(19) United States
(12) Patent Application Publication
(10) Pub. No.: US 2011/0321197 A1
(43) Pub. Date: Dec. 29, 2011

(54) Plants with Increased Yield (NUE)

(75) Inventors: Hardy Schön, Berlin (DE); Oliver Thimm, Berlin (DE); Gerhard Ritte, Potsdam (DE); Oliver Bläsing, Potsdam (DE); Koen Bruynseels, Wichelen (BE); Yves Hatzfeld, Lille (FR); Valerie Frankard, Waterloo (BE); Ana Isabel Sanz Molinero, Gentbrugge (BE); Christophe Reuzeau, Tocan Saint Apre (FR); Steven Vandenabeele, Oudenaarde (BE)

(73) Assignee: BASF Plant Science GmbH, Ludwigshafen (DE)

(21) Appl. No.: 13/125,433

(22) PCT Filed: Oct. 2, 2009
(86) PCT No.: PCT/EP2009/062798

§ 371 Date: Apr. 21, 2011

Related U.S. Application Data
(60) Provisional application No. 61/162,747, filed on Mar. 24, 2009.
(60) Provisional application No. 61/240,676, filed on Sep. 9, 2009.
(60) Provisional application No. 61/240,675, filed on Sep. 9, 2009.

(30) Foreign Application Priority Data
Oct. 23, 2008 (EP) 08167446.7
Feb. 20, 2009 (EP) 09153318.2
Mar. 25, 2009 (EP) 09156090.4
May 20, 2009 (EP) 09160788.7
Aug. 25, 2009 (EP) 09010851.5

(51) Int. Cl. A01H 1/06; C12N 15/63; C12P 21/00; C12N 9/88; C12N 9/12; C12N 9/10; C12N 9/00; C12N 9/04; C12N 9/16; C12N 9/22; C12N 9/90; C07K 2/00; C07K 16/40; C07K 16/14; C07K 16/12; C12N 5/10; A01H 5/00; C12Q 1/68; G01N 33/53; C12Q 1/02; C12Q 1/28; C12Q 1/32; C12Q 1/48; C12Q 1/44; C12Q 1/42; C08B 30/04; A01C 14/00; C07H 21/00

(52) U.S. Cl. 800/290; 536/23.2; 435/320.1; 536/23.7; 536/23.74; 435/69.1; 435/232; 435/194; 435/193; 435/183; 435/190; 435/196; 435/199; 435/233; 530/350; 530/389.8; 435/419; 800/298; 800/320.1; 800/320.3; 800/320.2; 800/320; 800/312; 800/314; 800/306; 800/317.1; 800/322; 800/317; 800/317.2; 800/317.4; 435/6.18; 435/7.1; 435/6.1; 435/29; 435/28; 435/26; 435/15; 435/19; 435/21; 536/102; 111/100

(57) ABSTRACT

A method for producing a plant with increased yield as compared to a corresponding wild type plant whereby the method comprises at least the following step: increasing or generating in a plant or a part thereof one or more activities selected from the group consisting of 17.6 kDa class I heat shock protein, 26.5 kDa class I small heat shock protein, 26S protease subunit, 2-Cys peroxiredoxin, 3-dehydroquinate synthase, 5-keto-D-gluconate-5-reductase, asparagine synthetase A, aspartate 1-decar-boxylase precursor, ATP-dependent RNA helicase, B0567-protein, B1088-protein, B1289-protein, B2940-protein, calnexin homolog, CDS5399-protein, chromatin structure-remodeling complex protein, D-amino acid dehydrogenase, D-arabinono-1,4-lac-tone oxidase, Delta 1-pyrroline-5-carboxylate reductase, glycine cleavage complex lipoylprotein, ketodeoxygluconokinase, lipoyl synthase, low-molecular-weight heat-shock protein, Microsomal cytochrome b reductase, mitochondrial ribosomal protein, mitotic check point protein, monodehydroascorbate reductase, paraquat-inducible protein B, phosphatase, Phosphoglucosamine mutase, protein disaggregation chaperone, protein kinase, pyruvate decarboxylase, recA family protein, rhodanese-related sulfurtransferase, ribonuclease P protein component, ribosome modulation factor, sensory histidine kinase, serine hydroxymethyltransferase, SLL1280-protein, SLL1797-protein, small membrane lipoprotein, Small nucleolar ribonucleoprotein complex subunit, Sulfatase, transcription initiation factor subunit, tretraspanin, tRNA ligase, xyloglucan galactosyltransferase, YKL130C-protein, YLR443W-protein, YML096W-protein, and zinc finger family protein-activity.

[0001] The present invention disclosed herein provides a method for producing a plant with increased yield as compared to a corresponding wild type plant comprising increasing or generating one or more activities in a plant or a part thereof. The present invention further relates to nucleic acids enhancing or improving one or more traits of a transgenic plant, and cells, progenies, seeds and pollen derived from such plants or parts, as well as methods of making and methods of using such plant cell(s) or plant(s), progenies, seed(s) or pollen. Particularly, said improved trait(s) are manifested in an increased yield, preferably by improving one or more yield-related trait(s).

[0002] Under field conditions, plant performance, for example in terms of growth, development, biomass accumulation and seed generation, depends on a plant's tolerance and acclimation ability to numerous environmental conditions, changes and stresses. Since the beginning of agriculture and horticulture, there was a need for improving plant traits in crop cultivation. Breeding strategies foster crop properties to withstand biotic and abiotic stresses, to improve nutrient use efficiency and to alter other intrinsic crop specific yield parameters, i.e. increasing yield by applying technical advances. Plants are sessile organisms and consequently need to cope with various environmental stresses. Biotic stresses such as plant pests and pathogens on the one hand, and abiotic environmental stresses on the other hand are major limiting factors for plant growth and productivity, thereby limiting plant cultivation and geographical distribution. Plants exposed to different stresses typically have low yields of plant material, like seeds, fruit or other produces. Crop losses and crop yield losses caused by abiotic and biotic stresses represent a significant economic and political factor and contribute to food shortages, particularly in many underdeveloped countries.

[0003] Conventional means for crop and horticultural improvements today utilize selective breeding techniques to identify plants with desirable characteristics. Advances in molecular biology have allowed to modify the germplasm of plants in a specific way.—For example, the modification of a single gene, resulted in several cases in a significant increase in e.g. stress tolerance as well as other yield-related traits.

[0004] Agricultural biotechnology has attempted to meet humanity's growing needs through genetic modifications of plants that could increase crop yield, for example, by conferring better tolerance to abiotic stress responses or by increasing biomass.

[0005] Agricultural biotechnologists use measurements of other parameters that indicate the potential impact of a transgene on crop yield. For forage crops like alfalfa, silage corn, and hay, the plant biomass correlates with the total yield. For grain crops, however, other parameters have been used to estimate yield, such as plant size, as measured by total plant dry weight, above-ground dry weight, above-ground fresh weight, leaf area, stem volume, plant height, rosette diameter, leaf length, root length, root mass, tiller number, and leaf number. Plant size at an early developmental stage will typically correlate with plant size later in development. A larger plant with a greater leaf area can typically absorb more light and carbon dioxide than a smaller plant and therefore will likely gain a greater weight during the same period. There is a strong genetic component to plant size and growth rate, and so for a range of diverse genotypes plant size under one environmental condition is likely to correlate with size under another. In this way a standard environment is used to approximate the diverse and dynamic environments encountered at different locations and times by crops in the field.

[0006] Some genes that are involved in stress responses, water use, and/or biomass in plants have been characterized, but to date, success at developing transgenic crop plants with improved yield has been limited, and no such plants have been commercialized.

[0007] Consequently, there is a need to identify genes which confer resistance to various combinations of stresses or which confer improved yield under optimal and/or suboptimal growth conditions. There is a need, therefore, to identify additional genes that have the capacity to increase yield of crop plants.

[0008] Accordingly, in one embodiment, the present invention provides a method for producing a plant having an increased yield as compared to a corresponding wild type plant whereby the method comprises at least the following step: increasing or generating in a plant one or more activities (in the following referred to as one or more “activities” or one or more of “said activities” or for one selected activity as “said activity”) selected from the group consisting of 17.6 kDa class I heat shock protein, 26.5 kDa class I small heat shock protein, 26S protease subunit, 2-Cys peroxiredoxin, 3-dehydroquinate synthase, 5-keto-D-gluconate-5-reductase, asparagine synthetase A, aspartate 1-decarboxylase precursor, ATP-dependent RNA helicase, B0567-protein, B1088-protein, B1289-protein, B2940-protein, calnexin homolog, CDS5399-protein, chromatin structure-remodeling complex protein, D-amino acid dehydrogenase, D-arabinono-1,4-lactone oxidase, Delta 1-pyrroline-5-carboxylate reductase, glycine cleavage complex lipoylprotein, ketodeoxygluconokinase, lipoyl synthase, low-molecular-weight heat-shock protein, Microsomal cytochrome b reductase, mitochondrial ribosomal protein, mitotic check point protein, monodehydroascorbate reductase, paraquat-inducible protein B, phosphatase, Phosphoglucosamine mutase, protein disaggregation chaperone, protein kinase, pyruvate decarboxylase, recA family protein, rhodanese-related sulfurtransferase, ribonuclease P protein component, ribosome modulation factor, sensory histidine kinase, serine hydroxymethyltransferase, SLL1280-protein, SLL1797-protein, small membrane lipoprotein, Small nucleolar ribonucleoprotein complex subunit, Sulfatase, transcription initiation factor subunit, tretraspanin, tRNA ligase, xyloglucan galactosyltransferase, YKL130C-protein, YLR443W-protein, YML096W-protein, and zinc finger family protein-activity in the sub-cellular compartment and tissue indicated herein, e.g. as shown in table I.

[0009] Accordingly, in a further embodiment, the invention provides a transgenic plant that over-expresses an isolated polynucleotide identified in Table I in the sub-cellular compartment and tissue indicated herein. The transgenic plant of the invention demonstrates an improved yield or increased yield as compared to a wild type variety of the plant. The terms “improved yield” or “increased yield” can be used interchangeable.

[0010] The term “yield” as used herein generally refers to a measurable produce from a plant, particularly a crop. Yield and yield increase (in comparison to a non-transformed starting or wild-type plant) can be measured in a number of ways, and it is understood that a skilled person will be able to apply the correct meaning in view of the particular embodiments, the particular crop concerned and the specific purpose or application concerned.

[0011] As used herein, the term “improved yield” or the term “increased yield” means any improvement in the yield of any measured plant product, such as grain, fruit or fiber. In accordance with the invention, changes in different phenotypic traits may improve yield. For example, and without limitation, parameters such as floral organ development, root initiation, root biomass, seed number, seed weight, harvest index, tolerance to abiotic environmental stress, leaf formation, phototropism, apical dominance, and fruit development, are suitable measurements of improved yield. Any increase in yield is an improved yield in accordance with the invention. For example, the improvement in yield can comprise a 0.1%, 0.5%, 1%, 3%, 5%, 10%, 15%, 20%, 30%, 40%, 50%, 60%, 70%, 80%, 90% or greater increase in any measured parameter. For example, an increase in the bu/acre yield of soybeans or corn derived from a crop comprising plants which are transgenic for the nucleotides and polypeptides of Table I, as compared with the bu/acre yield from untreated soybeans or corn cultivated under the same conditions, is an improved yield in accordance with the invention. The increased or improved yield can be achieved in the absence or presence of stress conditions.

[0012] For example, enhanced or increased “yield” refers to one or more yield parameters selected from the group consisting of biomass yield, dry biomass yield, aerial dry biomass yield, underground dry biomass yield, fresh-weight biomass yield, aerial fresh-weight biomass yield, underground fresh-weight biomass yield; enhanced yield of harvestable parts, either dry or fresh-weight or both, either aerial or underground or both; enhanced yield of crop fruit, either dry or fresh-weight or both, either aerial or underground or both; and preferably enhanced yield of seeds, either dry or fresh-weight or both, either aerial or underground or both.

For example, the present invention provides methods for producing transgenic plant cells or plants with can show an increased yield-related trait, e.g. an increased tolerance to environmental stress and/or increased intrinsic yield and/or biomass production as compared to a corresponding (e.g. non-transformed) wild type or starting plant by increasing or generating one or more of said activities mentioned above.

[0013] In one embodiment, an increase in yield refers to increased or improved crop yield or harvestable yield.

[0014] Crop yield is defined herein as the number of bushels of relevant agricultural product (such as grain, forage, or seed) harvested per acre. Crop yield is impacted by abiotic stresses, such as drought, heat, salinity, and cold stress, and by the size (biomass) of the plant. Traditional plant breeding strategies are relatively slow and have in general not been successful in conferring increased tolerance to abiotic stresses. Grain yield improvements by conventional breeding have nearly reached a plateau in maize.

[0015] Accordingly, the yield of a plant can depend on the specific plant/crop of interest as well as its intended application (such as food production, feed production, processed food production, bio-fuel, biogas or alcohol production, or the like) of interest in each particular case. Thus, in one embodiment, yield is calculated as harvest index (expressed as a ratio of the weight of the respective harvestable parts divided by the total biomass), harvestable parts weight per area (acre, square meter, or the like); and the like. The harvest index, i.e., the ratio of yield biomass to the total cumulative biomass at harvest, in maize has remained essentially unchanged during selective breeding for grain yield over the last hundred years. Accordingly, recent yield improvements that have occurred in maize are the result of the increased total biomass production per unit land area. This increased total biomass has been achieved by increasing planting density, which has led to adaptive phenotypic alterations, such as a reduction in leaf angle, which may reduce shading of lower leaves, and tassel size, which may increase harvest index. Harvest index is relatively stable under many environmental conditions, and so a robust correlation between plant size and grain yield is possible. Plant size and grain yield are intrinsically linked, because the majority of grain biomass is dependent on current or stored photosynthetic productivity by the leaves and stem of the plant. As with abiotic stress tolerance, measurements of plant size in early development, under standardized conditions in a growth chamber or greenhouse, are standard practices to measure potential yield advantages conferred by the presence of a transgene.

[0016] For example, the yield refers to biomass yield, e.g. to dry weight biomass yield and/or fresh-weight biomass yield. Biomass yield refers to the aerial or underground parts of a plant, depending on the specific circumstances (test conditions, specific crop of interest, application of interest, and the like). In one embodiment, biomass yield refers to the aerial and underground parts. Biomass yield may be calculated as fresh-weight, dry weight or a moisture adjusted basis. Biomass yield may be calculated on a per plant basis or in relation to a specific area (e.g. biomass yield per acre/square meter/or the like).

[0017] In other embodiment, “yield” refers to seed yield which can be measured by one or more of the following parameters: number of seeds or number of filled seeds (per plant or per area (acre/square meter/or the like)); seed filling rate (ratio between number of filled seeds and total number of seeds); number of flowers per plant; seed biomass or total seeds weight (per plant or per area (acre/square meter/or the like); thousand kernel weight (TKW; extrapolated from the number of filled seeds counted and their total weight; an increase in TKW may be caused by an increased seed size, an increased seed weight, an increased embryo size, and/or an increased endosperm). Other parameters allowing to measure seed yield are also known in the art. Seed yield may be determined on a dry weight or on a fresh weight basis, or typically on a moisture adjusted basis, e.g. at 15.5 percent moisture.

[0018] In one embodiment, the term “increased yield” means that the a plant, exhibits an increased growth rate, under conditions of abiotic environmental stress, compared to the corresponding wild-type photosynthetic active organism.

[0019] An increased growth rate may be reflected inter alia by or confers an increased biomass production of the whole plant, or an increased biomass production of the aerial parts of a plant, or by an increased biomass production of the underground parts of a plant, or by an increased biomass production of parts of a plant, like stems, leaves, blossoms, fruits, and/or seeds.

[0020] In an embodiment thereof, increased yield includes higher fruit yields, higher seed yields, higher fresh matter production, and/or higher dry matter production.

[0021] In another embodiment thereof, the term “increased yield” means that the plant, exhibits an prolonged growth under conditions of abiotic environmental stress, as compared to the corresponding, e.g. non-transformed, wild type organism. A prolonged growth comprises survival and/or continued growth of the plant, at the moment when the non-transformed wild type organism shows visual symptoms of deficiency and/or death.

[0022] For example, in one embodiment, the plant used in the method of the invention is a corn plant. Increased yield for corn plants means in one embodiment, increased seed yield, in particular for corn varieties used for feed or food. Increased seed yield of corn refers in one embodiment to an increased kernel size or weight, an increased kernel per pod, or increased pods per plant. Further, in one embodiment, the cob yield is increased, this is particularly useful for corn plant varieties used for feeding. Further, for example, the length or size of the cob is increased. In one embodiment, increased yield for a corn plant relates to an improved cob to kernel ratio.

[0023] For example, in one embodiment, the plant used in the method of the invention is a soy plant. Increased yield for soy plants means in one embodiment, increased seed yield, in particular for soy varieties used for feed or food. Increased seed yield of soy refers in one embodiment to an increased kernel size or weight, an increased kernel per pod, or increased pods per plant.

[0024] For example, in one embodiment, the plant used in the method of the invention is an oil seed rape (OSR) plant. Increased yield for OSR plants means in one embodiment, increased seed yield, in particular for OSR varieties used for feed or food. Increased seed yield of OSR refers in one embodiment to an increased kernel size or weight, an increased kernel per pod, or increased pods per plant.

[0025] For example, in one embodiment, the plant used in the method of the invention is a cotton plant. Increased yield for cotton plants means in one embodiment, increased lint yield. Increased cotton yield of cotton refers in one embodiment to an increased length of lint.

[0026] Said increased yield in accordance with the present invention can typically be achieved by enhancing or improving, in comparison to an origin or wild-type plant, one or more yield-related traits of the plant. Such yield-related traits of a plant the improvement of which results in increased yield comprise, without limitation, the increase of the intrinsic yield capacity of a plant, improved nutrient use efficiency, and/or increased stress tolerance, in particular increased abiotic stress tolerance.

[0027] Accordingly to present invention, yield is increased by improving one or more of the yield-related traits as defined herein.

[0028] Intrinsic yield capacity of a plant can be, for example, manifested by improving the specific (intrinsic) seed yield (e.g. in terms of increased seed/grain size, increased ear number, increased seed number per ear, improvement of seed filling, improvement of seed composition, embryo and/or endosperm improvements, or the like); modification and improvement of inherent growth and development mechanisms of a plant (such as plant height, plant growth rate, pod number, pod position on the plant, number of internodes, incidence of pod shatter, efficiency of nodulation and nitrogen fixation, efficiency of carbon assimilation, improvement of seedling vigour/early vigour, enhanced efficiency of germination (under stressed or non-stressed conditions), improvement in plant architecture, cell cycle modifications, photosynthesis modifications, various signaling pathway modifications, modification of transcriptional regulation, modification of translational regulation, modification of enzyme activities, and the like); and/or the like.

[0029] The improvement or increase of stress tolerance of a plant can for example be manifested by improving or increasing a plant's tolerance against stress, particularly abiotic stress. In the present application, abiotic stress refers generally to abiotic environmental conditions a plant is typically confronted with, including conditions which are typically referred to as “abiotic stress” conditions including, but not limited to, drought (tolerance to drought may be achieved as a result of improved water use efficiency), heat, low temperatures and cold conditions (such as freezing and chilling conditions), salinity, osmotic stress, shade, high plant density, mechanical stress, oxidative stress, and the like.

[0030] The increased plant yield can also be mediated by increasing the “nutrient use efficiency of a plant”, e.g. by improving the use efficiency of nutrients including, but not limited to, phosphorus, potassium, and nitrogen. For example, there is a need for plants that are capable to use nitrogen more efficiently so that less nitrogen is required for growth and therefore resulting in the improved level of yield under nitrogen deficiency conditions. Further, higher yields may be obtained with current or standard levels of nitrogen use. Accordingly, plant yield is increased by increasing nitrogen use efficiency (NUE) of a plant or a part thereof. Because of the high costs of nitrogen fertilizer in relation to the revenues for agricultural products, and additionally its deleterious effect on the environment, it is desirable to develop strategies to reduce nitrogen input and/or to optimize nitrogen uptake and/or utilization of a given nitrogen availability while simultaneously maintaining optimal yield, productivity and quality of plants, preferably cultivated plants, e.g. crops. Also it is desirable to maintain the yield of crops with lower fertilizer input and/or higher yield on soils of similar or even poorer quality.

[0031] In one embodiment, the nitrogen use efficiency is determined according to the method described herein. Accordingly, in one embodiment, the present invention relates to a method for increasing the yield, comprising the following steps:

(a) measuring the nitrogen content in the soil, and
(b) determining, whether the nitrogen-content in the soil is optimal or suboptimal for the growth of an origin or wild type plant, e.g. a crop, and
(c1) growing the plant of the invention in said soil, if the nitrogen-content is suboptimal for the growth of the origin or wild type plant, or
(c2) growing the plant of the invention in the soil and comparing the yield with the yield of a standard, an origin or a wild type plant, selecting and growing the plant, which shows higher or the highest yield, if the nitrogen-content is optimal for the origin or wild type plant.

[0032] For example, enhanced nitrogen use efficiency of the plant can be determined and quantified according to the following method: Transformed plants are grown in pots in a growth chamber (Svalöf Weibull, Svalöv, Sweden). In case the plants are Arabidopsis thaliana seeds thereof are sown in pots containing a 1:1 (v:v) mixture of nutrient depleted soil (“Einheitserde Typ 0”, 30% clay, Tantau, Wansdorf Germany) and sand. Germination is induced by a four day period at 4° C., in the dark. Subsequently the plants are grown under standard growth conditions. In case the plants are Arabidopsis thaliana, the standard growth conditions are: photoperiod of 16 h light and 8 h dark, 20° C., 60% relative humidity, and a photon flux density of 200 μE. In case the plants are Arabidopsis thaliana they are watered every second day with a N-depleted nutrient solution and after 9 to 10 days the plants are individualized. After a total time of 29 to 31 days the plants are harvested and rated by the fresh weight of the aerial parts of the plants, preferably the rosettes.

[0033] Accordingly, altering the genetic composition of a plant render it more productive with current fertilizer application standards, or maintaining their productive rates with significantly reduced fertilizer input.

[0034] Increased nitrogen use efficiency can result from enhanced uptake and assimilation of nitrogen fertilizer and/or the subsequent remobilization and reutilization of accumulated nitrogen reserves. Plants containing nitrogen use efficiency-improving genes can therefore be used for the enhancement of yield. Improving the nitrogen use efficiency in a plant would increase harvestable yield per unit of input nitrogen fertilizer, both in developing nations where access to nitrogen fertilizer is limited and in developed nations were the level of nitrogen use remains high. Nitrogen utilization improvement also allows decreases in on-farm input costs, decreased use and dependence on the non-renewable energy sources required for nitrogen fertilizer production, and decreases the environmental impact of nitrogen fertilizer manufacturing and agricultural use.

[0035] In a further embodiment of the present invention, plant yield is increased by increasing the plant's stress tolerance(s). Generally, the term “increased tolerance to stress” can be defined as survival of plants, and/or higher yield production, under stress conditions as compared to a non-transformed wild type or starting plant: For example, the plant of the invention or produced according to the method of the invention is better adapted to the stress conditions. “Improved adaptation” to environmental stress like e.g. drought, heat, nutrient depletion, freezing and/or chilling temperatures refers herein to an improved plant performance resulting in an increased yield, particularly with regard to one or more of the yield related traits as defined in more detail above.

[0036] During its life-cycle, a plant is generally confronted with a diversity of environmental conditions. Any such conditions, which may, under certain circumstances, have an impact on plant yield, are herein referred to as “stress” condition. Environmental stresses may generally be divided into biotic and abiotic (environmental) stresses. Unfavorable nutrient conditions are sometimes also referred to as “environmental stress”. The present invention does also contemplate solutions for this kind of environmental stress, e.g. referring to increased nutrient use efficiency.

[0037] For example, in one embodiment of the present invention, plant yield is increased by increasing the abiotic stress tolerance(s) of a plant.

[0038] For the purposes of the description of the present invention, the terms “enhanced tolerance to abiotic stress”, “enhanced resistance to abiotic environmental stress”, “enhanced tolerance to environmental stress”, “improved adaptation to environmental stress” and other variations and expressions similar in its meaning are used interchangeably and refer, without limitation, to an improvement in tolerance to one or more abiotic environmental stress(es) as described herein and as compared to a corresponding origin or wild type plant or a part thereof.

[0039] The term abiotic stress tolerance(s) refers for example low temperature tolerance, drought tolerance or improved water use efficiency (WUE), heat tolerance, salt stress tolerance and others. Studies of a plant's response to desiccation, osmotic shock, and temperature extremes are also employed to determine the plant's tolerance or resistance to abiotic stresses.

[0040] Stress tolerance in plants like low temperature, drought, heat and salt stress tolerance can have a common theme important for plant growth, namely the availability of water. Plants are typically exposed during their life cycle to conditions of reduced environmental water content. The protection strategies are similar to those of chilling tolerance.

[0041] Accordingly, in one embodiment of the present invention, said yield-related trait relates to an increased water use efficiency of the plant of the invention and/or an increased tolerance to drought conditions of the plant of the invention. Water use efficiency (WUE) is a parameter often correlated with drought tolerance. An increase in biomass at low water availability may be due to relatively improved efficiency of growth or reduced water consumption. In selecting traits for improving crops, a decrease in water use, without a change in growth would have particular merit in an irrigated agricultural system where the water input costs were high. An increase in growth without a corresponding jump in water use would have applicability to all agricultural systems. In many agricultural systems where water supply is not limiting, an increase in growth, even if it came at the expense of an increase in water use also increases yield.

[0042] When soil water is depleted or if water is not available during periods of drought, crop yields are restricted. Plant water deficit develops if transpiration from leaves exceeds the supply of water from the roots. The available water supply is related to the amount of water held in the soil and the ability of the plant to reach that water with its root system. Transpiration of water from leaves is linked to the fixation of carbon dioxide by photosynthesis through the stomata. The two processes are positively correlated so that high carbon dioxide influx through photosynthesis is closely linked to water loss by transpiration. As water transpires from the leaf, leaf water potential is reduced and the stomata tend to close in a hydraulic process limiting the amount of photosynthesis. Since crop yield is dependent on the fixation of carbon dioxide in photosynthesis, water uptake and transpiration are contributing factors to crop yield. Plants which are able to use less water to fix the same amount of carbon dioxide or which are able to function normally at a lower water potential have the potential to conduct more photosynthesis and thereby to produce more biomass and economic yield in many agricultural systems.

[0043] Drought stress means any environmental stress which leads to a lack of water in plants or reduction of water supply to plants, including a secondary stress by low temperature and/or salt, and/or a primary stress during drought or heat, e.g. desiccation etc.

[0044] For example, increased tolerance to drought conditions can be determined and quantified according to the following method: Transformed plants are grown individually in pots in a growth chamber (York Industriekälte GmbH, Mannheim, Germany). Germination is induced. In case the plants are Arabidopsis thaliana sown seeds are kept at 4° C., in the dark, for 3 days in order to induce germination. Subsequently conditions are changed for 3 days to 20° C./6° C. day/night temperature with a 16/8 h day-night cycle at 150 μE/m²s. Subsequently the plants are grown under standard growth conditions. In case the plants are Arabidopsis thaliana, the standard growth conditions are: photoperiod of 16 h light and 8 h dark, 20° C., 60% relative humidity, and a photon flux density of 200 μE. Plants are grown and cultured until they develop leaves. In case the plants are Arabidopsis thaliana they are watered daily until they were approximately 3 weeks old. Starting at that time drought was imposed by withholding water. After the non-transformed wild type plants show visual symptoms of injury, the evaluation starts and plants are scored for symptoms of drought symptoms and biomass production comparison to wild type and neighboring plants for 5-6 days in succession. In one embodiment, the tolerance to drought, e.g. the tolerance to cycling drought is determined according to the method described in the examples.

[0045] In one embodiment, the tolerance to drought is a tolerance to cycling drought.

[0046] Accordingly, in one embodiment, the present invention relates to a method for increasing the yield, comprising the following steps:

(a) determining, whether the water supply in the area for planting is optimal or suboptimal for the growth of an origin or wild type plant, e.g. a crop, and/or determining the visual symptoms of injury of plants growing in the area for planting; and
(b1) growing the plant of the invention in said soil, if the water supply is suboptimal for the growth of an origin or wild type plant or visual symptoms for drought can be found at a standard, origin or wild type plant growing in the area; or
(b2) growing the plant of the invention in the soil and comparing the yield with the yield of a standard, an origin or a wild type plant and selecting and growing the plant, which shows a higher yield or the highest yield, if the water supply is optimal for the origin or wild type plant.
Visual symptoms of injury stating for one or any combination of two, three or more of the following features: wilting; leaf browning; loss of turgor, which results in drooping of leaves or needles stems, and flowers; drooping and/or shedding of leaves or needles; the leaves are green but leaf angled slightly toward the ground compared with controls; leaf blades begun to fold (curl) inward; premature senescence of leaves or needles; loss of chlorophyll in leaves or needles and/or yellowing.

[0047] In a further embodiment of the present invention, said yield-related trait of the plant of the invention is an increased tolerance to heat conditions of said plant.

[0048] In-another embodiment of the present invention, said yield-related trait of the plant of the invention is an increased low temperature tolerance of said plant, e.g. comprising freezing tolerance and/or chilling tolerance. Low temperatures impinge on a plethora of biological processes. They retard or inhibit almost all metabolic and cellular processes. The response of plants to low temperature is an important determinant of their ecological range. The problem of coping with low temperatures is exacerbated by the need to prolong the growing season beyond the short summer found at high latitudes or altitudes. Most plants have evolved adaptive strategies to protect themselves against low temperatures. Generally, adaptation to low temperature may be divided into chilling tolerance, and freezing tolerance.

[0049] Chilling tolerance is naturally found in species from temperate or boreal zones and allows survival and an enhanced growth at low but non-freezing temperatures. Species from tropical or subtropical zones are chilling sensitive and often show wilting, chlorosis or necrosis, slowed growth and even death at temperatures around 10° C. during one or more stages of development. Accordingly, improved or enhanced “chilling tolerance” or variations thereof refers herein to improved adaptation to low but non-freezing temperatures around 10° C., preferably temperatures between 1 to 18° C., more preferably 4 to 14° C., and most preferred 8 to 12° C.; hereinafter called “chilling temperature”.

[0050] Freezing tolerance allows survival at near zero to particularly subzero temperatures. It is believed to be promoted by a process termed cold-acclimation which occurs at low but non-freezing temperatures and provides increased freezing tolerance at subzero temperatures. In addition, most species from temperate regions have life cycles that are adapted to seasonal changes of the temperature. For those plants, low temperatures may also play an important role in plant development through the process of stratification and vernalisation. It becomes obvious that a clear-cut distinction between or definition of chilling tolerance and freezing tolerance is difficult and that the processes may be overlapping or interconnected.

[0051] Improved or enhanced “freezing tolerance” or variations thereof refers herein to improved adaptation to temperatures near or below zero, namely preferably temperatures 4° C. or below, more preferably 3° C. or 2° C. or below, and particularly preferred at or 0 (zero)° C. or −4° C. or below, or even extremely low temperatures down to −10° C. or lower; hereinafter called “freezing temperature.

[0052] Accordingly, the plant of the invention may in one embodiment show an early seedling growth after exposure to low temperatures to an chilling-sensitive wild type or origin, improving in a further embodiment seed germination rates. The process of seed germination strongly depends on environmental temperature and the properties of the seeds determine the level of activity and performance during germination and seedling emergence when being exposed to low temperature. The method of the invention further provides in one embodiment a plant which show under chilling condition an reduced delay of leaf development.

[0053] Enhanced tolerance to low temperature may, for example, be determined according to the following method: Transformed plants are grown in pots in a growth chamber (e.g. York, Mannheim, Germany). In case the plants are Arabidopsis thaliana seeds thereof are sown in pots containing a 3.5:1 (v:v) mixture of nutrient rich soil (GS90, Tantau, Wansdorf, Germany) and sand. Plants are grown under standard growth conditions. In case the plants are Arabidopsis thaliana, the standard growth conditions are: photoperiod of 16 h light and 8 h dark, 20° C., 60% relative humidity, and a photon flux density of 200 μmol/m²s. Plants are grown and cultured. In case the plants are Arabidopsis thaliana they are watered every second day. After 9 to 10 days the plants are individualized. Cold (e.g. chilling at 11-12° C.) is applied 14 days after sowing until the end of the experiment. After a total growth period of 29 to 31 days the plants are harvested and rated by the fresh weight of the aerial parts of the plants, in the case of Arabidopsis preferably the rosettes.

[0054] Accordingly, in one embodiment, the present invention relates to a method for increasing yield, comprising the following steps:
[0055] (a) determining, whether the temperature in the area for planting is optimal or suboptimal for the growth of an origin or wild type plant, e.g. a crop; and
[0056] (b1) growing the plant of the invention in said soil; if the temperature is suboptimal low for the growth of an origin or wild type plant growing in the area; or
[0057] (b2) growing the plant of the invention in the soil and comparing the yield with the yield of a standard, an origin or a wild type plant and selecting and growing the plant, which shows higher or the highest yield, if the temperature is optimal for the origin or wild type plant;

[0058] In a further embodiment of the present invention, yield-related trait may also be increased salinity tolerance (salt tolerance), tolerance to osmotic stress, increased shade tolerance, increased tolerance to a high plant density, increased tolerance to mechanical stresses, and/or increased tolerance to oxidative stress.

[0059] In an embodiment thereof, the term “enhanced tolerance to abiotic environmental stress” in a photosynthetic active organism means that the photosynthetic active organism, preferably a plant, when confronted with abiotic environmental stress conditions exhibits an enhanced dry biomass yield as compared to a corresponding, e.g. non-transformed, wild type photosynthetic active organism like a plant.

[0060] In an embodiment thereof, the term “enhanced tolerance to abiotic environmental stress” in a photosynthetic active organism means that the photosynthetic active organism, preferably a plant, when confronted with abiotic environmental stress conditions exhibits an enhanced aerial dry biomass yield as compared to a corresponding, e.g. non-transformed, wild type photosynthetic active organism.

[0061] In an embodiment thereof, the term “enhanced tolerance to abiotic environmental stress” in a plant means that the plant, when confronted with abiotic environmental stress conditions exhibits an enhanced underground dry biomass yield as compared to a corresponding, e.g. non-transformed, wild type organism.

[0062] In another embodiment thereof, the term “enhanced tolerance to abiotic environmental stress” in a plant means that the plant, when confronted with abiotic environmental stress conditions exhibits an enhanced fresh weight biomass yield as compared to a corresponding, e.g. non-transformed, wild type organism.

[0063] In an embodiment thereof, the term “enhanced tolerance to abiotic environmental stress” in a plant means that the plant, when confronted with abiotic environmental stress conditions exhibits an enhanced aerial fresh weight biomass yield as compared to a corresponding, e.g. non-transformed, wild type organism.

[0064] In an embodiment thereof, the term “enhanced tolerance to abiotic environmental stress” in a plant means that the plant, when confronted with abiotic environmental stress conditions exhibits an enhanced underground fresh weight biomass yield as compared to a corresponding, e.g. non-transformed, wild type organism.

[0065] In another embodiment thereof, the term “enhanced tolerance to abiotic environmental stress” in a plant means that the plant, when confronted with abiotic environmental stress conditions exhibits an enhanced yield of harvestable parts of a plant as compared to a corresponding, e.g. non-transformed, wild type organism.

[0066] In an embodiment thereof, the term “enhanced tolerance to abiotic environmental stress” in a plant means that the plant, when confronted with abiotic environmental stress conditions exhibits an enhanced yield of dry harvestable parts of a plant as compared to a corresponding, e.g. non-transformed, wild type organism.

[0067] In an embodiment thereof, the term “enhanced tolerance to abiotic environmental stress” in a plant means that the plant, when confronted with abiotic environmental stress conditions exhibits an enhanced yield of dry aerial harvestable parts of a plant as compared to a corresponding, e.g. non-transformed, wild type organism.

[0068] In an embodiment thereof, the term “enhanced tolerance to abiotic environmental stress” in a plant means that the plant, when confronted with abiotic environmental stress conditions exhibits an enhanced yield of underground dry harvestable parts of a plant as compared to a corresponding, e.g. non-transformed, wild type organism.

[0069] In another embodiment thereof, the term “enhanced tolerance to abiotic environmental stress” in a plant means that the plant, when confronted with abiotic environmental stress conditions exhibits an enhanced yield of fresh weight harvestable parts of a plant as compared to a corresponding, e.g. non-transformed, wild type organism.

[0070] In an embodiment thereof, the term “enhanced tolerance to abiotic environmental stress” in a plant means that the plant, when confronted with abiotic environmental stress conditions an enhanced yield of aerial fresh weight harvestable parts of a plant as compared to a corresponding, e.g. non-transformed, wild type organism.

[0071] In an embodiment thereof, the term “enhanced tolerance to abiotic environmental stress” in a plant means that the plant, when confronted with abiotic environmental stress conditions exhibits an enhanced yield of underground fresh weight harvestable parts of a plant as compared to a corresponding, e.g. non-transformed, wild type organism.

[0072] In a further embodiment, the term “enhanced tolerance to abiotic environmental stress” in a plant means that the plant, when confronted with abiotic environmental stress conditions exhibits an enhanced yield of the crop fruit as compared to a corresponding, e.g. non-transformed, wild type organism.

[0073] In an embodiment thereof, the term “enhanced tolerance to abiotic environmental stress” in a plant means that the plant, when confronted with abiotic environmental stress conditions exhibits an enhanced yield of the fresh crop fruit as compared to a corresponding, e.g. non-transformed, wild type organism.

[0074] In an embodiment thereof, the term “enhanced tolerance to abiotic environmental stress” in a plant means that the plant, when confronted with abiotic environmental stress conditions exhibits an enhanced yield of the dry crop fruit as compared to a corresponding, e.g. non-transformed, wild type organism.

[0075] In an embodiment thereof, the term “enhanced tolerance to abiotic environmental stress” in a plant means that the plant, when confronted with abiotic environmental stress conditions exhibits an enhanced grain dry weight as compared to a corresponding, e.g. non-transformed, wild type organism.

[0076] In a further embodiment, the term “enhanced tolerance to abiotic environmental stress” in a plant means that the plant, when confronted with abiotic environmental stress conditions exhibits an enhanced yield of seeds as compared to a corresponding, e.g. nontransformed, wild type organism.

[0077] In an embodiment thereof, the term “enhanced tolerance to abiotic environmental stress” in a plant means that the plant, when confronted with abiotic environmental stress conditions exhibits an enhanced yield of fresh weight seeds as compared to a corresponding, e.g. non-transformed, wild type organism.

[0078] In an embodiment thereof, the term “enhanced tolerance to abiotic environmental stress” in a plant means that the plant, when confronted with abiotic environmental stress conditions exhibits an enhanced yield of dry seeds as compared to a corresponding, e.g. non-transformed, wild type organism.

[0079] For example, the abiotic environmental stress conditions, the plant is confronted with, can, however, be any of the abiotic environmental stresses mentioned herein. Preferably, the plant produced or used is a plant as described below. A plant produced according to the present invention can be a crop plant, e.g. corn, soy bean, rice, cotton, wheat or oil seed rape (for example, canola) or as listed below.

[0080] An increased nitrogen use efficiency of the produced corn relates in one embodiment to an improved or increased protein content of the corn seed, in particular in corn seed used as feed. Increased nitrogen use efficiency relates in another embodiment to an increased kernel size or a higher kernel number per plant. An increased water use efficiency of the produced corn relates in one embodiment to an increased kernel size or number compared to a wild type plant. Further, an increased tolerance to low temperature relates in one embodiment to an early vigor and allows the early planting and sowing of a corn plant produced according to the method of the present invention.

[0081] A increased nitrogen use efficiency of the produced soy plant relates in one embodiment to an improved or increased protein content of the soy seed, in particular in soy seed used as feed. Increased nitrogen use efficiency relates in another embodiment to an increased kernel size or number. An increased water use efficiency of the produced soy plant relates in one embodiment to an increased kernel size or number. Further, an increased tolerance to low temperature relates in one embodiment to an early vigor and allows the early planting and sowing of a soy plant produced according to the method of the present invention.

[0082] An increased nitrogen use efficiency of the produced OSR plant relates in one embodiment to an improved or increased protein content of the OSR seed, in particular in OSR seed used as feed. Increased nitrogen use efficiency relates in another embodiment to an increased kernel size or number per plant. An increased water use efficiency of the produced OSR plant relates in one embodiment to an increased kernel size or number per plant. Further, an increased tolerance to low temperature relates in one embodiment to an early vigor and allows the early planting and sowing of a OSR plant produced according to the method of the present invention. In one embodiment, the present invention relates to a method for the production of hardy oil seed rape (OSR with winter hardness) comprising using a hardy oil seed rape plant in the above mentioned method of the invention.

[0083] A increased nitrogen use efficiency of the produced cotton plant relates in one embodiment to an improved protein content of the cotton seed, in particular in cotton seed used for feeding. Increased nitrogen use efficiency relates in another embodiment to an increased kernel size or number. An increased water use efficiency of the produced cotton plant relates in one embodiment to an increased kernel size or number. Further, an increased tolerance to low temperature relates in one embodiment to an early vigor and allows the early planting and sowing of a soy plant produced according to the method of the present invention.

[0084] Accordingly, the present invention provides a method for producing a transgenic plant with increased yield showing one or more improved yield-related traits as compared to the corresponding origin or the wild type plant, whereby the method comprises the increasing or generating of one or more activities selected from the group consisting of 17.6 kDa class I heat shock protein, 26.5 kDa class I small heat shock protein, 26S protease subunit, 2-Cys peroxiredoxin, 3-dehydroquinate synthase, 5-keto-D-gluconate-5-reductase, asparagine synthetase A, aspartate 1-decarboxylase precursor, ATP-dependent RNA helicase, B0567-protein, B1088-protein, B1289-protein, B2940-protein, calnexin homolog, CDS5399-protein, chromatin structure-remodeling complex protein, D-amino acid dehydrogenase, D-arabinono-1,4-lactone oxidase, Delta 1-pyrroline-5-carboxylate reductase, glycine cleavage complex lipoylprotein, ketodeoxygluconokinase, lipoyl synthase, low-molecular-weight heat-shock protein, Microsomal cytochrome b reductase, mitochondrial ribosomal protein, mitotic check point protein, monodehydroascorbate reductase, paraquat-inducible protein B, phosphatase, Phosphoglucosamine mutase, protein disaggregation chaperone, protein kinase, pyruvate decarboxylase, recA family protein, rhodanese-related sulfurtransferase, ribonuclease P protein component, ribosome modulation factor, sensory histidine kinase, serine hydroxymethyltransferase, SLL1280-protein, SLL1797-protein, small membrane lipoprotein, Small nucleolar ribonucleoprotein complex subunit, Sulfatase, transcription initiation factor subunit, tretraspanin, tRNA ligase, xyloglucan galactosyltransferase, YKL130C-protein, YLR443W-protein, YML096W-protein, and zinc finger family protein-activity in the subcellular compartment and/or tissue of said plant as indicated herein, e.g. in Table I.

[0085] Thus, in one embodiment, the present invention provides a method for producing a plant showing an increased nutrient use efficiency.

[0086] The nutrient use efficiency achieved in accordance with the methods of the present invention, and shown by the transgenic plant of the invention, is for example nitrogen use efficiency.

In another embodiment, an abiotic stress resistance can be achieved in accordance with the methods of the present invention, and shown by the transgenic plant of the invention as indicated shown in the examples, e.g. in Table VIII-B, is an increased low temperature tolerance, particularly increased tolerance to chilling.
Accordingly, the present invention provides a method for producing a plant; showing an increased intrinsic yield or increased biomass, as compared to a corresponding origin or wild type plant, by increasing or generating one or more activities e.g. as indicated in the examples in Table VIII-D.
Accordingly, the present invention provides a method for producing a plant; showing an increased total seed weight per plant increase, as compared to a corresponding origin or wild type plant, by increasing or generating one or more activities e.g. as indicated in the example in Table IX.
Thus, the abiotic stress resistance achieved in accordance with the methods of the present invention, and shown by the transgenic plant of the invention, can also be an increased nitrogen use efficiency and low temperature tolerance, particularly increased tolerance to chilling, e.g. as indicated in the examples in combination of Table VIII-A and VIII-B.
Accordingly, the present invention provides a method for producing a plant; showing an increased nitrogen use efficiency and intrinsic yield or increased biomass, as compared to a corresponding origin or wild type plant, by increasing or generating one or more activities e.g. as indicated in the examples in combination of Table VIII-A and VIII-D.
Accordingly, the present invention provides a method for producing a plant; showing an increased low temperature tolerance, particularly increased tolerance to chilling and intrinsic yield or increased biomass, as compared to a corresponding origin or wild type plant, by increasing or generating one or more activities e.g. as indicated in the examples in combination of Table VIII-B and VIII-D. In another embodiment, the abiotic stress resistance achieved in accordance with the methods of the present invention, and shown by the trans-genic plant of the invention, is an increased nitrogen use efficiency and low temperature tolerance, particularly increased tolerance to chilling, and intrinsic yield, e.g. as indicated in the examples in combination of Table VIII-A and VIII-B and VIII-C.

[0087] Thus, in one further embodiment of the present invention, a method is provided for producing a transgenic plant; progenies, seeds, and/or pollen derived from such plant or for the production of such a plant; each plant can also show an increased low temperature tolerance, particularly chilling tolerance, as compared to a corresponding, e.g. nontransformed, wild type plant cell or plant, by increasing or generating one or more of said “activities” of said plant.

[0088] Thus, in one further embodiment of the present invention, a method is provided for producing a transgenic plant; progenies, seeds, and/or pollen derived from such plant or for the production of such a plant; each plant can show nitrogen use efficiency (NUE) as well as an increased low temperature tolerance and/or increased intrinsic yield, as compared to a corresponding, e.g. non-transformed, wild type plant cell or plant, by increasing or generating one or more of said “activities” of said plant.

[0089] Thus, in one further embodiment of the present invention, a method is provided for producing a transgenic plant; progenies, seeds, and/or pollen derived from such plant or for the production of such a plant; each plant can show an increased nitrogen use efficiency (NUE) as well as low temperature tolerance or increased intrinsic yield, particularly chilling tolerance, and increase biomass as compared to a corresponding, e.g. non-transformed, wild type plant cell or plant, by increasing or generating one or more of said Activities as well as in the sub-cellular compartment and tissue indicated herein of said plant.

[0090] Thus, in one further embodiment of the present invention, a method is provided for producing a transgenic plant; progenies, seeds, and/or pollen derived from such or for the production of such a plant; each plant can show an increased nitrogen use efficiency (NUE) and low temperature tolerance and increased intrinsic yield as compared to a corresponding, e.g. non-transformed, wild type plant cell or plant, by increasing or generating one or more of said Activities in the sub-cellular compartment and tissue indicated herein of said plant.

[0091] Furthermore, in one embodiment, the present invention provides a transgenic plant showing one or more increased yield-related trait as compared to the corresponding, e.g. non-transformed, origin or wild type plant cell or plant, having an increased or newly generated one or more “activities” selected from the above mentioned group of “activities” in the sub-cellular compartment and tissue indicated herein of said plant.

[0092] Thus, in one further embodiment of the present invention, a method is provided for producing a transgenic plant; progenies, seeds, and/or pollen derived from such plant or for the production of such a plant; each showing an increased low temperature tolerance and nitrogen use efficiency (NUE) as compared to a corresponding, e.g. non-transformed, wild type plant cell or plant, by increasing or generating one or more of said “activities”.

[0093] Thus, in one further embodiment of the present invention, a method is provided for producing a transgenic plant; progenies, seeds, and/or pollen derived from such plant or for the production of such a plant; each showing an increased low temperature tolerance and an increased intrinsic yield, as compared to a corresponding, e.g. non-transformed, wild type plant cell or plant, by increasing or generating one or more of said “activities”. Thus, in one further embodiment of the present invention, a method is provided for producing a transgenic plant; progenies, seeds, and/or pollen derived from such plant or for the production of such a plant; each showing an improved nitrogen use efficiency and increased cycling drought tolerance as compared to a corresponding, e.g. non-transformed, wild type plant cell or plant, by increasing or generating one or more of said “activities”.

[0094] Thus, in one further embodiment of the present invention, a method is provided for producing a transgenic plant; progenies, seeds, and/or pollen derived from such plant or for the production of such a plant; each showing an increased an increased nitrogen use efficiency and increased intrinsic yield, as compared to a corresponding, e.g. non-transformed, wild type plant cell or plant, by increasing or generating one or more of said “activities”.

[0095] Thus, in one further embodiment of the present invention, a method is provided for producing a transgenic plant; progenies, seeds, and/or pollen derived from such plant or for the production of such a plant; each showing an early flowering and increased yield, in particular increased total seed weight. The bolting difference compares the relative difference in days to bolting between the transgenic versus non-transgenic controls and shows that the transgenic lines are flowering earlier and increased yield, in particular increased total seed weight. Accordingly, the method provided for producing a transgenic plant; progenies, seeds, and/or pollen derived from such plant or for the production of such a plant; or the plant of the present invention showing an early flowering and increased yield, in particular increased total seed weight, generate earlier flowering effect and improved total seed weight per plant, providing a very useful set of traits towards enhanced yields as shown in table IX.

[0096] Accordingly, an activity selected form the group consisting of 17.6 kDa class I heat shock protein, 26.5 kDa class I small heat shock protein, 26S protease subunit, 2-Cys peroxiredoxin, 3-dehydroquinate synthase, 5-keto-D-gluconate-5-reductase, asparagine synthetase A, aspartate 1-decarboxylase precursor, ATP-dependent RNA helicase, B0567-protein, B1088-protein, B1289-protein, B2940-protein, calnexin homolog, CDS5399-protein, chromatin structure-remodeling complex protein, D-amino acid dehydrogenase, D-arabinono-1,4-lactone oxidase, Delta 1-pyrroline-5-carboxylate reductase, glycine cleavage complex lipoylprotein, ketodeoxygluconokinase, lipoyl synthase, low-molecular-weight heat-shock protein, Microsomal cytochrome b reductase, mitochondrial ribosomal protein, mitotic check point protein, monodehydroascorbate reductase, paraquat-inducible protein B, phosphatase, Phosphoglucosamine mutase, protein disaggregation chaperone, protein kinase, pyruvate decarboxylase, recA family protein, rhodanese-related sulfurtransferase, ribonuclease P protein component, ribosome modulation factor, sensory histidine kinase, serine hydroxymethyltransferase, SLL1280-protein, SLL1797-protein, small membrane lipoprotein, Small nucleolar ribonucleoprotein complex subunit, Sulfatase, transcription initiation factor subunit, tretraspanin, tRNA ligase, xyloglucan galactosyltransferase, YKL130C-protein, YLR443W-protein, YML096W-protein, and zinc finger family protein-activity is increased in one or more specific compartment(s) or organelle(s) of a cell or plant and confers an increased yield, e.g. the plant shows one or more increased or improved said yield-related trait(s). For example, said “activity” is increased in the compartment of a cell as indicated in table I or II in column 6 resulting in an increased yield of the corresponding plant. For example, the specific localization of said activity confers an improved or increased yield-related trait as shown in table VIIIA, B, and/or D. For example, said activity can be increased in plastids or mitochondria of a plant cell, thus conferring increase of yield in a corresponding plant, e.g. conferring an improved or increased yield-related trait as shown in table VIIIA, B, and/or D or table IX.

[0097] Further, the present invention relates to a method for producing a plant with increased yield as compared to a corresponding wild type plant comprising at least one of the steps selected from the group consisting of:
[0098] (i) increasing or generating the activity of a polypeptide comprising a polypeptide, or a consensus sequence, or at least one polypeptide motif as depicted in column 5 or 7 of Table II or of Table IV, respectively;
[0099] (ii) increasing or generating the activity of an expression product of one or more nucleic acid molecule(s) comprising one or more polynucleotide(s) as depicted in column 5 or 7 of Table I, and
[0100] (iii) increasing or generating the activity of a functional equivalent of (i) or (ii).

[0101] Accordingly, the increase or generation of one or more said “activities” is for example conferred by the increase of activity or amount of one or more expression products of said nucleic acid molecule, e.g. proteins, or by de novo expression, i.e. by the generation of said “activity” in the plant. Accordingly, in the present invention described herein, the increase or generation of one or more of said “activities” is for example conferred by the expression of one or more protein(s) each comprising a polypeptide selected from the group as depicted in table II, column 5 and 7.

[0102] Thus, the method of the invention comprises in one embodiment the following steps:
[0103] (i) increasing or generating of the expression of at least one nucleic acid molecule; and/or
[0104] (ii) increasing or generating the expression of an expression product encoded by at least one nucleic acid molecule; and/or
[0105] (iii) increasing or generating one or more activities of an expression product encoded by at least one nucleic acid molecule;
   whereby the at least one nucleic acid molecule (in the following “Yield Related Protein (YRP)”-encoding gene or “YRP”-gene) comprises a nucleic acid molecule selected from the group consisting of:
[0106] (a) a nucleic acid molecule encoding the polypeptide shown in column 5 or 7 of table II;
[0107] (b) a nucleic acid molecule shown in column 5 or 7 of table I;
[0108] (c) a nucleic acid molecule, which, as a result of the degeneracy of the genetic code, can be derived from a polypeptide sequence depicted in column 5 or 7 of table II and confers an increased yield as compared to a corresponding, e.g. non-transformed, wild type plant cell, a transgenic plant or a part thereof;
[0109] (d) a nucleic acid molecule having 30 or more, for example 50, 60, 70, 80, 85, 90, 95, 97, 98, or 99% or more identity with the nucleic acid molecule sequence of a polynucleotide comprising the nucleic acid molecule shown in column 5 or 7 of table I and confers an increased yield as compared to a corresponding, e.g. non-transformed, wild type plant cell, a transgenic plant or a part thereof;
[0110] (e) a nucleic acid molecule encoding a polypeptide having 30 or more, for example 50, 60, 70, 80, 85, 90, 95, 97, 98, or 99% or more identity with the amino acid sequence of the polypeptide encoded by the nucleic acid molecule of (a) to (c) and having the activity represented by a nucleic acid molecule comprising a polynucleotide as depicted in column 5 of table I and confers an increased yield as compared to a corresponding, e.g. non-transformed, wild type plant cell, a transgenic plant or a part thereof;
[0111] (f) a nucleic acid molecule which hybridizes with a nucleic acid molecule of (a) to (c) under stringent hybridization conditions and confers an increased yield as compared to a corresponding, e.g. non-transformed, wild type plant cell, a transgenic plant or a part thereof;
[0112] (g) a nucleic acid molecule encoding a polypeptide which can be isolated with the aid of monoclonal or polyclonal antibodies made against a polypeptide encoded by one of the nucleic acid molecules of (a) to (e) and having the activity represented by the nucleic acid molecule comprising a polynucleotide as depicted in column 5 of table I;
[0113] (h) a nucleic acid molecule encoding a polypeptide comprising the consensus sequence or one or more polypeptide motifs as shown in column 7 of table IV and preferably having the activity represented by a nucleic acid molecule comprising a polynucleotide as depicted in column 5 of table II or IV;
[0114] (i) a nucleic acid molecule encoding a polypeptide having the activity represented by a protein as depicted in column 5 of table II and conferring increased yield as compared to a corresponding, e.g. non-transformed, wild type plant cell, a transgenic plant or a part thereof;
[0115] (j) nucleic acid molecule which comprises a polynucleotide, which is obtained by amplifying a cDNA library or a genomic library using the primers in column 7 of table III and preferably having the activity represented by a nucleic acid molecule comprising a polynucleotide as depicted in column 5 of table II or IV; and
[0116] (k) a nucleic acid molecule which is obtainable by screening a suitable nucleic acid library under stringent hybridization conditions with a probe comprising a complementary sequence of a nucleic acid molecule of (a) or (b) or with a fragment thereof, having 15 nt or more, preferably 20 nt, 30 nt, 50 nt, 100 nt, 200 nt, or 500 nt, 1000 nt, 1500 nt, 2000 nt or 3000 nt or more of a nucleic acid molecule complementary to a nucleic acid molecule sequence characterized in (a) to (e) and encoding a polypeptide having the activity represented by a protein comprising a polypeptide as depicted in column 5 of table II.

[0117] Accordingly, the genes of the present invention or used in accordance with the present invention, which encode a protein having an activity selected from the group consisting of 17.6 kDa class I heat shock protein, 26.5 kDa class I small heat shock protein, 26S protease subunit, 2-Cys peroxiredoxin, 3-dehydroquinate synthase, 5-keto-D-gluconate-5-reductase, asparagine synthetase A, aspartate 1-decarboxylase precursor, ATP-dependent RNA helicase, B0567-protein, B1088-protein, B1289-protein, B2940-protein, calnexin homolog, CDS5399-protein, chromatin structure-remodeling complex protein, D-amino acid dehydrogenase, D-arabinono-1,4-lactone oxidase, Delta 1-pyrroline-5-carboxylate reductase, glycine cleavage complex lipoylprotein, ketodeoxygluconokinase, lipoyl synthase, low-molecular-weight heat-shock protein, Microsomal cytochrome b reductase, mitochondrial ribosomal protein, mitotic check point protein, monodehydroascorbate reductase, paraquat-inducible protein B, phosphatase, Phosphoglucosamine mutase, protein disaggregation chaperone, protein kinase, pyruvate decarboxylase, recA family protein, rhodanese-related sulfurtransferase, ribonuclease P protein component, ribosome modulation factor, sensory histidine kinase, serine hydroxymethyltransferase, SLL1280-protein, SLL1797-protein, small membrane lipoprotein, Small nucleolar ribonucleoprotein complex subunit, Sulfatase, transcription initiation factor subunit, tretraspanin, tRNA ligase, xyloglucan galactosyltransferase, YKL130C-protein, YLR443W-protein, YML096W-protein, and zinc finger family protein-activity, which encode a protein comprising a polypeptide encoded for by a nucleic acid sequence as shown in table I, column 5 or 7, and/or which encode a protein comprising a polypeptide as depicted in table II, column 5 and 7, or which an be amplified with the primer set shown in table III, column 7, are also referred to as “YRP genes”.

[0118] Proteins or polypeptides encoded by the “YRP-genes” are referred to as “Yield Related Proteins” or “YRP”. For the purposes of the description of the present invention, a polypeptide having (i) an activity selected from the group consisting of 17.6 kDa class I heat shock protein, 26.5 kDa class I small heat shock protein, 26S protease subunit, 2-Cys peroxiredoxin, 3-dehydroquinate synthase, 5-keto-D-gluconate-5-reductase, asparagine synthetase A, aspartate 1-decarboxylase precursor, ATP-dependent RNA helicase, B0567-protein, B1088-protein, B1289-protein, B2940-protein, calnexin homolog, CDS5399-protein, chromatin structure-remodeling complex protein, D-amino acid dehydrogenase, D-arabinono-1,4-lactone oxidase, Delta 1-pyrroline-5-carboxylate reductase, glycine cleavage complex lipoylprotein, ketodeoxygluconokinase, lipoyl synthase, low-molecular-weight heat-shock protein, Microsomal cytochrome b reductase, mitochondrial ribosomal protein, mitotic check point protein, monodehydroascorbate reductase, paraquat-inducible protein B, phosphatase, Phosphoglucosamine mutase, protein disaggregation chaperone, protein kinase, pyruvate decarboxylase, recA family protein, rhodanese-related sulfurtransferase, ribonuclease P protein component, ribosome modulation factor, sensory histidine kinase, serine hydroxymethyltransferase, SLL1280-protein, SLL1797-protein, small membrane lipoprotein, Small nucleolar ribonucleoprotein complex subunit, Sulfatase, transcription initiation factor subunit, tretraspanin, tRNA ligase, xyloglucan galactosyltransferase, YKL130C-protein, YLR443W-protein, YML096W-protein, and zinc finger family protein-activity, (ii) a polypeptide comprising a polypeptide encoded by one or more nucleic acid sequences as shown in table I, column 5 or 7, or (iii) a polypeptide comprising a polypeptide as depicted in table II, column 5 and 7, or (iv) a polypeptide comprising the consensus sequence as shown in table IV, column 7, or (v) a polypeptide comprising one or more motives as shown in table IV, column 7, are also referred to as “Yield Related Proteins” or “YRPs”.

[0119] Thus, the present invention fulfills the need to identify new, unique genes capable of conferring increased yield, e.g. with an increased yield-related trait, for example enhanced tolerance to abiotic environmental stress, for example an increased drought tolerance and/or low temperature tolerance and/or an increased nutrient use efficiency, intrinsic yield and/or another increased yield-related trait, to photosynthetic active organism, preferably plants, upon expression or over-expression of endogenous and/or exogenous genes. Accordingly, the present invention provides YRP and YRP genes.

[0120] Accordingly, this invention fulfills the need to identify new, unique genes capable of conferring increased yield, e.g. with an increased yield-related trait, for example enhanced tolerance to abiotic environmental stress, for example an increased drought tolerance and/or low temperature tolerance and/or an increased nutrient use efficiency, intrinsic yield and/or another increased yield-related trait, to photosynthetic active organism, preferably plants, upon expression or over-expression of endogenous genes. Accordingly, the present invention provides YRP and YRP genes derived from plants. In particular, genes from plants are described in column 5 as well as in column 7 of tables I or II.

[0121] Further, the invention fulfills the need to identify new, unique genes capable of conferring increased yield, e.g. with an increased yield-related trait, for example enhanced tolerance to abiotic environmental stress, for example an increased drought tolerance and/or low temperature tolerance and/or an increased nutrient use efficiency, intrinsic yield and/or another increased yield-related trait, to photosynthetic active organism, preferably plants, upon expression or over-expression of exogenous genes. Accordingly, the present invention provides YRP and YRP genes derived from plants and other organisms in column 5 as well as in column 7 of tables I or II.

[0122] Furthermore, this invention fulfills the need to identify new, unique genes capable of conferring an enhanced tolerance to abiotic environmental stress in combination with an increase of yield to photosynthetic active organism, preferably plants, upon expression or over-expression of endogenous and/or exogenous genes.

[0123] Thus, in one embodiment, the present invention provides a method for producing a plant showing increased or improved yield as compared to the corresponding origin or wild type plant, by increasing or generating one or more activities selected from the group consisting of 17.6 kDa class I heat shock protein, 26.5 kDa class I small heat shock protein, 26S protease subunit, 2-Cys peroxiredoxin, 3-dehydroquinate synthase, 5-keto-D-gluconate-5-reductase, asparagine synthetase A, aspartate 1-decarboxylase precursor, ATP-dependent RNA helicase, B0567-protein, B1088-protein, B1289-protein, B2940-protein, calnexin homolog, CDS5399-protein, chromatin structure-remodeling complex protein, D-amino acid dehydrogenase, D-arabinono-1,4-lactone oxidase, Delta 1-pyrroline-5-carboxylate reductase, glycine cleavage complex lipoylprotein, ketodeoxygluconokinase, lipoyl synthase, low-molecular-weight heat-shock protein, Microsomal cytochrome b reductase, mitochondrial ribosomal protein, mitotic check point protein, monodehydroascorbate reductase, paraquat-inducible protein B, phosphatase, Phosphoglucosamine mutase, protein disaggregation chaperone, protein kinase, pyruvate decarboxylase, recA family protein, rhodanese-related sulfurtransferase, ribonuclease P protein component, ribosome modulation factor, sensory histidine kinase, serine hydroxymethyltransferase, SLL1280-protein, SLL1797-protein, small membrane lipoprotein, Small nucleolar ribonucleoprotein complex subunit, Sulfatase, transcription initiation factor subunit, tretraspanin, tRNA ligase, xyloglucan galactosyltransferase, YKL130C-protein, YLR443W-protein, YML096W-protein, and zinc finger family protein-activity, e.g. which is conferred by one or more YRP or the gene product of one or more YRP-genes, for example by the gene product of a nucleic acid sequence comprising a polynucleotide selected from the group as shown in table I, column 5 or 7 or by one or more protein(s) each comprising a polypeptide encoded by one or more nucleic acid sequence(s) selected from the group as shown in table I, column 5 or 7, or by one or more protein(s) each comprising a polypeptide selected from the group as depicted in table II, column 5 and 7, or a protein having a sequence corresponding to the consensus sequence shown in table IV, column 7 in the and (b) optionally, growing the plant cell, plant or part thereof under conditions which permit the development of the plant cell, the plant or the part thereof, and (c) regenerating a plant with increased yield, e.g. with an increased yield-related trait, for example enhanced tolerance to abiotic environmental stress, for example an increased drought tolerance and/or low temperature tolerance and/or an increased nutrient use efficiency, intrinsic yield and/or another increased yield-related trait as compared to a corresponding, e.g. non-transformed, wild type plant or a part thereof.

[0124] In an embodiment, the plant grows in presence or absence of nutrient deficiency and/or abiotic stress and the plant showing an increased yield as compared to a corresponding, e.g. non-transformed, wild type plant is elected.

[0125] Accordingly, in one further embodiment, the said method for producing a plant or a part thereof for the regeneration of said plant, the plant showing an increased yield, said method comprises (i) growing the plant or part thereof together with a, e.g. non-transformed, wild type photosynthetic active organism under conditions of abiotic environmental stress or deficiency; and (ii) selecting a plant with increased yield as compared to a corresponding, e.g. non-transformed, wild type a plant, for example after the, e.g. non-transformed, wild type plant shows visual symptoms of deficiency and/or death.

[0126] As mentioned, the increase of yield can be mediated by one or more yield-related traits. Thus, the method of the invention relates to the production of a plant showing said one or more improved yield-related traits.

[0127] Thus, the present invention provides a method for producing a plant showing one or more improved yield-related traits selected from the group consisting of: increased nutrient use efficiency, e.g. nitrogen use efficiency (NUE), increased stress resistance, e.g. abiotic stress resistance, increased nutrient use efficiency, increased water use efficiency, increased stress resistance, e.g. abiotic stress resistance, particular low temperature tolerance, drought tolerance and an increased intrinsic yield.

[0128] In one embodiment, one or more of said “activities” is/are increased by increasing the amount and/or specific activity of one or more proteins having said “activity” in a plant cell or a part thereof, e.g. a compartment, e.g. by increasing the amount and/or specific activity of one of more YRP in a cell or a compartment of a cell.

[0129] Further, the present invention relates to a method for producing a plant with increased yield as compared to a corresponding origin or wild type plant, e.g. a transgenic plant, which comprises: (a) increasing or generating, in a plant cell nucleus, a plant cell, a plant or a part thereof, one or more activities selected from the group consisting of 17.6 kDa class I heat shock protein, 26.5 kDa class I small heat shock protein, 26S protease subunit, 2-Cys peroxiredoxin, 3-dehydroquinate synthase, 5-keto-D-gluconate-5-reductase, asparagine synthetase A, aspartate 1-decarboxylase precursor, ATP-dependent RNA helicase, B0567-protein, B1088-protein, B1289-protein, B2940-protein, calnexin homolog, CDS5399-protein, chromatin structure-remodeling complex protein, D-amino acid dehydrogenase, D-arabinono-1,4-lactone oxidase, Delta 1-pyrroline-5-carboxylate reductase, glycine cleavage complex lipoylprotein, ketodeoxygluconokinase, lipoyl synthase, low-molecular-weight heat-shock protein, Microsomal cytochrome b reductase, mitochondrial ribosomal protein, mitotic check point protein, monodehydroascorbate reductase, paraquat-inducible protein B, phosphatase, Phosphoglucosamine mutase, protein disaggregation chaperone, protein kinase, pyruvate decarboxylase, recA family protein, rhodanese-related sulfurtransferase, ribonuclease P protein component, ribosome modulation factor, sensory histidine kinase, serine hydroxymethyltransferase, SLL1280-protein, SLL1797-protein, small membrane lipoprotein, Small nucleolar ribonucleoprotein complex subunit, Sulfatase, transcription initiation factor subunit, tretraspanin, tRNA ligase, xyloglucan galactosyltransferase, YKL130C-protein, YLR443W-protein, YML096W-protein, and zinc finger family protein-activity, e.g. by the methods mentioned herein; and (b) cultivating or growing the plant cell, the plant or the part thereof under conditions which permit the development of the plant cell, the plant or the part thereof; and (c) recovering a plant from said plant cell nucleus, said plant cell, or said plant part, which shows increased yield as compared to a corresponding, e.g. non-transformed, origin or wild type plant; and (d) optionally, selecting the plant or a part thereof, showing increased yield, for example showing an increased or improved yield-related trait, e.g. an improved nutrient use efficiency and/or abiotic stress resistance, as compared to a corresponding, e.g. non-transformed, wild type plant cell, e.g. which shows visual symptoms of deficiency and/or death.

[0130] Furthermore, the present invention also relates to a method for the identification of a plant with an increased yield comprising screening a population of one or more plant cell nuclei, plant cells, plant tissues or plants or parts thereof for said “activity”, comparing the level of activity with the activity level in a reference; identifying one or more plant cell nuclei, plant cells, plant tissues or plants or parts thereof with the activity increased compared to the reference, optionally producing a plant from the identified plant cell nuclei, cell or tissue.

[0131] In one further embodiment, the present invention also relates to a method for the identification of a plant with an increased yield comprising screening a population of one or more plant cell nuclei, plant cells, plant tissues or plants or parts thereof for the expression level of an nucleic acid coding for an polypeptide conferring said activity, comparing the level of expression with a reference; identifying one or more plant cell nuclei, plant cells, plant tissues or plants or parts thereof with the expression level increased compared to the reference, optionally producing a plant from the identified plant cell nuclei, cell or tissue.

[0132] In one embodiment, the present invention provides a process for improving the adaptation to environmental stress. Further, the present invention provides a plant with enhanced or improved yield. As mentioned, according to the present invention, increased or improved yield can be achieved by increasing or improving one or more yield-related traits, e.g. the nutrient use efficiency, water use efficiency, tolerance to abiotic environmental stress, particularly low temperature or drought, as compared to the corresponding, e.g. non-transformed, wild type plant.

[0133] In one embodiment of the present invention, these traits are achieved by a process for an enhanced tolerance to abiotic environmental stress in a photosynthetic active organism, preferably a plant, as compared to a corresponding (non-transformed) wild type photosynthetic active organism.

[0134] “Improved adaptation” to environmental stress like e.g. freezing and/or chilling temperatures refers to an improved plant performance under environmental stress conditions.

[0135] In a further embodiment, “enhanced tolerance to abiotic environmental stress” in a plant means that the plant, when confronted with abiotic environmental stress conditions as mentioned herein, e.g. low temperature conditions including chilling and freezing temperatures, or e.g. drought, exhibits an enhanced yield as mentioned herein, e.g. a seed yield or biomass yield, as compared to a corresponding (non-transformed) wild type.

[0136] Accordingly, in a preferred embodiment, the present invention provides a method for producing a transgenic cell for the regeneration or production of a plant with increased yield, e.g. tolerance to abiotic environmental stress and/or another increased yield-related trait, as compared to a corresponding, e.g. non-transformed, wild type cell by increasing or generating one or more activities selected from the group consisting of 17.6 kDa class I heat shock protein, 26.5 kDa class I small heat shock protein, 26S protease subunit, 2-Cys peroxiredoxin, 3-dehydroquinate synthase, 5-keto-D-gluconate-5-reductase, asparagine synthetase A, aspartate 1-decarboxylase precursor, ATP-dependent RNA helicase, B0567-protein, B1088-protein, B1289-protein, B2940-protein, calnexin homolog, CDS5399-protein, chromatin structure-remodeling complex protein, D-amino acid dehydrogenase, D-arabinono-1,4-lactone oxidase, Delta 1-pyrroline-5-carboxylate reductase, glycine cleavage complex lipoylprotein, ketodeoxygluconokinase, lipoyl synthase, low-molecular-weight heat-shock protein, Microsomal cytochrome b reductase, mitochondrial ribosomal protein, mitotic check point protein, monodehydroascorbate reductase, paraquat-inducible protein B, phosphatase, Phosphoglucosamine mutase, protein disaggregation chaperone, protein kinase, pyruvate decarboxylase, recA family protein, rhodanese-related sulfurtransferase, ribonuclease P protein component, ribosome modulation factor, sensory histidine kinase, serine hydroxymethyltransferase, SLL1280-protein, SLL1797-protein, small membrane lipoprotein, Small nucleolar ribonucleoprotein complex subunit, Sulfatase, transcription initiation factor subunit, tretraspanin, tRNA ligase, xyloglucan galactosyltransferase, YKL130C-protein, YLR443W-protein, YML096W-protein, and zinc finger family protein-activity. The cell can be for example a host cell, e.g. a transgenic host cell. A host cell can be for example a microorganism, e.g. derived from fungi or bacteria, or a plant cell particular useful for transformation.

[0137] Accordingly, in an embodiment, the present invention provides a method for producing a cell for the regeneration or production of a plant with an increased yield-trait, e.g. tolerance to abiotic environmental stress and/or another increased yield-related trait, as compared to a corresponding, e.g. non-transformed, wild type plant cell by increasing or generating one or more activities selected from the group consisting of 17.6 kDa class I heat shock protein, 26.5 kDa class I small heat shock protein, 26S protease subunit, 2-Cys peroxiredoxin, 3-dehydroquinate synthase, 5-keto-D-gluconate-5-reductase, asparagine synthetase A, aspartate 1-decarboxylase precursor, ATP-dependent RNA helicase, 60567-protein, B1088-protein, B1289-protein, B2940-protein, calnexin homolog, CDS5399-protein, chromatin structure-remodeling complex protein, D-amino acid dehydrogenase, D-arabinono-1,4-lactone oxidase, Delta 1-pyrroline-5-carboxylate reductase, glycine cleavage complex lipoylprotein, ketodeoxygluconokinase, lipoyl synthase, low-molecular-weight heat-shock protein, Microsomal cytochrome b reductase, mitochondrial ribosomal protein, mitotic check point protein, monodehydroascorbate reductase, paraquat-inducible protein B, phosphatase, Phosphoglucosamine mutase, protein disaggregation chaperone, protein kinase, pyruvate decarboxylase, recA family protein, rhodanese-related sulfurtransferase, ribonuclease P protein component, ribosome modulation factor, sensory histidine kinase, serine hydroxymethyltransferase, SLL1280-protein, SLL1797-protein, small membrane lipoprotein, Small nucleolar ribonucleoprotein complex subunit, Sulfatase, transcription initiation factor subunit, tretraspanin, tRNA ligase, xyloglucan galactosyltransferase, YKL130C-protein, YLR443W-protein, YML096W-protein, and zinc finger family protein-activity.

[0138] Said cell for the regeneration or production of a plant can be for example a host cell, e.g. a transgenic host cell. A host cell can be for example a microorganism, e.g. derived from fungi or bacteria, or a plant cell particular useful for transformation.

[0139] In another embodiment, the photosynthetic active organism produced according the invention, especially the plant of the invention, shows increased yield under conditions of abiotic environmental stress and shows an enhanced tolerance to a further abiotic environmental stress or shows another improved yield-related trait.

[0140] In one embodiment throughout the description, abiotic environmental stress refers to nitrogen use efficiency.

[0141] In another embodiment, the present invention relates to a method for increasing yield of a population of plants, comprising checking the growth temperature(s) in the area for planting, comparing the temperatures with the optimal growth temperature of a plant species or a variety considered for planting, e.g. the origin or wild type plant mentioned herein; and planting and growing the plant of the invention if the growth temperature is not optimal for the planting and growing of the plant species or the variety considered for planting, e.g. for the origin or wild type plant.

[0142] The method can be repeated in parts or in whole once or more.

[0143] Furthermore, the present invention relates to a method for producing a trans-genic plant with increased yield as compared to a corresponding, e.g. non-transformed, wild type plant, transforming a plant cell or a plant cell nucleus or a plant tissue to produce such a plant, with a nucleic acid molecule comprising a nucleic acid molecule selected from the group consisting of:
[0144] (a) a nucleic acid molecule encoding the polypeptide shown in column 5 or 7 of table II;
[0145] (b) a nucleic acid molecule shown in column 5 or 7 of table I;
[0146] (c) a nucleic acid molecule, which, as a result of the degeneracy of the genetic code, can be derived from a polypeptide sequence depicted in column 5 or 7 of table II and confers an increased yield as compared to a corresponding, e.g. non-transformed, wild type plant cell, a transgenic plant or a part thereof;
[0147] (d) a nucleic acid molecule having 30 or more, for example 50, 60, 70, 80, 85, 90, 95, 97, 98, or 99% or more identity with the nucleic acid molecule sequence of a polynucleotide comprising the nucleic acid molecule shown in column 5 or 7 of table I and confers an increased yield as compared to a corresponding, e.g. non-transformed, wild type plant cell, a transgenic plant or a part thereof;
[0148] (e) a nucleic acid molecule encoding a polypeptide having 30 or more, for example 50, 60, 70, 80, 85, 90, 95, 97, 98, or 99% or more identity with the amino acid sequence of the polypeptide encoded by the nucleic acid molecule of (a) to (c) and having the activity represented by a nucleic acid molecule comprising a polynucleotide as depicted in column 5 of table I and confers an increased yield as compared to a corresponding, e.g. non-transformed, wild type plant cell, a transgenic plant or a part thereof;
[0149] (f) a nucleic acid molecule which hybridizes with a nucleic acid molecule of (a) to (c) under stringent hybridization conditions and confers an increased yield as compared to a corresponding, e.g. non-transformed, wild type plant cell, a transgenic plant or a part thereof;
[0150] (g) a nucleic acid molecule encoding a polypeptide which can be isolated with the aid of monoclonal or polyclonal antibodies made against a polypeptide encoded by one of the nucleic acid molecules of (a) to (e) and having the activity represented by the nucleic acid molecule comprising a polynucleotide as depicted in column 5 of table I;
[0151] (h) a nucleic acid molecule encoding a polypeptide comprising the consensus sequence or one or more polypeptide motifs as shown in column 7 of table IV and preferably having the activity represented by a nucleic acid molecule comprising a polynucleotide as depicted in column 5 of table II or IV;
[0152] (i) a nucleic acid molecule encoding a polypeptide having the activity represented by a protein as depicted in column 5 of table II and conferring increased yield as compared to a corresponding, e.g. non-transformed, wild type plant cell, a transgenic plant or a part thereof;
[0153] (j) nucleic acid molecule which comprises a polynucleotide, which is obtained by amplifying a cDNA library or a genomic library using the primers in column 7 of table III and preferably having the activity represented by a nucleic acid molecule comprising a polynucleotide as depicted in column 5 of table II or IV; and
[0154] (k) a nucleic acid molecule which is obtainable by screening a suitable nucleic acid library under stringent hybridization conditions with a probe comprising a complementary sequence of a nucleic acid molecule of (a) or (b) or with a fragment thereof, having at least 20, 30, 50, 100, 200, 300, 500 or 1000 or more nt of a nucleic acid molecule complementary to a nucleic acid molecule sequence characterized in (a) to (e) and encoding a polypeptide having the activity represented by a protein comprising a polypeptide as depicted in column 5 of table II,
   and regenerating a transgenic plant from that transformed plant cell nucleus, plant cell or plant tissue with increased yield.

[0155] A modification, i.e. an increase, can be caused by endogenous or exogenous factors. For example, an increase in activity in an organism or a part thereof can be caused by adding a gene product or a precursor or an activator or an agonist to the media or nutrition or can be caused by introducing said subjects into a organism, transient or stable. Furthermore such an increase can be reached by the introduction of the inventive nucleic acid sequence or the encoded protein in the correct cell compartment for example into the nucleus or cytoplasmic respectively or into plastids either by transformation and/or targeting. For the purposes of the description of the present invention, the terms “cytoplasmic” and “non-targeted” shall indicate, that the nucleic acid of the invention is expressed without the addition of an non-natural transit peptide encoding sequence. A non-natural transit peptide encoding sequence is a sequence which is not a natural part of a nucleic acid of the invention, e.g. of the nucleic acids depicted in table I column 5 or 7, but is rather added by molecular manipulation steps as for example described in the example under “plastid targeted expression”. Therefore the terms “cytoplasmic” and “non-targeted” shall not exclude a targeted localisation to any cell compartment for the products of the inventive nucleic acid sequences by their naturally occurring sequence properties within the background of the transgenic organism. The sub-cellular location of the mature polypeptide derived from the enclosed sequences can be predicted by a skilled person for the organism (plant) by using software tools like TargetP (Emanuelsson et al., (2000), Predicting sub-cellular localization of proteins based on their N-terminal amino acid sequence, J. Mol. Biol. 300, 1005-1016.), ChloroP (Emanuelsson et al. (1999), ChloroP, a neural network-based method for predicting chloroplast transit peptides and their cleavage sites, Protein Science, 8: 978-984.) or other predictive software tools (Emanuelsson et al. (2007), Locating proteins in the cell using TargetP, SignalP, and related tools, Nature Protocols 2, 953-971).

[0156] As used herein, “plant” is meant to include not only a whole plant but also a part thereof i.e., one or more cells, and tissues, including for example, leaves, stems, shoots, roots, flowers, fruits and seeds.

[0157] In one embodiment, an activity as disclosed herein as being conferred by a YPR; e.g. a polypeptide shown in table II, is increase or generated in the plastid, if in column 6 of each table I the term “plastidic” is listed for said polypeptide.

[0158] In one embodiment, an activity as disclosed herein as being conferred by a YPR; e.g. a polypeptide shown in table II, is increase or generated in the mitochondria if in column 6 of each table I the term “mitochondria” is listed for said polypeptide.

[0159] In another embodiment the present invention relates to a method for producing an, e.g. transgenic, plant with increased yield, e.g. with an increased yield-related trait, for example enhanced tolerance to abiotic environmental stress, for example an increased drought tolerance and/or low temperature tolerance and/or an increased nutrient use efficiency, intrinsic yield and/or another increased yield-related trait as compared to a corresponding, e.g. non-transformed, wild type plant, which comprises
[0160] (a) increasing or generating one or more said “activities” in the cytoplasm of a plant cell, and
[0161] (b) growing the plant under conditions which permit the development of a plant with increased yield, e.g. with an increased yield-related trait, for example enhanced tolerance to abiotic environmental stress, for example an increased drought tolerance and/or low temperature tolerance and/or an increased nutrient use efficiency, intrinsic yield and/or another increased yield-related trait as compared to a corresponding, e.g. non-transformed, wild type plant.

[0162] In one embodiment, an activity as disclosed herein as being conferred by a polypeptide shown in table II is increase or generated in the cytoplasm, if in column 6 of each table I the term “cytoplasmic” is listed for said polypeptide.

[0163] As the terms “cytoplasmic” and “non-targeted” shall not exclude a targeted localisation to any cell compartment for the products of the inventive nucleic acid sequences by their naturally occurring sequence properties within the background of the transgenic organism, in one embodiment, an activity as disclosed herein as being conferred by a polypeptide shown in table II is increase or generated non-targeted, if in column 6 of each table I the term “cytoplasmic” is listed for said polypeptide. For the purposes of the description of the present invention, the term “cytoplasmic” shall indicate, that the nucleic acid of the invention is expressed without the addition of an non-natural transit peptide encoding sequence. A non-natural transient peptide encoding sequence is a sequence which is not a natural part of a nucleic acid of the invention but is rather added by molecular manipulation steps as for example described in the example under “plastid targeted expression”. Therefore the term “cytoplasmic” shall not exclude a targeted localisation to any cell compartment for the products of the inventive nucleic acid sequences by their naturally occurring sequence properties.

[0164] In another embodiment the present invention is related to a method for producing a, e.g. transgenic, plant with increased yield, or a part thereof, as compared to a corresponding, e.g. non-transformed, wild type plant, which comprises
[0165] (a1) increasing or generating one or more said activities, e.g. the activity of said YRP or the gene product of said YRP gene, e.g. an activity selected from the group consisting of 17.6 kDa class I heat shock protein, 26.5 kDa class I small heat shock protein, 26S protease subunit, 2-Cys peroxiredoxin, 3-dehydroquinate synthase, 5-keto-D-gluconate-5-reductase, asparagine synthetase A, aspartate 1-decarboxylase precursor, ATP-dependent RNA helicase, B0567-protein, B1088-protein, B1289-protein, B2940-protein, calnexin homolog, CDS5399-protein, chromatin structure-remodeling complex protein, D-amino acid dehydrogenase, D-arabinono-1,4-lactone oxidase, Delta 1-pyrroline-5-carboxylate reductase, glycine cleavage complex lipoylprotein, ketodeoxygluconokinase, lipoyl synthase, low-molecular-weight heat-shock protein, Microsomal cytochrome b reductase, mitochondrial ribosomal protein, mitotic check point protein, monodehydroascorbate reductase, paraquat-inducible protein B, phosphatase, Phosphoglucosamine mutase, protein disaggregation chaperone, protein kinase, pyruvate decarboxylase, recA family protein, rhodanese-related sulfurtransferase, ribonuclease P protein component, ribosome modulation factor, sensory histidine kinase, serine hydroxymethyltransferase, SLL1280-protein, SLL1797-protein, small membrane lipoprotein, Small nucleolar ribonucleoprotein complex subunit, Sulfatase, transcription initiation factor subunit, tretraspanin, tRNA ligase, xyloglucan galactosyltransferase, YKL130C-protein, YLR443W-protein, YML096W-protein, and zinc finger family protein-activity in an organelle of a plant cell, or
[0166] (a2) increasing or generating the activity of a YRP, e.g. of a protein as shown in table II, column 3 or as encoded by the nucleic acid sequences as shown in table I, column 5 or 7, and which is joined to a nucleic acid sequence encoding a transit peptide in the plant cell; or
[0167] (a3) increasing or generating the activity of a YRP, e.g. a protein as shown in table II, column 3 or as encoded by the nucleic acid sequences as shown in table I, column 5 or 7, and which is joined to a nucleic acid sequence encoding an organelle localization sequence, especially a chloroplast localization sequence, in a plant cell,
[0168] (a4) increasing or generating the activity of a YRP, e.g. a protein as shown in table II, column 3 or as encoded by the nucleic acid sequences as shown in table I, column 5 or 7, and which is joined to a nucleic acid sequence encoding an mitochondrion localization sequence in a plant cell,
   and
[0169] (b) regenerating a plant from said plant cell;
[0170] (c) growing the plant under conditions which permit the development of a plant with increased yield, e.g. with an increased yield-related trait, for example enhanced tolerance to abiotic environmental stress, for example an increased drought tolerance and/or low temperature tolerance and/or an increased nutrient use efficiency, intrinsic yield and/or another increased yield-related trait as compared to a corresponding, e.g. non-transformed, wild type plant.

[0171] Accordingly, in a further embodiment, in said method for producing a transgenic plant with increased yield said activity is increased or generating by increasing or generating the activity of a protein as shown in table II, column 3 encoded by the nucleic acid sequences as shown in table I, column 5 or 7,
[0172] (a1) in an organelle of a plant through the transformation of the organelle indicated in column 6 for said activity, or
[0173] (a2) in the plastid of a plant, or in one or more parts thereof, through the transformation of the plastids, if indicated in column 6 for said activity;
[0174] (a3) in the chloroplast of a plant, or in one or more parts thereof, through the transformation of the chloroplast, if indicated in column 6 for said activity,
[0175] (a4) in the mitochondrion of a plant, or in one or more parts thereof, through the transformation of the mitochondrion, if indicated in column 6 for said activity.

[0176] In principle the nucleic acid sequence encoding a transit peptide can be isolated from every organism such as microorganisms such as algae or plants containing plastids, preferably containing chloroplasts. A “transit peptide” is an amino acid sequence, whose encoding nucleic acid sequence is translated together with the corresponding structural gene. That means the transit peptide is an integral part of the translated protein and forms an amino terminal extension of the protein. Both are translated as so called “pre-protein”. In general the transit peptide is cleaved off from the pre-protein during or just after import of the protein into the correct cell organelle such as a plastid to yield the mature protein. The transit peptide ensures correct localization of the mature protein by facilitating the transport of proteins through intracellular membranes.

[0177] Nucleic acid sequences encoding a transit peptide can be derived from a nucleic acid sequence encoding a protein finally resided in the plastid and stemming from an organism selected from the group consisting of the genera Acetabularia, Arabidopsis, Brassica, Capsicum, Chlamydomonas, Cururbita, Dunaliella, Euglena, Flayeria, Glycine, Helianthus, Hordeum, Lemna, Lolium, Lycopersion, Malus, Medicago, Mesembryanthemum, Nicotiana, Oenotherea, Oryza, Petunia, Phaseolus, Physcomitrella, Pinus, Pisum, Raphanus, Silene, Sinapis, Solanum, Spinacea, Stevia, Synechococcus, Triticum and Zea.

[0178] For example, such transit peptides, which are beneficially used in the inventive process, are derived from the nucleic acid sequence encoding a protein selected from the group consisting of ribulose bisphosphate carboxylase/oxygenase, 5-enolpyruvyl-shikimate-3-phosphate synthase, acetolactate synthase, chloroplast ribosomal protein CS17, Cs protein, ferredoxin, plastocyanin, ribulose bisphosphate carboxylase activase, tryptophan synthase, acyl carrier protein, plastid chaperonin-60, cytochrome c₅₅₂, 22-kDA heat shock protein, 33-kDa Oxygen-evolving enhancer protein 1, ATP synthase γ subunit, ATP synthase δ subunit, chlorophyll-a/b-binding proteinII-1, Oxygen-evolving enhancer protein 2, Oxygen-evolving enhancer protein 3, photosystem I: P21, photosystem I: P28, photosystem I: P30, photosystem I: P35, photosystem I: P37, glycerol-3-phosphate acyltransferases, chlorophyll a/b binding protein, CAB2 protein, hydroxymethyl-bilane synthase, pyruvate-orthophosphate dikinase, CAB3 protein, plastid ferritin, ferritin, early light-inducible protein, glutamate-1-semialdehyde aminotransferase, protochlorophyllide reductase, starch-granule-bound amylase synthase, light-harvesting chlorophyll a/b-binding protein of photosystem II, major pollen allergen Lol p 5a, plastid ClpB ATP-dependent protease, superoxide dismutase, ferredoxin NADP oxidoreductase, 28-kDa ribonucleoprotein, 31-kDa ribonucleoprotein, 33-kDa ribonucleoprotein, acetolactate synthase, ATP synthase CF₀ subunit 1, ATP synthase CF₀ subunit 2, ATP synthase CF₀ subunit 3, ATP synthase CF₀ subunit 4, cytochrome f, ADP-glucose pyrophosphorylase, glutamine synthase, glutamine synthase 2, carbonic anhydrase, GapA protein, heat-shock-protein hsp21, phosphate translocator, plastid ClpA ATP-dependent protease, plastid ribosomal protein CL24, plastid ribosomal protein CL9, plastid ribosomal protein PsCL18, plastid ribosomal protein PsCL25, DAHP synthase, starch phosphorylase, root acyl carrier protein II, betaine-aldehyde dehydrogenase, GapB protein, glutamine synthetase 2, phosphoribulokinase, nitrite reductase, ribosomal protein L12, ribosomal protein L13, ribosomal protein L21, ribosomal protein L35, ribosomal protein L40, triose phosphate-3-phosphoglyerate-phosphate translocator, ferredoxin-dependent glutamate synthase, glyceraldehyde-3-phosphate dehydrogenase, NADP-dependent malic enzyme and NADP-malate dehydrogenase.

[0179] In one embodiment the nucleic acid sequence encoding a transit peptide is derived from a nucleic acid sequence encoding a protein finally resided in the plastid and stemming from an organism selected from the group consisting of the species Acetabularia mediterranea, Arabidopsis thaliana, Brassica campestris, Brassica napus, Capsicum annuum, Chlamydomonas reinhardtii, Cururbita moschata, Dunaliella salina, Dunaliella tertiolecta, Euglena gracilis, Flayeria trinervia, Glycine max, Helianthus annuus, Hordeum vulgare, Lemna gibba, Lolium perenne, Lycopersion esculentum, Malus domestica, Medicago falcata, Medicago sativa, Mesembryanthemum crystallinum, Nicotiana plumbaginifolia, Nicotiana sylvestris, Nicotiana tabacum, Oenotherea hookeri, Oryza sativa, Petunia hybrida, Phaseolus vulgaris, Physcomitrella patens, Pinus tunbergii, Pisum sativum, Raphanus sativus, Silene pratensis, Sinapis alba, Solanum tuberosum, Spinacea oleracea, Stevia rebaudiana, Synechococcus, Synechocystis, Triticum aestivum and Zea mays.

[0180] Nucleic acid sequences are encoding transit peptides are disclosed by von Heijne et al. (Plant Molecular Biology Reporter, 9 (2), 104, (1991)), which are hereby incorporated by reference. Table V shows some examples of the transit peptide sequences disclosed by von Heijne et al.

[0181] According to the disclosure of the invention, especially in the examples, the skilled worker is able to link other nucleic acid sequences disclosed by von Heijne et al. to the herein disclosed YRP genes or genes encoding a YRP, e.g. to a nucleic acid sequences shown in table I, columns 5 and 7, e.g. for the nucleic acid molecules for which in column 6 of table I the term “plastidic” is indicated.

[0182] Nucleic acid sequences encoding transit peptides are derived from the genus Spinacia such as chloroplast 30S ribosomal protein PSrp-1, root acyl carrier protein II, acyl carrier protein, ATP synthase: γ subunit, ATP synthase: δ subunit, cytochrom f, ferredoxin l, ferredoxin NADP oxidoreductase (=FNR), nitrite reductase, phosphoribulokinase, plastocyanin or carbonic anhydrase. The skilled worker will recognize that various other nucleic acid sequences encoding transit peptides can easily isolated from plastid-localized proteins, which are expressed from nuclear genes as precursors and are then targeted to plastids. Such transit peptides encoding sequences can be used for the construction of other expression constructs. The transit peptides advantageously used in the inventive process and which are part of the inventive nucleic acid sequences and proteins are typically 20 to 120 amino acids, preferably 25 to 110, 30 to 100 or 35 to 90 amino acids, more preferably 40 to 85 amino acids and most preferably 45 to 80 amino acids in length and functions posttranslational to direct the protein to the plastid preferably to the chloroplast. The nucleic acid sequences encoding such transit peptides are localized upstream of nucleic acid sequence encoding the mature protein. For the correct molecular joining of the transit peptide encoding nucleic acid and the nucleic acid encoding the protein to be targeted it is sometimes necessary to introduce additional base pairs at the joining position, which forms restriction enzyme recognition sequences useful for the molecular joining of the different nucleic acid molecules. This procedure might lead to very few additional amino acids at the N-terminal of the mature imported protein, which usually and preferably do not interfere with the protein function. In any case, the additional base pairs at the joining position which forms restriction enzyme recognition sequences have to be chosen with care, in order to avoid the formation of stop codons or codons which encode amino acids with a strong influence on protein folding, like e.g. proline. It is preferred that such additional codons encode small structural flexible amino acids such as glycine or alanine.

[0183] As mentioned above the nucleic acid sequence coding for the YRP, e.g. for a protein as shown in table II, column 3 or 5, and its homologs as disclosed in table I, column 7 can be joined to a nucleic acid sequence encoding a transit peptide, e.g. if for the nucleic acid molecule in column 6 of table I the term “plastidic” is indicated. This nucleic acid sequence encoding a transit peptide ensures transport of the protein to the respective organelle, especially the plastid. The nucleic acid sequence of the gene to be expressed and the nucleic acid sequence encoding the transit peptide are operably linked. Therefore the transit peptide is fused in frame to the nucleic acid sequence coding for a YRP, e.g. a protein as shown in table II, column 3 or 5 and its homologs as disclosed in table I, column 7, e.g. if for the nucleic acid molecule in column 6 of table I the term “plastidic” is indicated.

[0184] The term “organelle” according to the invention shall mean for example “mitochondria” or “plastid”. The term “plastid” according to the invention are intended to include various forms of plastids including proplastids, chloroplasts, chromoplasts, gerontoplasts, leucoplasts, amyloplasts, elaioplasts and etioplasts, preferably chloroplasts. They all have as a common ancestor the aforementioned proplasts.

[0185] Other transit peptides are disclosed by Schmidt et al. (J. Biol. Chem. 268 (36), 27447 (1993)), Della-Cioppa et al. (Plant. Physiol. 84, 965 (1987)), de Castro Silva Filho et al. (Plant Mol. Biol. 30, 769 (1996)), Zhao et al. (J. Biol. Chem. 270 (11), 6081 (1995)), Römer et al. (Biochem. Biophys. Res. Commun. 196 (3), 1414 (1993)), Keegstra et al. (Annu. Rev. Plant Physiol. Plant Mol. Biol. 40, 471 (1989)), Lubben et al. (Photosynthesis Res. 17, 173 (1988)) and Lawrence et al. (J. Biol. Chem. 272 (33), 20357 (1997)). A general review about targeting is disclosed by Kermode Allison R. in Critical Reviews in Plant Science 15 (4), 285 (1996) under the title “Mechanisms of Intracellular Protein Transport and Targeting in Plant Cells.”.

[0186] Favored transit peptide sequences, which are used in the inventive process and which form part of the inventive nucleic acid sequences are generally enriched in hydroxylated amino acid residues (serine and threonine), with these two residues generally constituting 20 to 35% of the total. They often have an amino-terminal region empty of Gly, Pro, and charged residues. Furthermore they have a number of small hydrophobic amino acids such as valine and alanine and generally acidic amino acids are lacking. In addition they generally have a middle region rich in Ser, Thr, Lys and Arg. Overall they have very often a net positive charge.

[0187] Alternatively, nucleic acid sequences coding for the transit peptides may be chemically synthesized either in part or wholly according to structure of transit peptide sequences disclosed in the prior art. Said natural or chemically synthesized sequences can be directly linked to the sequences encoding the mature protein or via a linker nucleic acid sequence, which may be typically 500 base pairs or less, preferably 450, 400, 350, 300, 250 or 200 or less base pairs, more preferably 150, 100, 90, 80, 70, 60, 50, 40 or 30 base pairs or less and most preferably 25, 20, 15, 12, 9, 6 or 3 or less base pairs in length and are in frame to the coding sequence. Furthermore favorable nucleic acid sequences encoding transit peptides may comprise sequences derived from more than one biological and/or chemical source and may include a nucleic acid sequence derived from the amino-terminal region of the mature protein, which in its native state is linked to the transit peptide. In a preferred embodiment of the invention said amino-terminal region of the mature protein is typically 150 amino acids or less, preferably 140, 130, 120, 110, 100 or 90 or less amino acids, more preferably 80, 70, 60, 50, 40, 35, 30, 25 or 20 amino acids or less and most preferably 19, 18, 17, 16, 15, 14, 13, 12, 11 or 10 or less amino acids in length. But even shorter or longer stretches are also possible. In addition target sequences, which facilitate the transport of proteins to other cell compartments such as the vacuole, endoplasmic reticulum, Golgi complex, glyoxysomes, peroxisomes or mitochondria may be also part of the inventive nucleic acid sequence.

[0188] The proteins translated from said inventive nucleic acid sequences are a kind of fusion proteins that means the nucleic acid sequences encoding the transit peptide, for example the ones shown in table V, for example the last one of the table, are joint to a YRP-gene, e.g. the nucleic acid sequences shown in table I, columns 5 and 7, e.g. if for the nucleic acid molecule in column 6 of table I the term “plastidic” is indicated. The person skilled in the art is able to join said sequences in a functional manner. Advantageously the transit peptide part is cleaved off from the YRP, e.g. from the protein part shown in table II, columns 5 and 7, during the transport preferably into the plastids. All products of the cleavage of the preferred transit peptide shown in the last line of table V have preferably the N-terminal amino acid sequences QIA CSS or QIA EFQLTT in front of the start methionine of YRP, e.g. the protein mentioned in table II, columns 5 and 7. Other short amino acid sequences of an range of 1 to 20 amino acids preferable 2 to 15 amino acids, more preferable 3 to 10 amino acids most preferably 4 to 8 amino acids are also possible in front of the start methionine of the YRP, e.g. the protein mentioned in table II, columns 5 and 7. In case of the amino acid sequence QIA CSS the three amino acids in front of the start methionine are stemming from the LIC (=ligation independent cloning) cassette. Said short amino acid sequence is preferred in the case of the expression of Escherichia coli genes. In case of the amino acid sequence QIA EFQLTT the six amino acids in front of the start methionine are stemming from the LIC cassette. Said short amino acid sequence is preferred in the case of the expression of Saccharomyces cerevisiae genes. The skilled worker knows that other short sequences are also useful in the expression of the YRP genes, e.g. the genes mentioned in table I, columns 5 and 7. Furthermore the skilled worker is aware of the fact that there is not a need for such short sequences in the expression of the genes.

TABLE V
Examples of transit peptides disclosed by von Heijne et al.

| Trans | | | SEQ ID | |
|---|---|---|---|---|
| Pep | Organism | Transit Peptide | NO: | Reference |
| 1 | Acetabularia | MASIMMNKSVVLSKECAKPLATPK | 10 | Mol. Gen. |
| | mediterranea | VTLNKRGFATTIATKNREMMVWQP | | Genet. 218, |
| | | FNNKMFETFSFLPP | | 445 (1989) |
| 2 | Arabidopsis | MAASLQSTATFLQSAKIATAPSRG | 11 | EMBO J. 8, |
| | thaliana | SSHLRSTQAVGKSFGLETSSARLT | | 3187 (1989) |
| | | CSFQSDFKDFTGKCSDAVKIAGFA | | |
| | | LATSALVVSGASAEGAPK | | |
| 3 | Arabidopsis | MAQVSRICNGVQNPSLICNLSKSS | 12 | Mol. Gen. |
| | thaliana | QRKSPLSVSLKTQQHPRAYPISSS | | Genet. 210, |
| | | WGLKKSGMTLIGSELRPLKVMSSV | | 437 (1987) |
| | | STAEKASEIVLQPIREISGLIKLP | | |
| 4 | Arabidopsis | MAAATTTTTTSSSISFSTKPSPSS | 13 | Plant |
| | thaliana | SKSPLPISRFSLPFSLNPNKSSSS | | Physiol. 85, |
| | | SRRRGIKSSSPSSISAVLNTTTNV | | 1110 (1987) |
| | | TTTPSPTKPTKPETFISRFAPDQP | | |
| | | RKGA | | |
| 5 | Arabidopsis | MITSSLTCSLQALKLSSPFAHGST | 14 | J. Biol. |
| | thaliana | PLSSLSKPNSFPNHRMPALVPV | | Chem. 265, |
| | | | | 2763 (1990) |
| 6 | Arabidopsis | MASLLGTSSSAI- | 15 | EMBO J. 9, |
| | thaliana | WASPSLSSPSSKPSSSPICFRPGKLFGSKL | | 1337 (1990) |
| | | NAGIQI | | |
| | | RPKKNRSRYHVSVMNVATEINSTE | | |
| | | QVVGKFDSKKSARPVYPFAAI | | |
| 7 | Arabidopsis | MASTALSSAIVGTSFIRRSPAPISL | 16 | Plant |
| | thaliana | RSLPSANTQSLFGLKSGTARGG | | Physiol. 93, |
| | | RVVAM | | 572 (1990) |
| 8 | Arabidopsis | MAASTMALSSPAFAGKAVNLSPAA | 17 | Nucl. Acids |
| | thaliana | SEVLGSGRVTNRKTV | | Res. 14, |
| | | | | 4051 (1986) |
| 9 | Arabidopsis | MAAITSATVTIPSFTGLKLAVSSK | 18 | Gene 65, 59 |
| | thaliana | PKTLSTISRSSSATRAPPKLALKS | | (1988) |
| | | SLKDFGVIAVATAASIVLAGNAMA | | |
| | | MEVLLGSDDGSLAFVPSEFT | | |
| 10 | Arabidopsis | MAAAVSTVGAINRAPLSLNGSGSG | 19 | Nucl. Acids |
| | thaliana | AVSAPASTFLGKKVVTVSRFAQSN | | Res. 17, |
| | | KKSNGSFKVLAVKEDKQTDGDRWR | | 2871 (1989) |
| | | GLAYDTSDDQIDI | | |
| 11 | Arabidopsis | MKSSMLSSTAWTSPAQATMVAPF | 20 | Plant Mol. |
| | thaliana | TGLKSSASFPVTRKANNDITSITS | | Biol. 11, |
| | | NGGRVSC | | 745 (1988) |
| 12 | Arabidopsis | MAASGTSATFRASVSSAPSSSSQL | 21 | Proc. Natl. |
| | thaliana | THLKSPFKAVKYTPLPSSRSKSSS | | Acad. Sci. |
| | | FSVSCTIAKDPPVLMAAGSDPALW | | USA, 86, |
| | | QRPDSFGRFGKFGGKYVPE | | 4604 (1989) |
| 13 | Brassica | MSTTFCSSVCMQATSLAATTRISF | 22 | Nucl. Acids |
| | campestris | QKPALVSTTNLSFNLRRSIPTRFS | | Res. 15, |
| | | ISCAAKPETVEKVSKIVKKQLSLK | | 7197 (1987) |
| | | DDQKVVAE | | |
| 14 | Brassica | MATTFSASVSMQATSLATTTRISF | 23 | Eur. J. Bio- |
| | napus | QKPVLVSNHGRTNLSFNLSRTRLSISC | | chem. 174, |
| | | | | 287 (1988) |
| 15 | Chlamydomonas | MQALSSRVNIAAKPQRAQRLVVRA | 24 | Plant Mol. |
| | reinhardtii | EEVKAAPKKEVGPKRGSLVK | | Biol. 12, |
| | | | | 463 (1989) |
| 16 | Cucurbita | MAELIQDKESAQSAATAAAASSGY | 25 | FEBS Lett. |
| | moschata | ERRNEPAHSRKFLEVRSEEELLSCIKK | | 238, 424 |
| | | | | (1988) |
| 17 | Spinacea | MSTINGCLTSISPSRTQLKNTSTL | 26 | J. Biol. |
| | oleracea | RPTFIANSRVNPSSSVPPSLIRNQ | | Chem. 265, |
| | | PVFAAPAPIITPTL | | (10) 5414 |
| | | | | (1990) |
| 18 | Spinacea | MTTAVTAAVSFPSTKTTSLSARCS | 27 | Curr. Genet. |
| | oleracea | SVISPDKISYKKVPLYYRNVSATG | | 13, 517 |
| | | KMGPIRAQIASDVEAPPPAPAKVEKMS | | (1988) |
| 19 | Spinacea | MTTAVTAAVSFPSTKTTSLSARSS | 28 | |
| | oleracea | SVISPDKISYKKVPLYYRNVSATG | | |
| | | KMGPIRA | | |

[0189] Alternatively to the targeting of the YRP, e.g. proteins having the sequences shown in table II, columns 5 and 7, preferably of sequences in general encoded in the nucleus with the aid of the targeting sequences mentioned for example in table V alone or in combination with other targeting sequences preferably into the plastids, the nucleic acids of the invention can directly be introduced into the plastidic genome, e.g. for which in column 6 of table II the term “plastidic” is indicated. Therefore in a preferred embodiment the YRP gene, e.g. the nucleic acid sequences shown in table I, columns 5 and 7 are directly introduced and expressed in plastids, particularly if in column 6 of table I the term “plastidic” is indicated.

[0190] The term “introduced” in the context of this specification shall mean the insertion of a nucleic acid sequence into the organism by means of a “transfection”, “transduction” or preferably by “transformation”.

[0191] A plastid, such as a chloroplast, has been “transformed” by an exogenous (preferably foreign) nucleic acid sequence if nucleic acid sequence has been introduced into the plastid that means that this sequence has crossed the membrane or the membranes of the plastid. The foreign DNA may be integrated (covalently linked) into plastid DNA making up the genome of the plastid, or it may remain not integrated (e.g., by including a chloroplast origin of replication). “Stably” integrated DNA sequences are those, which are inherited through plastid replication, thereby transferring new plastids, with the features of the integrated DNA sequence to the progeny.

[0192] For expression a person skilled in the art is familiar with different methods to introduce the nucleic acid sequences into different organelles such as the preferred plastids. Such methods are for example disclosed by Maiga P. (Annu. Rev. Plant Biol. 55, 289 (2004)), Evans T. (WO 2004/040973), McBride K. E. et al. (U.S. Pat. No. 5,455,818), Daniell H. et al. (U.S. Pat. No. 5,932,479 and U.S. Pat. No. 5,693,507) and Straub J. M. et al. (U.S. Pat. No. 6,781,033). A preferred method is the transformation of microspore-derived hypocotyl or cotyledonary tissue (which are green and thus contain numerous plastids) leaf tissue and afterwards the regeneration of shoots from said transformed plant material on selective medium. As methods for the transformation bombarding of the plant material or the use of independently replicating shuttle vectors are well known by the skilled worker. But also a PEG-mediated transformation of the plastids or Agrobacterium transformation with binary vectors is possible. Useful markers for the transformation of plastids are positive selection markers for example the chloramphenicol-, streptomycin-, kanamycin-, neomycin-, amikamycin-, spectinomycin-, triazine- and/or lincomycin-tolerance genes. As additional markers named in the literature often as secondary markers, genes coding for the tolerance against herbicides such as phosphinothricin (=glufosinate, BASTA™, Liberty™, encoded by the bar gene), glyphosate (═N-(phosphonomethyl)glycine, Roundup™, encoded by the 5-enolpyruvylshikimate-3-phosphate synthase gene=epsps), sulfonylureas (like Staple™, encoded by the acetolactate synthase (ALS) gene), imidazolinones [=IMI, like imazethapyr, imazamox, Clearfield™ encoded by the acetohydroxyacid synthase (AHAS) gene, also known as acetolactate synthase (ALS) gene] or bromoxynil (=Buctril™, encoded by the oxy gene) or genes coding for antibiotics such as hygromycin or G418 are useful for further selection. Such secondary markers are useful in the case when most genome copies are transformed. In addition negative selection markers such as the bacterial cytosine deaminase (encoded by the codA gene) are also useful for the transformation of plastids.

[0193] To increase the possibility of identification of transformants it is also desirable to use reporter genes other then the aforementioned tolerance genes or in addition to said genes. Reporter genes are for example β-galactosidase-, β-glucuronidase-(GUS), alkaline phosphatase- and/or green-fluorescent protein-genes (GFP).

[0194] By transforming the plastids the intraspecies specific transgene flow is blocked, because a lot of species such as corn, cotton and rice have a strict maternal inheritance of plastids. By placing the YRP gene, e.g. the genes specified in table I, columns 5 and 7, e.g. if for the nucleic acid molecule in column 6 of table I the term “plastidic” is indicated, or active fragments thereof in the plastids of plants, these genes will not be present in the pollen of said plants.

[0195] A further embodiment of the invention relates to the use of so called “chloroplast localization sequences”, in which a first RNA sequence or molecule is capable of transporting or “chaperoning” a second RNA sequence, such as a RNA sequence transcribed from the YRP gene, e.g. the sequences depicted in table I, columns 5 and 7 or a sequence encoding a YRP, e.g. the protein, as depicted in table II, columns 5 and 7, from an external environment inside a cell or outside a plastid into a chloroplast. In one embodiment the chloroplast localization signal is substantially similar or complementary to a complete or intact viroid sequence, e.g. if for the polypeptide in column 6 of table II the term “plastidic” is indicated. The chloroplast localization signal may be encoded by a DNA sequence, which is transcribed into the chloroplast localization RNA. The term “viroid” refers to a naturally occurring single stranded RNA molecule (Flores, C. R. Acad Sci III. 324 (10), 943 (2001)). Viroids usually contain about 200-500 nucleotides and generally exist as circular molecules.

[0196] Examples of viroids that contain chloroplast localization signals include but are not limited to ASBVd, PLMVd, CChMVd and ELVd. The viroid sequence or a functional part of it can be fused to a YRP gene, e.g. the sequences depicted in table I, columns 5 and 7 or a sequence encoding a YRP, e.g. the protein as depicted in table II, columns 5 and 7, in such a manner that the viroid sequence transports a sequence transcribed from a YRP gene, e.g. the sequence as depicted in table I, columns 5 and 7 or a sequence encoding a YRP, e.g. the protein as depicted in table II, columns 5 and 7 into the chloroplasts, e.g. e.g. if for said nucleic acid molecule or polynucleotide in column 6 of table I or II the term “plastidic” is indicated. A preferred embodiment uses a modified ASBVd (Navarro et al., Virology. 268 (1), 218 (2000)).

[0197] In a further specific embodiment the protein to be expressed in the plastids such as the YRP, e.g. the proteins depicted in table II, columns 5 and 7, e.g. if for the polypeptide in column 6 of table II the term “plastidic” is indicated, are encoded by different nucleic acids. Such a method is disclosed in WO 2004/040973, which shall be incorporated by reference. WO 2004/040973 teaches a method, which relates to the translocation of an RNA corresponding to a gene or gene fragment into the chloroplast by means of a chloroplast localization sequence. The genes, which should be expressed in the plant or plants cells, are split into nucleic acid fragments, which are introduced into different compartments in the plant e.g. the nucleus, the plastids and/or mitochondria. Additionally plant cells are described in which the chloroplast contains a ribozyme fused at one end to an RNA encoding a fragment of a protein used in the inventive process such that the ribozyme can trans-splice the translocated fusion RNA to the RNA encoding the gene fragment to form and as the case may be reunite the nucleic acid fragments to an intact mRNA encoding a functional protein for example as disclosed in table II, columns 5 and 7.

[0198] In another embodiment of the invention the YRP gene, e.g. the nucleic acid molecules as shown in table I, columns 5 and 7, e.g. if in column 6 of table I the term “plastidic” is indicated, used in the inventive process are transformed into plastids, which are metabolic active. Those plastids should preferably maintain at a high copy number in the plant or plant tissue of interest, most preferably the chloroplasts found in green plant tissues, such as leaves or cotyledons or in seeds.

[0199] In another embodiment of the invention the YRP gene, e.g. the nucleic acid molecules as shown in table I, columns 5 and 7, e.g. if in column 6 of table I the term “mitochondric” is indicated, used in the inventive process are transformed into mitochondria, which are metabolic active.

[0200] For a good expression in the plastids the YRP gene, e.g. the nucleic acid sequences as shown in table I, columns 5 and 7, e.g. if in column 6 of table I the term “plastidic” is indicated, are introduced into an expression cassette using a preferably a promoter and terminator, which are active in plastids, preferably a chloroplast promoter. Examples of such promoters include the psbA promoter from the gene from spinach or pea, the rbcL promoter, and the atpB promoter from corn.

[0201] Surprisingly it was found, that the transgenic expression of the Saccharomyces cerevisiae, E. coli, Synechocystis, Populus trichocarpa, Azotobacter vinelandii or A. thaliana YRP, e.g. as shown in table II, column 3, in a plant such as A. thaliana for example, conferred increased yield, e.g. an increased yield-related trait, for example enhanced tolerance to abiotic environmental stress, increased nutrient use efficiency, increased drought tolerance, low temperature tolerance and/or another increased yield-related trait to the trans-genic plant cell, plant or a part thereof as compared to a corresponding, e.g. non-transformed, wild type plant.

[0202] Accordingly, in one embodiment, an increased yield as compared to a correspondingly non-modified, e.g. a non-transformed, wild type plant is conferred according to method of the invention, by increasing or generating the activity of a polypeptide comprising the yield-related polypeptide shown in SEQ ID NO.: 64, or encoded by the yield-related nucleic acid molecule (or gene) comprising the nucleic acid shown in SEQ ID NO.: 63, or a homolog of said nucleic acid molecule or polypeptide, e.g. derived from Escherichia coli. Thus, in one embodiment, the activity “B0567-protein” or the activity of a nucleic acid molecule or a polypeptide comprising the nucleic acid or polypeptide or the consensus sequence or the polypeptide motif, depicted in table I, II or IV, column 7, respective same line as SEQ ID NO.: 63, or SEQ ID NO.: 64, respectively, is increased or generated in a plant cell, plant or part thereof. Preferably, the increase occurs cytoplasmic.

[0203] In a further embodiment, an increased nutrient use efficiency compared to a corresponding non-modified, e.g. a non-transformed, wild type plant is conferred if the activity of a polypeptide comprising the polypeptide shown in SEQ ID NO. 64, or encoded by a nucleic acid molecule comprising the nucleic acid molecule shown in SEQ ID NO. 63, or a homolog of said nucleic acid molecule or polypeptide, is increased or generated. For example, the activity of a corresponding nucleic acid molecule or a polypeptide derived from Escherichia coli is increased or generated, preferably comprising the nucleic acid molecule shown in SEQ ID NO. 63 or polypeptide shown in SEQ ID NO. 64, respectively, or a homolog thereof. E.g. an increased tolerance to abiotic environmental stress, in particular increased nutrient use efficiency as compared to a corresponding non-modified, e.g. a non-transformed, wild type plant cell, a plant or a part thereof is conferred if the activity “B0567-protein or” if the activity of a nucleic acid molecule or a polypeptide comprising the nucleic acid or polypeptide or the consensus sequence or the polypeptide motif, as depicted in table I, II or IV, column 7 respective same line as SEQ ID NO. 63 or SEQ ID NO. 64, respectively, is increased or generated in a plant or part thereof. Preferably, the increase occurs cytoplasmic. In one embodiment an increased nitrogen use efficiency is conferred.

[0204] Particularly, an increase of yield from 1.05-fold to 1.79-fold, for example plus at least 100% thereof, under conditions of nitrogen deficiency is conferred compared to a corresponding non-modified, e.g. non-transformed, wild type plant.

[0205] In a further embodiment, an increased intrinsic yield, compared to a corresponding non-modified, e.g. a non-transformed, wild type plant is conferred if the activity of a polypeptide comprising the polypeptide shown in SEQ ID NO. 64, or encoded by a nucleic acid molecule comprising the nucleic acid molecule shown in SEQ ID NO. 63, or a homolog of said nucleic acid molecule or polypeptide, is increased or generated. For example, the activity of a corresponding nucleic acid molecule or a polypeptide derived from Escherichia coli is increased or generated, preferably comprising the nucleic acid molecule shown in SEQ ID NO. 63 or polypeptide shown in SEQ ID NO. 64, respectively, or a homolog thereof. E.g. an increased intrinsic yield, compared to a corresponding non-modified, e.g. a non-transformed, wild type plant is conferred if the activity “B0567-protein” or if the activity of a nucleic acid molecule or a polypeptide comprising the nucleic acid or polypeptide or the consensus sequence or the polypeptide motif, depicted in table I, II or IV, column 7, respective same line as SEQ ID NO.: 63 or SEQ ID NO.: 64, respectively, is increased or generated in a plant or part thereof. Preferably, the increase occurs cytoplasmic. Particularly, an increase of yield from 1.05-fold to 1.120-fold, for example plus at least 100% thereof, under standard conditions, e.g. in the absence of nutrient deficiency and/or stress conditions is conferred compared to a corresponding control, e.g. an non-modified, e.g. non-transformed, wild type plant.

[0206] Accordingly, in one embodiment, an increased yield as compared to a correspondingly non-modified, e.g. a non-transformed, wild type plant is conferred according to method of the invention, by increasing or generating the activity of a polypeptide comprising the yield-related polypeptide shown in SEQ ID NO.: 82, or encoded by the yield-related nucleic acid molecule (or gene) comprising the nucleic acid shown in SEQ ID NO.: 81, or a homolog of said nucleic acid molecule or polypeptide, e.g. derived from Escherichia coli. Thus, in one embodiment, the activity “ribosome modulation factor” or the activity of a nucleic acid molecule or a polypeptide comprising the nucleic acid or polypeptide or the consensus sequence or the polypeptide motif, depicted in table I, II or IV, column 7, respective same line as SEQ ID NO.: 81, or SEQ ID NO.: 82, respectively, is increased or generated in a plant cell, plant or part thereof. Preferably, the increase occurs plastidic.

[0207] In a further embodiment, an increased nutrient use efficiency compared to a corresponding non-modified, e.g. a non-transformed, wild type plant is conferred if the activity of a polypeptide comprising the polypeptide shown in SEQ ID NO. 82, or encoded by a nucleic acid molecule comprising the nucleic acid molecule shown in SEQ ID NO. 81, or a homolog of said nucleic acid molecule or polypeptide, is increased or generated. For example, the activity of a corresponding nucleic acid molecule or a polypeptide derived from Escherichia coli is increased or generated, preferably comprising the nucleic acid molecule shown in SEQ ID NO. 81 or polypeptide shown in SEQ ID NO. 82, respectively, or a homolog thereof. E.g. an increased tolerance to abiotic environmental stress, in particular increased nutrient use efficiency as compared to a corresponding non-modified, e.g. a non-transformed, wild type plant cell, a plant or a part thereof is conferred if the activity “ribosome modulation factor or” if the activity of a nucleic acid molecule or a polypeptide comprising the nucleic acid or polypeptide or the consensus sequence or the polypeptide motif, as depicted in table I, II or IV, column 7 respective same line as SEQ ID NO. 81 or SEQ ID NO. 82, respectively, is increased or generated in a plant or part thereof. Preferably, the increase occurs plastidic. In one embodiment an increased nitrogen use efficiency is conferred.

[0208] Particularly, an increase of yield from 1.05-fold to 1.22-fold, for example plus at least 100% thereof, under conditions of nitrogen deficiency is conferred compared to a corresponding non-modified, e.g. non-transformed, wild type plant.

[0209] Accordingly, in one embodiment, an increased yield as compared to a correspondingly non-modified, e.g. a non-transformed, wild type plant is conferred according to method of the invention, by increasing or generating the activity of a polypeptide comprising the yield-related polypeptide shown in SEQ ID NO.: 139, or encoded by the yield-related nucleic acid molecule (or gene) comprising the nucleic acid shown in SEQ ID NO.: 138, or a homolog of said nucleic acid molecule or polypeptide, e.g. derived from Escherichia coli. Thus, in one embodiment, the activity “B1088-protein” or the activity of a nucleic acid molecule or a polypeptide comprising the nucleic acid or polypeptide or the consensus sequence or the polypeptide motif, depicted in table I, II or IV, column 7, respective same line as SEQ ID NO.: 138, or SEQ ID NO.: 139, respectively, is increased or generated in a plant cell, plant or part thereof. Preferably, the increase occurs cytoplasmic.

[0210] In a further embodiment, an increased nutrient use efficiency compared to a corresponding non-modified, e.g. a non-transformed, wild type plant is conferred if the activity of a polypeptide comprising the polypeptide shown in SEQ ID NO. 139, or encoded by a nucleic acid molecule comprising the nucleic acid molecule shown in SEQ ID NO. 138, or a homolog of said nucleic acid molecule or polypeptide, is increased or generated. For example, the activity of a corresponding nucleic acid molecule or a polypeptide derived from Escherichia coli is increased or generated, preferably comprising the nucleic acid molecule shown in SEQ ID NO. 138 or polypeptide shown in SEQ ID NO. 139, respectively, or a homolog thereof. E.g. an increased tolerance to abiotic environmental stress, in particular increased nutrient use efficiency as compared to a corresponding non-modified, e.g. a non-transformed, wild type plant cell, a plant or a part thereof is conferred if the activity “B1088-protein or” if the activity of a nucleic acid molecule or a polypeptide comprising the nucleic acid or polypeptide or the consensus sequence or the polypeptide motif, as depicted in table I, II or IV, column 7 respective same line as SEQ ID NO. 138 or SEQ ID NO. 139, respectively, is increased or generated in a plant or part thereof. Preferably, the increase occurs cytoplasmic. In one embodiment an increased nitrogen use efficiency is conferred.

[0211] Particularly, an increase of yield from 1.05-fold to 1.54-fold, for example plus at least 100% thereof, under conditions of nitrogen deficiency is conferred compared to a corresponding non-modified, e.g. non-transformed, wild type plant.

[0212] Accordingly, in one embodiment, an increased yield as compared to a correspondingly non-modified, e.g. a non-transformed, wild type plant is conferred according to method of the invention, by increasing or generating the activity of a polypeptide comprising the yield-related polypeptide shown in SEQ ID NO.: 201, or encoded by the yield-related nucleic acid molecule (or gene) comprising the nucleic acid shown in SEQ ID NO.: 200, or a homolog of said nucleic acid molecule or polypeptide, e.g. derived from Escherichia coli. Thus, in one embodiment, the activity “B1289-protein” or the activity of a nucleic acid molecule or a polypeptide comprising the nucleic acid or polypeptide or the consensus sequence or the polypeptide motif, depicted in table I, II or IV, column 7, respective same line as SEQ ID NO.: 200, or SEQ ID NO.: 201, respectively, is increased or generated in a plant cell, plant or part thereof. Preferably, the increase occurs cytoplasmic.

[0213] In a further embodiment, an increased nutrient use efficiency compared to a corresponding non-modified, e.g. a non-transformed, wild type plant is conferred if the activity of a polypeptide comprising the polypeptide shown in SEQ ID NO. 201, or encoded by a nucleic acid molecule comprising the nucleic acid molecule shown in SEQ ID NO. 200, or a homolog of said nucleic acid molecule or polypeptide, is increased or generated. For example, the activity of a corresponding nucleic acid molecule or a polypeptide derived from Escherichia coli is increased or generated, preferably comprising the nucleic acid molecule shown in SEQ ID NO. 200 or polypeptide shown in SEQ ID NO. 201, respectively, or a homolog thereof. E.g. an increased tolerance to abiotic environmental stress, in particular increased nutrient use efficiency as compared to a corresponding non-modified, e.g. a non-transformed, wild type plant cell, a plant or a part thereof is conferred if the activity “61289-protein or” if the activity of a nucleic acid molecule or a polypeptide comprising the nucleic acid or polypeptide or the consensus sequence or the polypeptide motif, as depicted in table I, II or IV, column 7 respective same line as SEQ ID NO. 200 or SEQ ID NO. 201, respectively, is increased or generated in a plant or part thereof. Preferably, the increase occurs cytoplasmic. In one embodiment an increased nitrogen use efficiency is conferred.

[0214] Particularly, an increase of yield from 1.05-fold to 1.25-fold, for example plus at least 100% thereof, under conditions of nitrogen deficiency is conferred compared to a corresponding non-modified, e.g. non-transformed, wild type plant.

[0215] Accordingly, in one embodiment, an increased yield as compared to a correspondingly non-modified, e.g. a non-transformed, wild type plant is conferred according to method of the invention, by increasing or generating the activity of a polypeptide comprising the yield-related polypeptide shown in SEQ ID NO.: 290, or encoded by the yield-related nucleic acid molecule (or gene) comprising the nucleic acid shown in SEQ ID NO.: 289, or a homolog of said nucleic acid molecule or polypeptide, e.g. derived from Escherichia coli. Thus, in one embodiment, the activity “glycine cleavage complex lipoylprotein” or the activity of a nucleic acid molecule or a polypeptide comprising the nucleic acid or polypeptide or the consensus sequence or the polypeptide motif, depicted in table I, II or IV, column 7, respective same line as SEQ ID NO.: 289, or SEQ ID NO.: 290, respectively, is increased or generated in a plant cell, plant or part thereof. Preferably, the increase occurs cytoplasmic.

[0216] In a further embodiment, an increased nutrient use efficiency compared to a corresponding non-modified, e.g. a non-transformed, wild type plant is conferred if the activity of a polypeptide comprising the polypeptide shown in SEQ ID NO. 290, or encoded by a nucleic acid molecule comprising the nucleic acid molecule shown in SEQ ID NO. 289, or a homolog of said nucleic acid molecule or polypeptide, is increased or generated. For example, the activity of a corresponding nucleic acid molecule or a polypeptide derived from Escherichia coli is increased or generated, preferably comprising the nucleic acid molecule shown in SEQ ID NO. 289 or polypeptide shown in SEQ ID NO. 290, respectively, or a homolog thereof. E.g. an increased tolerance to abiotic environmental stress, in particular increased nutrient use efficiency as compared to a corresponding non-modified, e.g. a non-transformed, wild type plant cell, a plant or a part thereof is conferred if the activity “glycine cleavage complex lipoylprotein or” if the activity of a nucleic acid molecule or a polypeptide comprising the nucleic acid or polypeptide or the consensus sequence or the polypeptide motif, as depicted in table I, II or IV, column 7 respective same line as SEQ ID NO. 289 or SEQ ID NO. 290, respectively, is increased or generated in a plant or part thereof. Preferably, the increase occurs cytoplasmic. In one embodiment an increased nitrogen use efficiency is conferred.

[0217] Particularly, an increase of yield from 1.05-fold to 1.45-fold, for example plus at least 100% thereof, under conditions of nitrogen deficiency is conferred compared to a corresponding non-modified, e.g. non-transformed, wild type plant.

[0218] Accordingly, in one embodiment, an increased yield as compared to a correspondingly non-modified, e.g. a non-transformed, wild type plant is conferred according to method of the invention, by increasing or generating the activity of a polypeptide comprising the yield-related polypeptide shown in SEQ ID NO.: 821, or encoded by the yield-related nucleic acid molecule (or gene) comprising the nucleic acid shown in SEQ ID NO.: 820, or a homolog of said nucleic acid molecule or polypeptide, e.g. derived from Escherichia coli. Thus, in one embodiment, the activity “3-dehydroquinate synthase” or the activity of a nucleic acid molecule or a polypeptide comprising the nucleic acid or polypeptide or the consensus sequence or the polypeptide motif, depicted in table I, II or IV, column 7, respective same line as SEQ ID NO.: 820, or SEQ ID NO.: 821, respectively, is increased or generated in a plant cell, plant or part thereof. Preferably, the increase occurs plastidic.

[0219] In a further embodiment, an increased nutrient use efficiency compared to a corresponding non-modified, e.g. a non-transformed, wild type plant is conferred if the activity of a polypeptide comprising the polypeptide shown in SEQ ID NO. 821, or encoded by a nucleic acid molecule comprising the nucleic acid molecule shown in SEQ ID NO. 820, or a homolog of said nucleic acid molecule or polypeptide, is increased or generated. For example, the activity of a corresponding nucleic acid molecule or a polypeptide derived from Escherichia coli is increased or generated, preferably comprising the nucleic acid molecule shown in SEQ ID NO. 820 or polypeptide shown in SEQ ID NO. 821, respectively, or a homolog thereof. E.g. an increased tolerance to abiotic environmental stress, in particular increased nutrient use efficiency as compared to a corresponding non-modified, e.g. a non-transformed, wild type plant cell, a plant or a part thereof is conferred if the activity “3-dehydroquinate synthase or” if the activity of a nucleic acid molecule or a polypeptide comprising the nucleic acid or polypeptide or the consensus sequence or the polypeptide motif, as depicted in table I, II or IV, column 7 respective same line as SEQ ID NO. 820 or SEQ ID NO. 821, respectively, is increased or generated in a plant or part thereof. Preferably, the increase occurs plastidic. In one embodiment an increased nitrogen use efficiency is conferred.

[0220] Particularly, an increase of yield from 1.05-fold to 1.15-fold, for example plus at least 100% thereof, under conditions of nitrogen deficiency is conferred compared to a corresponding non-modified, e.g. non-transformed, wild type plant.

[0221] Accordingly, in one embodiment, an increased yield as compared to a correspondingly non-modified, e.g. a non-transformed, wild type plant is conferred according to method of the invention, by increasing or generating the activity of a polypeptide comprising the yield-related polypeptide shown in SEQ ID NO.: 1296, or encoded by the yield-related nucleic acid molecule (or gene) comprising the nucleic acid shown in SEQ ID NO.: 1295, or a homolog of said nucleic acid molecule or polypeptide, e.g. derived from Escherichia coli. Thus, in one embodiment, the activity “ketodeoxygluconokinase” or the activity of a nucleic acid molecule or a polypeptide comprising the nucleic acid or polypeptide or the consensus sequence or the polypeptide motif, depicted in table I, II or IV, column 7, respective same line as SEQ ID NO.: 1295, or SEQ ID NO.: 1296, respectively, is increased or generated in a plant cell, plant or part thereof. Preferably, the increase occurs plastidic.

[0222] In a further embodiment, an increased nutrient use efficiency compared to a corresponding non-modified, e.g. a non-transformed, wild type plant is conferred if the activity of a polypeptide comprising the polypeptide shown in SEQ ID NO. 1296, or encoded by a nucleic acid molecule comprising the nucleic acid molecule shown in SEQ ID NO. 1295, or a homolog of said nucleic acid molecule or polypeptide, is increased or generated. For example, the activity of a corresponding nucleic acid molecule or a polypeptide derived from Escherichia coli is increased or generated, preferably comprising the nucleic acid molecule shown in SEQ ID NO. 1295 or polypeptide shown in SEQ ID NO. 1296, respectively, or a homolog thereof. E.g. an increased tolerance to abiotic environmental stress, in particular increased nutrient use efficiency as compared to a corresponding non-modified, e.g. a non-transformed, wild type plant cell, a plant or a part thereof is conferred if the activity “ketodeoxygluconokinase or” if the activity of a nucleic acid molecule or a polypeptide comprising the nucleic acid or polypeptide or the consensus sequence or the polypeptide motif, as depicted in table I, II or IV, column 7 respective same line as SEQ ID NO. 1295 or SEQ ID NO. 1296, respectively, is increased or generated in a plant or part thereof. Preferably, the increase occurs plastidic. In one embodiment an increased nitrogen use efficiency is conferred.

[0223] Particularly, an increase of yield from 1.05-fold to 1.29-fold, for example plus at least 100% thereof, under conditions of nitrogen deficiency is conferred compared to a corresponding non-modified, e.g. non-transformed, wild type plant.

[0224] In a further embodiment, an increased intrinsic yield, compared to a corresponding non-modified, e.g. a non-transformed, wild type plant is conferred if the activity of a polypeptide comprising the polypeptide shown in SEQ ID NO. 1296, or encoded by a nucleic acid molecule comprising the nucleic acid molecule shown in SEQ ID NO. 1295, or a homolog of said nucleic acid molecule or polypeptide, is increased or generated. For example, the activity of a corresponding nucleic acid molecule or a polypeptide derived from Escherichia coli is increased or generated, preferably comprising the nucleic acid molecule shown in SEQ ID NO. 1295 or polypeptide shown in SEQ ID NO. 1296, respectively, or a homolog thereof. E.g. an increased intrinsic yield, compared to a corresponding non-modified, e.g. a non-transformed, wild type plant is conferred if the activity “ketodeoxygluconokinase” or if the activity of a nucleic acid molecule or a polypeptide comprising the nucleic acid or polypeptide or the consensus sequence or the polypeptide motif, depicted in table I, II or IV, column 7, respective same line as SEQ ID NO.: 1295 or SEQ ID NO.: 1296, respectively, is increased or generated in a plant or part thereof. Preferably, the increase occurs plastidic. Particularly, an increase of yield from 1.05-fold to 1.208-fold, for example plus at least 100% thereof, under standard conditions, e.g. in the absence of nutrient deficiency and/or stress conditions is conferred compared to a corresponding control, e.g. an non-modified, e.g. non-transformed, wild type plant.

[0225] Accordingly, in one embodiment, an increased yield as compared to a correspondingly non-modified, e.g. a non-transformed, wild type plant is conferred according to method of the invention, by increasing or generating the activity of a polypeptide comprising the yield-related polypeptide shown in SEQ ID NO.: 1366, or encoded by the yield-related nucleic acid molecule (or gene) comprising the nucleic acid shown in SEQ ID NO.: 1365, or a homolog of said nucleic acid molecule or polypeptide, e.g. derived from Escherichia coli. Thus, in one embodiment, the activity “rhodanese-related sulfurtransferase” or the activity of a nucleic acid molecule or a polypeptide comprising the nucleic acid or polypeptide or the consensus sequence or the polypeptide motif, depicted in table I, II or IV, column 7, respective same line as SEQ ID NO.: 1365, or SEQ ID NO.: 1366, respectively, is increased or generated in a plant cell, plant or part thereof. Preferably, the increase occurs cytoplasmic.

[0226] In a further embodiment, an increased nutrient use efficiency compared to a corresponding non-modified, e.g. a non-transformed, wild type plant is conferred if the activity of a polypeptide comprising the polypeptide shown in SEQ ID NO. 1366, or encoded by a nucleic acid molecule comprising the nucleic acid molecule shown in SEQ ID NO. 1365, or a homolog of said nucleic acid molecule or polypeptide, is increased or generated. For example, the activity of a corresponding nucleic acid molecule or a polypeptide derived from Escherichia coli is increased or generated, preferably comprising the nucleic acid molecule shown in SEQ ID NO. 1365 or polypeptide shown in SEQ ID NO. 1366, respectively, or a homolog thereof. E.g. an increased tolerance to abiotic environmental stress, in particular increased nutrient use efficiency as compared to a corresponding non-modified, e.g. a non-transformed, wild type plant cell, a plant or a part thereof is conferred if the activity “rhodanese-related sulfurtransferase or” if the activity of a nucleic acid molecule or a polypeptide comprising the nucleic acid or polypeptide or the consensus sequence or the polypeptide motif, as depicted in table I, II or IV, column 7 respective same line as SEQ ID NO. 1365 or SEQ ID NO. 1366, respectively, is increased or generated in a plant or part thereof. Preferably, the increase occurs cytoplasmic. In one embodiment an increased nitrogen use efficiency is conferred.

[0227] Particularly, an increase of yield from 1.05-fold to 1.46-fold, for example plus at least 100% thereof, under conditions of nitrogen deficiency is conferred compared to a corresponding non-modified, e.g. non-transformed, wild type plant.

[0228] In a further embodiment, an increased intrinsic yield, compared to a corresponding non-modified, e.g. a non-transformed, wild type plant is conferred if the activity of a polypeptide comprising the polypeptide shown in SEQ ID NO. 1366, or encoded by a nucleic acid molecule comprising the nucleic acid molecule shown in SEQ ID NO. 1365, or a homolog of said nucleic acid molecule or polypeptide, is increased or generated. For example, the activity of a corresponding nucleic acid molecule or a polypeptide derived from Escherichia coli is increased or generated, preferably comprising the nucleic acid molecule shown in SEQ ID NO. 1365 or polypeptide shown in SEQ ID NO. 1366, respectively, or a homolog thereof. E.g. an increased intrinsic yield, compared to a corresponding non-modified, e.g. a non-transformed, wild type plant is conferred if the activity “rhodanese-related sulfurtransferase” or if the activity of a nucleic acid molecule or a polypeptide comprising the nucleic acid or polypeptide or the consensus sequence or the polypeptide motif, depicted in table I, II or IV, column 7, respective same line as SEQ ID NO.: 1365 or SEQ ID NO.: 1366, respectively, is increased or generated in a plant or part thereof. Preferably, the increase occurs cytoplasmic. Particularly, an increase of yield from 1.05-fold to 1.208-fold, for example plus at least 100% thereof, under standard conditions, e.g. in the absence of nutrient deficiency and/or stress conditions is conferred compared to a corresponding control, e.g. an non-modified, e.g. non-transformed, wild type plant.

[0229] Accordingly, in one embodiment, an increased yield as compared to a correspondingly non-modified, e.g. a non-transformed, wild type plant is conferred according to method of the invention, by increasing or generating the activity of a polypeptide comprising the yield-related polypeptide shown in SEQ ID NO.: 1454, or encoded by the yield-related nucleic acid molecule (or gene) comprising the nucleic acid shown in SEQ ID NO.: 1453, or a homolog of said nucleic acid molecule or polypeptide, e.g. derived from Escherichia coli. Thus, in one embodiment, the activity “asparagine synthetase A” or the activity of a nucleic acid molecule or a polypeptide comprising the nucleic acid or polypeptide or the consensus sequence or the polypeptide motif, depicted in table I, II or IV, column 7, respective same line as SEQ ID NO.: 1453, or SEQ ID NO.: 1454, respectively, is increased or generated in a plant cell, plant or part thereof. Preferably, the increase occurs plastidic.

[0230] In a further embodiment, an increased nutrient use efficiency compared to a corresponding non-modified, e.g. a non-transformed, wild type plant is conferred if the activity of a polypeptide comprising the polypeptide shown in SEQ ID NO. 1454, or encoded by a nucleic acid molecule comprising the nucleic acid molecule shown in SEQ ID NO. 1453, or a homolog of said nucleic acid molecule or polypeptide, is increased or generated. For example, the activity of a corresponding nucleic acid molecule or a polypeptide derived from Escherichia coli is increased or generated, preferably comprising the nucleic acid molecule shown in SEQ ID NO. 1453 or polypeptide shown in SEQ ID NO. 1454, respectively, or a homolog thereof. E.g. an increased tolerance to abiotic environmental stress, in particular increased nutrient use efficiency as compared to a corresponding non-modified, e.g. a non-transformed, wild type plant cell, a plant or a part thereof is conferred if the activity “asparagine synthetase A or” if the activity of a nucleic acid molecule or a polypeptide comprising the nucleic acid or polypeptide or the consensus sequence or the polypeptide motif, as depicted in table I, II or IV, column 7 respective same line as SEQ ID NO. 1453 or SEQ ID NO. 1454, respectively, is increased or generated in a plant or part thereof. Preferably, the increase occurs plastidic. In one embodiment an increased nitrogen use efficiency is conferred

[0231] Particularly, an increase of yield from 1.05-fold to 1.23-fold, for example plus at least 100% thereof, under conditions of nitrogen deficiency is conferred compared to a corresponding non-modified, e.g. non-transformed, wild type plant.

[0232] Accordingly, in one embodiment, an increased yield as compared to a correspondingly non-modified, e.g. a non-transformed, wild type plant is conferred according to method of the invention, by increasing or generating the activity of a polypeptide comprising the yield-related polypeptide shown in SEQ ID NO.: 1558, or encoded by the yield-related nucleic acid molecule (or gene) comprising the nucleic acid shown in SEQ ID NO.: 1557, or a homolog of said nucleic acid molecule or polypeptide, e.g. derived from Escherichia coli. Thus, in one embodiment, the activity “sensory histidine kinase” or the activity of a nucleic acid molecule or a polypeptide comprising the nucleic acid or polypeptide or the consensus sequence or the polypeptide motif, depicted in table I, II or IV, column 7, respective same line as SEQ ID NO.: 1557, or SEQ ID NO.: 1558, respectively, is increased or generated in a plant cell, plant or part thereof. Preferably, the increase occurs plastidic.

[0233] In a further embodiment, an increased nutrient use efficiency compared to a corresponding non-modified, e.g. a non-transformed, wild type plant is conferred if the activity of a polypeptide comprising the polypeptide shown in SEQ ID NO. 1558, or encoded by a nucleic acid molecule comprising the nucleic acid molecule shown in SEQ ID NO. 1557, or a homolog of said nucleic acid molecule or polypeptide, is increased or generated. For example, the activity of a corresponding nucleic acid molecule or a polypeptide derived from Escherichia coli is increased or generated, preferably comprising the nucleic acid molecule shown in SEQ ID NO. 1557 or polypeptide shown in SEQ ID NO. 1558, respectively, or a homolog thereof. E.g. an increased tolerance to abiotic environmental stress, in particular increased nutrient use efficiency as compared to a corresponding non-modified, e.g. a non-transformed, wild type plant cell, a plant or a part thereof is conferred if the activity “sensory histidine kinase or” if the activity of a nucleic acid molecule or a polypeptide comprising the nucleic acid or polypeptide or the consensus sequence or the polypeptide motif, as depicted in table I, II or IV, column 7 respective same line as SEQ ID NO. 1557 or SEQ ID NO. 1558, respectively, is increased or generated in a plant or part thereof. Preferably, the increase occurs plastidic. In one embodiment an increased nitrogen use efficiency is conferred.

[0234] Particularly, an increase of yield from 1.05-fold to 1.25-fold, for example plus at least 100% thereof, under conditions of nitrogen deficiency is conferred compared to a corresponding non-modified, e.g. non-transformed, wild type plant.

[0235] Accordingly, in one embodiment, an increased yield as compared to a correspondingly non-modified, e.g. a non-transformed, wild type plant is conferred according to method of the invention, by increasing or generating the activity of a polypeptide comprising the yield-related polypeptide shown in SEQ ID NO.: 1749, or encoded by the yield-related nucleic acid molecule (or gene) comprising the nucleic acid shown in SEQ ID NO.: 1748, or a homolog of said nucleic acid molecule or polypeptide, e.g. derived from Escherichia coli. Thus, in one embodiment, the activity “5-keto-D-gluconate-5-reductase” or the activity of a nucleic acid molecule or a polypeptide comprising the nucleic acid or polypeptide or the consensus sequence or the polypeptide motif, depicted in table I, II or IV, column 7, respective same line as SEQ ID NO.: 1748, or SEQ ID NO.: 1749, respectively, is increased or generated in a plant cell, plant or part thereof. Preferably, the increase occurs cytoplasmic.

[0236] In a further embodiment, an increased nutrient use efficiency compared to a corresponding non-modified, e.g. a non-transformed, wild type plant is conferred if the activity of a polypeptide comprising the polypeptide shown in SEQ ID NO. 1749, or encoded by a nucleic acid molecule comprising the nucleic acid molecule shown in SEQ ID NO. 1748, or a homolog of said nucleic acid molecule or polypeptide, is increased or generated. For example, the activity of a corresponding nucleic acid molecule or a polypeptide derived from Escherichia coli is increased or generated, preferably comprising the nucleic acid molecule shown in SEQ ID NO. 1748 or polypeptide shown in SEQ ID NO. 1749, respectively, or a homolog thereof. E.g. an increased tolerance to abiotic environmental stress, in particular increased nutrient use efficiency as compared to a corresponding non-modified, e.g. a non-transformed, wild type plant cell, a plant or a part thereof is conferred if the activity “5-keto-D-gluconate-5-reductase or” if the activity of a nucleic acid molecule or a polypeptide comprising the nucleic acid or polypeptide or the consensus sequence or the polypeptide motif, as depicted in table I, II or IV, column 7 respective same line as SEQ ID NO. 1748 or SEQ ID NO. 1749, respectively, is increased or generated in a plant or part thereof. Preferably, the increase occurs cytoplasmic. In one embodiment an increased nitrogen use efficiency is conferred.

[0237] Particularly, an increase of yield from 1.05-fold to 1.79-fold, for example plus at least 100% thereof, under conditions of nitrogen deficiency is conferred compared to a corresponding non-modified, e.g. non-transformed, wild type plant.

[0238] Accordingly, in one embodiment, an increased yield as compared to a correspondingly non-modified, e.g. a non-transformed, wild type plant is conferred according to method of the invention, by increasing or generating the activity of a polypeptide comprising the yield-related polypeptide shown in SEQ ID NO.: 2147, or encoded by the yield-related nucleic acid molecule (or gene) comprising the nucleic acid shown in SEQ ID NO.: 2146, or a homolog of said nucleic acid molecule or polypeptide, e.g. derived from Synechocystis sp. Thus, in one embodiment, the activity “aspartate 1-decarboxylase precursor” or the activity of a nucleic acid molecule or a polypeptide comprising the nucleic acid or polypeptide or the consensus sequence or the polypeptide motif, depicted in table I, II or IV, column 7, respective same line as SEQ ID NO.: 2146, or SEQ ID NO.: 2147, respectively, is increased or generated in a plant cell, plant or part thereof. Preferably, the increase occurs cytoplasmic.

[0239] In a further embodiment, an increased tolerance to abiotic environmental stress, in particular increased low temperature tolerance, compared to a corresponding non-modified, e.g. a non-transformed, wild type plant is conferred if the activity of a polypeptide comprising the polypeptide shown in SEQ ID NO. 2147, or encoded by a nucleic acid molecule comprising the nucleic acid molecule shown in SEQ ID NO. 2146, or a homolog of said nucleic acid molecule or polypeptide, is increased or generated. For example, the activity of a corresponding nucleic acid molecule or a polypeptide derived from Synechocystis sp. is increased or generated, preferably comprising the nucleic acid molecule shown in SEQ ID NO. 2146 or polypeptide shown in SEQ ID NO. 2147, respectively, or a homolog thereof. E.g. an increased tolerance to abiotic environmental stress, in particular increased low temperature tolerance, compared to a corresponding non-modified, e.g. a non-transformed, wild type plant is conferred if the activity “aspartate 1-decarboxylase precursor” or if the activity of a nucleic acid molecule or a polypeptide comprising the nucleic acid or polypeptide or the consensus sequence or the polypeptide motif, depicted in table I, II or IV, column 7, respective same line as SEQ ID NO.: 2146 or SEQ ID NO.: 2147, respectively, is increased or generated in a plant or part thereof. Preferably, the increase occurs cytoplasmic. Particularly, an increase of yield from 1.05-fold to 1.145-fold, for example plus at least 100% thereof, under conditions of low temperature is conferred compared to a corresponding non-modified, e.g. non-transformed, wild type plant.

[0240] In a further embodiment, an increased nutrient use efficiency compared to a corresponding non-modified, e.g. a non-transformed, wild type plant is conferred if the activity of a polypeptide comprising the polypeptide shown in SEQ ID NO. 2147, or encoded by a nucleic acid molecule comprising the nucleic acid molecule shown in SEQ ID NO. 2146, or a homolog of said nucleic acid molecule or polypeptide, is increased or generated. For example, the activity of a corresponding nucleic acid molecule or a polypeptide derived from Synechocystis sp. is increased or generated, preferably comprising the nucleic acid molecule shown in SEQ ID NO. 2146 or polypeptide shown in SEQ ID NO. 2147, respectively, or a homolog thereof. E.g. an increased tolerance to abiotic environmental stress, in particular increased nutrient use efficiency as compared to a corresponding non-modified, e.g. a non-transformed, wild type plant cell, a plant or a part thereof is conferred if the activity “aspartate 1-decarboxylase precursor or” if the activity of a nucleic acid molecule or a polypeptide comprising the nucleic acid or polypeptide or the consensus sequence or the polypeptide motif, as depicted in table I, II or IV, column 7 respective same line as SEQ ID NO. 2146 or SEQ ID NO. 2147, respectively, is increased or generated in a plant or part thereof. Preferably, the increase occurs cytoplasmic. In one embodiment an increased nitrogen use efficiency is conferred.

[0241] Particularly, an increase of yield from 1.05-fold to 1.72-fold, for example plus at least 100% thereof, under conditions of nitrogen deficiency is conferred compared to a corresponding non-modified, e.g. non-transformed, wild type plant.

[0242] Accordingly, in one embodiment, an increased yield as compared to a correspondingly non-modified, e.g. a non-transformed, wild type plant is conferred according to method of the invention, by increasing or generating the activity of a polypeptide comprising the yield-related polypeptide shown in SEQ ID NO.: 2417, or encoded by the yield-related nucleic acid molecule (or gene) comprising the nucleic acid shown in SEQ ID NO.: 2416, or a homolog of said nucleic acid molecule or polypeptide, e.g. derived from Saccharomyces cerevisiae. Thus, in one embodiment, the activity “tRNA ligase” or the activity of a nucleic acid molecule or a polypeptide comprising the nucleic acid or polypeptide or the consensus sequence or the polypeptide motif, depicted in table I, II or IV, column 7, respective same line as SEQ ID NO.: 2416, or SEQ ID NO.: 2417, respectively, is increased or generated in a plant cell, plant or part thereof. Preferably, the increase occurs cytoplasmic.

[0243] In a further embodiment, an increased nutrient use efficiency compared to a corresponding non-modified, e.g. a non-transformed, wild type plant is conferred if the activity of a polypeptide comprising the polypeptide shown in SEQ ID NO. 2417, or encoded by a nucleic acid molecule comprising the nucleic acid molecule shown in SEQ ID NO. 2416, or a homolog of said nucleic acid molecule or polypeptide, is increased or generated. For example, the activity of a corresponding nucleic acid molecule or a polypeptide derived from Saccharomyces cerevisiae is increased or generated, preferably comprising the nucleic acid molecule shown in SEQ ID NO. 2416 or polypeptide shown in SEQ ID NO. 2417, respectively, or a homolog thereof. E.g. an increased tolerance to abiotic environmental stress, in particular increased nutrient use efficiency as compared to a corresponding non-modified, e.g. a non-transformed, wild type plant cell, a plant or a part thereof is conferred if the activity “tRNA ligase or” if the activity of a nucleic acid molecule or a polypeptide comprising the nucleic acid or polypeptide or the consensus sequence or the polypeptide motif, as depicted in table I, II or IV, column 7 respective same line as SEQ ID NO. 2416 or SEQ ID NO. 2417, respectively, is increased or generated in a plant or part thereof. Preferably, the increase occurs cytoplasmic. In one embodiment an increased nitrogen use efficiency is conferred.

[0244] Particularly, an increase of yield from 1.05-fold to 1.44-fold, for example plus at least 100% thereof, under conditions of nitrogen deficiency is conferred compared to a corresponding non-modified, e.g. non-transformed, wild type plant.

[0245] In a further embodiment, an increased intrinsic yield, compared to a corresponding non-modified, e.g. a non-transformed, wild type plant is conferred if the activity of a polypeptide comprising the polypeptide shown in SEQ ID NO. 2417, or encoded by a nucleic acid molecule comprising the nucleic acid molecule shown in SEQ ID NO. 2416, or a homolog of said nucleic acid molecule or polypeptide, is increased or generated. For example, the activity of a corresponding nucleic acid molecule or a polypeptide derived from Saccharomyces cerevisiae is increased or generated, preferably comprising the nucleic acid molecule shown in SEQ ID NO. 2416 or polypeptide shown in SEQ ID NO. 2417, respectively, or a homolog thereof. E.g. an increased intrinsic yield, compared to a corresponding non-modified, e.g. a non-transformed, wild type plant is conferred if the activity “tRNA ligase” or if the activity of a nucleic acid molecule or a polypeptide comprising the nucleic acid or polypeptide or the consensus sequence or the polypeptide motif, depicted in table I, II or IV, column 7, respective same line as SEQ ID NO.: 2416 or SEQ ID NO.: 2417, respectively, is increased or generated in a plant or part thereof. Preferably, the increase occurs cytoplasmic. Particularly, an increase of yield from 1.05-fold to 1.323-fold, for example plus at least 100% thereof, under standard conditions, e.g. in the absence of nutrient deficiency and/or stress conditions is conferred compared to a corresponding control, e.g. an non-modified, e.g. non-transformed, wild type plant.

[0246] Accordingly, in one embodiment, an increased yield as compared to a correspondingly non-modified, e.g. a non-transformed, wild type plant is conferred according to method of the invention, by increasing or generating the activity of a polypeptide comprising the yield-related polypeptide shown in SEQ ID NO.: 2451, or encoded by the yield-related nucleic acid molecule (or gene) comprising the nucleic acid shown in SEQ ID NO.: 2450, or a homolog of said nucleic acid molecule or polypeptide, e.g. derived from Saccharomyces cerevisiae. Thus, in one embodiment, the activity “mitotic check point protein” or the activity of a nucleic acid molecule or a polypeptide comprising the nucleic acid or polypeptide or the consensus sequence or the polypeptide motif, depicted in table I, II or IV, column 7, respective same line as SEQ ID NO.: 2450, or SEQ ID NO.: 2451, respectively, is increased or generated in a plant cell, plant or part thereof. Preferably, the increase occurs cytoplasmic.

[0247] In a further embodiment, an increased nutrient use efficiency compared to a corresponding non-modified, e.g. a non-transformed, wild type plant is conferred if the activity of a polypeptide comprising the polypeptide shown in SEQ ID NO. 2451, or encoded by a nucleic acid molecule comprising the nucleic acid molecule shown in SEQ ID NO. 2450, or a homolog of said nucleic acid molecule or polypeptide, is increased or generated. For example, the activity of a corresponding nucleic acid molecule or a polypeptide derived from Saccharomyces cerevisiae is increased or generated, preferably comprising the nucleic acid molecule shown in SEQ ID NO. 2450 or polypeptide shown in SEQ ID NO. 2451, respectively, or a homolog thereof. E.g. an increased tolerance to abiotic environmental stress, in particular increased nutrient use efficiency as compared to a corresponding non-modified, e.g. a non-transformed, wild type plant cell, a plant or a part thereof is conferred if the activity “mitotic check point protein or” if the activity of a nucleic acid molecule or a polypeptide comprising the nucleic acid or polypeptide or the consensus sequence or the polypeptide motif, as depicted in table I, II or IV, column 7 respective same line as SEQ ID NO. 2450 or SEQ ID NO. 2451, respectively, is increased or generated in a plant or part thereof. Preferably, the increase occurs cytoplasmic. In one embodiment an increased nitrogen use efficiency is conferred.

[0248] Particularly, an increase of yield from 1.05-fold to 1.14-fold, for example plus at least 100% thereof, under conditions of nitrogen deficiency is conferred compared to a corresponding non-modified, e.g. non-transformed, wild type plant.

[0249] Accordingly, in one embodiment, an increased yield as compared to a correspondingly non-modified, e.g. a non-transformed, wild type plant is conferred according to method of the invention, by increasing or generating the activity of a polypeptide comprising the yield-related polypeptide shown in SEQ ID NO.: 2470, or encoded by the yield-related nucleic acid molecule (or gene) comprising the nucleic acid shown in SEQ ID NO.: 2469, or a homolog of said nucleic acid molecule or polypeptide, e.g. derived from Saccharomyces cerevisiae. Thus, in one embodiment, the activity “chromatin structure-remodeling complex protein” or the activity of a nucleic acid molecule or a polypeptide comprising the nucleic acid or polypeptide or the consensus sequence or the polypeptide motif, depicted in table I, II or IV, column 7, respective same line as SEQ ID NO.: 2469, or SEQ ID NO.: 2470, respectively, is increased or generated in a plant cell, plant or part thereof. Preferably, the increase occurs cytoplasmic.

[0250] In a further embodiment, an increased nutrient use efficiency compared to a corresponding non-modified, e.g. a non-transformed, wild type plant is conferred if the activity of a polypeptide comprising the polypeptide shown in SEQ ID NO. 2470, or encoded by a nucleic acid molecule comprising the nucleic acid molecule shown in SEQ ID NO. 2469, or a homolog of said nucleic acid molecule or polypeptide, is increased or generated. For example, the activity of a corresponding nucleic acid molecule or a polypeptide derived from Saccharomyces cerevisiae is increased or generated, preferably comprising the nucleic acid molecule shown in SEQ ID NO. 2469 or polypeptide shown in SEQ ID NO. 2470, respectively, or a homolog thereof. E.g. an increased tolerance to abiotic environmental stress, in particular increased nutrient use efficiency as compared to a corresponding non-modified, e.g. a non-transformed, wild type plant cell, a plant or a part thereof is conferred if the activity “chromatin structure-remodeling complex protein or” if the activity of a nucleic acid molecule or a polypeptide comprising the nucleic acid or polypeptide or the consensus sequence or the polypeptide motif, as depicted in table I, II or IV, column 7 respective same line as SEQ ID NO. 2469 or SEQ ID NO. 2470, respectively, is increased or generated in a plant or part thereof. Preferably, the increase occurs cytoplasmic. In one embodiment an increased nitrogen use efficiency is conferred.

[0251] Particularly, an increase of yield from 1.05-fold to 1.14-fold, for example plus at least 100% thereof, under conditions of nitrogen deficiency is conferred compared to a corresponding non-modified, e.g. non-transformed, wild type plant.

[0252] Accordingly, in one embodiment, an increased yield as compared to a correspondingly non-modified, e.g. a non-transformed, wild type plant is conferred according to method of the invention, by increasing or generating the cytoplasmic activity of a polypeptide comprising the yield-related polypeptide shown in SEQ ID NO.: 2502, or encoded by the yield-related nucleic acid molecule (or gene) comprising the nucleic acid shown in SEQ ID NO.: 2501, or a homolog of said nucleic acid molecule or polypeptide, e.g. derived from Saccharomyces cerevisiae. Thus, in one embodiment, the cytoplasmic activity “phosphatase” or the activity of a nucleic acid molecule or a polypeptide comprising the nucleic acid or polypeptide or the consensus sequence or the polypeptide motif, depicted in table I, II or IV, column 7, respective same line as SEQ ID NO.: 2501, or SEQ ID NO.: 2502, respectively, is increased or generated cytoplasmic in a plant cell, plant or part thereof.)

[0253] In a further embodiment, an increased tolerance to abiotic environmental stress, in particular increased low temperature tolerance, compared to a corresponding non-modified, e.g. a non-transformed, wild type plant is conferred if the activity of a polypeptide comprising the polypeptide shown in SEQ ID NO. 2502, or encoded by a nucleic acid molecule comprising the nucleic acid molecule shown in SEQ ID NO. 2501, or a homolog of said nucleic acid molecule or polypeptide, is increased or generated. For example, the activity of a corresponding nucleic acid molecule or a polypeptide derived from Saccharomyces cerevisiae is increased or generated, preferably comprising the nucleic acid molecule shown in SEQ ID NO. 2501 or polypeptide shown in SEQ ID NO. 2502, respectively, or a homolog thereof. E.g. an increased tolerance to abiotic environmental stress, in particular increased low temperature tolerance, compared to a corresponding non-modified, e.g. a non-transformed, wild type plant is conferred if the activity “phosphatase” or if the activity of a nucleic acid molecule or a polypeptide comprising the nucleic acid or polypeptide or the consensus sequence or the polypeptide motif, depicted in table I, II or IV, column 7, respective same line as SEQ ID NO.: 2501 or SEQ ID NO.: 2502, respectively, is increased or generated in a plant or part thereof. Preferably, the increase occurs plastidic. Particularly, an increase of yield from 1.05-fold to 1.108-fold, for example plus at least 100% thereof, under conditions of low temperature is conferred compared to a corresponding non-modified, e.g. non-transformed, wild type plant.

[0254] In a further embodiment, an increased nutrient use efficiency compared to a corresponding non-modified, e.g. a non-transformed, wild type plant is conferred if the activity of a polypeptide comprising the polypeptide shown in SEQ ID NO. 2502, or encoded by a nucleic acid molecule comprising the nucleic acid molecule shown in SEQ ID NO. 2501, or a homolog of said nucleic acid molecule or polypeptide, is increased or generated. For example, the activity of a corresponding nucleic acid molecule or a polypeptide derived from Saccharomyces cerevisiae is increased or generated, preferably comprising the nucleic acid molecule shown in SEQ ID NO. 2501 or polypeptide shown in SEQ ID NO. 2502, respectively, or a homolog thereof. E.g. an increased tolerance to abiotic environmental stress, in particular increased nutrient use efficiency as compared to a corresponding non-modified, e.g. a non-transformed, wild type plant cell, a plant or a part thereof is conferred if the activity “phosphatase or” if the activity of a nucleic acid molecule or a polypeptide comprising the nucleic acid or polypeptide or the consensus sequence or the polypeptide motif, as depicted in table I, II or IV, column 7 respective same line as SEQ ID NO. 2501 or SEQ ID NO. 2502, respectively, is increased or generated in a plant or part thereof. Preferably, the increase occurs cytoplasmic, e.g. if no further targeting signal is added to the sequence. In one embodiment an increased nitrogen use efficiency is conferred.

[0255] Particularly, an increase of yield from 1.05-fold to 1.48-fold, for example plus at least 100% thereof, under conditions of nitrogen deficiency is conferred compared to a corresponding non-modified, e.g. non-transformed, wild type plant.

[0256] In a further embodiment, an increased intrinsic yield, compared to a corresponding non-modified, e.g. a non-transformed, wild type plant is conferred if the activity of a polypeptide comprising the polypeptide shown in SEQ ID NO. 2502, or encoded by a nucleic acid molecule comprising the nucleic acid molecule shown in SEQ ID NO. 2501, or a homolog of said nucleic acid molecule or polypeptide, is increased or generated. For example, the activity of a corresponding nucleic acid molecule or a polypeptide derived from Saccharomyces cerevisiae is increased or generated plastidic, preferably comprising the nucleic acid molecule shown in SEQ ID NO. 2501 or polypeptide shown in SEQ ID NO. 2502, respectively, or a homolog thereof. E.g. an increased intrinsic yield, compared to a corresponding non-modified, e.g. a non-transformed, wild type plant is conferred if the activity “phosphatase” or if the activity of a nucleic acid molecule or a polypeptide comprising the nucleic acid or polypeptide or the consensus sequence or the polypeptide motif, depicted in table I, II or IV, column 7, respective same line as SEQ ID NO.: 2501 or SEQ ID NO.: 2502, respectively, is increased or generated plastidic in a plant or part thereof. Particularly, an increase of yield from 1.05-fold to 1.165-fold, for example plus at least 100% thereof, under standard conditions, e.g. in the absence of nutrient deficiency and/or stress conditions is conferred compared to a corresponding control, e.g. an non-modified, e.g. non-transformed, wild type plant.

[0257] Accordingly, in one embodiment, an increased yield as compared to a correspondingly non-modified, e.g. a non-transformed, wild type plant is conferred according to method of the invention, by increasing or generating the activity of a polypeptide comprising the yield-related polypeptide shown in SEQ ID NO.: 2524, or encoded by the yield-related nucleic acid molecule (or gene) comprising the nucleic acid shown in SEQ ID NO.: 2523, or a homolog of said nucleic acid molecule or polypeptide, e.g. derived from Saccharomyces cerevisiae. Thus, in one embodiment, the activity “D-arabinono-1,4-lactone oxidase” or the activity of a nucleic acid molecule or a polypeptide comprising the nucleic acid or polypeptide or the consensus sequence or the polypeptide motif, depicted in table I, II or IV, column 7, respective same line as SEQ ID NO.: 2523, or SEQ ID NO.: 2524, respectively, is increased or generated in a plant cell, plant or part thereof. Preferably, the increase occurs cytoplasmic.

[0258] In a further embodiment, an increased nutrient use efficiency compared to a corresponding non-modified, e.g. a non-transformed, wild type plant is conferred if the activity of a polypeptide comprising the polypeptide shown in SEQ ID NO. 2524, or encoded by a nucleic acid molecule comprising the nucleic acid molecule shown in SEQ ID NO. 2523, or a homolog of said nucleic acid molecule or polypeptide, is increased or generated. For example, the activity of a corresponding nucleic acid molecule or a polypeptide derived from Saccharomyces cerevisiae is increased or generated, preferably comprising the nucleic acid molecule shown in SEQ ID NO. 2523 or polypeptide shown in SEQ ID NO. 2524, respectively, or a homolog thereof. E.g. an increased tolerance to abiotic environmental stress, in particular increased nutrient use efficiency as compared to a corresponding non-modified, e.g. a non-transformed, wild type plant cell, a plant or a part thereof is conferred if the activity “D-arabinono-1,4-lactone oxidase or” if the activity of a nucleic acid molecule or a polypeptide comprising the nucleic acid or polypeptide or the consensus sequence or the polypeptide motif, as depicted in table I, II or IV, column 7 respective same line as SEQ ID NO. 2523 or SEQ ID NO. 2524, respectively, is increased or generated in a plant or part thereof. Preferably, the increase occurs cytoplasmic. In one embodiment an increased nitrogen use efficiency is conferred.

[0259] Particularly, an increase of yield from 1.05-fold to 1.46-fold, for example plus at least 100% thereof, under conditions of nitrogen deficiency is conferred compared to a corresponding non-modified, e.g. non-transformed, wild type plant.

[0260] Accordingly, in one embodiment, an increased yield as compared to a correspondingly non-modified, e.g. a non-transformed, wild type plant is conferred according to method of the invention, by increasing or generating the activity of a polypeptide comprising the yield-related polypeptide shown in SEQ ID NO.: 2568, or encoded by the yield-related nucleic acid molecule (or gene) comprising the nucleic acid shown in SEQ ID NO.: 2567, or a homolog of said nucleic acid molecule or polypeptide, e.g. derived from Saccharomyces cerevisiae. Thus, in one embodiment, the activity “ribonuclease P protein component” or the activity of a nucleic acid molecule or a polypeptide comprising the nucleic acid or polypeptide or the consensus sequence or the polypeptide motif, depicted in table I, II or IV, column 7, respective same line as SEQ ID NO.: 2567, or SEQ ID NO.: 2568, respectively, is increased or generated in a plant cell, plant or part thereof. Preferably, the increase occurs cytoplasmic.

[0261] In a further embodiment, an increased nutrient use efficiency compared to a corresponding non-modified, e.g. a non-transformed, wild type plant is conferred if the activity of a polypeptide comprising the polypeptide shown in SEQ ID NO. 2568, or encoded by a nucleic acid molecule comprising the nucleic acid molecule shown in SEQ ID NO. 2567, or a homolog of said nucleic acid molecule or polypeptide, is increased or generated. For example, the activity of a corresponding nucleic acid molecule or a polypeptide derived from Saccharomyces cerevisiae is increased or generated, preferably comprising the nucleic acid molecule shown in SEQ ID NO. 2567 or polypeptide shown in SEQ ID NO. 2568, respectively, or a homolog thereof. E.g. an increased tolerance to abiotic environmental stress, in particular increased nutrient use efficiency as compared to a corresponding non-modified, e.g. a non-transformed, wild type plant cell, a plant or a part thereof is conferred if the activity “ribonuclease P protein component or” if the activity of a nucleic acid molecule or a polypeptide comprising the nucleic acid or polypeptide or the consensus sequence or the polypeptide motif, as depicted in table I, II or IV, column 7 respective same line as SEQ ID NO. 2567 or SEQ ID NO. 2568, respectively, is increased or generated in a plant or part thereof. Preferably, the increase occurs cytoplasmic. In one embodiment an increased nitrogen use efficiency is conferred.

[0262] Particularly, an increase of yield from 1.05-fold to 1.29-fold, for example plus at least 100% thereof, under conditions of nitrogen deficiency is conferred compared to a corresponding non-modified, e.g. non-transformed, wild type plant.

[0263] Accordingly, in one embodiment, an increased yield as compared to a correspondingly non-modified, e.g. a non-transformed, wild type plant is conferred according to method of the invention, by increasing or generating the activity of a polypeptide comprising the yield-related polypeptide shown in SEQ ID NO.: 2594, or encoded by the yield-related nucleic acid molecule (or gene) comprising the nucleic acid shown in SEQ ID NO.: 2593, or a homolog of said nucleic acid molecule or polypeptide, e.g. derived from Saccharomyces cerevisiae. Thus, in one embodiment, the activity “YML096W-protein” or the activity of a nucleic acid molecule or a polypeptide comprising the nucleic acid or polypeptide or the consensus sequence or the polypeptide motif, depicted in table I, II or IV, column 7, respective same line as SEQ ID NO.: 2593, or SEQ ID NO.: 2594, respectively, is increased or generated in a plant cell, plant or part thereof. Preferably, the increase occurs cytoplasmic.

[0264] In a further embodiment, an increased tolerance to abiotic environmental stress, in particular increased low temperature tolerance, compared to a corresponding non-modified, e.g. a non-transformed, wild type plant is conferred if the activity of a polypeptide comprising the polypeptide shown in SEQ ID NO. 2594, or encoded by a nucleic acid molecule comprising the nucleic acid molecule shown in SEQ ID NO. 2593, or a homolog of said nucleic acid molecule or polypeptide, is increased or generated. For example, the activity of a corresponding nucleic acid molecule or a polypeptide derived from Saccharomyces cerevisiae is increased or generated, preferably comprising the nucleic acid molecule shown in SEQ ID NO. 2593 or polypeptide shown in SEQ ID NO. 2594, respectively, or a homolog thereof. E.g. an increased tolerance to abiotic environmental stress, in particular increased low temperature tolerance, compared to a corresponding non-modified, e.g. a non-transformed, wild type plant is conferred if the activity “YML096W-protein” or if the activity of a nucleic acid molecule or a polypeptide comprising the nucleic acid or polypeptide or the consensus sequence or the polypeptide motif, depicted in table I, II or IV, column 7, respective same line as SEQ ID NO.: 2593 or SEQ ID NO.: 2594, respectively, is increased or generated in a plant or part thereof. Preferably, the increase occurs cytoplasmic. Particularly, an increase of yield from 1.05-fold to 1.266-fold, for example plus at least 100% thereof, under conditions of low temperature is conferred compared to a corresponding non-modified, e.g. non-transformed, wild type plant.

[0265] In a further embodiment, an increased nutrient use efficiency compared to a corresponding non-modified, e.g. a non-transformed, wild type plant is conferred if the activity of a polypeptide comprising the polypeptide shown in SEQ ID NO. 2594, or encoded by a nucleic acid molecule comprising the nucleic acid molecule shown in SEQ ID NO. 2593, or a homolog of said nucleic acid molecule or polypeptide, is increased or generated. For example, the activity of a corresponding nucleic acid molecule or a polypeptide derived from Saccharomyces cerevisiae is increased or generated, preferably comprising the nucleic acid molecule shown in SEQ ID NO. 2593 or polypeptide shown in SEQ ID NO. 2594, respectively, or a homolog thereof. E.g. an increased tolerance to abiotic environmental stress, in particular increased nutrient use efficiency as compared to a corresponding non-modified, e.g. a non-transformed, wild type plant cell, a plant or a part thereof is conferred if the activity “YML096W-protein or” if the activity of a nucleic acid molecule or a polypeptide comprising the nucleic acid or polypeptide or the consensus sequence or the polypeptide motif, as depicted in table I, II or IV, column 7 respective same line as SEQ ID NO. 2593 or SEQ ID NO. 2594, respectively, is increased or generated in a plant or part thereof. Preferably, the increase occurs cytoplasmic. In one embodiment an increased nitrogen use efficiency is conferred.

[0266] Particularly, an increase of yield from 1.05-fold to 1.46-fold, for example plus at least 100% thereof, under conditions of nitrogen deficiency is conferred compared to a corresponding non-modified, e.g. non-transformed, wild type plant.

[0267] In a further embodiment, an increased intrinsic yield, compared to a corresponding non-modified, e.g. a non-transformed, wild type plant is conferred if the activity of a polypeptide comprising the polypeptide shown in SEQ ID NO. 2594, or encoded by a nucleic acid molecule comprising the nucleic acid molecule shown in SEQ ID NO. 2593, or a homolog of said nucleic acid molecule or polypeptide, is increased or generated. For example, the activity of a corresponding nucleic acid molecule or a polypeptide derived from Saccharomyces cerevisiae is increased or generated, preferably comprising the nucleic acid molecule shown in SEQ ID NO. 2593 or polypeptide shown in SEQ ID NO. 2594, respectively, or a homolog thereof. E.g. an increased intrinsic yield, compared to a corresponding non-modified, e.g. a non-transformed, wild type plant is conferred if the activity “YML096W-protein” or if the activity of a nucleic acid molecule or a polypeptide comprising the nucleic acid or polypeptide or the consensus sequence or the polypeptide motif, depicted in table I, II or IV, column 7, respective same line as SEQ ID NO.: 2593 or SEQ ID NO.: 2594, respectively, is increased or generated in a plant or part thereof. Preferably, the increase occurs cytoplasmic. Particularly, an increase of yield from 1.05-fold to 1.130-fold, for example plus at least 100% thereof, under standard conditions, e.g. in the absence of nutrient deficiency and/or stress conditions is conferred compared to a corresponding control, e.g. an non-modified, e.g. non-transformed, wild type plant.

[0268] Accordingly, in one embodiment, an increased yield as compared to a correspondingly non-modified, e.g. a non-transformed, wild type plant is conferred according to method of the invention, by increasing or generating the activity of a polypeptide comprising the yield-related polypeptide shown in SEQ ID NO.: 2620, or encoded by the yield-related nucleic acid molecule (or gene) comprising the nucleic acid shown in SEQ ID NO.: 2619, or a homolog of said nucleic acid molecule or polypeptide, e.g. derived from Saccharomyces cerevisiae. Thus, in one embodiment, the activity “transcription initiation factor subunit” or the activity of a nucleic acid molecule or a polypeptide comprising the nucleic acid or polypeptide or the consensus sequence or the polypeptide motif, depicted in table I, II or IV, column 7, respective same line as SEQ ID NO.: 2619, or SEQ ID NO.: 2620, respectively, is increased or generated in a plant cell, plant or part thereof. Preferably, the increase occurs cytoplasmic.

[0269] In a further embodiment, an increased nutrient use efficiency compared to a corresponding non-modified, e.g. a non-transformed, wild type plant is conferred if the activity of a polypeptide comprising the polypeptide shown in SEQ ID NO. 2620, or encoded by a nucleic acid molecule comprising the nucleic acid molecule shown in SEQ ID NO. 2619, or a homolog of said nucleic acid molecule or polypeptide, is increased or generated. For example, the activity of a corresponding nucleic acid molecule or a polypeptide derived from Saccharomyces cerevisiae is increased or generated, preferably comprising the nucleic acid molecule shown in SEQ ID NO. 2619 or polypeptide shown in SEQ ID NO. 2620, respectively, or a homolog thereof. E.g. an increased tolerance to abiotic environmental stress, in particular increased nutrient use efficiency as compared to a corresponding non-modified, e.g. a non-transformed, wild type plant cell, a plant or a part thereof is conferred if the activity “transcription initiation factor subunit or” if the activity of a nucleic acid molecule or a polypeptide comprising the nucleic acid or polypeptide or the consensus sequence or the polypeptide motif, as depicted in table I, II or IV, column 7 respective same line as SEQ ID NO. 2619 or SEQ ID NO. 2620, respectively, is increased or generated in a plant or part thereof. Preferably, the increase occurs cytoplasmic. In one embodiment an increased nitrogen use efficiency is conferred.

[0270] Particularly, an increase of yield from 1.05-fold to 1.2-fold, for example plus at least 100% thereof, under conditions of nitrogen deficiency is conferred compared to a corresponding non-modified, e.g. non-transformed, wild type plant.

[0271] Accordingly, in one embodiment, an increased yield as compared to a correspondingly non-modified, e.g. a non-transformed, wild type plant is conferred according to method of the invention, by increasing or generating the activity of a polypeptide comprising the yield-related polypeptide shown in SEQ ID NO.: 2679, or encoded by the yield-related nucleic acid molecule (or gene) comprising the nucleic acid shown in SEQ ID NO.: 2678, or a homolog of said nucleic acid molecule or polypeptide, e.g. derived from Saccharomyces cerevisiae. Thus, in one embodiment, the activity “mitochondrial ribosomal protein” or the activity of a nucleic acid molecule or a polypeptide comprising the nucleic acid or polypeptide or the consensus sequence or the polypeptide motif, depicted in table I, II or IV, column 7, respective same line as SEQ ID NO.: 2678, or SEQ ID NO.: 2679, respectively, is increased or generated in a plant cell, plant or part thereof. Preferably, the increase occurs cytoplasmic.

[0272] In a further embodiment, an increased nutrient use efficiency compared to a corresponding non-modified, e.g. a non-transformed, wild type plant is conferred if the activity of a polypeptide comprising the polypeptide shown in SEQ ID NO. 2679, or encoded by a nucleic acid molecule comprising the nucleic acid molecule shown in SEQ ID NO. 2678, or a homolog of said nucleic acid molecule or polypeptide, is increased or generated. For example, the activity of a corresponding nucleic acid molecule or a polypeptide derived from Saccharomyces cerevisiae is increased or generated, preferably comprising the nucleic acid molecule shown in SEQ ID NO. 2678 or polypeptide shown in SEQ ID NO. 2679, respectively, or a homolog thereof. E.g. an increased tolerance to abiotic environmental stress, in particular increased nutrient use efficiency as compared to a corresponding non-modified, e.g. a non-transformed, wild type plant cell, a plant or a part thereof is conferred if the activity “mitochondrial ribosomal protein or” if the activity of a nucleic acid molecule or a polypeptide comprising the nucleic acid or polypeptide or the consensus sequence or the polypeptide motif, as depicted in table I, II or IV, column 7 respective same line as SEQ ID NO. 2678 or SEQ ID NO. 2679, respectively, is increased or generated in a plant or part thereof. Preferably, the increase occurs cytoplasmic. In one embodiment an increased nitrogen use efficiency is conferred.

[0273] Particularly, an increase of yield from 1.05-fold to 1.23-fold, for example plus at least 100% thereof, under conditions of nitrogen deficiency is conferred compared to a corresponding non-modified, e.g. non-transformed, wild type plant.

[0274] Accordingly, in one embodiment, an increased yield as compared to a correspondingly non-modified, e.g. a non-transformed, wild type plant is conferred according to method of the invention, by increasing or generating the activity of a polypeptide comprising the yield-related polypeptide shown in SEQ ID NO.: 2702, or encoded by the yield-related nucleic acid molecule (or gene) comprising the nucleic acid shown in SEQ ID NO.: 2701, or a homolog of said nucleic acid molecule or polypeptide, e.g. derived from Saccharomyces cerevisiae. Thus, in one embodiment, the activity “lipoyl synthase” or the activity of a nucleic acid molecule or a polypeptide comprising the nucleic acid or polypeptide or the consensus sequence or the polypeptide motif, depicted in table I, II or IV, column 7, respective same line as SEQ ID NO.: 2701, or SEQ ID NO.: 2702, respectively, is increased or generated in a plant cell, plant or part thereof. Preferably, the increase occurs cytoplasmic.

[0275] In a further embodiment, an increased nutrient use efficiency compared to a corresponding non-modified, e.g. a non-transformed, wild type plant is conferred if the activity of a polypeptide comprising the polypeptide shown in SEQ ID NO. 2702, or encoded by a nucleic acid molecule comprising the nucleic acid molecule shown in SEQ ID NO. 2701, or a homolog of said nucleic acid molecule or polypeptide, is increased or generated. For example, the activity of a corresponding nucleic acid molecule or a polypeptide derived from Saccharomyces cerevisiae is increased or generated, preferably comprising the nucleic acid molecule shown in SEQ ID NO. 2701 or polypeptide shown in SEQ ID NO. 2702, respectively, or a homolog thereof. E.g. an increased tolerance to abiotic environmental stress, in particular increased nutrient use efficiency as compared to a corresponding non-modified, e.g. a non-transformed, wild type plant cell, a plant or a part thereof is conferred if the activity “lipoyl synthase or” if the activity of a nucleic acid molecule or a polypeptide comprising the nucleic acid or polypeptide or the consensus sequence or the polypeptide motif, as depicted in table I, II or IV, column 7 respective same line as SEQ ID NO. 2701 or SEQ ID NO. 2702, respectively, is increased or generated in a plant or part thereof. Preferably, the increase occurs cytoplasmic. In one embodiment an increased nitrogen use efficiency is conferred.

[0276] Particularly, an increase of yield from 1.05-fold to 1.14-fold, for example plus at least 100% thereof, under conditions of nitrogen deficiency is conferred compared to a corresponding non-modified, e.g. non-transformed, wild type plant.

[0277] Accordingly, in one embodiment, an increased yield as compared to a correspondingly non-modified, e.g. a non-transformed, wild type plant is conferred according to method of the invention, by increasing or generating the activity of a polypeptide comprising the yield-related polypeptide shown in SEQ ID NO.: 3311, or encoded by the yield-related nucleic acid molecule (or gene) comprising the nucleic acid shown in SEQ ID NO.: 3310, or a homolog of said nucleic acid molecule or polypeptide, e.g. derived from Saccharomyces cerevisiae. Thus, in one embodiment, the activity “ATP-dependent RNA helicase” or the activity of a nucleic acid molecule or a polypeptide comprising the nucleic acid or polypeptide or the consensus sequence or the polypeptide motif, depicted in table I, II or IV, column 7, respective same line as SEQ ID NO.: 3310, or SEQ ID NO.: 3311, respectively, is increased or generated in a plant cell, plant or part thereof. Preferably, the increase occurs cytoplasmic.

[0278] In a further embodiment, an increased nutrient use efficiency compared to a corresponding non-modified, e.g. a non-transformed, wild type plant is conferred if the activity of a polypeptide comprising the polypeptide shown in SEQ ID NO. 3311, or encoded by a nucleic acid molecule comprising the nucleic acid molecule shown in SEQ ID NO. 3310, or a homolog of said nucleic acid molecule or polypeptide, is increased or generated. For example, the activity of a corresponding nucleic acid molecule or a polypeptide derived from Saccharomyces cerevisiae is increased or generated, preferably comprising the nucleic acid molecule shown in SEQ ID NO. 3310 or polypeptide shown in SEQ ID NO. 3311, respectively, or a homolog thereof. E.g. an increased tolerance to abiotic environmental stress, in particular increased nutrient use efficiency as compared to a corresponding non-modified, e.g. a non-transformed, wild type plant cell, a plant or a part thereof is conferred if the activity “ATP-dependent RNA helicase or” if the activity of a nucleic acid molecule or a polypeptide comprising the nucleic acid or polypeptide or the consensus sequence or the polypeptide motif, as depicted in table I, II or IV, column 7 respective same line as SEQ ID NO. 3310 or SEQ ID NO. 3311, respectively, is increased or generated in a plant or part thereof. Preferably, the increase occurs cytoplasmic. In one embodiment an increased nitrogen use efficiency is conferred.

[0279] Particularly, an increase of yield from 1.05-fold to 1.11-fold, for example plus at least 100% thereof, under conditions of nitrogen deficiency is conferred compared to a corresponding non-modified, e.g. non-transformed, wild type plant.

[0280] Accordingly, in one embodiment, an increased yield as compared to a correspondingly non-modified, e.g. a non-transformed, wild type plant is conferred according to method of the invention, by increasing or generating the activity of a polypeptide comprising the yield-related polypeptide shown in SEQ ID NO.: 3669, or encoded by the yield-related nucleic acid molecule (or gene) comprising the nucleic acid shown in SEQ ID NO.: 3668, or a homolog of said nucleic acid molecule or polypeptide, e.g. derived from Escherichia coli. Thus, in one embodiment, the activity “small membrane lipoprotein” or the activity of a nucleic acid molecule or a polypeptide comprising the nucleic acid or polypeptide or the consensus sequence or the polypeptide motif, depicted in table I, II or IV, column 7, respective same line as SEQ ID NO.: 3668, or SEQ ID NO.: 3669, respectively, is increased or generated in a plant cell, plant or part thereof. Preferably, the increase occurs cytoplasmic.

[0281] In a further embodiment, an increased tolerance to abiotic environmental stress, in particular increased low temperature tolerance, compared to a corresponding non-modified, e.g. a non-transformed, wild type plant is conferred if the activity of a polypeptide comprising the polypeptide shown in SEQ ID NO. 3669, or encoded by a nucleic acid molecule comprising the nucleic acid molecule shown in SEQ ID NO. 3668, or a homolog of said nucleic acid molecule or polypeptide, is increased or generated. For example, the activity of a corresponding nucleic acid molecule or a polypeptide derived from Escherichia coli is increased or generated, preferably comprising the nucleic acid molecule shown in SEQ ID NO. 3668 or polypeptide shown in SEQ ID NO. 3669, respectively, or a homolog thereof. E.g. an increased tolerance to abiotic environmental stress, in particular increased low temperature tolerance, compared to a corresponding non-modified, e.g. a non-transformed, wild type plant is conferred if the activity “small membrane lipoprotein” or if the activity of a nucleic acid molecule or a polypeptide comprising the nucleic acid or polypeptide or the consensus sequence or the polypeptide motif, depicted in table I, II or IV, column 7, respective same line as SEQ ID NO.: 3668 or SEQ ID NO.: 3669, respectively, is increased or generated in a plant or part thereof. Preferably, the increase occurs cytoplasmic. Particularly, an increase of yield from 1.05-fold to 1.105-fold, for example plus at least 100% thereof, under conditions of low temperature is conferred compared to a corresponding non-modified, e.g. non-transformed, wild type plant.

[0282] In a further embodiment, an increased nutrient use efficiency compared to a corresponding non-modified, e.g. a non-transformed, wild type plant is conferred if the activity of a polypeptide comprising the polypeptide shown in SEQ ID NO. 3669, or encoded by a nucleic acid molecule comprising the nucleic acid molecule shown in SEQ ID NO. 3668, or a homolog of said nucleic acid molecule or polypeptide, is increased or generated. For example, the activity of a corresponding nucleic acid molecule or a polypeptide derived from Escherichia coli is increased or generated, preferably comprising the nucleic acid molecule shown in SEQ ID NO. 3668 or polypeptide shown in SEQ ID NO. 3669, respectively, or a homolog thereof. E.g. an increased tolerance to abiotic environmental stress, in particular increased nutrient use efficiency as compared to a corresponding non-modified, e.g. a non-transformed, wild type plant cell, a plant or a part thereof is conferred if the activity “small membrane lipoprotein or” if the activity of a nucleic acid molecule or a polypeptide comprising the nucleic acid or polypeptide or the consensus sequence or the polypeptide motif, as depicted in table I, II or IV, column 7 respective same line as SEQ ID NO. 3668 or SEQ ID NO. 3669, respectively, is increased or generated in a plant or part thereof. Preferably, the increase occurs cytoplasmic. In one embodiment an increased nitrogen use efficiency is conferred.

[0283] Particularly, an increase of yield from 1.05-fold to 1.11-fold, for example plus at least 100% thereof, under conditions of nitrogen deficiency is conferred compared to a corresponding non-modified, e.g. non-transformed, wild type plant.

[0284] Accordingly, in one embodiment, an increased yield as compared to a correspondingly non-modified, e.g. a non-transformed, wild type plant is conferred according to method of the invention, by increasing or generating the activity of a polypeptide comprising the yield-related polypeptide shown in SEQ ID NO.: 3691, or encoded by the yield-related nucleic acid molecule (or gene) comprising the nucleic acid shown in SEQ ID NO.: 3690, or a homolog of said nucleic acid molecule or polypeptide, e.g. derived from Synechocystis sp. Thus, in one embodiment, the activity “SLL1280-protein” or the activity of a nucleic acid molecule or a polypeptide comprising the nucleic acid or polypeptide or the consensus sequence or the polypeptide motif, depicted in table I, II or IV, column 7, respective same line as SEQ ID NO.: 3690, or SEQ ID NO.: 3691, respectively, is increased or generated in a plant cell, plant or part thereof. Preferably, the increase occurs cytoplasmic.

[0285] In a further embodiment, an increased tolerance to abiotic environmental stress, in particular increased low temperature tolerance, compared to a corresponding non-modified, e.g. a non-transformed, wild type plant is conferred if the activity of a polypeptide comprising the polypeptide shown in SEQ ID NO. 3691, or encoded by a nucleic acid molecule comprising the nucleic acid molecule shown in SEQ ID NO. 3690, or a homolog of said nucleic acid molecule or polypeptide, is increased or generated. For example, the activity of a corresponding nucleic acid molecule or a polypeptide derived from Synechocystis sp. is increased or generated, preferably comprising the nucleic acid molecule shown in SEQ ID NO. 3690 or polypeptide shown in SEQ ID NO. 3691, respectively, or a homolog thereof. E.g. an increased tolerance to abiotic environmental stress, in particular increased low temperature tolerance, compared to a corresponding non-modified, e.g. a non-transformed, wild type plant is conferred if the activity “SLL1280-protein” or if the activity of a nucleic acid molecule or a polypeptide comprising the nucleic acid or polypeptide or the consensus sequence or the polypeptide motif, depicted in table I, II or IV, column 7, respective same line as SEQ ID NO.: 3690 or SEQ ID NO.: 3691, respectively, is increased or generated in a plant or part thereof. Preferably, the increase occurs cytoplasmic. Particularly, an increase of yield from 1.05-fold to 1.080-fold, for example plus at least 100% thereof, under conditions of low temperature is conferred compared to a corresponding non-modified, e.g. non-transformed, wild type plant.

[0286] In a further embodiment, an increased nutrient use efficiency compared to a corresponding non-modified, e.g. a non-transformed, wild type plant is conferred if the activity of a polypeptide comprising the polypeptide shown in SEQ ID NO. 3691, or encoded by a nucleic acid molecule comprising the nucleic acid molecule shown in SEQ ID NO. 3690, or a homolog of said nucleic acid molecule or polypeptide, is increased or generated. For example, the activity of a corresponding nucleic acid molecule or a polypeptide derived from Synechocystis sp. is increased or generated, preferably comprising the nucleic acid molecule shown in SEQ ID NO. 3690 or polypeptide shown in SEQ ID NO. 3691, respectively, or a homolog thereof. E.g. an increased tolerance to abiotic environmental stress, in particular increased nutrient use efficiency as compared to a corresponding non-modified, e.g. a non-transformed, wild type plant cell, a plant or a part thereof is conferred if the activity “SLL1280-protein or” if the activity of a nucleic acid molecule or a polypeptide comprising the nucleic acid or polypeptide or the consensus sequence or the polypeptide motif, as depicted in table I, II or IV, column 7 respective same line as SEQ ID NO. 3690 or SEQ ID NO. 3691, respectively, is increased or generated in a plant or part thereof. Preferably, the increase occurs cytoplasmic. In one embodiment an increased nitrogen use efficiency is conferred.

[0287] Particularly, an increase of yield from 1.05-fold to 1.10-fold, for example plus at least 100% thereof, under conditions of nitrogen deficiency is conferred compared to a corresponding non-modified, e.g. non-transformed, wild type plant.

[0288] Accordingly, in one embodiment, an increased yield as compared to a correspondingly non-modified, e.g. a non-transformed, wild type plant is conferred according to method of the invention, by increasing or generating the activity of a polypeptide comprising the yield-related polypeptide shown in SEQ ID NO.: 4706, or encoded by the yield-related nucleic acid molecule (or gene) comprising the nucleic acid shown in SEQ ID NO.: 4705, or a homolog of said nucleic acid molecule or polypeptide, e.g. derived from Saccharomyces cerevisiae. Thus, in one embodiment, the activity “YLR443W-protein” or the activity of a nucleic acid molecule or a polypeptide comprising the nucleic acid or polypeptide or the consensus sequence or the polypeptide motif, depicted in table I, II or IV, column 7, respective same line as SEQ ID NO.: 4705, or SEQ ID NO.: 4706, respectively, is increased or generated in a plant cell, plant or part thereof. Preferably, the increase occurs cytoplasmic.

[0289] In a further embodiment, an increased nutrient use efficiency compared to a corresponding non-modified, e.g. a non-transformed, wild type plant is conferred if the activity of a polypeptide comprising the polypeptide shown in SEQ ID NO. 4706, or encoded by a nucleic acid molecule comprising the nucleic acid molecule shown in SEQ ID NO. 4705, or a homolog of said nucleic acid molecule or polypeptide, is increased or generated. For example, the activity of a corresponding nucleic acid molecule or a polypeptide derived from Saccharomyces cerevisiae is increased or generated, preferably comprising the nucleic acid molecule shown in SEQ ID NO. 4705 or polypeptide shown in SEQ ID NO. 4706, respectively, or a homolog thereof. E.g. an increased tolerance to abiotic environmental stress, in particular increased nutrient use efficiency as compared to a corresponding non-modified, e.g. a non-transformed, wild type plant cell, a plant or a part thereof is conferred if the activity “YLR443W-protein or” if the activity of a nucleic acid molecule or a polypeptide comprising the nucleic acid or polypeptide or the consensus sequence or the polypeptide motif, as depicted in table I, II or IV, column 7 respective same line as SEQ ID NO. 4705 or SEQ ID NO. 4706, respectively, is increased or generated in a plant or part thereof. Preferably, the increase occurs cytoplasmic. In one embodiment an increased nitrogen use efficiency is conferred.

[0290] Particularly, an increase of yield from 1.05-fold to 1.13-fold, for example plus at least 100% thereof, under conditions of nitrogen deficiency is conferred compared to a corresponding non-modified, e.g. non-transformed, wild type plant.

[0291] Accordingly, in one embodiment, an increased yield as compared to a correspondingly non-modified, e.g. a non-transformed, wild type plant is conferred according to method of the invention, by increasing or generating the activity of a polypeptide comprising the yield-related polypeptide shown in SEQ ID NO.: 4718, or encoded by the yield-related nucleic acid molecule (or gene) comprising the nucleic acid shown in SEQ ID NO.: 4717, or a homolog of said nucleic acid molecule or polypeptide, e.g. derived from Saccharomyces cerevisiae. Thus, in one embodiment, the activity “26S protease subunit” or the activity of a nucleic acid molecule or a polypeptide comprising the nucleic acid or polypeptide or the consensus sequence or the polypeptide motif, depicted in table I, II or IV, column 7, respective same line as SEQ ID NO.: 4717, or SEQ ID NO.: 4718, respectively, is increased or generated in a plant cell, plant or part thereof. Preferably, the increase occurs cytoplasmic.

[0292] In a further embodiment, an increased nutrient use efficiency compared to a corresponding non-modified, e.g. a non-transformed, wild type plant is conferred if the activity of a polypeptide comprising the polypeptide shown in SEQ ID NO. 4718, or encoded by a nucleic acid molecule comprising the nucleic acid molecule shown in SEQ ID NO. 4717, or a homolog of said nucleic acid molecule or polypeptide, is increased or generated. For example, the activity of a corresponding nucleic acid molecule or a polypeptide derived from Saccharomyces cerevisiae is increased or generated, preferably comprising the nucleic acid molecule shown in SEQ ID NO. 4717 or polypeptide shown in SEQ ID NO. 4718, respectively, or a homolog thereof. E.g. an increased tolerance to abiotic environmental stress, in particular increased nutrient use efficiency as compared to a corresponding non-modified, e.g. a non-transformed, wild type plant cell, a plant or a part thereof is conferred if the activity “26S protease subunit or” if the activity of a nucleic acid molecule or a polypeptide comprising the nucleic acid or polypeptide or the consensus sequence or the polypeptide motif, as depicted in table I, II or IV, column 7 respective same line as SEQ ID NO. 4717 or SEQ ID NO. 4718, respectively, is increased or generated in a plant or part thereof. Preferably, the increase occurs cytoplasmic. In one embodiment an increased nitrogen use efficiency is conferred.

[0293] Particularly, an increase of yield from 1.05-fold to 1.14-fold, for example plus at least 100% thereof, under conditions of nitrogen deficiency is conferred compared to a corresponding non-modified, e.g. non-transformed, wild type plant.

[0294] Accordingly, in one embodiment, an increased yield as compared to a correspondingly non-modified, e.g. a non-transformed, wild type plant is conferred according to method of the invention, by increasing or generating the activity of a polypeptide comprising the yield-related polypeptide shown in SEQ ID NO.: 3770, or encoded by the yield-related nucleic acid molecule (or gene) comprising the nucleic acid shown in SEQ ID NO.: 3769, or a homolog of said nucleic acid molecule or polypeptide, e.g. derived from Arabidopsis thaliana. Thus, in one embodiment, the activity “tretraspanin” or the activity of a nucleic acid molecule or a polypeptide comprising the nucleic acid or polypeptide or the consensus sequence or the polypeptide motif, depicted in table I, II or IV, column 7, respective same line as SEQ ID NO.: 3769, or SEQ ID NO.: 3770, respectively, is increased or generated in a plant cell, plant or part thereof. Preferably, the increase occurs cytoplasmic.

[0295] In a further embodiment, an increased nutrient use efficiency compared to a corresponding non-modified, e.g. a non-transformed, wild type plant is conferred if the activity of a polypeptide comprising the polypeptide shown in SEQ ID NO. 3770, or encoded by a nucleic acid molecule comprising the nucleic acid molecule shown in SEQ ID NO. 3769, or a homolog of said nucleic acid molecule or polypeptide, is increased or generated. For example, the activity of a corresponding nucleic acid molecule or a polypeptide derived from Arabidopsis thaliana is increased or generated, preferably comprising the nucleic acid molecule shown in SEQ ID NO. 3769 or polypeptide shown in SEQ ID NO. 3770, respectively, or a homolog thereof. E.g. an increased tolerance to abiotic environmental stress, in particular increased nutrient use efficiency as compared to a corresponding non-modified, e.g. a non-transformed, wild type plant cell, a plant or a part thereof is conferred if the activity “tretraspanin or” if the activity of a nucleic acid molecule or a polypeptide comprising the nucleic acid or polypeptide or the consensus sequence or the polypeptide motif, as depicted in table I, II or IV, column 7 respective same line as SEQ ID NO. 3769 or SEQ ID NO. 3770, respectively, is increased or generated in a plant or part thereof. Preferably, the increase occurs cytoplasmic. In one embodiment an increased nitrogen use efficiency is conferred.

[0296] Particularly, an increase of yield from 1.05-fold to 1.18-fold, for example plus at least 100% thereof, under conditions of nitrogen deficiency is conferred compared to a corresponding non-modified, e.g. non-transformed, wild type plant.

[0297] In a further embodiment, an increased intrinsic yield, compared to a corresponding non-modified, e.g. a non-transformed, wild type plant is conferred if the activity of a polypeptide comprising the polypeptide shown in SEQ ID NO. 3770, or encoded by a nucleic acid molecule comprising the nucleic acid molecule shown in SEQ ID NO. 3769, or a homolog of said nucleic acid molecule or polypeptide, is increased or generated. For example, the activity of a corresponding nucleic acid molecule or a polypeptide derived from Arabidopsis thaliana is increased or generated, preferably comprising the nucleic acid molecule shown in SEQ ID NO. 3769 or polypeptide shown in SEQ ID NO. 3770, respectively, or a homolog thereof. E.g. an increased intrinsic yield, compared to a corresponding non-modified, e.g. a non-transformed, wild type plant is conferred if the activity “tretraspanin” or if the activity of a nucleic acid molecule or a polypeptide comprising the nucleic acid or polypeptide or the consensus sequence or the polypeptide motif, depicted in table I, II or IV, column 7, respective same line as SEQ ID NO.: 3769 or SEQ ID NO.: 3770, respectively, is increased or generated in a plant or part thereof. Preferably, the increase occurs cytoplasmic. Particularly, an increase of yield from 1.05-fold to 1.232-fold, for example plus at least 100% thereof, under standard conditions, e.g. in the absence of nutrient deficiency and/or stress conditions is conferred compared to a corresponding control, e.g. an non-modified, e.g. non-transformed, wild type plant.

[0298] Accordingly, in one embodiment, an increased yield as compared to a correspondingly non-modified, e.g. a non-transformed, wild type plant is conferred according to method of the invention, by increasing or generating the activity of a polypeptide comprising the yield-related polypeptide shown in SEQ ID NO.: 4010, or encoded by the yield-related nucleic acid molecule (or gene) comprising the nucleic acid shown in SEQ ID NO.: 4009, or a homolog of said nucleic acid molecule or polypeptide, e.g. derived from Arabidopsis thaliana. Thus, in one embodiment, the activity “xyloglucan galactosyltransferase” or the activity of a nucleic acid molecule or a polypeptide comprising the nucleic acid or polypeptide or the consensus sequence or the polypeptide motif, depicted in table I, II or IV, column 7, respective same line as SEQ ID NO.: 4009, or SEQ ID NO.: 4010, respectively, is increased or generated in a plant cell, plant or part thereof. Preferably, the increase occurs cytoplasmic.

[0299] In a further embodiment, an increased tolerance to abiotic environmental stress, in particular increased low temperature tolerance, compared to a corresponding non-modified, e.g. a non-transformed, wild type plant is conferred if the activity of a polypeptide comprising the polypeptide shown in SEQ ID NO. 4010, or encoded by a nucleic acid molecule comprising the nucleic acid molecule shown in SEQ ID NO. 4009, or a homolog of said nucleic acid molecule or polypeptide, is increased or generated. For example, the activity of a corresponding nucleic acid molecule or a polypeptide derived from Arabidopsis thaliana is increased or generated, preferably comprising the nucleic acid molecule shown in SEQ ID NO. 4009 or polypeptide shown in SEQ ID NO. 4010, respectively, or a homolog thereof. E.g. an increased tolerance to abiotic environmental stress, in particular increased low temperature tolerance, compared to a corresponding non-modified, e.g. a non-transformed, wild type plant is conferred if the activity “xyloglucan galactosyltransferase” or if the activity of a nucleic acid molecule or a polypeptide comprising the nucleic acid or polypeptide or the consensus sequence or the polypeptide motif, depicted in table I, II or IV, column 7, respective same line as SEQ ID NO.: 4009 or SEQ ID NO.: 4010, respectively, is increased or generated in a plant or part thereof. Preferably, the increase occurs cytoplasmic. Particularly, an increase of yield from 1.05-fold to 1.115-fold, for example plus at least 100% thereof, under conditions of low temperature is conferred compared to a corresponding non-modified, e.g. non-transformed, wild type plant.

[0300] In a further embodiment, an increased nutrient use efficiency compared to a corresponding non-modified, e.g. a non-transformed, wild type plant is conferred if the activity of a polypeptide comprising the polypeptide shown in SEQ ID NO. 4010, or encoded by a nucleic acid molecule comprising the nucleic acid molecule shown in SEQ ID NO. 4009, or a homolog of said nucleic acid molecule or polypeptide, is increased or generated. For example, the activity of a corresponding nucleic acid molecule or a polypeptide derived from Arabidopsis thaliana is increased or generated, preferably comprising the nucleic acid molecule shown in SEQ ID NO. 4009 or polypeptide shown in SEQ ID NO. 4010, respectively, or a homolog thereof. E.g. an increased tolerance to abiotic environmental stress, in particular increased nutrient use efficiency as compared to a corresponding non-modified, e.g. a non-transformed, wild type plant cell, a plant or a part thereof is conferred if the activity “xyloglucan galactosyltransferase or” if the activity of a nucleic acid molecule or a polypeptide comprising the nucleic acid or polypeptide or the consensus sequence or the polypeptide motif, as depicted in table I, II or IV, column 7 respective same line as SEQ ID NO. 4009 or SEQ ID NO. 4010, respectively, is increased or generated in a plant or part thereof. Preferably, the increase occurs cytoplasmic. In one embodiment an increased nitrogen use efficiency is conferred.

[0301] Particularly, an increase of yield from 1.05-fold to 1.31-fold, for example plus at least 100% thereof, under conditions of nitrogen deficiency is conferred compared to a corresponding non-modified, e.g. non-transformed, wild type plant.

[0302] In a further embodiment, an increased intrinsic yield, compared to a corresponding non-modified, e.g. a non-transformed, wild type plant is conferred if the activity of a polypeptide comprising the polypeptide shown in SEQ ID NO. 4010, or encoded by a nucleic acid molecule comprising the nucleic acid molecule shown in SEQ ID NO. 4009, or a homolog of said nucleic acid molecule or polypeptide, is increased or generated. For example, the activity of a corresponding nucleic acid molecule or a polypeptide derived from Arabidopsis thaliana is increased or generated, preferably comprising the nucleic acid molecule shown in SEQ ID NO. 4009 or polypeptide shown in SEQ ID NO. 4010, respectively, or a homolog thereof. E.g. an increased intrinsic yield, compared to a corresponding non-modified, e.g. a non-transformed, wild type plant is conferred if the activity “xyloglucan galactosyltransferase” or if the activity of a nucleic acid molecule or a polypeptide comprising the nucleic acid or polypeptide or the consensus sequence or the polypeptide motif, depicted in table I, II or IV, column 7, respective same line as SEQ ID NO.: 4009 or SEQ ID NO.: 4010, respectively, is increased or generated in a plant or part thereof. Preferably, the increase occurs cytoplasmic. Particularly, an increase of yield from 1.05-fold to 1.273-fold, for example plus at least 100% thereof, under standard conditions, e.g. in the absence of nutrient deficiency and/or stress conditions is conferred compared to a corresponding control, e.g. an non-modified, e.g. non-transformed, wild type plant.

[0303] Accordingly, in one embodiment, an increased yield as compared to a correspondingly non-modified, e.g. a non-transformed, wild type plant is conferred according to method of the invention, by increasing or generating the activity of a polypeptide comprising the yield-related polypeptide shown in SEQ ID NO.: 4078, or encoded by the yield-related nucleic acid molecule (or gene) comprising the nucleic acid shown in SEQ ID NO.: 4077, or a homolog of said nucleic acid molecule or polypeptide, e.g. derived from Arabidopsis thaliana. Thus, in one embodiment, the activity “pyruvate decarboxylase” or the activity of a nucleic acid molecule or a polypeptide comprising the nucleic acid or polypeptide or the consensus sequence or the polypeptide motif, depicted in table I, II or IV, column 7, respective same line as SEQ ID NO.: 4077, or SEQ ID NO.: 4078, respectively, is increased or generated in a plant cell, plant or part thereof. Preferably, the increase occurs cytoplasmic.

[0304] In a further embodiment, an increased tolerance to abiotic environmental stress, in particular increased low temperature tolerance, compared to a corresponding non-modified, e.g. a non-transformed, wild type plant is conferred if the activity of a polypeptide comprising the polypeptide shown in SEQ ID NO. 4078, or encoded by a nucleic acid molecule comprising the nucleic acid molecule shown in SEQ ID NO. 4077, or a homolog of said nucleic acid molecule or polypeptide, is increased or generated. For example, the activity of a corresponding nucleic acid molecule or a polypeptide derived from Arabidopsis thaliana is increased or generated, preferably comprising the nucleic acid molecule shown in SEQ ID NO. 4077 or polypeptide shown in SEQ ID NO. 4078, respectively, or a homolog thereof. E.g. an increased tolerance to abiotic environmental stress, in particular increased low temperature tolerance, compared to a corresponding non-modified, e.g. a non-transformed, wild type plant is conferred if the activity “pyruvate decarboxylase” or if the activity of a nucleic acid molecule or a polypeptide comprising the nucleic acid or polypeptide or the consensus sequence or the polypeptide motif, depicted in table I, II or IV, column 7, respective same line as SEQ ID NO.: 4077 or SEQ ID NO.: 4078, respectively, is increased or generated in a plant or part thereof. Preferably, the increase occurs cytoplasmic. Particularly, an increase of yield from 1.05-fold to 1.154-fold, for example plus at least 100% thereof, under conditions of low temperature is conferred compared to a corresponding non-modified, e.g. non-transformed, wild type plant.

[0305] In a further embodiment, an increased nutrient use efficiency compared to a corresponding non-modified, e.g. a non-transformed, wild type plant is conferred if the activity of a polypeptide comprising the polypeptide shown in SEQ ID NO. 4078, or encoded by a nucleic acid molecule comprising the nucleic acid molecule shown in SEQ ID NO. 4077, or a homolog of said nucleic acid molecule or polypeptide, is increased or generated. For example, the activity of a corresponding nucleic acid molecule or a polypeptide derived from Arabidopsis thaliana is increased or generated, preferably comprising the nucleic acid molecule shown in SEQ ID NO. 4077 or polypeptide shown in SEQ ID NO. 4078, respectively, or a homolog thereof. E.g. an increased tolerance to abiotic environmental stress, in particular increased nutrient use efficiency as compared to a corresponding non-modified, e.g. a non-transformed, wild type plant cell, a plant or a part thereof is conferred if the activity “pyruvate decarboxylase or” if the activity of a nucleic acid molecule or a polypeptide comprising the nucleic acid or polypeptide or the consensus sequence or the polypeptide motif, as depicted in table I, II or IV, column 7 respective same line as SEQ ID NO. 4077 or SEQ ID NO. 4078, respectively, is increased or generated in a plant or part thereof. Preferably, the increase occurs cytoplasmic. In one embodiment an increased nitrogen use efficiency is conferred.

[0306] Particularly, an increase of yield from 1.05-fold to 1.23-fold, for example plus at least 100% thereof, under conditions of nitrogen deficiency is conferred compared to a corresponding non-modified, e.g. non-transformed, wild type plant.

[0307] Accordingly, in one embodiment, an increased yield as compared to a correspondingly non-modified, e.g. a non-transformed, wild type plant is conferred according to method of the invention, by increasing or generating the activity of a polypeptide comprising the yield-related polypeptide shown in SEQ ID NO.: 4338, or encoded by the yield-related nucleic acid molecule (or gene) comprising the nucleic acid shown in SEQ ID NO.: 4337, or a homolog of said nucleic acid molecule or polypeptide, e.g. derived from Arabidopsis thaliana. Thus, in one embodiment, the activity “calnexin homolog” or the activity of a nucleic acid molecule or a polypeptide comprising the nucleic acid or polypeptide or the consensus sequence or the polypeptide motif, depicted in table I, II or IV, column 7, respective same line as SEQ ID NO.: 4337, or SEQ ID NO.: 4338, respectively, is increased or generated in a plant cell, plant or part thereof. Preferably, the increase occurs cytoplasmic.

[0308] In a further embodiment, an increased nutrient use efficiency compared to a corresponding non-modified, e.g. a non-transformed, wild type plant is conferred if the activity of a polypeptide comprising the polypeptide shown in SEQ ID NO. 4338, or encoded by a nucleic acid molecule comprising the nucleic acid molecule shown in SEQ ID NO. 4337, or a homolog of said nucleic acid molecule or polypeptide, is increased or generated. For example, the activity of a corresponding nucleic acid molecule or a polypeptide derived from Arabidopsis thaliana is increased or generated, preferably comprising the nucleic acid molecule shown in SEQ ID NO. 4337 or polypeptide shown in SEQ ID NO. 4338, respectively, or a homolog thereof. E.g. an increased tolerance to abiotic environmental stress, in particular increased nutrient use efficiency as compared to a corresponding non-modified, e.g. a non-transformed, wild type plant cell, a plant or a part thereof is conferred if the activity “calnexin homolog or” if the activity of a nucleic acid molecule or a polypeptide comprising the nucleic acid or polypeptide or the consensus sequence or the polypeptide motif, as depicted in table I, II or IV, column 7 respective same line as SEQ ID NO. 4337 or SEQ ID NO. 4338, respectively, is increased or generated in a plant or part thereof. Preferably, the increase occurs cytoplasmic. In one embodiment an increased nitrogen use efficiency is conferred.

[0309] Particularly, an increase of yield from 1.05-fold to 1.22-fold, for example plus at least 100% thereof, under conditions of nitrogen deficiency is conferred compared to a corresponding non-modified, e.g. non-transformed, wild type plant.

[0310] In a further embodiment, an increased intrinsic yield, compared to a corresponding non-modified, e.g. a non-transformed, wild type plant is conferred if the activity of a polypeptide comprising the polypeptide shown in SEQ ID NO. 4338, or encoded by a nucleic acid molecule comprising the nucleic acid molecule shown in SEQ ID NO. 4337, or a homolog of said nucleic acid molecule or polypeptide, is increased or generated. For example, the activity of a corresponding nucleic acid molecule or a polypeptide derived from Arabidopsis thaliana is increased or generated, preferably comprising the nucleic acid molecule shown in SEQ ID NO. 4337 or polypeptide shown in SEQ ID NO. 4338, respectively, or a homolog thereof. E.g. an increased intrinsic yield, compared to a corresponding non-modified, e.g. a non-transformed, wild type plant is conferred if the activity “calnexin homolog” or if the activity of a nucleic acid molecule or a polypeptide comprising the nucleic acid or polypeptide or the consensus sequence or the polypeptide motif, depicted in table I, II or IV, column 7, respective same line as SEQ ID NO.: 4337 or SEQ ID NO.: 4338, respectively, is increased or generated in a plant or part thereof. Preferably, the increase occurs cytoplasmic. Particularly, an increase of yield from 1.05-fold to 1.223-fold, for example plus at least 100% thereof, under standard conditions, e.g. in the absence of nutrient deficiency and/or stress conditions is conferred compared to a corresponding control, e.g. an non-modified, e.g. non-transformed, wild type plant.

[0311] Accordingly, in one embodiment, an increased yield as compared to a correspondingly non-modified, e.g. a non-transformed, wild type plant is conferred according to method of the invention, by increasing or generating the activity of a polypeptide comprising the yield-related polypeptide shown in SEQ ID NO.: 4620, or encoded by the yield-related nucleic acid molecule (or gene) comprising the nucleic acid shown in SEQ ID NO.: 4619, or a homolog of said nucleic acid molecule or polypeptide, e.g. derived from Arabidopsis thaliana. Thus, in one embodiment, the activity “zinc finger family protein” or the activity of a nucleic acid molecule or a polypeptide comprising the nucleic acid or polypeptide or the consensus sequence or the polypeptide motif, depicted in table I, II or IV, column 7, respective same line as SEQ ID NO.: 4619, or SEQ ID NO.: 4620, respectively, is increased or generated in a plant cell, plant or part thereof. Preferably, the increase occurs cytoplasmic.

[0312] In a further embodiment, an increased tolerance to abiotic environmental stress, in particular increased low temperature tolerance, compared to a corresponding non-modified, e.g. a non-transformed, wild type plant is conferred if the activity of a polypeptide comprising the polypeptide shown in SEQ ID NO. 4620, or encoded by a nucleic acid molecule comprising the nucleic acid molecule shown in SEQ ID NO. 4619, or a homolog of said nucleic acid molecule or polypeptide, is increased or generated. For example, the activity of a corresponding nucleic acid molecule or a polypeptide derived from Arabidopsis thaliana is increased or generated, preferably comprising the nucleic acid molecule shown in SEQ ID NO. 4619 or polypeptide shown in SEQ ID NO. 4620, respectively, or a homolog thereof. E.g. an increased tolerance to abiotic environmental stress, in particular increased low temperature tolerance, compared to a corresponding non-modified, e.g. a non-transformed, wild type plant is conferred if the activity “zinc finger family protein” or if the activity of a nucleic acid molecule or a polypeptide comprising the nucleic acid or polypeptide or the consensus sequence or the polypeptide motif, depicted in table I, II or IV, column 7, respective same line as SEQ ID NO.: 4619 or SEQ ID NO.: 4620, respectively, is increased or generated in a plant or part thereof. Preferably, the increase occurs cytoplasmic. Particularly, an increase of yield from 1.05-fold to 1.089-fold, for example plus at least 100% thereof, under conditions of low temperature is conferred compared to a corresponding non-modified, e.g. non-transformed, wild type plant.

[0313] In a further embodiment, an increased nutrient use efficiency compared to a corresponding non-modified, e.g. a non-transformed, wild type plant is conferred if the activity of a polypeptide comprising the polypeptide shown in SEQ ID NO. 4620, or encoded by a nucleic acid molecule comprising the nucleic acid molecule shown in SEQ ID NO. 4619, or a homolog of said nucleic acid molecule or polypeptide, is increased or generated. For example, the activity of a corresponding nucleic acid molecule or a polypeptide derived from Arabidopsis thaliana is increased or generated, preferably comprising the nucleic acid molecule shown in SEQ ID NO. 4619 or polypeptide shown in SEQ ID NO. 4620, respectively, or a homolog thereof. E.g. an increased tolerance to abiotic environmental stress, in particular increased nutrient use efficiency as compared to a corresponding non-modified, e.g. a non-transformed, wild type plant cell, a plant or a part thereof is conferred if the activity “zinc finger family protein or” if the activity of a nucleic acid molecule or a polypeptide comprising the nucleic acid or polypeptide or the consensus sequence or the polypeptide motif, as depicted in table I, II or IV, column 7 respective same line as SEQ ID NO. 4619 or SEQ ID NO. 4620, respectively, is increased or generated in a plant or part thereof. Preferably, the increase occurs cytoplasmic. In one embodiment an increased nitrogen use efficiency is conferred.

[0314] Particularly, an increase of yield from 1.05-fold to 1.32-fold, for example plus at least 100% thereof, under conditions of nitrogen deficiency is conferred compared to a corresponding non-modified, e.g. non-transformed, wild type plant.

[0315] In a further embodiment, an increased intrinsic yield, compared to a corresponding non-modified, e.g. a non-transformed, wild type plant is conferred if the activity of a polypeptide comprising the polypeptide shown in SEQ ID NO. 4620, or encoded by a nucleic acid molecule comprising the nucleic acid molecule shown in SEQ ID NO. 4619, or a homolog of said nucleic acid molecule or polypeptide, is increased or generated. For example, the activity of a corresponding nucleic acid molecule or a polypeptide derived from Arabidopsis thaliana is increased or generated, preferably comprising the nucleic acid molecule shown in SEQ ID NO. 4619 or polypeptide shown in SEQ ID NO. 4620, respectively, or a homolog thereof. E.g. an increased intrinsic yield, compared to a corresponding non-modified, e.g. a non-transformed, wild type plant is conferred if the activity “zinc finger family protein” or if the activity of a nucleic acid molecule or a polypeptide comprising the nucleic acid or polypeptide or the consensus sequence or the polypeptide motif, depicted in table I, II or IV, column 7, respective same line as SEQ ID NO.: 4619 or SEQ ID NO.: 4620, respectively, is increased or generated in a plant or part thereof. Preferably, the increase occurs cytoplasmic. Particularly, an increase of yield from 1.05-fold to 1.115-fold, for example plus at least 100% thereof, under standard conditions, e.g. in the absence of nutrient deficiency and/or stress conditions is conferred compared to a corresponding control, e.g. an non-modified, e.g. non-transformed, wild type plant.

[0316] Accordingly, in one embodiment, an increased yield as compared to a correspondingly non-modified, e.g. a non-transformed, wild type plant is conferred according to method of the invention, by increasing or generating the activity of a polypeptide comprising the yield-related polypeptide shown in SEQ ID NO.: 6311, or encoded by the yield-related nucleic acid molecule (or gene) comprising the nucleic acid shown in SEQ ID NO.: 6310, or a homolog of said nucleic acid molecule or polypeptide, e.g. derived from Azotobacter vinelandii. Thus, in one embodiment, the activity “Sulfatase” or the activity of a nucleic acid molecule or a polypeptide comprising the nucleic acid or polypeptide or the consensus sequence or the polypeptide motif, depicted in table I, II or IV, column 7, respective same line as SEQ ID NO.: 6310, or SEQ ID NO.: 6311, respectively, is increased or generated in a plant cell, plant or part thereof. Preferably, the increase occurs cytoplasmic.

[0317] In a further embodiment, an increased tolerance to abiotic environmental stress, in particular increased low temperature tolerance, compared to a corresponding non-modified, e.g. a non-transformed, wild type plant is conferred if the activity of a polypeptide comprising the polypeptide shown in SEQ ID NO. 6311, or encoded by a nucleic acid molecule comprising the nucleic acid molecule shown in SEQ ID NO. 6310, or a homolog of said nucleic acid molecule or polypeptide, is increased or generated. For example, the activity of a corresponding nucleic acid molecule or a polypeptide derived from Azotobacter vinelandii is increased or generated, preferably comprising the nucleic acid molecule shown in SEQ ID NO. 6310 or polypeptide shown in SEQ ID NO. 6311, respectively, or a homolog thereof. E.g. an increased tolerance to abiotic environmental stress, in particular increased low temperature tolerance, compared to a corresponding non-modified, e.g. a non-transformed, wild type plant is conferred if the activity “Sulfatase” or if the activity of a nucleic acid molecule or a polypeptide comprising the nucleic acid or polypeptide or the consensus sequence or the polypeptide motif, depicted in table I, II or IV, column 7, respective same line as SEQ ID NO.: 6310 or SEQ ID NO.: 6311, respectively, is increased or generated in a plant or part thereof. Preferably, the increase occurs cytoplasmic. Particularly, an increase of yield from 1.05-fold to 1.144-fold, for example plus at least 100% thereof, under conditions of low temperature is conferred compared to a corresponding non-modified, e.g. non-transformed, wild type plant.

[0318] In a further embodiment, an increased nutrient use efficiency compared to a corresponding non-modified, e.g. a non-transformed, wild type plant is conferred if the activity of a polypeptide comprising the polypeptide shown in SEQ ID NO. 6311, or encoded by a nucleic acid molecule comprising the nucleic acid molecule shown in SEQ ID NO. 6310, or a homolog of said nucleic acid molecule or polypeptide, is increased or generated. For example, the activity of a corresponding nucleic acid molecule or a polypeptide derived from Azotobacter vinelandii is increased or generated, preferably comprising the nucleic acid molecule shown in SEQ ID NO. 6310 or polypeptide shown in SEQ ID NO. 6311, respectively, or a homolog thereof. E.g. an increased tolerance to abiotic environmental stress, in particular increased nutrient use efficiency as compared to a corresponding non-modified, e.g. a non-transformed, wild type plant cell, a plant or a part thereof is conferred if the activity “Sulfatase or” if the activity of a nucleic acid molecule or a polypeptide comprising the nucleic acid or polypeptide or the consensus sequence or the polypeptide motif, as depicted in table I, II or IV, column 7 respective same line as SEQ ID NO. 6310 or SEQ ID NO. 6311, respectively, is increased or generated in a plant or part thereof. Preferably, the increase occurs cytoplasmic. In one embodiment an increased nitrogen use efficiency is conferred.

[0319] Particularly, an increase of yield from 1.05-fold to 1.17-fold, for example plus at least 100% thereof, under conditions of nitrogen deficiency is conferred compared to a corresponding non-modified, e.g. non-transformed, wild type plant.

[0320] Accordingly, in one embodiment, an increased yield as compared to a correspondingly non-modified, e.g. a non-transformed, wild type plant is conferred according to method of the invention, by increasing or generating the activity of a polypeptide comprising the yield-related polypeptide shown in SEQ ID NO.: 5808, or encoded by the yield-related nucleic acid molecule (or gene) comprising the nucleic acid shown in SEQ ID NO.: 5807, or a homolog of said nucleic acid molecule or polypeptide, e.g. derived from Azotobacter vinelandii. Thus, in one embodiment, the activity “Phosphoglucosamine mutase” or the activity of a nucleic acid molecule or a polypeptide comprising the nucleic acid or polypeptide or the consensus sequence or the polypeptide motif, depicted in table I, II or IV, column 7, respective same line as SEQ ID NO.: 5807, or SEQ ID NO.: 5808, respectively, is increased or generated in a plant cell, plant or part thereof. Preferably, the increase occurs cytoplasmic.

[0321] In a further embodiment, an increased tolerance to abiotic environmental stress, in particular increased low temperature tolerance, compared to a corresponding non-modified, e.g. a non-transformed, wild type plant is conferred if the activity of a polypeptide comprising the polypeptide shown in SEQ ID NO. 5808, or encoded by a nucleic acid molecule comprising the nucleic acid molecule shown in SEQ ID NO. 5807, or a homolog of said nucleic acid molecule or polypeptide, is increased or generated. For example, the activity of a corresponding nucleic acid molecule or a polypeptide derived from Azotobacter vinelandii is increased or generated, preferably comprising the nucleic acid molecule shown in SEQ ID NO. 5807 or polypeptide shown in SEQ ID NO. 5808, respectively, or a homolog thereof. E.g. an increased tolerance to abiotic environmental stress, in particular increased low temperature tolerance, compared to a corresponding non-modified, e.g. a non-transformed, wild type plant is conferred if the activity “Phosphoglucosamine mutase” or if the activity of a nucleic acid molecule or a polypeptide comprising the nucleic acid or polypeptide or the consensus sequence or the polypeptide motif, depicted in table I, II or IV, column 7, respective same line as SEQ ID NO.: 5807 or SEQ ID NO.: 5808, respectively, is increased or generated in a plant or part thereof. Preferably, the increase occurs cytoplasmic. Particularly, an increase of yield from 1.05-fold to 1.148-fold, for example plus at least 100% thereof, under conditions of low temperature is conferred compared to a corresponding non-modified, e.g. non-transformed, wild type plant.

[0322] In a further embodiment, an increased nutrient use efficiency compared to a corresponding non-modified, e.g. a non-transformed, wild type plant is conferred if the activity of a polypeptide comprising the polypeptide shown in SEQ ID NO. 5808, or encoded by a nucleic acid molecule comprising the nucleic acid molecule shown in SEQ ID NO. 5807, or a homolog of said nucleic acid molecule or polypeptide, is increased or generated. For example, the activity of a corresponding nucleic acid molecule or a polypeptide derived from Azotobacter vinelandii is increased or generated, preferably comprising the nucleic acid molecule shown in SEQ ID NO. 5807 or polypeptide shown in SEQ ID NO. 5808, respectively, or a homolog thereof. E.g. an increased tolerance to abiotic environmental stress, in particular increased nutrient use efficiency as compared to a corresponding non-modified, e.g. a non-transformed, wild type plant cell, a plant or a part thereof is conferred if the activity “Phosphoglucosamine mutase or” if the activity of a nucleic acid molecule or a polypeptide comprising the nucleic acid or polypeptide or the consensus sequence or the polypeptide motif, as depicted in table I, II or IV, column 7 respective same line as SEQ ID NO. 5807 or SEQ ID NO. 5808, respectively, is increased or generated in a plant or part thereof. Preferably, the increase occurs cytoplasmic. In one embodiment an increased nitrogen use efficiency is conferred.

[0323] Particularly, an increase of yield from 1.05-fold to 1.23-fold, for example plus at least 100% thereof, under conditions of nitrogen deficiency is conferred compared to a corresponding non-modified, e.g. non-transformed, wild type plant.

[0324] In a further embodiment, an increased intrinsic yield, compared to a corresponding non-modified, e.g. a non-transformed, wild type plant is conferred if the activity of a polypeptide comprising the polypeptide shown in SEQ ID NO. 5808, or encoded by a nucleic acid molecule comprising the nucleic acid molecule shown in SEQ ID NO. 5807, or a homolog of said nucleic acid molecule or polypeptide, is increased or generated. For example, the activity of a corresponding nucleic acid molecule or a polypeptide derived from Azotobacter vinelandii is increased or generated, preferably comprising the nucleic acid molecule shown in SEQ ID NO. 5807 or polypeptide shown in SEQ ID NO. 5808, respectively, or a homolog thereof. E.g. an increased intrinsic yield, compared to a corresponding non-modified, e.g. a non-transformed, wild type plant is conferred if the activity “Phosphoglucosamine mutase” or if the activity of a nucleic acid molecule or a polypeptide comprising the nucleic acid or polypeptide or the consensus sequence or the polypeptide motif, depicted in table I, II or IV, column 7, respective same line as SEQ ID NO.: 5807 or SEQ ID NO.: 5808, respectively, is increased or generated in a plant or part thereof. Preferably, the increase occurs cytoplasmic. Particularly, an increase of yield from 1.05-fold to 1.129-fold, for example plus at least 100% thereof, under standard conditions, e.g. in the absence of nutrient deficiency and/or stress conditions is conferred compared to a corresponding control, e.g. an non-modified, e.g. non-transformed, wild type plant.

[0325] Accordingly, in one embodiment, an increased yield as compared to a correspondingly non-modified, e.g. a non-transformed, wild type plant is conferred according to method of the invention, by increasing or generating the activity of a polypeptide comprising the yield-related polypeptide shown in SEQ ID NO.: 7541, or encoded by the yield-related nucleic acid molecule (or gene) comprising the nucleic acid shown in SEQ ID NO.: 7540, or a homolog of said nucleic acid molecule or polypeptide, e.g. derived from Synechocystis sp. Thus, in one embodiment, the activity “SLL1797-protein” or the activity of a nucleic acid molecule or a polypeptide comprising the nucleic acid or polypeptide or the consensus sequence or the polypeptide motif, depicted in table I, II or IV, column 7, respective same line as SEQ ID NO.: 7540, or SEQ ID NO.: 7541, respectively, is increased or generated in a plant cell, plant or part thereof. Preferably, the increase occurs cytoplasmic.

[0326] In a further embodiment, an increased tolerance to abiotic environmental stress, in particular increased low temperature tolerance, compared to a corresponding non-modified, e.g. a non-transformed, wild type plant is conferred if the activity of a polypeptide comprising the polypeptide shown in SEQ ID NO. 7541, or encoded by a nucleic acid molecule comprising the nucleic acid molecule shown in SEQ ID NO. 7540, or a homolog of said nucleic acid molecule or polypeptide, is increased or generated. For example, the activity of a corresponding nucleic acid molecule or a polypeptide derived from Synechocystis sp. is increased or generated, preferably comprising the nucleic acid molecule shown in SEQ ID NO. 7540 or polypeptide shown in SEQ ID NO. 7541, respectively, or a homolog thereof. E.g. an increased tolerance to abiotic environmental stress, in particular increased low temperature tolerance, compared to a corresponding non-modified, e.g. a non-transformed, wild type plant is conferred if the activity “SLL1797-protein” or if the activity of a nucleic acid molecule or a polypeptide comprising the nucleic acid or polypeptide or the consensus sequence or the polypeptide motif, depicted in table I, II or IV, column 7, respective same line as SEQ ID NO.: 7540 or SEQ ID NO.: 7541, respectively, is increased or generated in a plant or part thereof. Preferably, the increase occurs cytoplasmic. Particularly, an increase of yield from 1.05-fold to 1.086-fold, for example plus at least 100% thereof, under conditions of low temperature is conferred compared to a corresponding non-modified, e.g. non-transformed, wild type plant.

[0327] In a further embodiment, an increased nutrient use efficiency compared to a corresponding non-modified, e.g. a non-transformed, wild type plant is conferred if the activity of a polypeptide comprising the polypeptide shown in SEQ ID NO. 7541, or encoded by a nucleic acid molecule comprising the nucleic acid molecule shown in SEQ ID NO. 7540, or a homolog of said nucleic acid molecule or polypeptide, is increased or generated. For example, the activity of a corresponding nucleic acid molecule or a polypeptide derived from Synechocystis sp. is increased or generated, preferably comprising the nucleic acid molecule shown in SEQ ID NO. 7540 or polypeptide shown in SEQ ID NO. 7541, respectively, or a homolog thereof. E.g. an increased tolerance to abiotic environmental stress, in particular increased nutrient use efficiency as compared to a corresponding non-modified, e.g. a non-transformed, wild type plant cell, a plant or a part thereof is conferred if the activity “SLL1797-protein or” if the activity of a nucleic acid molecule or a polypeptide comprising the nucleic acid or polypeptide or the consensus sequence or the polypeptide motif, as depicted in table I, II or IV, column 7 respective same line as SEQ ID NO. 7540 or SEQ ID NO. 7541, respectively, is increased or generated in a plant or part thereof. Preferably, the increase occurs cytoplasmic. In one embodiment an increased nitrogen use efficiency is conferred.

[0328] Particularly, an increase of yield from 1.05-fold to 1.11-fold, for example plus at least 100% thereof, under conditions of nitrogen deficiency is conferred compared to a corresponding non-modified, e.g. non-transformed, wild type plant.

[0329] Accordingly, in one embodiment, an increased yield as compared to a correspondingly non-modified, e.g. a non-transformed, wild type plant is conferred according to method of the invention, by increasing or generating the activity of a polypeptide comprising the yield-related polypeptide shown in SEQ ID NO.: 7975, or encoded by the yield-related nucleic acid molecule (or gene) comprising the nucleic acid shown in SEQ ID NO.: 7974, or a homolog of said nucleic acid molecule or polypeptide, e.g. derived from Saccharomyces cerevisiae. Thus, in one embodiment, the activity “Microsomal cytochrome b reductase” or the activity of a nucleic acid molecule or a polypeptide comprising the nucleic acid or polypeptide or the consensus sequence or the polypeptide motif, depicted in table I, II or IV, column 7, respective same line as SEQ ID NO.: 7974, or SEQ ID NO.: 7975, respectively, is increased or generated in a plant cell, plant or part thereof. Preferably, the increase occurs cytoplasmic.

[0330] In a further embodiment, an increased tolerance to abiotic environmental stress, in particular increased low temperature tolerance, compared to a corresponding non-modified, e.g. a non-transformed, wild type plant is conferred if the activity of a polypeptide comprising the polypeptide shown in SEQ ID NO. 7975, or encoded by a nucleic acid molecule comprising the nucleic acid molecule shown in SEQ ID NO. 7974, or a homolog of said nucleic acid molecule or polypeptide, is increased or generated. For example, the activity of a corresponding nucleic acid molecule or a polypeptide derived from Saccharomyces cerevisiae is increased or generated, preferably comprising the nucleic acid molecule shown in SEQ ID NO. 7974 or polypeptide shown in SEQ ID NO. 7975, respectively, or a homolog thereof. E.g. an increased tolerance to abiotic environmental stress, in particular increased low temperature tolerance, compared to a corresponding non-modified, e.g. a non-transformed, wild type plant is conferred if the activity “Microsomal cytochrome b reductase” or if the activity of a nucleic acid molecule or a polypeptide comprising the nucleic acid or polypeptide or the consensus sequence or the polypeptide motif, depicted in table I, II or IV, column 7, respective same line as SEQ ID NO.: 7974 or SEQ ID NO.: 7975, respectively, is increased or generated in a plant or part thereof. Preferably, the increase occurs cytoplasmic. Particularly, an increase of yield from 1.05-fold to 1.076-fold, for example plus at least 100% thereof, under conditions of low temperature is conferred compared to a corresponding non-modified, e.g. non-transformed, wild type plant.

[0331] In a further embodiment, an increased nutrient use efficiency compared to a corresponding non-modified, e.g. a non-transformed, wild type plant is conferred if the activity of a polypeptide comprising the polypeptide shown in SEQ ID NO. 7975, or encoded by a nucleic acid molecule comprising the nucleic acid molecule shown in SEQ ID NO. 7974, or a homolog of said nucleic acid molecule or polypeptide, is increased or generated. For example, the activity of a corresponding nucleic acid molecule or a polypeptide derived from Saccharomyces cerevisiae is increased or generated, preferably comprising the nucleic acid molecule shown in SEQ ID NO. 7974 or polypeptide shown in SEQ ID NO. 7975, respectively, or a homolog thereof. E.g. an increased tolerance to abiotic environmental stress, in particular increased nutrient use efficiency as compared to a corresponding non-modified, e.g. a non-transformed, wild type plant cell, a plant or a part thereof is conferred if the activity “Microsomal cytochrome b reductase or” if the activity of a nucleic acid molecule or a polypeptide comprising the nucleic acid or polypeptide or the consensus sequence or the polypeptide motif, as depicted in table I, II or IV, column 7 respective same line as SEQ ID NO. 7974 or SEQ ID NO. 7975, respectively, is increased or generated in a plant or part thereof. Preferably, the increase occurs cytoplasmic. In one embodiment an increased nitrogen use efficiency is conferred.

[0332] Particularly, an increase of yield from 1.05-fold to 1.51-fold, for example plus at least 100% thereof, under conditions of nitrogen deficiency is conferred compared to a corresponding non-modified, e.g. non-transformed, wild type plant.

[0333] In a further embodiment, an increased intrinsic yield, compared to a corresponding non-modified, e.g. a non-transformed, wild type plant is conferred if the activity of a polypeptide comprising the polypeptide shown in SEQ ID NO. 7975, or encoded by a nucleic acid molecule comprising the nucleic acid molecule shown in SEQ ID NO. 7974, or a homolog of said nucleic acid molecule or polypeptide, is increased or generated. For example, the activity of a corresponding nucleic acid molecule or a polypeptide derived from Saccharomyces cerevisiae is increased or generated, preferably comprising the nucleic acid molecule shown in SEQ ID NO. 7974 or polypeptide shown in SEQ ID NO. 7975, respectively, or a homolog thereof. E.g. an increased intrinsic yield, compared to a corresponding non-modified, e.g. a non-transformed, wild type plant is conferred if the activity “Microsomal cytochrome b reductase” or if the activity of a nucleic acid molecule or a polypeptide comprising the nucleic acid or polypeptide or the consensus sequence or the polypeptide motif, depicted in table I, II or IV, column 7, respective same line as SEQ ID NO.: 7974 or SEQ ID NO.: 7975, respectively, is increased or generated in a plant or part thereof. Preferably, the increase occurs cytoplasmic. Particularly, an increase of yield from 1.05-fold to 1.365-fold, for example plus at least 100% thereof, under standard conditions, e.g. in the absence of nutrient deficiency and/or stress conditions is conferred compared to a corresponding control, e.g. an non-modified, e.g. non-transformed, wild type plant.

[0334] Accordingly, in one embodiment, an increased yield as compared to a correspondingly non-modified, e.g. a non-transformed, wild type plant is conferred according to method of the invention, by increasing or generating the activity of a polypeptide comprising the yield-related polypeptide shown in SEQ ID NO.: 7535, or encoded by the yield-related nucleic acid molecule (or gene) comprising the nucleic acid shown in SEQ ID NO.: 7534, or a homolog of said nucleic acid molecule or polypeptide, e.g. derived from Escherichia coli. Thus, in one embodiment, the activity “B2940-protein” or the activity of a nucleic acid molecule or a polypeptide comprising the nucleic acid or polypeptide or the consensus sequence or the polypeptide motif, depicted in table I, II or IV, column 7, respective same line as SEQ ID NO.: 7534, or SEQ ID NO.: 7535, respectively, is increased or generated in a plant cell, plant or part thereof. Preferably, the increase occurs plastidic.

[0335] In a further embodiment, an increased tolerance to abiotic environmental stress, in particular increased low temperature tolerance, compared to a corresponding non-modified, e.g. a non-transformed, wild type plant is conferred if the activity of a polypeptide comprising the polypeptide shown in SEQ ID NO. 7535, or encoded by a nucleic acid molecule comprising the nucleic acid molecule shown in SEQ ID NO. 7534, or a homolog of said nucleic acid molecule or polypeptide, is increased or generated. For example, the activity of a corresponding nucleic acid molecule or a polypeptide derived from Escherichia coli is increased or generated, preferably comprising the nucleic acid molecule shown in SEQ ID NO. 7534 or polypeptide shown in SEQ ID NO. 7535, respectively, or a homolog thereof. E.g. an increased tolerance to abiotic environmental stress, in particular increased low temperature tolerance, compared to a corresponding non-modified, e.g. a non-transformed, wild type plant is conferred if the activity “B2940-protein” or if the activity of a nucleic acid molecule or a polypeptide comprising the nucleic acid or polypeptide or the consensus sequence or the polypeptide motif, depicted in table I, II or IV, column 7, respective same line as SEQ ID NO.: 7534 or SEQ ID NO.: 7535, respectively, is increased or generated in a plant or part thereof. Preferably, the increase occurs plastidic. Particularly, an increase of yield from 1.05-fold to 1.251-fold, for example plus at least 100% thereof, under conditions of low temperature is conferred compared to a corresponding non-modified, e.g. non-transformed, wild type plant.

[0336] In a further embodiment, an increased nutrient use efficiency compared to a corresponding non-modified, e.g. a non-transformed, wild type plant is conferred if the activity of a polypeptide comprising the polypeptide shown in SEQ ID NO. 7535, or encoded by a nucleic acid molecule comprising the nucleic acid molecule shown in SEQ ID NO. 7534, or a homolog of said nucleic acid molecule or polypeptide, is increased or generated. For example, the activity of a corresponding nucleic acid molecule or a polypeptide derived from Escherichia coli is increased or generated, preferably comprising the nucleic acid molecule shown in SEQ ID NO. 7534 or polypeptide shown in SEQ ID NO. 7535, respectively, or a homolog thereof. E.g. an increased tolerance to abiotic environmental stress, in particular increased nutrient use efficiency as compared to a corresponding non-modified, e.g. a non-transformed, wild type plant cell, a plant or a part thereof is conferred if the activity “B2940-protein or” if the activity of a nucleic acid molecule or a polypeptide comprising the nucleic acid or polypeptide or the consensus sequence or the polypeptide motif, as depicted in table I, II or IV, column 7 respective same line as SEQ ID NO. 7534 or SEQ ID NO. 7535, respectively, is increased or generated in a plant or part thereof. Preferably, the increase occurs plastidic. In one embodiment an increased nitrogen use efficiency is conferred.

[0337] Particularly, an increase of yield from 1.05-fold to 1.23-fold, for example plus at least 100% thereof, under conditions of nitrogen deficiency is conferred compared to a corresponding non-modified, e.g. non-transformed, wild type plant.

[0338] In a further embodiment, an increased intrinsic yield, compared to a corresponding non-modified, e.g. a non-transformed, wild type plant is conferred if the activity of a polypeptide comprising the polypeptide shown in SEQ ID NO. 7535, or encoded by a nucleic acid molecule comprising the nucleic acid molecule shown in SEQ ID NO. 7534, or a homolog of said nucleic acid molecule or polypeptide, is increased or generated. For example, the activity of a corresponding nucleic acid molecule or a polypeptide derived from Escherichia coli is increased or generated, preferably comprising the nucleic acid molecule shown in SEQ ID NO. 7534 or polypeptide shown in SEQ ID NO. 7535, respectively, or a homolog thereof. E.g. an increased intrinsic yield, compared to a corresponding non-modified, e.g. a non-transformed, wild type plant is conferred if the activity “B2940-protein” or if the activity of a nucleic acid molecule or a polypeptide comprising the nucleic acid or polypeptide or the consensus sequence or the polypeptide motif, depicted in table I, II or IV, column 7, respective same line as SEQ ID NO.: 7534 or SEQ ID NO.: 7535, respectively, is increased or generated in a plant or part thereof. Preferably, the increase occurs plastidic. Particularly, an increase of yield from 1.05-fold to 1.119-fold, for example plus at least 100% thereof, under standard conditions, e.g. in the absence of nutrient deficiency and/or stress conditions is conferred compared to a corresponding control, e.g. an non-modified, e.g. non-transformed, wild type plant.

[0339] Accordingly, in one embodiment, an increased yield as compared to a correspondingly non-modified, e.g. a non-transformed, wild type plant is conferred according to method of the invention, by increasing or generating the activity of a polypeptide comprising the yield-related polypeptide shown in SEQ ID NO.: 5258, or encoded by the yield-related nucleic acid molecule (or gene) comprising the nucleic acid shown in SEQ ID NO.: 5257, or a homolog of said nucleic acid molecule or polypeptide, e.g. derived from Arabidopsis thaliana. Thus, in one embodiment, the activity “recA family protein” or the activity of a nucleic acid molecule or a polypeptide comprising the nucleic acid or polypeptide or the consensus sequence or the polypeptide motif, depicted in table I, II or IV, column 7, respective same line as SEQ ID NO.: 5257, or SEQ ID NO.: 5258, respectively, is increased or generated in a plant cell, plant or part thereof. Preferably, the increase occurs cytoplasmic.

[0340] In a further embodiment, an increased nutrient use efficiency compared to a corresponding non-modified, e.g. a non-transformed, wild type plant is conferred if the activity of a polypeptide comprising the polypeptide shown in SEQ ID NO. 5258, or encoded by a nucleic acid molecule comprising the nucleic acid molecule shown in SEQ ID NO. 5257, or a homolog of said nucleic acid molecule or polypeptide, is increased or generated. For example, the activity of a corresponding nucleic acid molecule or a polypeptide derived from Arabidopsis thaliana is increased or generated, preferably comprising the nucleic acid molecule shown in SEQ ID NO. 5257 or polypeptide shown in SEQ ID NO. 5258, respectively, or a homolog thereof. E.g. an increased tolerance to abiotic environmental stress, in particular increased nutrient use efficiency as compared to a corresponding non-modified, e.g. a non-transformed, wild type plant cell, a plant or a part thereof is conferred if the activity “recA family protein or” if the activity of a nucleic acid molecule or a polypeptide comprising the nucleic acid or polypeptide or the consensus sequence or the polypeptide motif, as depicted in table I, II or IV, column 7 respective same line as SEQ ID NO. 5257 or SEQ ID NO. 5258, respectively, is increased or generated in a plant or part thereof. Preferably, the increase occurs cytoplasmic. In one embodiment an increased nitrogen use efficiency is conferred.

[0341] Particularly, an increase of yield from 1.05-fold to 1.11-fold, for example plus at least 100% thereof, under conditions of nitrogen deficiency is conferred compared to a corresponding non-modified, e.g. non-transformed, wild type plant.

Accordingly, in one embodiment, an increased yield as compared to a correspondingly non-modified, e.g. a non-transformed, wild type plant is conferred according to method of the invention, by increasing or generating the activity of a polypeptide comprising the yield-related polypeptide shown in SEQ ID NO.: 6333, or encoded by the yield-related nucleic acid molecule (or gene) comprising the nucleic acid shown in SEQ ID NO.: 6332, or a homolog of said nucleic acid molecule or polypeptide, e.g. derived from Escherichia coli. Thus, in one embodiment, the activity “paraquat-inducible protein B” or the activity of a nucleic acid molecule or a polypeptide comprising the nucleic acid or polypeptide or the consensus sequence or the polypeptide motif, depicted in table I, II or IV, column 7, respective same line as SEQ ID NO.: 6332, or SEQ ID NO.: 6333, respectively, is increased or generated in a plant cell, plant or part thereof. Preferably, the increase occurs cytoplasmic.

[0342] In a further embodiment, an increased nutrient use efficiency compared to a corresponding non-modified, e.g. a non-transformed, wild type plant is conferred if the activity of a polypeptide comprising the polypeptide shown in SEQ ID NO. 6333, or encoded by a nucleic acid molecule comprising the nucleic acid molecule shown in SEQ ID NO. 6332, or a homolog of said nucleic acid molecule or polypeptide, is increased or generated. For example, the activity of a corresponding nucleic acid molecule or a polypeptide derived from Escherichia coli is increased or generated, preferably comprising the nucleic acid molecule shown in SEQ ID NO. 6332 or polypeptide shown in SEQ ID NO. 6333, respectively, or a homolog thereof. E.g. an increased tolerance to abiotic environmental stress, in particular increased nutrient use efficiency as compared to a corresponding non-modified, e.g. a non-transformed, wild type plant cell, a plant or a part thereof is conferred if the activity “paraquat-inducible protein B or” if the activity of a nucleic acid molecule or a polypeptide comprising the nucleic acid or polypeptide or the consensus sequence or the polypeptide motif, as depicted in table I, II or IV, column 7 respective same line as SEQ ID NO. 6332 or SEQ ID NO. 6333, respectively, is increased or generated in a plant or part thereof. Preferably, the increase occurs cytoplasmic. In one embodiment an increased nitrogen use efficiency is conferred.

[0343] Particularly, an increase of yield from 1.05-fold to 1.11-fold, for example plus at least 100% thereof, under conditions of nitrogen deficiency is conferred compared to a corresponding non-modified, e.g. non-transformed, wild type plant.

[0344] Accordingly, in one embodiment, an increased yield as compared to a correspondingly non-modified, e.g. a non-transformed, wild type plant is conferred according to method of the invention, by increasing or generating the activity of a polypeptide comprising the yield-related polypeptide shown in SEQ ID NO.: 7593, or encoded by the yield-related nucleic acid molecule (or gene) comprising the nucleic acid shown in SEQ ID NO.: 7592, or a homolog of said nucleic acid molecule or polypeptide, e.g. derived from Saccharomyces cerevisiae. Thus, in one embodiment, the activity “Delta 1-pyrroline-5-carboxylate reductase” or the activity of a nucleic acid molecule or a polypeptide comprising the nucleic acid or polypeptide or the consensus sequence or the polypeptide motif, depicted in table I, II or IV, column 7, respective same line as SEQ ID NO.: 7592, or SEQ ID NO.: 7593, respectively, is increased or generated in a plant cell, plant or part thereof. Preferably, the increase occurs cytoplasmic.

[0345] In a further embodiment, an increased nutrient use efficiency compared to a corresponding non-modified, e.g. a non-transformed, wild type plant is conferred if the activity of a polypeptide comprising the polypeptide shown in SEQ ID NO. 7593, or encoded by a nucleic acid molecule comprising the nucleic acid molecule shown in SEQ ID NO. 7592, or a homolog of said nucleic acid molecule or polypeptide, is increased or generated. For example, the activity of a corresponding nucleic acid molecule or a polypeptide derived from Saccharomyces cerevisiae is increased or generated, preferably comprising the nucleic acid molecule shown in SEQ ID NO. 7592 or polypeptide shown in SEQ ID NO. 7593, respectively, or a homolog thereof. E.g. an increased tolerance to abiotic environmental stress, in particular increased nutrient use efficiency as compared to a corresponding non-modified, e.g. a non-transformed, wild type plant cell, a plant or a part thereof is conferred if the activity “Delta 1-pyrroline-5-carboxylate reductase or” if the activity of a nucleic acid molecule or a polypeptide comprising the nucleic acid or polypeptide or the consensus sequence or the polypeptide motif, as depicted in table I, II or IV, column 7 respective same line as SEQ ID NO. 7592 or SEQ ID NO. 7593, respectively, is increased or generated in a plant or part thereof. Preferably, the increase occurs cytoplasmic. In one embodiment an increased nitrogen use efficiency is conferred.

[0346] Particularly, an increase of yield from 1.05-fold to 1.16-fold, for example plus at least 100% thereof, under conditions of nitrogen deficiency is conferred compared to a corresponding non-modified, e.g. non-transformed, wild type plant.

[0347] In a further embodiment, an increased intrinsic yield, compared to a corresponding non-modified, e.g. a non-transformed, wild type plant is conferred if the activity of a polypeptide comprising the polypeptide shown in SEQ ID NO. 7593, or encoded by a nucleic acid molecule comprising the nucleic acid molecule shown in SEQ ID NO. 7592, or a homolog of said nucleic acid molecule or polypeptide, is increased or generated. For example, the activity of a corresponding nucleic acid molecule or a polypeptide derived from Saccharomyces cerevisiae is increased or generated, preferably comprising the nucleic acid molecule shown in SEQ ID NO. 7592 or polypeptide shown in SEQ ID NO. 7593, respectively, or a homolog thereof. E.g. an increased intrinsic yield, compared to a corresponding non-modified, e.g. a non-transformed, wild type plant is conferred if the activity “Delta 1-pyrroline-5-carboxylate reductase” or if the activity of a nucleic acid molecule or a polypeptide comprising the nucleic acid or polypeptide or the consensus sequence or the polypeptide motif, depicted in table I, II or IV, column 7, respective same line as SEQ ID NO.: 7592 or SEQ ID NO.: 7593, respectively, is increased or generated in a plant or part thereof. Preferably, the increase occurs cytoplasmic. Particularly, an increase of yield from 1.05-fold to 1.116-fold, for example plus at least 100% thereof, under standard conditions, e.g. in the absence of nutrient deficiency and/or stress conditions is conferred compared to a corresponding control, e.g. an non-modified, e.g. non-transformed, wild type plant.

[0348] Accordingly, in one embodiment, an increased yield as compared to a correspondingly non-modified, e.g. a non-transformed, wild type plant is conferred according to method of the invention, by increasing or generating the activity of a polypeptide comprising the yield-related polypeptide shown in SEQ ID NO.: 6437, or encoded by the yield-related nucleic acid molecule (or gene) comprising the nucleic acid shown in SEQ ID NO.: 6436, or a homolog of said nucleic acid molecule or polypeptide, e.g. derived from Escherichia coli. Thus, in one embodiment, the activity “D-amino acid dehydrogenase” or the activity of a nucleic acid molecule or a polypeptide comprising the nucleic acid or polypeptide or the consensus sequence or the polypeptide motif, depicted in table I, II or IV, column 7, respective same line as SEQ ID NO.: 6436, or SEQ ID NO.: 6437, respectively, is increased or generated in a plant cell, plant or part thereof. Preferably, the increase occurs plastidic.

[0349] In a further embodiment, an increased nutrient use efficiency compared to a corresponding non-modified, e.g. a non-transformed, wild type plant is conferred if the activity of a polypeptide comprising the polypeptide shown in SEQ ID NO. 6437, or encoded by a nucleic acid molecule comprising the nucleic acid molecule shown in SEQ ID NO. 6436, or a homolog of said nucleic acid molecule or polypeptide, is increased or generated. For example, the activity of a corresponding nucleic acid molecule or a polypeptide derived from Escherichia coli is increased or generated, preferably comprising the nucleic acid molecule shown in SEQ ID NO. 6436 or polypeptide shown in SEQ ID NO. 6437, respectively, or a homolog thereof. E.g. an increased tolerance to abiotic environmental stress, in particular increased nutrient use efficiency as compared to a corresponding non-modified, e.g. a non-transformed, wild type plant cell, a plant or a part thereof is conferred if the activity “D-amino acid dehydrogenase or” if the activity of a nucleic acid molecule or a polypeptide comprising the nucleic acid or polypeptide or the consensus sequence or the polypeptide motif, as depicted in table I, II or IV, column 7 respective same line as SEQ ID NO. 6436 or SEQ ID NO. 6437, respectively, is increased or generated in a plant or part thereof. Preferably, the increase occurs plastidic. In one embodiment an increased nitrogen use efficiency is conferred.

[0350] Particularly, an increase of yield from 1.05-fold to 1.44-fold, for example plus at least 100% thereof, under conditions of nitrogen deficiency is conferred compared to a corresponding non-modified, e.g. non-transformed, wild type plant.

[0351] Accordingly, in one embodiment, an increased yield as compared to a correspondingly non-modified, e.g. a non-transformed, wild type plant is conferred according to method of the invention, by increasing or generating the activity of a polypeptide comprising the yield-related polypeptide shown in SEQ ID NO.: 6724, or encoded by the yield-related nucleic acid molecule (or gene) comprising the nucleic acid shown in SEQ ID NO.: 6723, or a homolog of said nucleic acid molecule or polypeptide, e.g. derived from Escherichia coli. Thus, in one embodiment, the activity “protein disaggregation chaperone” or the activity of a nucleic acid molecule or a polypeptide comprising the nucleic acid or polypeptide or the consensus sequence or the polypeptide motif, depicted in table I, II or IV, column 7, respective same line as SEQ ID NO.: 6723, or SEQ ID NO.: 6724, respectively, is increased or generated in a plant cell, plant or part thereof. Preferably, the increase occurs plastidic.

[0352] In a further embodiment, an increased nutrient use efficiency compared to a corresponding non-modified, e.g. a non-transformed, wild type plant is conferred if the activity of a polypeptide comprising the polypeptide shown in SEQ ID NO. 6724, or encoded by a nucleic acid molecule comprising the nucleic acid molecule shown in SEQ ID NO. 6723, or a homolog of said nucleic acid molecule or polypeptide, is increased or generated. For example, the activity of a corresponding nucleic acid molecule or a polypeptide derived from Escherichia coli is increased or generated, preferably comprising the nucleic acid molecule shown in SEQ ID NO. 6723 or polypeptide shown in SEQ ID NO. 6724, respectively, or a homolog thereof. E.g. an increased tolerance to abiotic environmental stress, in particular increased nutrient use efficiency as compared to a corresponding non-modified, e.g. a non-transformed, wild type plant cell, a plant or a part thereof is conferred if the activity “protein disaggregation chaperone or” if the activity of a nucleic acid molecule or a polypeptide comprising the nucleic acid or polypeptide or the consensus sequence or the polypeptide motif, as depicted in table I, II or IV, column 7 respective same line as SEQ ID NO. 6723 or SEQ ID NO. 6724, respectively, is increased or generated in a plant or part thereof. Preferably, the increase occurs plastidic. In one embodiment an increased nitrogen use efficiency is conferred.

[0353] Particularly, an increase of yield from 1.05-fold to 1.13-fold, for example plus at least 100% thereof, under conditions of nitrogen deficiency is conferred compared to a corresponding non-modified, e.g. non-transformed, wild type plant.

[0354] Accordingly, in one embodiment, an increased yield as compared to a correspondingly non-modified, e.g. a non-transformed, wild type plant is conferred according to method of the invention, by increasing or generating the activity of a polypeptide comprising the yield-related polypeptide shown in SEQ ID NO.: 8091, or encoded by the yield-related nucleic acid molecule (or gene) comprising the nucleic acid shown in SEQ ID NO.: 8090, or a homolog of said nucleic acid molecule or polypeptide, e.g. derived from Arabidopsis thaliana. Thus, in one embodiment, the activity “17.6 kDa class I heat shock protein” or the activity of a nucleic acid molecule or a polypeptide comprising the nucleic acid or polypeptide or the consensus sequence or the polypeptide motif, depicted in table I, II or IV, column 7, respective same line as SEQ ID NO.: 8090, or SEQ ID NO.: 8091, respectively, is increased or generated in a plant cell, plant or part thereof. Preferably, the increase occurs cytoplasmic.

[0355] In a further embodiment, an increased tolerance to abiotic environmental stress, in particular increased low temperature tolerance, compared to a corresponding non-modified, e.g. a non-transformed, wild type plant is conferred if the activity of a polypeptide comprising the polypeptide shown in SEQ ID NO. 8091, or encoded by a nucleic acid molecule comprising the nucleic acid molecule shown in SEQ ID NO. 8090, or a homolog of said nucleic acid molecule or polypeptide, is increased or generated. For example, the activity of a corresponding nucleic acid molecule or a polypeptide derived from Arabidopsis thaliana is increased or generated, preferably comprising the nucleic acid molecule shown in SEQ ID NO. 8090 or polypeptide shown in SEQ ID NO. 8091, respectively, or a homolog thereof. E.g. an increased tolerance to abiotic environmental stress, in particular increased low temperature tolerance, compared to a corresponding non-modified, e.g. a non-transformed, wild type plant is conferred if the activity “17.6 kDa class I heat shock protein” or if the activity of a nucleic acid molecule or a polypeptide comprising the nucleic acid or polypeptide or the consensus sequence or the polypeptide motif, depicted in table I, II or IV, column 7, respective same line as SEQ ID NO.: 8090 or SEQ ID NO.: 8091, respectively, is increased or generated in a plant or part thereof. Preferably, the increase occurs cytoplasmic. Particularly, an increase of yield from 1.05-fold to 1.151-fold, for example plus at least 100% thereof, under conditions of low temperature is conferred compared to a corresponding non-modified, e.g. non-transformed, wild type plant.

[0356] In a further embodiment, an increased nutrient use efficiency compared to a corresponding non-modified, e.g. a non-transformed, wild type plant is conferred if the activity of a polypeptide comprising the polypeptide shown in SEQ ID NO. 8091, or encoded by a nucleic acid molecule comprising the nucleic acid molecule shown in SEQ ID NO. 8090, or a homolog of said nucleic acid molecule or polypeptide, is increased or generated. For example, the activity of a corresponding nucleic acid molecule or a polypeptide derived from Arabidopsis thaliana is increased or generated, preferably comprising the nucleic acid molecule shown in SEQ ID NO. 8090 or polypeptide shown in SEQ ID NO. 8091, respectively, or a homolog thereof. E.g. an increased tolerance to abiotic environmental stress, in particular increased nutrient use efficiency as compared to a corresponding non-modified, e.g. a non-transformed, wild type plant cell, a plant or a part thereof is conferred if the activity “17.6 kDa class I heat shock protein or” if the activity of a nucleic acid molecule or a polypeptide comprising the nucleic acid or polypeptide or the consensus sequence or the polypeptide motif, as depicted in table I, II or IV, column 7 respective same line as SEQ ID

[0357] NO. 8090 or SEQ ID NO. 8091, respectively, is increased or generated in a plant or part thereof. Preferably, the increase occurs cytoplasmic. In one embodiment an increased nitrogen use efficiency is conferred.

[0358] Particularly, an increase of yield from 1.05-fold to 1.407-fold, for example plus at least 100% thereof, under conditions of nitrogen deficiency is conferred compared to a corresponding non-modified, e.g. non-transformed, wild type plant.

[0359] In a further embodiment, an increased intrinsic yield, compared to a corresponding non-modified, e.g. a non-transformed, wild type plant is conferred if the activity of a polypeptide comprising the polypeptide shown in SEQ ID NO. 8091, or encoded by a nucleic acid molecule comprising the nucleic acid molecule shown in SEQ ID NO. 8090, or a homolog of said nucleic acid molecule or polypeptide, is increased or generated. For example, the activity of a corresponding nucleic acid molecule or a polypeptide derived from Arabidopsis thaliana is increased or generated, preferably comprising the nucleic acid molecule shown in SEQ ID NO. 8090 or polypeptide shown in SEQ ID NO. 8091, respectively, or a homolog thereof. E.g. an increased intrinsic yield, compared to a corresponding non-modified, e.g. a non-transformed, wild type plant is conferred if the activity “17.6 kDa class I heat shock protein” or if the activity of a nucleic acid molecule or a polypeptide comprising the nucleic acid or polypeptide or the consensus sequence or the polypeptide motif, depicted in table I, II or IV, column 7, respective same line as SEQ ID NO.: 8090 or SEQ ID NO.: 8091, respectively, is increased or generated in a plant or part thereof. Preferably, the increase occurs cytoplasmic. Particularly, an increase of yield from 1.05-fold to 1.069-fold, for example plus at least 100% thereof, under standard conditions, e.g. in the absence of nutrient deficiency and/or stress conditions is conferred compared to a corresponding control, e.g. an non-modified, e.g. non-transformed, wild type plant.

[0360] Accordingly, in one embodiment, an increased yield as compared to a correspondingly non-modified, e.g. a non-transformed, wild type plant is conferred according to method of the invention, by increasing or generating the activity of a polypeptide comprising the yield-related polypeptide shown in SEQ ID NO.: 8674, or encoded by the yield-related nucleic acid molecule (or gene) comprising the nucleic acid shown in SEQ ID NO.: 8673, or a homolog of said nucleic acid molecule or polypeptide, e.g. derived from Arabidopsis thaliana. Thus, in one embodiment, the activity “26.5 kDa class I small heat shock protein” or the activity of a nucleic acid molecule or a polypeptide comprising the nucleic acid or polypeptide or the consensus sequence or the polypeptide motif, depicted in table I, II or IV, column 7, respective same line as SEQ ID NO.: 8673, or SEQ ID NO.: 8674, respectively, is increased or generated in a plant cell, plant or part thereof. Preferably, the increase occurs cytoplasmic.

[0361] In a further embodiment, an increased tolerance to abiotic environmental stress, in particular increased low temperature tolerance, compared to a corresponding non-modified, e.g. a non-transformed, wild type plant is conferred if the activity of a polypeptide comprising the polypeptide shown in SEQ ID NO. 8674, or encoded by a nucleic acid molecule comprising the nucleic acid molecule shown in SEQ ID NO. 8673, or a homolog of said nucleic acid molecule or polypeptide, is increased or generated. For example, the activity of a corresponding nucleic acid molecule or a polypeptide derived from Arabidopsis thaliana is increased or generated, preferably comprising the nucleic acid molecule shown in SEQ ID NO. 8673 or polypeptide shown in SEQ ID NO. 8674, respectively, or a homolog thereof. E.g. an increased tolerance to abiotic environmental stress, in particular increased low temperature tolerance, compared to a corresponding non-modified, e.g. a non-transformed, wild type plant is conferred if the activity “26.5 kDa class I small heat shock protein” or if the activity of a nucleic acid molecule or a polypeptide comprising the nucleic acid or polypeptide or the consensus sequence or the polypeptide motif, depicted in table I, II or IV, column 7, respective same line as SEQ ID NO.: 8673 or SEQ ID NO.: 8674, respectively, is increased or generated in a plant or part thereof. Preferably, the increase occurs cytoplasmic. Particularly, an increase of yield from 1.05-fold to 1.536-fold, for example plus at least 100% thereof, under conditions of low temperature is conferred compared to a corresponding non-modified, e.g. non-transformed, wild type plant.

[0362] In a further embodiment, an increased nutrient use efficiency compared to a corresponding non-modified, e.g. a non-transformed, wild type plant is conferred if the activity of a polypeptide comprising the polypeptide shown in SEQ ID NO. 8674, or encoded by a nucleic acid molecule comprising the nucleic acid molecule shown in SEQ ID NO. 8673, or a homolog of said nucleic acid molecule or polypeptide, is increased or generated. For example, the activity of a corresponding nucleic acid molecule or a polypeptide derived from Arabidopsis thaliana is increased or generated, preferably comprising the nucleic acid molecule shown in SEQ ID NO. 8673 or polypeptide shown in SEQ ID NO. 8674, respectively, or a homolog thereof. E.g. an increased tolerance to abiotic environmental stress, in particular increased nutrient use efficiency as compared to a corresponding non-modified, e.g. a non-transformed, wild type plant cell, a plant or a part thereof is conferred if the activity “26.5 kDa class I small heat shock protein or” if the activity of a nucleic acid molecule or a polypeptide comprising the nucleic acid or polypeptide or the consensus sequence or the polypeptide motif, as depicted in table I, II or IV, column 7 respective same line as SEQ ID NO. 8673 or SEQ ID NO. 8674, respectively, is increased or generated in a plant or part thereof. Preferably, the increase occurs cytoplasmic. In one embodiment an increased nitrogen use efficiency is conferred.

[0363] Particularly, an increase of yield from 1.05-fold to 1.446-fold, for example plus at least 100% thereof, under conditions of nitrogen deficiency is conferred compared to a corresponding non-modified, e.g. non-transformed, wild type plant.

[0364] In a further embodiment, an increased intrinsic yield, compared to a corresponding non-modified, e.g. a non-transformed, wild type plant is conferred if the activity of a polypeptide comprising the polypeptide shown in SEQ ID NO. 8674, or encoded by a nucleic acid molecule comprising the nucleic acid molecule shown in SEQ ID NO. 8673, or a homolog of said nucleic acid molecule or polypeptide, is increased or generated. For example, the activity of a corresponding nucleic acid molecule or a polypeptide derived from Arabidopsis thaliana is increased or generated, preferably comprising the nucleic acid molecule shown in SEQ ID NO. 8673 or polypeptide shown in SEQ ID NO. 8674, respectively, or a homolog thereof. E.g. an increased intrinsic yield, compared to a corresponding non-modified, e.g. a non-transformed, wild type plant is conferred if the activity “26.5 kDa class I small heat shock protein” or if the activity of a nucleic acid molecule or a polypeptide comprising the nucleic acid or polypeptide or the consensus sequence or the polypeptide motif, depicted in table I, II or IV, column 7, respective same line as SEQ ID NO.: 8673 or SEQ ID NO.: 8674, respectively, is increased or generated in a plant or part thereof. Preferably, the increase occurs cytoplasmic. Particularly, an increase of yield from 1.05-fold to 1.194-fold, for example plus at least 100% thereof, under standard conditions, e.g. in the absence of nutrient deficiency and/or stress conditions is conferred compared to a corresponding control, e.g. an non-modified, e.g. non-transformed, wild type plant. Further, In another embodiment, an earlier flowering, e.g. an bolting difference and increased intrinsic yield, e.g an increase in total seed weight per plant compared to a corresponding non-modified, e.g. a non-transformed, wild type plant is conferred if the activity of a polypeptide comprising the polypeptide shown in SEQ ID NO. 8674, or encoded by a nucleic acid molecule comprising the nucleic acid molecule shown in SEQ ID NO. 8673, or a homolog of said nucleic acid molecule or polypeptide, is increased or generated.

[0365] Accordingly, in one embodiment, an increased yield as compared to a correspondingly non-modified, e.g. a non-transformed, wild type plant is conferred according to method of the invention, by increasing or generating the activity of a polypeptide comprising the yield-related polypeptide shown in SEQ ID NO.: 8722, or encoded by the yield-related nucleic acid molecule (or gene) comprising the nucleic acid shown in SEQ ID NO.: 8721, or a homolog of said nucleic acid molecule or polypeptide, e.g. derived from Arabidopsis thaliana. Thus, in one embodiment, the activity “monodehydroascorbate reductase” or the activity of a nucleic acid molecule or a polypeptide comprising the nucleic acid or polypeptide or the consensus sequence or the polypeptide motif, depicted in table I, II or IV, column 7, respective same line as SEQ ID NO.: 8721, or SEQ ID NO.: 8722, respectively, is increased or generated in a plant cell, plant or part thereof. Preferably, the increase occurs cytoplasmic.

[0366] In a further embodiment, an increased tolerance to abiotic environmental stress, in particular increased low temperature tolerance, compared to a corresponding nonmodified, e.g. a non-transformed, wild type plant is conferred if the activity of a polypeptide comprising the polypeptide shown in SEQ ID NO. 8722, or encoded by a nucleic acid molecule comprising the nucleic acid molecule shown in SEQ ID NO. 8721, or a homolog of said nucleic acid molecule or polypeptide, is increased or generated. For example, the activity of a corresponding nucleic acid molecule or a polypeptide derived from Arabidopsis thaliana is increased or generated, preferably comprising the nucleic acid molecule shown in SEQ ID NO. 8721 or polypeptide shown in SEQ ID NO. 8722, respectively, or a homolog thereof. E.g. an increased tolerance to abiotic environmental stress, in particular increased low temperature tolerance, compared to a corresponding non-modified, e.g. a non-transformed, wild type plant is conferred if the activity “monodehydroascorbate reductase” or if the activity of a nucleic acid molecule or a polypeptide comprising the nucleic acid or polypeptide or the consensus sequence or the polypeptide motif, depicted in table I, II or IV, column 7, respective same line as SEQ ID NO.: 8721 or SEQ ID NO.: 8722, respectively, is increased or generated in a plant or part thereof. Preferably, the increase occurs cytoplasmic. Particularly, an increase of yield from 1.05-fold to 1.192-fold, for example plus at least 100% thereof, under conditions of low temperature is conferred compared to a corresponding non-modified, e.g. non-transformed, wild type plant.

[0367] In a further embodiment, an increased nutrient use efficiency compared to a corresponding non-modified, e.g. a non-transformed, wild type plant is conferred if the activity of a polypeptide comprising the polypeptide shown in SEQ ID NO. 8722, or encoded by a nucleic acid molecule comprising the nucleic acid molecule shown in SEQ ID NO. 8721, or a homolog of said nucleic acid molecule or polypeptide, is increased or generated. For example, the activity of a corresponding nucleic acid molecule or a polypeptide derived from Arabidopsis thaliana is increased or generated, preferably comprising the nucleic acid molecule shown in SEQ ID NO. 8721 or polypeptide shown in SEQ ID NO. 8722, respectively, or a homolog thereof. E.g. an increased tolerance to abiotic environmental stress, in particular increased nutrient use efficiency as compared to a corresponding non-modified, e.g. a non-transformed, wild type plant cell, a plant or a part thereof is conferred if the activity “monodehydroascorbate reductase or” if the activity of a nucleic acid molecule or a polypeptide comprising the nucleic acid or polypeptide or the consensus sequence or the polypeptide motif, as depicted in table I, II or IV, column 7 respective same line as SEQ ID NO. 8721 or SEQ ID NO. 8722, respectively, is increased or generated in a plant or part thereof. Preferably, the increase occurs cytoplasmic. In one embodiment an increased nitrogen use efficiency is conferred.

[0368] Particularly, an increase of yield from 1.05-fold to 1.422-fold, for example plus at least 100% thereof, under conditions of nitrogen deficiency is conferred compared to a corresponding non-modified, e.g. non-transformed, wild type plant.

[0369] In a further embodiment, an increased intrinsic yield, compared to a corresponding non-modified, e.g. a non-transformed, wild type plant is conferred if the activity of a polypeptide comprising the polypeptide shown in SEQ ID NO. 8722, or encoded by a nucleic acid molecule comprising the nucleic acid molecule shown in SEQ ID NO. 8721, or a homolog of said nucleic acid molecule or polypeptide, is increased or generated. For example, the activity of a corresponding nucleic acid molecule or a polypeptide derived from Arabidopsis thaliana is increased or generated, preferably comprising the nucleic acid molecule shown in SEQ ID NO. 8721 or polypeptide shown in SEQ ID NO. 8722, respectively, or a homolog thereof. E.g. an increased intrinsic yield, compared to a corresponding non-modified, e.g. a non-transformed, wild type plant is conferred if the activity “monodehydroascorbate reductase” or if the activity of a nucleic acid molecule or a polypeptide comprising the nucleic acid or polypeptide or the consensus sequence or the polypeptide motif, depicted in table I, II or IV, column 7, respective same line as SEQ ID NO.: 8721 or SEQ ID NO.: 8722, respectively, is increased or generated in a plant or part thereof. Preferably, the increase occurs cytoplasmic. Particularly, an increase of yield from 1.05-fold to 1.080-fold, for example plus at least 100% thereof, under standard conditions, e.g. in the absence of nutrient deficiency and/or stress conditions is conferred compared to a corresponding control, e.g. an non-modified, e.g. non-transformed, wild type plant.

[0370] Accordingly, in one embodiment, an increased yield as compared to a correspondingly non-modified, e.g. a non-transformed, wild type plant is conferred according to method of the invention, by increasing or generating the activity of a polypeptide comprising the yield-related polypeptide shown in SEQ ID NO.: 8913, or encoded by the yield-related nucleic acid molecule (or gene) comprising the nucleic acid shown in SEQ ID NO.: 8912, or a homolog of said nucleic acid molecule or polypeptide, e.g. derived from Arabidopsis thaliana. Thus, in one embodiment, the activity “monodehydroascorbate reductase” or the activity of a nucleic acid molecule or a polypeptide comprising the nucleic acid or polypeptide or the consensus sequence or the polypeptide motif, depicted in table I, II or IV, column 7, respective same line as SEQ ID NO.: 8912, or SEQ ID NO.: 8913, respectively, is increased or generated in a plant cell, plant or part thereof. Preferably, the increase occurs cytoplasmic.

[0371] In a further embodiment, an increased nutrient use efficiency compared to a corresponding non-modified, e.g. a non-transformed, wild type plant is conferred if the activity of a polypeptide comprising the polypeptide shown in SEQ ID NO. 8913, or encoded by a nucleic acid molecule comprising the nucleic acid molecule shown in SEQ ID NO. 8912, or a homolog of said nucleic acid molecule or polypeptide, is increased or generated. For example, the activity of a corresponding nucleic acid molecule or a polypeptide derived from Arabidopsis thaliana is increased or generated, preferably comprising the nucleic acid molecule shown in SEQ ID NO. 8912 or polypeptide shown in SEQ ID NO. 8913, respectively, or a homolog thereof. E.g. an increased tolerance to abiotic environmental stress, in particular increased nutrient use efficiency as compared to a corresponding non-modified, e.g. a non-transformed, wild type plant cell, a plant or a part thereof is conferred if the activity “monodehydroascorbate reductase or” if the activity of a nucleic acid molecule or a polypeptide comprising the nucleic acid or polypeptide or the consensus sequence or the polypeptide motif, as depicted in table I, II or IV, column 7 respective same line as SEQ ID NO. 8912 or SEQ ID NO. 8913, respectively, is increased or generated in a plant or part thereof. Preferably, the increase occurs cytoplasmic. In one embodiment an increased nitrogen use efficiency is conferred.

[0372] Particularly, an increase of yield from 1.05-fold to 1.248-fold, for example plus at least 100% thereof, under conditions of nitrogen deficiency is conferred compared to a corresponding non-modified, e.g. non-transformed, wild type plant.

[0373] In a further embodiment, an increased intrinsic yield, compared to a corresponding non-modified, e.g. a non-transformed, wild type plant is conferred if the activity of a polypeptide comprising the polypeptide shown in SEQ ID NO. 8913, or encoded by a nucleic acid molecule comprising the nucleic acid molecule shown in SEQ ID NO. 8912, or a homolog of said nucleic acid molecule or polypeptide, is increased or generated. For example, the activity of a corresponding nucleic acid molecule or a polypeptide derived from Arabidopsis thaliana is increased or generated, preferably comprising the nucleic acid molecule shown in SEQ ID NO. 8912 or polypeptide shown in SEQ ID NO. 8913, respectively, or a homolog thereof. E.g. an increased intrinsic yield, compared to a corresponding non-modified, e.g. a non-transformed, wild type plant is conferred if the activity “monodehydroascorbate reductase” or if the activity of a nucleic acid molecule or a polypeptide comprising the nucleic acid or polypeptide or the consensus sequence or the polypeptide motif, depicted in table I, II or IV, column 7, respective same line as SEQ ID NO.: 8912 or SEQ ID NO.: 8913, respectively, is increased or generated in a plant or part thereof. Preferably, the increase occurs cytoplasmic. Particularly, an increase of yield from 1.05-fold to 1.164-fold, for example plus at least 100% thereof, under standard conditions, e.g. in the absence of nutrient deficiency and/or stress conditions is conferred compared to a corresponding control, e.g. an non-modified, e.g. non-transformed, wild type plant.

[0374] Accordingly, in one embodiment, an increased yield as compared to a correspondingly non-modified, e.g. a non-transformed, wild type plant is conferred according to method of the invention, by increasing or generating the activity of a polypeptide comprising the yield-related polypeptide shown in SEQ ID NO.: 9110, or encoded by the yield-related nucleic acid molecule (or gene) comprising the nucleic acid shown in SEQ ID NO.: 9109, or a homolog of said nucleic acid molecule or polypeptide, e.g. derived from Arabidopsis thaliana. Thus, in one embodiment, the activity “low-molecular-weight heat-shock protein” or the activity of a nucleic acid molecule or a polypeptide comprising the nucleic acid or polypeptide or the consensus sequence or the polypeptide motif, depicted in table I, II or IV, column 7, respective same line as SEQ ID NO.: 9109, or SEQ ID NO.: 9110, respectively, is increased or generated in a plant cell, plant or part thereof. Preferably, the increase occurs cytoplasmic.

[0375] In a further embodiment, an increased tolerance to abiotic environmental stress, in particular increased low temperature tolerance, compared to a corresponding non-modified, e.g. a non-transformed, wild type plant is conferred if the activity of a polypeptide comprising the polypeptide shown in SEQ ID NO. 9110, or encoded by a nucleic acid molecule comprising the nucleic acid molecule shown in SEQ ID NO. 9109, or a homolog of said nucleic acid molecule or polypeptide, is increased or generated. For example, the activity of a corresponding nucleic acid molecule or a polypeptide derived from Arabidopsis thaliana is increased or generated, preferably comprising the nucleic acid molecule shown in SEQ ID NO. 9109 or polypeptide shown in SEQ ID NO. 9110, respectively, or a homolog thereof. E.g. an increased tolerance to abiotic environmental stress, in particular increased low temperature tolerance, compared to a corresponding non-modified, e.g. a non-transformed, wild type plant is conferred if the activity “low-molecular-weight heat-shock protein” or if the activity of a nucleic acid molecule or a polypeptide comprising the nucleic acid or polypeptide or the consensus sequence or the polypeptide motif, depicted in table I, II or IV, column 7, respective same line as SEQ ID NO.: 9109 or SEQ ID NO.: 9110, respectively, is increased or generated in a plant or part thereof. Preferably, the increase occurs cytoplasmic. Particularly, an increase of yield from 1.05-fold to 1.257-fold, for example plus at least 100% thereof, under conditions of low temperature is conferred compared to a corresponding non-modified, e.g. non-transformed, wild type plant.

[0376] In a further embodiment, an increased nutrient use efficiency compared to a corresponding non-modified, e.g. a non-transformed, wild type plant is conferred if the activity of a polypeptide comprising the polypeptide shown in SEQ ID NO. 9110, or encoded by a nucleic acid molecule comprising the nucleic acid molecule shown in SEQ ID NO. 9109, or a homolog of said nucleic acid molecule or polypeptide, is increased or generated. For example, the activity of a corresponding nucleic acid molecule or a polypeptide derived from Arabidopsis thaliana is increased or generated, preferably comprising the nucleic acid molecule shown in SEQ ID NO. 9109 or polypeptide shown in SEQ ID NO. 9110, respectively, or a homolog thereof. E.g. an increased tolerance to abiotic environmental stress, in particular increased nutrient use efficiency as compared to a corresponding non-modified, e.g. a non-transformed, wild type plant cell, a plant or a part thereof is conferred if the activity “low-molecular-weight heat-shock protein or” if the activity of a nucleic acid molecule or a polypeptide comprising the nucleic acid or polypeptide or the consensus sequence or the polypeptide motif, as depicted in table I, II or IV, column 7 respective same line as SEQ ID NO. 9109 or SEQ ID NO. 9110, respectively, is increased or generated in a plant or part thereof. Preferably, the increase occurs cytoplasmic. In one embodiment an increased nitrogen use efficiency is conferred.

[0377] Particularly, an increase of yield from 1.05-fold to 1.302-fold, for example plus at least 100% thereof, under conditions of nitrogen deficiency is conferred compared to a corresponding non-modified, e.g. non-transformed, wild type plant.

[0378] Accordingly, in one embodiment, an increased yield as compared to a correspondingly non-modified, e.g. a non-transformed, wild type plant is conferred according to method of the invention, by increasing or generating the activity of a polypeptide comprising the yield-related polypeptide shown in SEQ ID NO.: 9728, or encoded by the yield-related nucleic acid molecule (or gene) comprising the nucleic acid shown in SEQ ID NO.: 9727, or a homolog of said nucleic acid molecule or polypeptide, e.g. derived from Arabidopsis thaliana. Thus, in one embodiment, the activity “serine hydroxymethyltransferase” or the activity of a nucleic acid molecule or a polypeptide comprising the nucleic acid or polypeptide or the consensus sequence or the polypeptide motif, depicted in table I, II or IV, column 7, respective same line as SEQ ID NO.: 9727, or SEQ ID NO.: 9728, respectively, is increased or generated in a plant cell, plant or part thereof. Preferably, the increase occurs cytoplasmic.

[0379] In a further embodiment, an increased tolerance to abiotic environmental stress, in particular increased low temperature tolerance, compared to a corresponding non-modified, e.g. a non-transformed, wild type plant is conferred if the activity of a polypeptide comprising the polypeptide shown in SEQ ID NO. 9728, or encoded by a nucleic acid molecule comprising the nucleic acid molecule shown in SEQ ID NO. 9727, or a homolog of said nucleic acid molecule or polypeptide, is increased or generated. For example, the activity of a corresponding nucleic acid molecule or a polypeptide derived from Arabidopsis thaliana is increased or generated, preferably comprising the nucleic acid molecule shown in SEQ ID NO. 9727 or polypeptide shown in SEQ ID NO. 9728, respectively, or a homolog thereof. E.g. an increased tolerance to abiotic environmental stress, in particular increased low temperature tolerance, compared to a corresponding non-modified, e.g. a non-transformed, wild type plant is conferred if the activity “serine hydroxymethyltransferase” or if the activity of a nucleic acid molecule or a polypeptide comprising the nucleic acid or polypeptide or the consensus sequence or the polypeptide motif, depicted in table I, II or IV, column 7, respective same line as SEQ ID NO.: 9727 or SEQ ID NO.: 9728, respectively, is increased or generated in a plant or part thereof. Preferably, the increase occurs cytoplasmic. Particularly, an increase of yield from 1.05-fold to 1.176-fold, for example plus at least 100% thereof, under conditions of low temperature is conferred compared to a corresponding non-modified, e.g. non-transformed, wild type plant.

[0380] In a further embodiment, an increased nutrient use efficiency compared to a corresponding non-modified, e.g. a non-transformed, wild type plant is conferred if the activity of a polypeptide comprising the polypeptide shown in SEQ ID NO. 9728, or encoded by a nucleic acid molecule comprising the nucleic acid molecule shown in SEQ ID NO. 9727, or a homolog of said nucleic acid molecule or polypeptide, is increased or generated. For example, the activity of a corresponding nucleic acid molecule or a polypeptide derived from Arabidopsis thaliana is increased or generated, preferably comprising the nucleic acid molecule shown in SEQ ID NO. 9727 or polypeptide shown in SEQ ID NO. 9728, respectively, or a homolog thereof. E.g. an increased tolerance to abiotic environmental stress, in particular increased nutrient use efficiency as compared to a corresponding non-modified, e.g. a non-transformed, wild type plant cell, a plant or a part thereof is conferred if the activity “serine hydroxymethyltransferase or” if the activity of a nucleic acid molecule or a polypeptide comprising the nucleic acid or polypeptide or the consensus sequence or the polypeptide motif, as depicted in table I, II or IV, column 7 respective same line as SEQ ID NO. 9727 or SEQ ID NO. 9728, respectively, is increased or generated in a plant or part thereof. Preferably, the increase occurs cytoplasmic. In one embodiment an increased nitrogen use efficiency is conferred.

[0381] Particularly, an increase of yield from 1.05-fold to 1.348-fold, for example plus at least 100% thereof, under conditions of nitrogen deficiency is conferred compared to a corresponding non-modified, e.g. non-transformed, wild type plant.

[0382] Accordingly, in one embodiment, an increased yield as compared to a correspondingly non-modified, e.g. a non-transformed, wild type plant is conferred according to method of the invention, by increasing or generating the activity of a polypeptide comprising the yield-related polypeptide shown in SEQ ID NO.: 10738, or encoded by the yield-related nucleic acid molecule (or gene) comprising the nucleic acid shown in SEQ ID NO.: 10737, or a homolog of said nucleic acid molecule or polypeptide, e.g. derived from Arabidopsis thaliana. Thus, in one embodiment, the activity “2-Cys peroxiredoxin” or the activity of a nucleic acid molecule or a polypeptide comprising the nucleic acid or polypeptide or the consensus sequence or the polypeptide motif, depicted in table I, II or IV, column 7, respective same line as SEQ ID NO.: 10737, or SEQ ID NO.: 10738, respectively, is increased or generated in a plant cell, plant or part thereof. Preferably, the increase occurs cytoplasmic.

[0383] In a further embodiment, an increased nutrient use efficiency compared to a corresponding non-modified, e.g. a non-transformed, wild type plant is conferred if the activity of a polypeptide comprising the polypeptide shown in SEQ ID NO. 10738, or encoded by a nucleic acid molecule comprising the nucleic acid molecule shown in SEQ ID NO. 10737, or a homolog of said nucleic acid molecule or polypeptide, is increased or generated. For example, the activity of a corresponding nucleic acid molecule or a polypeptide derived from Arabidopsis thaliana is increased or generated, preferably comprising the nucleic acid molecule shown in SEQ ID NO. 10737 or polypeptide shown in SEQ ID NO. 10738, respectively, or a homolog thereof. E.g. an increased tolerance to abiotic environmental stress, in particular increased nutrient use efficiency as compared to a corresponding non-modified, e.g. a non-transformed, wild type plant cell, a plant or a part thereof is conferred if the activity “2-Cys peroxiredoxin or” if the activity of a nucleic acid molecule or a polypeptide comprising the nucleic acid or polypeptide or the consensus sequence or the polypeptide motif, as depicted in table I, II or IV, column 7 respective same line as SEQ ID NO. 10737 or SEQ ID NO. 10738, respectively, is increased or generated in a plant or part thereof. Preferably, the increase occurs cytoplasmic. In one embodiment an increased nitrogen use efficiency is conferred.

[0384] Particularly, an increase of yield from 1.05-fold to 1.298-fold, for example plus at least 100% thereof, under conditions of nitrogen deficiency is conferred compared to a corresponding non-modified, e.g. non-transformed, wild type plant.

[0385] In a further embodiment, an increased intrinsic yield, compared to a corresponding non-modified, e.g. a non-transformed, wild type plant is conferred if the activity of a polypeptide comprising the polypeptide shown in SEQ ID NO. 10738, or encoded by a nucleic acid molecule comprising the nucleic acid molecule shown in SEQ ID NO. 10737, or a homolog of said nucleic acid molecule or polypeptide, is increased or generated. For example, the activity of a corresponding nucleic acid molecule or a polypeptide derived from Arabidopsis thaliana is increased or generated, preferably comprising the nucleic acid molecule shown in SEQ ID NO. 10737 or polypeptide shown in SEQ ID NO. 10738, respectively, or a homolog thereof. E.g. an increased intrinsic yield, compared to a corresponding non-modified, e.g. a non-transformed, wild type plant is conferred if the activity “2-Cys peroxiredoxin” or if the activity of a nucleic acid molecule or a polypeptide comprising the nucleic acid or polypeptide or the consensus sequence or the polypeptide motif, depicted in table I, II or IV, column 7, respective same line as SEQ ID NO.: 10737 or SEQ ID NO.: 10738, respectively, is increased or generated in a plant or part thereof. Preferably, the increase occurs cytoplasmic. Particularly, an increase of yield from 1.05-fold to 1.059-fold, for example plus at least 100% thereof, under standard conditions, e.g. in the absence of nutrient deficiency and/or stress conditions is conferred compared to a corresponding control, e.g. an non-modified, e.g. non-transformed, wild type plant.

[0386] Accordingly, in one embodiment, an increased yield as compared to a correspondingly non-modified, e.g. a non-transformed, wild type plant is conferred according to method of the invention, by increasing or generating the activity of a polypeptide comprising the yield-related polypeptide shown in SEQ ID NO.: 11062, or encoded by the yield-related nucleic acid molecule (or gene) comprising the nucleic acid shown in SEQ ID NO.: 11061, or a homolog of said nucleic acid molecule or polypeptide, e.g. derived from Populus trichocarpa. Thus, in one embodiment, the activity “CDS5399-protein” or the activity of a nucleic acid molecule or a polypeptide comprising the nucleic acid or polypeptide or the consensus sequence or the polypeptide motif, depicted in table I, II or IV, column 7, respective same line as SEQ ID NO.: 11061, or SEQ ID NO.: 11062, respectively, is increased or generated in a plant cell, plant or part thereof. Preferably, the increase occurs cytoplasmic.

[0387] In a further embodiment, an increased tolerance to abiotic environmental stress, in particular increased low temperature tolerance, compared to a corresponding non-modified, e.g. a non-transformed, wild type plant is conferred if the activity of a polypeptide comprising the polypeptide shown in SEQ ID NO. 11062, or encoded by a nucleic acid molecule comprising the nucleic acid molecule shown in SEQ ID NO. 11061, or a homolog of said nucleic acid molecule or polypeptide, is increased or generated. For example, the activity of a corresponding nucleic acid molecule or a polypeptide derived from Populus trichocarpa is increased or generated, preferably comprising the nucleic acid molecule shown in SEQ ID NO. 11061 or polypeptide shown in SEQ ID NO. 11062, respectively, or a homolog thereof. E.g. an increased tolerance to abiotic environmental stress, in particular increased low temperature tolerance, compared to a corresponding non-modified, e.g. a non-transformed, wild type plant is conferred if the activity “CDS5399-protein” or if the activity of a nucleic acid molecule or a polypeptide comprising the nucleic acid or polypeptide or the consensus sequence or the polypeptide motif, depicted in table I, II or IV, column 7, respective same line as SEQ ID NO.: 11061 or SEQ ID NO.: 11062, respectively, is increased or generated in a plant or part thereof. Preferably, the increase occurs cytoplasmic. Particularly, an increase of yield from 1.05-fold to 1.376-fold, for example plus at least 100% thereof, under conditions of low temperature is conferred compared to a corresponding non-modified, e.g. non-transformed, wild type plant.

[0388] In a further embodiment, an increased nutrient use efficiency compared to a corresponding non-modified, e.g. a non-transformed, wild type plant is conferred if the activity of a polypeptide comprising the polypeptide shown in SEQ ID NO. 11062, or encoded by a nucleic acid molecule comprising the nucleic acid molecule shown in SEQ ID NO. 11061, or a homolog of said nucleic acid molecule or polypeptide, is increased or generated. For example, the activity of a corresponding nucleic acid molecule or a polypeptide derived from Populus trichocarpa is increased or generated, preferably comprising the nucleic acid molecule shown in SEQ ID NO. 11061 or polypeptide shown in SEQ ID NO. 11062, respectively, or a homolog thereof. E.g. an increased tolerance to abiotic environmental stress, in particular increased nutrient use efficiency as compared to a corresponding non-modified, e.g. a non-transformed, wild type plant cell, a plant or a part thereof is conferred if the activity “CDS5399-protein or” if the activity of a nucleic acid molecule or a polypeptide comprising the nucleic acid or polypeptide or the consensus sequence or the polypeptide motif, as depicted in table I, II or IV, column 7 respective same line as SEQ ID NO. 11061 or SEQ ID NO. 11062, respectively, is increased or generated in a plant or part thereof. Preferably, the increase occurs cytoplasmic. In one embodiment an increased nitrogen use efficiency is conferred.

[0389] Particularly, an increase of yield from 1.05-fold to 1.249-fold, for example plus at least 100% thereof, under conditions of nitrogen deficiency is conferred compared to a corresponding non-modified, e.g. non-transformed, wild type plant.

[0390] Accordingly, in one embodiment, an increased yield as compared to a correspondingly non-modified, e.g. a non-transformed, wild type plant is conferred according to method of the invention, by increasing or generating the activity of a polypeptide comprising the yield-related polypeptide shown in SEQ ID NO.: 11139, or encoded by the yield-related nucleic acid molecule (or gene) comprising the nucleic acid shown in SEQ ID NO.: 11138, or a homolog of said nucleic acid molecule or polypeptide, e.g. derived from Populus trichocarpa. Thus, in one embodiment, the activity “Small nucleolar ribonucleoprotein complex subunit” or the activity of a nucleic acid molecule or a polypeptide comprising the nucleic acid or polypeptide or the consensus sequence or the polypeptide motif, depicted in table I, II or IV, column 7, respective same line as SEQ ID NO.: 11138, or SEQ ID NO.: 11139, respectively, is increased or generated in a plant cell, plant or part thereof. Preferably, the increase occurs cytoplasmic.

[0391] In a further embodiment, an increased tolerance to abiotic environmental stress, in particular increased low temperature tolerance, compared to a corresponding non-modified, e.g. a non-transformed, wild type plant is conferred if the activity of a polypeptide comprising the polypeptide shown in SEQ ID NO. 11139, or encoded by a nucleic acid molecule comprising the nucleic acid molecule shown in SEQ ID NO. 11138, or a homolog of said nucleic acid molecule or polypeptide, is increased or generated. For example, the activity of a corresponding nucleic acid molecule or a polypeptide derived from Populus trichocarpa is increased or generated, preferably comprising the nucleic acid molecule shown in SEQ ID NO. 11138 or polypeptide shown in SEQ ID NO. 11139, respectively, or a homolog thereof. E.g. an increased tolerance to abiotic environmental stress, in particular increased low temperature tolerance, compared to a corresponding non-modified, e.g. a non-transformed, wild type plant is conferred if the activity “Small nucleolar ribonucleoprotein complex subunit” or if the activity of a nucleic acid molecule or a polypeptide comprising the nucleic acid or polypeptide or the consensus sequence or the polypeptide motif, depicted in table I, II or IV, column 7, respective same line as SEQ ID NO.: 11138 or SEQ ID NO.: 11139, respectively, is increased or generated in a plant or part thereof. Preferably, the increase occurs cytoplasmic. Particularly, an increase of yield from 1.05-fold to 1.359-fold, for example plus at least 100% thereof, under conditions of low temperature is conferred compared to a corresponding non-modified, e.g. non-transformed, wild type plant.

[0392] In a further embodiment, an increased nutrient use efficiency compared to a corresponding non-modified, e.g. a non-transformed, wild type plant is conferred if the activity of a polypeptide comprising the polypeptide shown in SEQ ID NO. 11139, or encoded by a nucleic acid molecule comprising the nucleic acid molecule shown in SEQ ID NO. 11138, or a homolog of said nucleic acid molecule or polypeptide, is increased or generated. For example, the activity of a corresponding nucleic acid molecule or a polypeptide derived from Populus trichocarpa is increased or generated, preferably comprising the nucleic acid molecule shown in SEQ ID NO. 11138 or polypeptide shown in SEQ ID NO. 11139, respectively, or a homolog thereof. E.g. an increased tolerance to abiotic environmental stress, in particular increased nutrient use efficiency as compared to a corresponding non-modified, e.g. a non-transformed, wild type plant cell, a plant or a part thereof is conferred if the activity “Small nucleolar ribonucleoprotein complex subunit or” if the activity of a nucleic acid molecule or a polypeptide comprising the nucleic acid or polypeptide or the consensus sequence or the polypeptide motif, as depicted in table I, II or IV, column 7 respective same line as SEQ ID NO. 11138 or SEQ ID NO. 11139, respectively, is increased or generated in a plant or part thereof. Preferably, the increase occurs cytoplasmic. In one embodiment an increased nitrogen use efficiency is conferred.

[0393] Particularly, an increase of yield from 1.05-fold to 1.208-fold, for example plus at least 100% thereof, under conditions of nitrogen deficiency is conferred compared to a corresponding non-modified, e.g. non-transformed, wild type plant.

[0394] Accordingly, in one embodiment, an increased yield as compared to a correspondingly non-modified, e.g. a non-transformed, wild type plant is conferred according to method of the invention, by increasing or generating the activity of a polypeptide comprising the yield-related polypeptide shown in SEQ ID NO.: 11306, or encoded by the yield-related nucleic acid molecule (or gene) comprising the nucleic acid shown in SEQ ID NO.: 11305, or a homolog of said nucleic acid molecule or polypeptide, e.g. derived from Populus trichocarpa. Thus, in one embodiment, the activity “protein kinase” or the activity of a nucleic acid molecule or a polypeptide comprising the nucleic acid or polypeptide or the consensus sequence or the polypeptide motif, depicted in table I, II or IV, column 7, respective same line as SEQ ID NO.: 11305, or SEQ ID NO.: 11306, respectively, is increased or generated in a plant cell, plant or part thereof. Preferably, the increase occurs cytoplasmic.

[0395] In a further embodiment, an increased tolerance to abiotic environmental stress, in particular increased low temperature tolerance, compared to a corresponding non-modified, e.g. a non-transformed, wild type plant is conferred if the activity of a polypeptide comprising the polypeptide shown in SEQ ID NO. 11306, or encoded by a nucleic acid molecule comprising the nucleic acid molecule shown in SEQ ID NO. 11305, or a homolog of said nucleic acid molecule or polypeptide, is increased or generated. For example, the activity of a corresponding nucleic acid molecule or a polypeptide derived from Populus trichocarpa is increased or generated, preferably comprising the nucleic acid molecule shown in SEQ ID NO. 11305 or polypeptide shown in SEQ ID NO. 11306, respectively, or a homolog thereof. E.g. an increased tolerance to abiotic environmental stress, in particular increased low temperature tolerance, compared to a corresponding non-modified, e.g. a non-transformed, wild type plant is conferred if the activity “protein kinase” or if the activity of a nucleic acid molecule or a polypeptide comprising the nucleic acid or polypeptide or the consensus sequence or the polypeptide motif, depicted in table I, II or IV, column 7, respective same line as SEQ ID NO.: 11305 or SEQ ID NO.: 11306, respectively, is increased or generated in a plant or part thereof. Preferably, the increase occurs cytoplasmic. Particularly, an increase of yield from 1.05-fold to 1.147-fold, for example plus at least 100% thereof, under conditions of low temperature is conferred compared to a corresponding non-modified, e.g. non-transformed, wild type plant.

[0396] In a further embodiment, an increased nutrient use efficiency compared to a corresponding non-modified, e.g. a non-transformed, wild type plant is conferred if the activity of a polypeptide comprising the polypeptide shown in SEQ ID NO. 11306, or encoded by a nucleic acid molecule comprising the nucleic acid molecule shown in SEQ ID NO. 11305, or a homolog of said nucleic acid molecule or polypeptide, is increased or generated. For example, the activity of a corresponding nucleic acid molecule or a polypeptide derived from Populus trichocarpa is increased or generated, preferably comprising the nucleic acid molecule shown in SEQ ID NO. 11305 or polypeptide shown in SEQ ID NO. 11306, respectively, or a homolog thereof. E.g. an increased tolerance to abiotic environmental stress, in particular increased nutrient use efficiency as compared to a corresponding non-modified, e.g. a non-transformed, wild type plant cell, a plant or a part thereof is conferred if the activity “protein kinase or” if the activity of a nucleic acid molecule or a polypeptide comprising the nucleic acid or polypeptide or the consensus sequence or the polypeptide motif, as depicted in table I, II or IV, column 7 respective same line as SEQ ID NO. 11305 or SEQ ID NO. 11306, respectively, is increased or generated in a plant or part thereof. Preferably, the increase occurs cytoplasmic. In one embodiment an increased nitrogen use efficiency is conferred

[0397] Particularly, an increase of yield from 1.05-fold to 1.140-fold, for example plus at least 100% thereof, under conditions of nitrogen deficiency is conferred compared to a corresponding non-modified, e.g. non-transformed, wild type plant.

[0398] In a further embodiment, an increased intrinsic yield, compared to a corresponding non-modified, e.g. a non-transformed, wild type plant is conferred if the activity of a polypeptide comprising the polypeptide shown in SEQ ID NO. 11306, or encoded by a nucleic acid molecule comprising the nucleic acid molecule shown in SEQ ID NO. 11305, or a homolog of said nucleic acid molecule or polypeptide, is increased or generated. For example, the activity of a corresponding nucleic acid molecule or a polypeptide derived from Populus trichocarpa is increased or generated, preferably comprising the nucleic acid molecule shown in SEQ ID NO. 11305 or polypeptide shown in SEQ ID NO. 11306, respectively, or a homolog thereof. E.g. an increased intrinsic yield, compared to a corresponding non-modified, e.g. a non-transformed, wild type plant is conferred if the activity “protein kinase” or if the activity of a nucleic acid molecule or a polypeptide comprising the nucleic acid or polypeptide or the consensus sequence or the polypeptide motif, depicted in table I, II or IV, column 7, respective same line as SEQ ID NO.: 11305 or SEQ ID NO.: 11306, respectively, is increased or generated in a plant or part thereof. Preferably, the increase occurs cytoplasmic. Particularly, an increase of yield from 1.05-fold to 1.074-fold, for example plus at least 100% thereof, under standard conditions, e.g. in the absence of nutrient deficiency and/or stress conditions is conferred compared to a corresponding control, e.g. an non-modified, e.g. non-transformed, wild type plant.

[0399] Accordingly, in one embodiment, an increased yield as compared to a correspondingly non-modified, e.g. a non-transformed, wild type plant is conferred according to method of the invention, by increasing or generating the activity of a polypeptide comprising the yield-related polypeptide shown in SEQ ID NO.: 11497, or encoded by the yield-related nucleic acid molecule (or gene) comprising the nucleic acid shown in SEQ ID NO.: 11496, or a homolog of said nucleic acid molecule or polypeptide, e.g. derived from Saccharomyces cerevisiae. Thus, in one embodiment, the activity “YKL130C-protein” or the activity of a nucleic acid molecule or a polypeptide comprising the nucleic acid or polypeptide or the consensus sequence or the polypeptide motif, depicted in table I, II or IV, column 7, respective same line as SEQ ID NO.: 11496, or SEQ ID NO.: 11497, respectively, is increased or generated in a plant cell, plant or part thereof. Preferably, the increase occurs cytoplasmic.

[0400] In a further embodiment, an increased tolerance to abiotic environmental stress, in particular increased low temperature tolerance, compared to a corresponding non-modified, e.g. a non-transformed, wild type plant is conferred if the activity of a polypeptide comprising the polypeptide shown in SEQ ID NO. 11497, or encoded by a nucleic acid molecule comprising the nucleic acid molecule shown in SEQ ID NO. 11496, or a homolog of said nucleic acid molecule or polypeptide, is increased or generated. For example, the activity of a corresponding nucleic acid molecule or a polypeptide derived from Saccharomyces cerevisiae is increased or generated, preferably comprising the nucleic acid molecule shown in SEQ ID NO. 11496 or polypeptide shown in SEQ ID NO. 11497, respectively, or a homolog thereof. E.g. an increased tolerance to abiotic environmental stress, in particular increased low temperature tolerance, compared to a corresponding non-modified, e.g. a non-transformed, wild type plant is conferred if the activity “YKL130C-protein” or if the activity of a nucleic acid molecule or a polypeptide comprising the nucleic acid or polypeptide or the consensus sequence or the polypeptide motif, depicted in table I, II or IV, column 7, respective same line as SEQ ID NO.: 11496 or SEQ ID NO.: 11497, respectively, is increased or generated in a plant or part thereof. Preferably, the increase occurs cytoplasmic. Particularly, an increase of yield from 1.05-fold to 1.154-fold, for example plus at least 100% thereof, under conditions of low temperature is conferred compared to a corresponding non-modified, e.g. non-transformed, wild type plant.

[0401] In a further embodiment, an increased nutrient use efficiency compared to a corresponding non-modified, e.g. a non-transformed, wild type plant is conferred if the activity of a polypeptide comprising the polypeptide shown in SEQ ID NO. 11497, or encoded by a nucleic acid molecule comprising the nucleic acid molecule shown in SEQ ID NO. 11496, or a homolog of said nucleic acid molecule or polypeptide, is increased or generated. For example, the activity of a corresponding nucleic acid molecule or a polypeptide derived from Saccharomyces cerevisiae is increased or generated, preferably comprising the nucleic acid molecule shown in SEQ ID NO. 11496 or polypeptide shown in SEQ ID NO. 11497, respectively, or a homolog thereof. E.g. an increased tolerance to abiotic environmental stress, in particular increased nutrient use efficiency as compared to a corresponding non-modified, e.g. a non-transformed, wild type plant cell, a plant or a part thereof is conferred if the activity “YKL130C-protein or” if the activity of a nucleic acid molecule or a polypeptide comprising the nucleic acid or polypeptide or the consensus sequence or the polypeptide motif, as depicted in table I, II or IV, column 7 respective same line as SEQ ID NO. 11496 or SEQ ID NO. 11497, respectively, is increased or generated in a plant or part thereof. Preferably, the increase occurs cytoplasmic. In one embodiment an increased nitrogen use efficiency is conferred.

[0402] Particularly, an increase of yield from 1.05-fold to 1.232-fold, for example plus at least 100% thereof, under conditions of nitrogen deficiency is conferred compared to a corresponding non-modified, e.g. non-transformed, wild type plant.

[0403] Accordingly, in one embodiment, an increased yield as compared to a correspondingly non-modified, e.g. a non-transformed, wild type plant is conferred according to method of the invention, by increasing or generating the activity of a polypeptide comprising the yield-related polypeptide shown in SEQ ID NO.: 11514, or encoded by the yield-related nucleic acid molecule (or gene) comprising the nucleic acid shown in SEQ ID NO.: 11513, or a homolog of said nucleic acid molecule or polypeptide, e.g. derived from Saccharomyces cerevisiae. Thus, in one embodiment, the activity “chromatin structure-remodeling complex protein” or the activity of a nucleic acid molecule or a polypeptide comprising the nucleic acid or polypeptide or the consensus sequence or the polypeptide motif, depicted in table I, II or IV, column 7, respective same line as SEQ ID NO.: 11513, or SEQ ID NO.: 11514, respectively, is increased or generated in a plant cell, plant or part thereof. Preferably, the increase occurs cytoplasmic.

[0404] In a further embodiment, an increased nutrient use efficiency compared to a corresponding non-modified, e.g. a non-transformed, wild type plant is conferred if the activity of a polypeptide comprising the polypeptide shown in SEQ ID NO. 11514, or encoded by a nucleic acid molecule comprising the nucleic acid molecule shown in SEQ ID NO. 11513, or a homolog of said nucleic acid molecule or polypeptide, is increased or generated. For example, the activity of a corresponding nucleic acid molecule or a polypeptide derived from Saccharomyces cerevisiae is increased or generated, preferably comprising the nucleic acid molecule shown in SEQ ID NO. 11513 or polypeptide shown in SEQ ID NO. 11514, respectively, or a homolog thereof. E.g. an increased tolerance to abiotic environmental stress, in particular increased nutrient use efficiency as compared to a corresponding non-modified, e.g. a non-transformed, wild type plant cell, a plant or a part thereof is conferred if the activity “chromatin structure-remodeling complex protein or” if the activity of a nucleic acid molecule or a polypeptide comprising the nucleic acid or polypeptide or the consensus sequence or the polypeptide motif, as depicted in table I, II or IV, column 7 respective same line as SEQ ID NO. 11513 or SEQ ID NO. 11514, respectively, is increased or generated in a plant or part thereof. Preferably, the increase occurs cytoplasmic. In one embodiment an increased nitrogen use efficiency is conferred.

[0405] Particularly, an increase of yield from 1.05-fold to 1.14-fold, for example plus at least 100% thereof, under conditions of nitrogen deficiency is conferred compared to a corresponding non-modified, e.g. non-transformed, wild type plant.

[0406] The ratios indicated above particularly refer to an increased yield actually measured as increase of biomass, especially as fresh weight biomass of aerial parts.

[0407] Unless otherwise specified, the terms “polynucleotides”, “nucleic acid” and “nucleic acid molecule” are interchangeably in the present context. Unless otherwise specified, the terms “peptide”, “polypeptide” and “protein” are interchangeably in the present context. The term “sequence” may relate to polynucleotides, nucleic acids, nucleic acid molecules, peptides, polypeptides and proteins, depending on the context in which the term “sequence” is used. The terms “gene(s)”, “polynucleotide”, “nucleic acid sequence”, “nucleotide sequence”, or “nucleic acid molecule(s)” as used herein refers to a polymeric form of nucleotides of any length, either ribonucleotides or deoxyribonucleotides. The terms refer only to the primary structure of the molecule.

[0408] Thus, the terms “gene(s)”, “polynucleotide”, “nucleic acid sequence”, “nucleotide sequence”, or “nucleic acid molecule(s)” as used herein include double- and single-stranded DNA and/or RNA. They also include known types of modifications, for example, methylation, “caps”, substitutions of one or more of the naturally occurring nucleotides with an analog. Preferably, the DNA or RNA sequence comprises a coding sequence encoding the herein defined polypeptide.

[0409] A “coding sequence” is a nucleotide sequence, which is transcribed into an RNA, e.g. a regulatory RNA, such as a miRNA, a ta-siRNA, cosuppression molecule, an RNAi, a ribozyme, etc. or into a mRNA which is translated into a polypeptide when placed under the control of appropriate regulatory sequences. The boundaries of the coding sequence are determined by a translation start codon at the 5′-terminus and a translation stop codon at the 3′-terminus. A coding sequence can include, but is not limited to mRNA, cDNA, recombinant nucleotide sequences or genomic DNA, while introns may be present as well under certain circumstances.

[0410] As used in the present context a nucleic acid molecule may also encompass the untranslated sequence located at the 3′ and at the 5′ end of the coding gene region, for example 2000, preferably less, e.g. 500, preferably 200, especially preferably 100, nucleotides of the sequence upstream of the 5′ end of the coding region and for example 300, preferably less, e.g. 100, preferably 50, especially preferably 20, nucleotides of the sequence downstream of the 3′ end of the coding gene region. In the event for example the antisense, RNAi, snRNA, dsRNA, siRNA, miRNA, ta-siRNA, co-suppression molecule, ribozyme etc. technology is used coding regions as well as the 5′- and/or 3′-regions can advantageously be used.

[0411] However, it is often advantageous only to choose the coding region for cloning and expression purposes.

[0412] “Polypeptide” refers to a polymer of amino acid (amino acid sequence) and does not refer to a specific length of the molecule. Thus, peptides and oligopeptides are included within the definition of polypeptide. This term does also refer to or include posttranslational modifications of the polypeptide, for example, glycosylations, acetylations, phosphorylations and the like. Included within the definition are, for example, polypeptides containing one or more analogs of an amino acid (including, for example, unnatural amino acids, etc.), polypeptides with substituted linkages, as well as other modifications known in the art, both naturally occurring and non-naturally occurring.

[0413] The term “table I” used in this specification is to be taken to specify the content of table I A and table I B. The term “table II” used in this specification is to be taken to specify the content of table II A and table II B. The term “table I A” used in this specification is to be taken to specify the content of table I A. The term “table I B” used in this specification is to be taken to specify the content of table I B. The term “table II A” used in this specification is to be taken to specify the content of table II A. The term “table II B” used in this specification is to be taken to specify the content of table II B. In one preferred embodiment, the term “table I” means table I B. In one preferred embodiment, the term “table II” means table II B.

[0414] The terms “comprise” or “comprising” and grammatical variations thereof when used in this specification are to be taken to specify the presence of stated features, integers, steps or components or groups thereof, but not to preclude the presence or addition of one or more other features, integers, steps, components or groups thereof.

[0415] In accordance with the invention, a protein or polypeptide has the “activity of an YRP, e.g. of a “protein as shown in table II, column 3” if its de novo activity, or its increased expression directly or indirectly leads to and confers increased yield, e.g. to an increased yield-related trait, for example enhanced tolerance to abiotic environmental stress, for example an increased drought tolerance and/or low temperature tolerance and/or an increased nutrient use efficiency, intrinsic yield and/or another increased yield-related trait as compared to a corresponding, e.g. non-transformed, wild type plant and the protein has the above mentioned activities of a protein as shown in table II, column 3.

[0416] Throughout the specification the activity or preferably the biological activity of such a protein or polypeptide or an nucleic acid molecule or sequence encoding such protein or polypeptide is identical or similar if it still has the biological or enzymatic activity of a protein as shown in table II, column 3, or which has 10% or more of the original enzymatic activity, preferably 20%, 30%, 40%, 50%, particularly preferably 60%, 70%, 80% most particularly preferably 90%, 95%, 98%, 99% or more in comparison to a protein as shown in table II, column 3 of S. cerevisiae or E. coli or Synechocystis sp. or A. thaliana or Populus trichocarpa or Azotobacter vinelandii.

[0417] In another embodiment the biological or enzymatic activity of a protein as shown in table II, column 3, has 100% or more of the original enzymatic activity, preferably 110%, 120%, 130%, 150%, particularly preferably 150%, 200%, 300% or more in comparison to a protein as shown in table II, column 3 of S. cerevisiae or E. coli or Synechocystis sp. or A. thaliana or Populus trichocarpa or Azotobacter vinelandii.

[0418] The terms “increased”, “raised”, “extended”, “enhanced”, “improved” or “amplified” relate to a corresponding change of a property in a plant, an organism, a part of an organism such as a tissue, seed, root, leave, flower etc. or in a cell and are interchangeable. Preferably, the overall activity in the volume is increased or enhanced in cases if the increase or enhancement is related to the increase or enhancement of an activity of a gene product, independent whether the amount of gene product or the specific activity of the gene product or both is increased or enhanced or whether the amount, stability or translation efficacy of the nucleic acid sequence or gene encoding for the gene product is increased or enhanced.

[0419] The terms “increase” relate to a corresponding change of a property an organism or in a part of a plant, an organism, such as a tissue, seed, root, leave, flower etc. or in a cell. Preferably, the overall activity in the volume is increased in cases the increase relates to the increase of an activity of a gene product, independent whether the amount of gene product or the specific activity of the gene product or both is increased or generated or whether the amount, stability or translation efficacy of the nucleic acid sequence or gene encoding for the gene product is increased.

[0420] Under “change of a property” it is understood that the activity, expression level or amount of a gene product or the metabolite content is changed in a specific volume relative to a corresponding volume of a control, reference or wild type, including the de novo creation of the activity or expression.

[0421] The terms “increase” include the change of said property in only parts of the subject of the present invention, for example, the modification can be found in compartment of a cell, like a organelle, or in a part of a plant, like tissue, seed, root, leave, flower etc. but is not detectable if the overall subject, i.e. complete cell or plant, is tested.

[0422] Accordingly, the term “increase” means that the specific activity of an enzyme as well as the amount of a compound or metabolite, e.g. of a polypeptide, a nucleic acid molecule of the invention or an encoding mRNA or DNA, can be increased in a volume.

[0423] The terms “wild type”, “control” or “reference” are exchangeable and can be a cell or a part of organisms such as an organelle like a chloroplast or a tissue, or an organism, in particular a plant, which was not modified or treated according to the herein described process according to the invention. Accordingly, the cell or a part of organisms such as an organelle like a chloroplast or a tissue, or an organism, in particular a plant used as wild type, control or reference corresponds to the cell, organism, plant or part thereof as much as possible and is in any other property but in the result of the process of the invention as identical to the subject matter of the invention as possible. Thus, the wild type, control or reference is treated identically or as identical as possible, saying that only conditions or properties might be different which do not influence the quality of the tested property.

[0424] Preferably, any comparison is carried out under analogous conditions. The term “analogous conditions” means that all conditions such as, for example, culture or growing conditions, soil, nutrient, water content of the soil, temperature, humidity or surrounding air or soil, assay conditions (such as buffer composition, temperature, substrates, pathogen strain, concentrations and the like) are kept identical between the experiments to be compared.

[0425] The “reference”, “control”, or “wild type” is preferably a subject, e.g. an organelle, a cell, a tissue, an organism, in particular a plant, which was not modified or treated according to the herein described process of the invention and is in any other property as similar to the subject matter of the invention as possible. The reference, control or wild type is in its genome, transcriptome, proteome or metabolome as similar as possible to the subject of the present invention. Preferably, the term “reference-” “control-” or “wild type-”-organelle, -cell, -tissue or -organism, in particular plant, relates to an organelle, cell, tissue or organism, in particular plant, which is nearly genetically identical to the organelle, cell, tissue or organism, in particular plant, of the present invention or a part thereof preferably 90% or more, e.g. 95%, more preferred are 98%, even more preferred are 99,00%, in particular 99.10%, 99.30%, 99.50%, 99.70%, 99.90%, 99.99%, 99.999% or more. Most preferable the “reference”, “control”, or “wild type” is a subject, e.g. an organelle, a cell, a tissue, an organism, in particular a plant, which is genetically identical to the organism, in particular plant, cell, a tissue or organelle used according to the process of the invention except that the responsible or activity conferring nucleic acid molecules or the gene product encoded by them are amended, manipulated, exchanged or introduced according to the inventive process.

[0426] In case, a control, reference or wild type differing from the subject of the present invention only by not being subject of the process of the invention can not be provided, a control, reference or wild type can be an organism in which the cause for the modulation of an activity conferring the enhanced tolerance to abiotic environmental stress and/or increased yield as compared to a corresponding, e.g. non-transformed, wild type plant cell, plant or part thereof or expression of the nucleic acid molecule of the invention as described herein has been switched back or off, e.g. by knocking out the expression of responsible gene product, e.g. by antisense inhibition, by inactivation of an activator or agonist, by activation of an inhibitor or antagonist, by inhibition through adding inhibitory antibodies, by adding active compounds as e.g. hormones, by introducing negative dominant mutants, etc. A gene production can for example be knocked out by introducing inactivating point mutations, which lead to an enzymatic activity inhibition or a destabilization or an inhibition of the ability to bind to cofactors etc.

[0427] Accordingly, preferred reference subject is the starting subject of the present process of the invention. Preferably, the reference and the subject matter of the invention are compared after standardization and normalization, e.g. to the amount of total RNA, DNA, or protein or activity or expression of reference genes, like housekeeping genes, such as ubiquitin, actin or ribosomal proteins.

[0428] The increase or modulation according to this invention can be constitutive, e.g. due to a stable permanent transgenic expression or to a stable mutation in the corresponding endogenous gene encoding the nucleic acid molecule of the invention or to a modulation of the expression or of the behavior of a gene conferring the expression of the polypeptide of the invention, or transient, e.g. due to an transient transformation or temporary addition of a modulator such as a agonist or antagonist or inducible, e.g. after transformation with a inducible construct carrying the nucleic acid molecule of the invention under control of a inducible promoter and adding the inducer, e.g. tetracycline or as described herein below.

[0429] The increase in activity of the polypeptide amounts in a cell, a tissue, an organelle, an organ or an organism, preferably a plant, or a part thereof preferably to 5% or more, preferably to 20% or to 50%, especially preferably to 70%, 80%, 90% or more, very especially preferably are to 100%, 150% or 200%, most preferably are to 250% or more in comparison to the control, reference or wild type. In one embodiment the term increase means the increase in amount in relation to the weight of the organism or part thereof (w/w).

[0430] In one embodiment the increase in activity of the polypeptide amounts in an organelle such as a plastid. In another embodiment the increase in activity of the polypeptide amounts in the cytoplasm.

[0431] The specific activity of a polypeptide encoded by a nucleic acid molecule of the present invention or of the polypeptide of the present invention can be tested as described in the examples. In particular, the expression of a protein in question in a cell, e.g. a plant cell in comparison to a control is an easy test and can be performed as described in the state of the art.

[0432] The term “increase” includes, that a compound or an activity, especially an activity, is introduced into a cell, the cytoplasm or a sub-cellular compartment or organelle de novo or that the compound or the activity, especially an activity, has not been detected before, in other words it is “generated”.

[0433] Accordingly, in the following, the term “increasing” also comprises the term “generating” or “stimulating”. The increased activity manifests itself in increased yield, e.g. an increased yield-related trait, for example enhanced tolerance to abiotic environmental stress, for example an increased drought tolerance and/or low temperature tolerance and/or an increased nutrient use efficiency, intrinsic yield and/or another increased yield-related trait as compared to a corresponding, e.g. non-transformed, wild type plant cell, plant or part thereof.

[0434] The sequence of B0567 from Escherichia coli, e.g. as shown in column 5 of table I, is published: sequences from S. cerevisiae have been published in Goffeau et al., Science 274 (5287), 546 (1996), sequences from E. coli have been published in Blattner et al., Science 277 (5331), 1453 (1997). Its activity is described as B0567-protein. Accordingly, in one embodiment, the process of the present invention for producing a plant with increased yield comprises increasing or generating the activity of a gene product conferring the activity “B0567-protein” from Escherichia coli or its functional equivalent or its homolog, e.g. the increase of
[0435] (a) a gene product of a gene comprising the nucleic acid molecule as shown in column 5 of table I, and being depicted in the same respective line as said B0567 or a functional equivalent or a homologue thereof as shown depicted in column 7 of table I, preferably a homologue or functional equivalent as shown depicted in column 7 of table I B, and being depicted in the same respective line as said B0567, e.g. cytoplasmic; or

[0436] (b) a polypeptide comprising a polypeptide, a consensus sequence or a polypeptide motif as shown depicted in column 5 of table II or column 7 of table IV, and being depicted in the same respective line as said B0567 or a functional equivalent or a homologue thereof as depicted in column 7 of table II, preferably a homologue or functional equivalent as depicted in column 7 of table II B, and being depicted in the same respective line as said B0567, e.g. cytoplasmic.

[0437] The sequence of B0953 from Escherichia coli, e.g. as shown in column 5 of table I, is published: sequences from S. cerevisiae have been published in Goffeau et al., Science 274 (5287), 546 (1996), sequences from E. coli have been published in Blattner et al., Science 277 (5331), 1453 (1997). Its activity is described as ribosome modulation factor.

Accordingly, in one embodiment, the process of the present invention for producing a plant with increased yield comprises increasing or generating the activity of a gene product conferring the activity “ribosome modulation factor” from Escherichia coli or its functional equivalent or its homolog, e.g. the increase of
[0438] (a) a gene product of a gene comprising the nucleic acid molecule as shown in column 5 of table I, and being depicted in the same respective line as said B0953 or a functional equivalent or a homologue thereof as shown depicted in column 7 of table I, preferably a homologue or functional equivalent as shown depicted in column 7 of table I B, and being depicted in the same respective line as said B0953, e.g. plastidic; or
[0439] (b) a polypeptide comprising a polypeptide, a consensus sequence or a polypeptide motif as shown depicted in column 5 of table II or column 7 of table IV, and being depicted in the same respective line as said B0953 or a functional equivalent or a homologue thereof as depicted in column 7 of table II, preferably a homologue or functional equivalent as depicted in column 7 of table II B, and being depicted in the same respective line as said B0953, e.g. plastidic.

[0440] The sequence of B1088 from Escherichia coli, e.g. as shown in column 5 of table I, is published: sequences from S. cerevisiae have been published in Goffeau et al., Science 274 (5287), 546 (1996), sequences from E. coli have been published in Blattner et al., Science 277 (5331), 1453 (1997). Its activity is described as B1088-protein.

Accordingly, in one embodiment, the process of the present invention for producing a plant with increased yield comprises increasing or generating the activity of a gene product conferring the activity “B1088-protein” from Escherichia coli or its functional equivalent or its homolog, e.g. the increase of
[0441] (a) a gene product of a gene comprising the nucleic acid molecule as shown in column 5 of table I, and being depicted in the same respective line as said B1088 or a functional equivalent or a homologue thereof as shown depicted in column 7 of table I, preferably a homologue or functional equivalent as shown depicted in column 7 of table I B, and being depicted in the same respective line as said B1088, e.g. cytoplasmic; or
[0442] (b) a polypeptide comprising a polypeptide, a consensus sequence or a polypeptide motif as shown depicted in column 5 of table II or column 7 of table IV, and being depicted in the same respective line as said B1088 or a functional equivalent or a homologue thereof as depicted in column 7 of table II, preferably a homologue or functional equivalent as depicted in column 7 of table II B, and being depicted in the same respective line as said B1088, e.g. cytoplasmic.

[0443] The sequence of B1289 from Escherichia coli, e.g. as shown in column 5 of table I, is published: sequences from S. cerevisiae have been published in Goffeau et al., Science 274 (5287), 546 (1996), sequences from E. coli have been published in Blattner et al., Science 277 (5331), 1453 (1997). Its activity is described as B1289-protein.

Accordingly, in one embodiment, the process of the present invention for producing a plant with increased yield comprises increasing or generating the activity of a gene product conferring the activity “B1289-protein” from Escherichia coli or its functional equivalent or its homolog, e.g. the increase of
[0444] (a) a gene product of a gene comprising the nucleic acid molecule as shown in column 5 of table I, and being depicted in the same respective line as said B1289 or a functional equivalent or a homologue thereof as shown depicted in column 7 of table I, preferably a homologue or functional equivalent as shown depicted in column 7 of table I B, and being depicted in the same respective line as said B1289, e.g. cytoplasmic; or
[0445] (b) a polypeptide comprising a polypeptide, a consensus sequence or a polypeptide motif as shown depicted in column 5 of table II or column 7 of table IV, and being depicted in the same respective line as said B1289 or a functional equivalent or a homologue thereof as depicted in column 7 of table II, preferably a homologue or functional equivalent as depicted in column 7 of table II B, and being depicted in the same respective line as said B1289, e.g. cytoplasmic.

[0446] The sequence of B2904 from Escherichia coli, e.g. as shown in column 5 of table I, is published: sequences from S. cerevisiae have been published in Goffeau et al., Science 274 (5287), 546 (1996), sequences from E. coli have been published in Blattner et al., Science 277 (5331), 1453 (1997). Its activity is described as glycine cleavage complex lipoylprotein.

Accordingly, in one embodiment, the process of the present invention for producing a plant with increased yield comprises increasing or generating the activity of a gene product conferring the activity “glycine cleavage complex lipoylprotein” from Escherichia coli or its functional equivalent or its homolog, e.g. the increase of
[0447] (a) a gene product of a gene comprising the nucleic acid molecule as shown in column 5 of table I, and being depicted in the same respective line as said B2904 or a functional equivalent or a homologue thereof as shown depicted in column 7 of table I, preferably a homologue or functional equivalent as shown depicted in column 7 of table I B, and being depicted in the same respective line as said B2904, e.g. cytoplasmic; or
[0448] (b) a polypeptide comprising a polypeptide, a consensus sequence or a polypeptide motif as shown depicted in column 5 of table II or column 7 of table IV, and being depicted in the same respective line as said B2904 or a functional equivalent or a homologue thereof as depicted in column 7 of table II, preferably a homologue or functional equivalent as depicted in column 7 of table II B, and being depicted in the same respective line as said B2904, e.g. cytoplasmic.

[0449] The sequence of B3389 from Escherichia coli, e.g. as shown in column 5 of table I, is published: sequences from S. cerevisiae have been published in Goffeau et al., Science 274 (5287), 546 (1996), sequences from E. coli have been published in Blattner et al., Science 277 (5331), 1453 (1997). Its activity is described as 3-dehydroquinate synthase.

Accordingly, in one embodiment, the process of the present invention for producing a plant with increased yield comprises increasing or generating the activity of a gene product conferring the activity “3-dehydroquinate synthase” from Escherichia coli or its functional equivalent or its homolog, e.g. the increase of
[0450] (a) a gene product of a gene comprising the nucleic acid molecule as shown in column 5 of table I, and being depicted in the same respective line as said B3389 or a functional equivalent or a homologue thereof as shown depicted in column 7 of table I, preferably a homologue or functional equivalent as shown depicted in column 7 of table I B, and being depicted in the same respective line as said B3389, e.g. plastidic; or
[0451] (b) a polypeptide comprising a polypeptide, a consensus sequence or a polypeptide motif as shown depicted in column 5 of table II or column 7 of table IV, and being depicted in the same respective line as said B3389 or a functional equivalent or a homologue thereof as depicted in column 7 of table II, preferably a homologue or functional equivalent as depicted in column 7 of table II B, and being depicted in the same respective line as said B3389, e.g. plastidic.

[0452] The sequence of B3526 from Escherichia coli, e.g. as shown in column 5 of table I, is published: sequences from S. cerevisiae have been published in Goffeau et al., Science 274 (5287), 546 (1996), sequences from E. coli have been published in Blattner et al., Science 277 (5331), 1453 (1997). Its activity is described as ketodeoxygluconokinase. Accordingly, in one embodiment, the process of the present invention for producing a plant with increased yield comprises increasing or generating the activity of a gene product conferring the activity “ketodeoxygluconokinase” from Escherichia coli or its functional equivalent or its homolog, e.g. the increase of
[0453] (a) a gene product of a gene comprising the nucleic acid molecule as shown in column 5 of table I, and being depicted in the same respective line as said B3526 or a functional equivalent or a homologue thereof as shown depicted in column 7 of table I, preferably a homologue or functional equivalent as shown depicted in column 7 of table I B, and being depicted in the same respective line as said B3526, e.g. plastidic; or
[0454] (b) a polypeptide comprising a polypeptide, a consensus sequence or a polypeptide motif as shown depicted in column 5 of table II or column 7 of table IV, and being depicted in the same respective line as said B3526 or a functional equivalent or a homologue thereof as depicted in column 7 of table II, preferably a homologue or functional equivalent as depicted in column 7 of table II B, and being depicted in the same respective line as said B3526, e.g. plastidic.

[0455] The sequence of B3611 from Escherichia coli, e.g. as shown in column 5 of table I, is published: sequences from S. cerevisiae have been published in Goffeau et al., Science 274 (5287), 546 (1996), sequences from E. coli have been published in Blattner et al., Science 277 (5331), 1453 (1997). Its activity is described as rhodanese-related sulfurtransferase.

Accordingly, in one embodiment, the process of the present invention for producing a plant with increased yield comprises increasing or generating the activity of a gene product conferring the activity “rhodanese-related sulfurtransferase” from Escherichia coli or its functional equivalent or its homolog, e.g. the increase of
[0456] (a) a gene product of a gene comprising the nucleic acid molecule as shown in column 5 of table I, and being depicted in the same respective line as said B3611 or a functional equivalent or a homologue thereof as shown depicted in column 7 of table I, preferably a homologue or functional equivalent as shown depicted in column 7 of table I B, and being depicted in the same respective line as said B3611, e.g. cytoplasmic; or
[0457] (b) a polypeptide comprising a polypeptide, a consensus sequence or a polypeptide motif as shown depicted in column 5 of table II or column 7 of table IV, and being depicted in the same respective line as said B3611 or a functional equivalent or a homologue thereof as depicted in column 7 of table II, preferably a homologue or functional equivalent as depicted in column 7 of table II B, and being depicted in the same respective line as said B3611, e.g. cytoplasmic.

[0458] The sequence of B3744 from Escherichia coli, e.g. as shown in column 5 of table I, is published: sequences from S. cerevisiae have been published in Goffeau et al., Science 274 (5287), 546 (1996), sequences from E. coli have been published in Blattner et al., Science 277 (5331), 1453 (1997). Its activity is described as asparagine synthetase A. Accordingly, in one embodiment, the process of the present invention for producing a plant with increased yield comprises increasing or generating the activity of a gene product conferring the activity “asparagine synthetase A” from Escherichia coli or its functional equivalent or its homolog, e.g. the increase of

(a) a gene product of a gene comprising the nucleic acid molecule as shown in column 5 of table I, and being depicted in the same respective line as said B3744 or a functional equivalent or a homologue thereof as shown depicted in column 7 of table I, preferably a homologue or functional equivalent as shown depicted in column 7 of table I B, and being depicted in the same respective line as said B3744, e.g. plastidic; or
(b) a polypeptide comprising a polypeptide, a consensus sequence or a polypeptide motif as shown depicted in column 5 of table II or column 7 of table IV, and being depicted in the same respective line as said B3744 or a functional equivalent or a homologue thereof as depicted in column 7 of table II, preferably a homologue or functional equivalent as depicted in column 7 of table II B, and being depicted in the same respective line as said B3744, e.g. plastidic.

[0459] The sequence of B3869 from Escherichia coli, e.g. as shown in column 5 of table I, is published: sequences from S. cerevisiae have been published in Goffeau et al., Science 274 (5287), 546 (1996), sequences from E. coli have been published in Blattner et al., Science 277 (5331), 1453 (1997). Its activity is described as sensory histidine kinase. Accordingly, in one embodiment, the process of the present invention for producing a plant with increased yield comprises increasing or generating the activity of a gene product conferring the activity “sensory histidine kinase” from Escherichia coli or its functional equivalent or its homolog, e.g. the increase of
[0460] (a) a gene product of a gene comprising the nucleic acid molecule as shown in column 5 of table I, and being depicted in the same respective line as said B3869 or a functional equivalent or a homologue thereof as shown depicted in column 7 of table I, preferably a homologue or functional equivalent as shown depicted in column 7 of table I B, and being depicted in the same respective line as said B3869, e.g. plastidic; or
[0461] (b) a polypeptide comprising a polypeptide, a consensus sequence or a polypeptide motif as shown depicted in column 5 of table II or column 7 of table IV, and being depicted in the same respective line as said B3869 or a functional equivalent or a homologue thereof as depicted in column 7 of table II, preferably a homologue or functional equivalent as depicted in column 7 of table II B, and being depicted in the same respective line as said B3869, e.g. plastidic.

[0462] The sequence of B4266 from Escherichia coli, e.g. as shown in column 5 of table I, is published: sequences from S. cerevisiae have been published in Goffeau et al., Science 274 (5287), 546 (1996), sequences from E. coli have been published in Blattner et al., Science 277 (5331), 1453 (1997). Its activity is described as 5-keto-D-gluconate-5-reductase.

Accordingly, in one embodiment, the process of the present invention for producing a plant with increased yield comprises increasing or generating the activity of a gene product conferring the activity “5-keto-D-gluconate-5-reductase” from Escherichia coli or its functional equivalent or its homolog, e.g. the increase of
[0463] (a) a gene product of a gene comprising the nucleic acid molecule as shown in column 5 of table I, and being depicted in the same respective line as said B4266 or a functional equivalent or a homologue thereof as shown depicted in column 7 of table I, preferably a homologue or functional equivalent as shown depicted in column 7 of table I B, and being depicted in the same respective line as said B4266, e.g. cytoplasmic; or
[0464] (b) a polypeptide comprising a polypeptide, a consensus sequence or a polypeptide motif as shown depicted in column 5 of table II or column 7 of table IV, and being depicted in the same respective line as said B4266 or a functional equivalent or a homologue thereof as depicted in column 7 of table II, preferably a homologue or functional equivalent as depicted in column 7 of table II B, and being depicted in the same respective line as said B4266, e.g. cytoplasmic.

[0465] The sequence of SLL0892 from Synechocystis sp., e.g. as shown in column 5 of table I, is published: sequences from S. cerevisiae have been published in Goffeau et al., Science 274 (5287), 546 (1996), sequences from E. coli have been published in Blattner et al., Science 277 (5331), 1453 (1997). Its activity is described as aspartate 1-decarboxylase precursor.

Accordingly, in one embodiment, the process of the present invention for producing a plant with increased yield comprises increasing or generating the activity of a gene product conferring the activity “aspartate 1-decarboxylase precursor” from Synechocystis sp. or its functional equivalent or its homolog, e.g. the increase of
[0466] (a) a gene product of a gene comprising the nucleic acid molecule as shown in column 5 of table I, and being depicted in the same respective line as said SLL0892 or a functional equivalent or a homologue thereof as shown depicted in column 7 of table I, preferably a homologue or functional equivalent as shown depicted in column 7 of table I B, and being depicted in the same respective line as said SLL0892, e.g. cytoplasmic; or
[0467] (b) a polypeptide comprising a polypeptide, a consensus sequence or a polypeptide motif as shown depicted in column 5 of table II or column 7 of table IV, and being depicted in the same respective line as said SLL0892 or a functional equivalent or a homologue thereof as depicted in column 7 of table II, preferably a homologue or functional equivalent as depicted in column 7 of table II B, and being depicted in the same respective line as said SLL0892, e.g. cytoplasmic.

[0468] The sequence of YJL087C from Saccharomyces cerevisiae, e.g. as shown in column 5 of table I, is published: sequences from S. cerevisiae have been published in Goffeau et al., Science 274 (5287), 546 (1996), sequences from E. coli have been published in Blattner et al., Science 277 (5331), 1453 (1997). Its activity is described as tRNA ligase. Accordingly, in one embodiment, the process of the present invention for producing a plant with increased yield comprises increasing or generating the activity of a gene product conferring the activity “tRNA ligase” from Saccharomyces cerevisiae or its functional equivalent or its homolog, e.g. the increase of
[0469] (a) a gene product of a gene comprising the nucleic acid molecule as shown in column 5 of table I, and being depicted in the same respective line as said YJL087C or a functional equivalent or a homologue thereof as shown depicted in column 7 of table I, preferably a homologue or functional equivalent as shown depicted in column 7 of table I B, and being depicted in the same respective line as said YJL087C, e.g. cytoplasmic; or
[0470] (b) a polypeptide comprising a polypeptide, a consensus sequence or a polypeptide motif as shown depicted in column 5 of table II or column 7 of table IV, and being depicted in the same respective line as said YJL087C or a functional equivalent or a homologue thereof as depicted in column 7 of table II, preferably a homologue or functional equivalent as depicted in column 7 of table II B, and being depicted in the same respective line as said YJL087C, e.g. cytoplasmic.

[0471] The sequence of YJR053W from Saccharomyces cerevisiae, e.g. as shown in column 5 of table I, is published: sequences from S. cerevisiae have been published in Goffeau et al., Science 274 (5287), 546 (1996), sequences from E. coli have been published in Blattner et al., Science 277 (5331), 1453 (1997). Its activity is described as mitotic check point protein.

Accordingly, in one embodiment, the process of the present invention for producing a plant with increased yield comprises increasing or generating the activity of a gene product conferring the activity “mitotic check point protein” from Saccharomyces cerevisiae or its functional equivalent or its homolog, e.g. the increase of
[0472] (a) a gene product of a gene comprising the nucleic acid molecule as shown in column 5 of table I, and being depicted in the same respective line as said YJR053W or a functional equivalent or a homologue thereof as shown depicted in column 7 of table I, preferably a homologue or functional equivalent as shown depicted in column 7 of table I B, and being depicted in the same respective line as said YJR053W, e.g. cytoplasmic; or
[0473] (b) a polypeptide comprising a polypeptide, a consensus sequence or a polypeptide motif as shown depicted in column 5 of table II or column 7 of table IV, and being depicted in the same respective line as said YJR053W or a functional equivalent or a homologue thereof as depicted in column 7 of table II, preferably a homologue or functional equivalent as depicted in column 7 of table II B, and being depicted in the same respective line as said YJR053W, e.g. cytoplasmic.

[0474] The sequence of YLR357W from Saccharomyces cerevisiae, e.g. as shown in column 5 of table I, is published: sequences from S. cerevisiae have been published in Goffeau et al., Science 274 (5287), 546 (1996), sequences from E. coli have been published in Blattner et al., Science 277 (5331), 1453 (1997). Its activity is described as chromatin structure-remodeling complex protein.

Accordingly, in one embodiment, the process of the present invention for producing a plant with increased yield comprises increasing or generating the activity of a gene product conferring the activity “chromatin structure-remodeling complex protein” from Saccharomyces cerevisiae or its functional equivalent or its homolog, e.g. the increase of
[0475] (a) a gene product of a gene comprising the nucleic acid molecule as shown in column 5 of table I, and being depicted in the same respective line as said YLR357W or a functional equivalent or a homologue thereof as shown depicted in column 7 of table I, preferably a homologue or functional equivalent as shown depicted in column 7 of table I B, and being depicted in the same respective line as said YLR357W, e.g. cytoplasmic; or
[0476] (b) a polypeptide comprising a polypeptide, a consensus sequence or a polypeptide motif as shown depicted in column 5 of table II or column 7 of table IV, and being depicted in the same respective line as said YLR357W or a functional equivalent or a homologue thereof as depicted in column 7 of table II, preferably a homologue or functional equivalent as depicted in column 7 of table II B, and being depicted in the same respective line as said YLR357W, e.g. cytoplasmic.

[0477] The sequence of YLR361C from Saccharomyces cerevisiae, e.g. as shown in column 5 of table I, is published: sequences from S. cerevisiae have been published in Goffeau et al., Science 274 (5287), 546 (1996), sequences from E. coli have been published in Blattner et al., Science 277 (5331), 1453 (1997). Its activity is described as phosphatase. Accordingly, in one embodiment, the process of the present invention for producing a plant with increased yield comprises increasing or generating the activity of a gene product conferring the activity “phosphatase” from Saccharomyces cerevisiae or its functional equivalent or its homolog, e.g. the increase of
[0478] (a) a gene product of a gene comprising the nucleic acid molecule as shown in column 5 of table I, and being depicted in the same respective line as said YLR361c or a functional equivalent or a homologue thereof as shown depicted in column 7 of table I, preferably a homologue or functional equivalent as shown depicted in column 7 of table I B, and being depicted in the same respective line as said YLR361c; or
[0479] (b) a polypeptide comprising a polypeptide, a consensus sequence or a polypeptide motif as shown depicted in column 5 of table II or column 7 of table IV, and being depicted in the same respective line as said YLR361C or a functional equivalent or a homologue thereof as depicted in column 7 of table II, preferably a homologue or functional equivalent as depicted in column 7 of table II B, and being depicted in the same respective line as said YLR361c.

[0480] The sequence of YML086C from Saccharomyces cerevisiae, e.g. as shown in column 5 of table I, is published: sequences from S. cerevisiae have been published in Goffeau et al., Science 274 (5287), 546 (1996), sequences from E. coli have been published in Blattner et al., Science 277 (5331), 1453 (1997). Its activity is described as D-arabinono-1,4-lactone oxidase.

Accordingly, in one embodiment, the process of the present invention for producing a plant with increased yield comprises increasing or generating the activity of a gene product conferring the activity “D-arabinono-1,4-lactone oxidase” from Saccharomyces cerevisiae or its functional equivalent or its homolog, e.g. the increase of
[0481] (a) a gene product of a gene comprising the nucleic acid molecule as shown in column 5 of table I, and being depicted in the same respective line as said YML086C or a functional equivalent or a homologue thereof as shown depicted in column 7 of table I, preferably a homologue or functional equivalent as shown depicted in column 7 of table I B, and being depicted in the same respective line as said YML086C, e.g. cytoplasmic; or
[0482] (b) a polypeptide comprising a polypeptide, a consensus sequence or a polypeptide motif as shown depicted in column 5 of table II or column 7 of table IV, and being depicted in the same respective line as said YML086C or a functional equivalent or a homologue thereof as depicted in column 7 of table II, preferably a homologue or functional equivalent as depicted in column 7 of table II B, and being depicted in the same respective line as said YML086C, e.g. cytoplasmic.

[0483] The sequence of YML091C from Saccharomyces cerevisiae, e.g. as shown in column 5 of table I, is published: sequences from S. cerevisiae have been published in Goffeau et al., Science 274 (5287), 546 (1996), sequences from E. coli have been published in Blattner et al., Science 277 (5331), 1453 (1997). Its activity is described as ribonuclease P protein component.

Accordingly, in one embodiment, the process of the present invention for producing a plant with increased yield comprises increasing or generating the activity of a gene product conferring the activity “ribonuclease P protein component” from Saccharomyces cerevisiae or its functional equivalent or its homolog, e.g. the increase of
[0484] (a) a gene product of a gene comprising the nucleic acid molecule as shown in column 5 of table I, and being depicted in the same respective line as said YML091C or a functional equivalent or a homologue thereof as shown depicted in column 7 of table I, preferably a homologue or functional equivalent as shown depicted in column 7 of table I B, and being depicted in the same respective line as said YML091C, e.g. cytoplasmic; or
[0485] (b) a polypeptide comprising a polypeptide, a consensus sequence or a polypeptide motif as shown depicted in column 5 of table II or column 7 of table IV, and being depicted in the same respective line as said YML091C or a functional equivalent or a homologue thereof as depicted in column 7 of table II, preferably a homologue or functional equivalent as depicted in column 7 of table II B, and being depicted in the same respective line as said YML091C, e.g. cytoplasmic.

[0486] The sequence of YML096W from Saccharomyces cerevisiae, e.g. as shown in column 5 of table I, is published: sequences from S. cerevisiae have been published in Goffeau et al., Science 274 (5287), 546 (1996), sequences from E. coli have been published in Blattner et al., Science 277 (5331), 1453 (1997). Its activity is described as YML096W-protein.

Accordingly, in one embodiment, the process of the present invention for producing a plant with increased yield comprises increasing or generating the activity of a gene product conferring the activity “YML096W-protein” from Saccharomyces cerevisiae or its functional equivalent or its homolog, e.g. the increase of
[0487] (a) a gene product of a gene comprising the nucleic acid molecule as shown in column 5 of table I, and being depicted in the same respective line as said YML096W or a functional equivalent or a homologue thereof as shown depicted in column 7 of table I, preferably a homologue or functional equivalent as shown depicted in column 7 of table I B, and being depicted in the same respective line as said YML096W, e.g. cytoplasmic; or
[0488] (b) a polypeptide comprising a polypeptide, a consensus sequence or a polypeptide motif as shown depicted in column 5 of table II or column 7 of table IV, and being depicted in the same respective line as said YML096W or a functional equivalent or a homologue thereof as depicted in column 7 of table II, preferably a homologue or functional equivalent as depicted in column 7 of table II B, and being depicted in the same respective line as said YML096W, e.g. cytoplasmic.

[0489] The sequence of YMR236W from Saccharomyces cerevisiae, e.g. as shown in column 5 of table I, is published: sequences from S. cerevisiae have been published in Goffeau et al., Science 274 (5287), 546 (1996), sequences from E. coli have been published in Blattner et al., Science 277 (5331), 1453 (1997). Its activity is described as transcription initiation factor subunit.

Accordingly, in one embodiment, the process of the present invention for producing a plant with increased yield comprises increasing or generating the activity of a gene product conferring the activity “transcription initiation factor subunit” from Saccharomyces cerevisiae or its functional equivalent or its homolog, e.g. the increase of
[0490] (a) a gene product of a gene comprising the nucleic acid molecule as shown in column 5 of table I, and being depicted in the same respective line as said YMR236W or a functional equivalent or a homologue thereof as shown depicted in column 7 of table I, preferably a homologue or functional equivalent as shown depicted in column 7 of table I B, and being depicted in the same respective line as said YMR236W, e.g. cytoplasmic; or
[0491] (b) a polypeptide comprising a polypeptide, a consensus sequence or a polypeptide motif as shown depicted in column 5 of table II or column 7 of table IV, and being depicted in the same respective line as said YMR236W or a functional equivalent or a homologue thereof as depicted in column 7 of table II, preferably a homologue or functional equivalent as depicted in column 7 of table II B, and being depicted in the same respective line as said YMR236W, e.g. cytoplasmic.

[0492] The sequence of YNL137C from Saccharomyces cerevisiae, e.g. as shown in column 5 of table I, is published: sequences from S. cerevisiae have been published in Goffeau et al., Science 274 (5287), 546 (1996), sequences from E. coli have been published in Blattner et al., Science 277 (5331), 1453 (1997). Its activity is described as mitochondrial ribosomal protein.

Accordingly, in one embodiment, the process of the present invention for producing a plant with increased yield comprises increasing or generating the activity of a gene product conferring the activity “mitochondrial ribosomal protein” from Saccharomyces cerevisiae or its functional equivalent or its homolog, e.g. the increase of
[0493] (a) a gene product of a gene comprising the nucleic acid molecule as shown in column 5 of table I, and being depicted in the same respective line as said YNL137C or a functional equivalent or a homologue thereof as shown depicted in column 7 of table I, preferably a homologue or functional equivalent as shown depicted in column 7 of table I B, and being depicted in the same respective line as said YNL137C, e.g. cytoplasmic; or
[0494] (b) a polypeptide comprising a polypeptide, a consensus sequence or a polypeptide motif as shown depicted in column 5 of table II or column 7 of table IV, and being depicted in the same respective line as said YNL137C or a functional equivalent or a homologue thereof as depicted in column 7 of table II, preferably a homologue or functional equivalent as depicted in column 7 of table II B, and being depicted in the same respective line as said YNL137C, e.g. cytoplasmic.

[0495] The sequence of YOR196c from Saccharomyces cerevisiae, e.g. as shown in column 5 of table I, is published: sequences from S. cerevisiae have been published in Goffeau et al., Science 274 (5287), 546 (1996), sequences from E. coli have been published in Blattner et al., Science 277 (5331), 1453 (1997). Its activity is described as lipoyl synthase. Accordingly, in one embodiment, the process of the present invention for producing a plant with increased yield comprises increasing or generating the activity of a gene product conferring the activity “lipoyl synthase” from Saccharomyces cerevisiae or its functional equivalent or its homolog, e.g. the increase of
[0496] (a) a gene product of a gene comprising the nucleic acid molecule as shown in column 5 of table I, and being depicted in the same respective line as said YOR196c or a functional equivalent or a homologue thereof as shown depicted in column 7 of table I, preferably a homologue or functional equivalent as shown depicted in column 7 of table I B, and being depicted in the same respective line as said YOR196c, e.g. cytoplasmic; or
[0497] (b) a polypeptide comprising a polypeptide, a consensus sequence or a polypeptide motif as shown depicted in column 5 of table II or column 7 of table IV, and being depicted in the same respective line as said YOR196c or a functional equivalent or a homologue thereof as depicted in column 7 of table II, preferably a homologue or functional equivalent as depicted in column 7 of table II B, and being depicted in the same respective line as said YOR196c, e.g. cytoplasmic.

[0498] The sequence of YPL119C from Saccharomyces cerevisiae, e.g. as shown in column 5 of table I, is published: sequences from S. cerevisiae have been published in Goffeau et al., Science 274 (5287), 546 (1996), sequences from E. coli have been published in Blattner et al., Science 277 (5331), 1453 (1997). Its activity is described as ATP-dependent RNA helicase.

Accordingly, in one embodiment, the process of the present invention for producing a plant with increased yield comprises increasing or generating the activity of a gene product conferring the activity “ATP-dependent RNA helicase” from Saccharomyces cerevisiae or its functional equivalent or its homolog, e.g. the increase of
[0499] (a) a gene product of a gene comprising the nucleic acid molecule as shown in column 5 of table I, and being depicted in the same respective line as said YPL119C or a functional equivalent or a homologue thereof as shown depicted in column 7 of table I, preferably a homologue or functional equivalent as shown depicted in column 7 of table I B, and being depicted in the same respective line as said YPL119C, e.g. cytoplasmic; or
[0500] (b) a polypeptide comprising a polypeptide, a consensus sequence or a polypeptide motif as shown depicted in column 5 of table II or column 7 of table IV, and being depicted in the same respective line as said YPL119C or a functional equivalent or a homologue thereof as depicted in column 7 of table II, preferably a homologue or functional equivalent as depicted in column 7 of table II B, and being depicted in the same respective line as said YPL119C, e.g. cytoplasmic.

[0501] The sequence of B2617 from Escherichia coli, e.g. as shown in column 5 of table I, is published: sequences from S. cerevisiae have been published in Goffeau et al., Science 274 (5287), 546 (1996), sequences from E. coli have been published in Blattner et al., Science 277 (5331), 1453 (1997). Its activity is described as small membrane lipoprotein.

Accordingly, in one embodiment, the process of the present invention for producing a plant with increased yield comprises increasing or generating the activity of a gene product conferring the activity “small membrane lipoprotein” from Escherichia coli or its functional equivalent or its homolog, e.g. the increase of
[0502] (a) a gene product of a gene comprising the nucleic acid molecule as shown in column 5 of table I, and being depicted in the same respective line as said B2617 or a functional equivalent or a homologue thereof as shown depicted in column 7 of table I, preferably a homologue or functional equivalent as shown depicted in column 7 of table I B, and being depicted in the same respective line as said B2617, e.g. cytoplasmic; or
[0503] (b) a polypeptide comprising a polypeptide, a consensus sequence or a polypeptide motif as shown depicted in column 5 of table II or column 7 of table IV, and being depicted in the same respective line as said B2617 or a functional equivalent or a homologue thereof as depicted in column 7 of table II, preferably a homologue or functional equivalent as depicted in column 7 of table II B, and being depicted in the same respective line as said B2617, e.g. cytoplasmic.

[0504] The sequence of SLL1280 from Synechocystis sp., e.g. as shown in column 5 of table I, is published: sequences from S. cerevisiae have been published in Goffeau et al., Science 274 (5287), 546 (1996), sequences from E. coli have been published in Blattner et al., Science 277 (5331), 1453 (1997). Its activity is described as SLL1280-protein.

Accordingly, in one embodiment, the process of the present invention for producing a plant with increased yield comprises increasing or generating the activity of a gene product conferring the activity “SLL1280-protein” from Synechocystis sp. or its functional equivalent or its homolog, e.g. the increase of
[0505] (a) a gene product of a gene comprising the nucleic acid molecule as shown in column 5 of table I, and being depicted in the same respective line as said SLL1280 or a functional equivalent or a homologue thereof as shown depicted in column 7 of table I, preferably a homologue or functional equivalent as shown depicted in column 7 of table I B, and being depicted in the same respective line as said SLL1280, e.g. cytoplasmic; or
[0506] (b) a polypeptide comprising a polypeptide, a consensus sequence or a polypeptide motif as shown depicted in column 5 of table II or column 7 of table IV, and being depicted in the same respective line as said SLL1280 or a functional equivalent or a homologue thereof as depicted in column 7 of table II, preferably a homologue or functional equivalent as depicted in column 7 of table II B, and being depicted in the same respective line as said SLL1280, e.g. cytoplasmic.

[0507] The sequence of YLR443W from Saccharomyces cerevisiae, e.g. as shown in column 5 of table I, is published: sequences from S. cerevisiae have been published in Goffeau et al., Science 274 (5287), 546 (1996), sequences from E. coli have been published in Blattner et al., Science 277 (5331), 1453 (1997). Its activity is described as YLR443W-protein.

Accordingly, in one embodiment, the process of the present invention for producing a plant with increased yield comprises increasing or generating the activity of a gene product conferring the activity “YLR443W-protein” from Saccharomyces cerevisiae or its functional equivalent or its homolog, e.g. the increase of
[0508] (a) a gene product of a gene comprising the nucleic acid molecule as shown in column 5 of table I, and being depicted in the same respective line as said YLR443W or a functional equivalent or a homologue thereof as shown depicted in column 7 of table I, preferably a homologue or functional equivalent as shown depicted in column 7 of table I B, and being depicted in the same respective line as said YLR443W, e.g. cytoplasmic; or
[0509] (b) a polypeptide comprising a polypeptide, a consensus sequence or a polypeptide motif as shown depicted in column 5 of table II or column 7 of table IV, and being depicted in the same respective line as said YLR443W or a functional equivalent or a homologue thereof as depicted in column 7 of table II, preferably a homologue or functional equivalent as depicted in column 7 of table II B, and being depicted in the same respective line as said YLR443W, e.g. cytoplasmic.

[0510] The sequence of YOR259c from Saccharomyces cerevisiae, e.g. as shown in column 5 of table I, is published: sequences from S. cerevisiae have been published in Goffeau et al., Science 274 (5287), 546 (1996), sequences from E. coli have been published in Blattner et al., Science 277 (5331), 1453 (1997). Its activity is described as 26S protease subunit.

Accordingly, in one embodiment, the process of the present invention for producing a plant with increased yield comprises increasing or generating the activity of a gene product conferring the activity “26S protease subunit” from Saccharomyces cerevisiae or its functional equivalent or its homolog, e.g. the increase of
[0511] (a) a gene product of a gene comprising the nucleic acid molecule as shown in column 5 of table I, and being depicted in the same respective line as said YOR259c or a functional equivalent or a homologue thereof as shown depicted in column 7 of table I, preferably a homologue or functional equivalent as shown depicted in column 7 of table I B, and being depicted in the same respective line as said YOR259c, e.g. cytoplasmic; or
[0512] (b) a polypeptide comprising a polypeptide, a consensus sequence or a polypeptide motif as shown depicted in column 5 of table II or column 7 of table IV, and being depicted in the same respective line as said YOR259c or a functional equivalent or a homologue thereof as depicted in column 7 of table II, preferably a homologue or functional equivalent as depicted in column 7 of table II B, and being depicted in the same respective line as said YOR259c, e.g. cytoplasmic.

[0513] The sequence of AT2G19580.1 from Arabidopsis thaliana, e.g. as shown in column 5 of table I, is published: sequences from S. cerevisiae have been published in Goffeau et al., Science 274 (5287), 546 (1996), sequences from E. coli have been published in Blattner et al., Science 277 (5331), 1453 (1997). Its activity is described as tretraspanin. Accordingly, in one embodiment, the process of the present invention for producing a plant with increased yield comprises increasing or generating the activity of a gene product conferring the activity “tretraspanin” from Arabidopsis thaliana or its functional equivalent or its homolog, e.g. the increase of
[0514] (a) a gene product of a gene comprising the nucleic acid molecule as shown in column 5 of table I, and being depicted in the same respective line as said AT2G19580.1 or a functional equivalent or a homologue thereof as shown depicted in column 7 of table I, preferably a homologue or functional equivalent as shown depicted in column 7 of table I B, and being depicted in the same respective line as said AT2G19580.1, e.g. cytoplasmic; or
[0515] (b) a polypeptide comprising a polypeptide, a consensus sequence or a polypeptide motif as shown depicted in column 5 of table II or column 7 of table IV, and being depicted in the same respective line as said AT2G19580.1 or a functional equivalent or a homologue thereof as depicted in column 7 of table II, preferably a homologue or functional equivalent as depicted in column 7 of table II B, and being depicted in the same respective line as said AT2G19580.1, e.g. cytoplasmic.

[0516] The sequence of AT2G20370.1 from Arabidopsis thaliana, e.g. as shown in column 5 of table I, is published: sequences from S. cerevisiae have been published in Goffeau et al., Science 274 (5287), 546 (1996), sequences from E. coli have been published in Blattner et al., Science 277 (5331), 1453 (1997). Its activity is described as xyloglucan galactosyltransferase.

Accordingly, in one embodiment, the process of the present invention for producing a plant with increased yield comprises increasing or generating the activity of a gene product conferring the activity “xyloglucan galactosyltransferase” from Arabidopsis thaliana or its functional equivalent or its homolog, e.g. the increase of
[0517] (a) a gene product of a gene comprising the nucleic acid molecule as shown in column 5 of table I, and being depicted in the same respective line as said AT2G20370.1 or a functional equivalent or a homologue thereof as shown depicted in column 7 of table I, preferably a homologue or functional equivalent as shown depicted in column 7 of table I B, and being depicted in the same respective line as said AT2G20370.1, e.g. cytoplasmic; or
[0518] (b) a polypeptide comprising a polypeptide, a consensus sequence or a polypeptide motif as shown depicted in column 5 of table II or column 7 of table IV, and being depicted in the same respective line as said AT2G20370.1 or a functional equivalent or a homologue thereof as depicted in column 7 of table II, preferably a homologue or functional equivalent as depicted in column 7 of table II B, and being depicted in the same respective line as said AT2G20370.1, e.g. cytoplasmic.

[0519] The sequence of AT4G33070.1 from Arabidopsis thaliana, e.g. as shown in column 5 of table I, is published: sequences from S. cerevisiae have been published in Goffeau et al., Science 274 (5287), 546 (1996), sequences from E. coli have been published in Blattner et al., Science 277 (5331), 1453 (1997). Its activity is described as pyruvate decarboxylase.

Accordingly, in one embodiment, the process of the present invention for producing a plant with increased yield comprises increasing or generating the activity of a gene product conferring the activity “pyruvate decarboxylase” from Arabidopsis thaliana or its functional equivalent or its homolog, e.g. the increase of
[0520] (a) a gene product of a gene comprising the nucleic acid molecule as shown in column 5 of table I, and being depicted in the same respective line as said AT4G33070.1 or a functional equivalent or a homologue thereof as shown depicted in column 7 of table I, preferably a homologue or functional equivalent as shown depicted in column 7 of table I B, and being depicted in the same respective line as said AT4G33070.1, e.g. cytoplasmic; or
[0521] (b) a polypeptide comprising a polypeptide, a consensus sequence or a polypeptide motif as shown depicted in column 5 of table II or column 7 of table IV, and being depicted in the same respective line as said AT4G33070.1 or a functional equivalent or a homologue thereof as depicted in column 7 of table II, preferably a homologue or functional equivalent as depicted in column 7 of table II B, and being depicted in the same respective line as said AT4G33070.1, e.g. cytoplasmic.

[0522] The sequence of AT5G07340.1 from Arabidopsis thaliana, e.g. as shown in column 5 of table I, is published: sequences from S. cerevisiae have been published in Goffeau et al., Science 274 (5287), 546 (1996), sequences from E. coli have been published in Blattner et al., Science 277 (5331), 1453 (1997). Its activity is described as calnexin homolog.

Accordingly, in one embodiment, the process of the present invention for producing a plant with increased yield comprises increasing or generating the activity of a gene product conferring the activity “calnexin homolog” from Arabidopsis thaliana or its functional equivalent or its homolog, e.g. the increase of
[0523] (a) a gene product of a gene comprising the nucleic acid molecule as shown in column 5 of table I, and being depicted in the same respective line as said AT5G07340.1 or a functional equivalent or a homologue thereof as shown depicted in column 7 of table I, preferably a homologue or functional equivalent as shown depicted in column 7 of table I B, and being depicted in the same respective line as said AT5G07340.1, e.g. cytoplasmic; or
[0524] (b) a polypeptide comprising a polypeptide, a consensus sequence or a polypeptide motif as shown depicted in column 5 of table II or column 7 of table IV, and being depicted in the same respective line as said AT5G07340.1 or a functional equivalent or a homologue thereof as depicted in column 7 of table II, preferably a homologue or functional equivalent as depicted in column 7 of table II B, and being depicted in the same respective line as said AT5G07340.1, e.g. cytoplasmic.

[0525] The sequence of AT5G62460.1 from Arabidopsis thaliana, e.g. as shown in column 5 of table I, is published: sequences from S. cerevisiae have been published in Goffeau et al., Science 274 (5287), 546 (1996), sequences from E. coli have been published in Blattner et al., Science 277 (5331), 1453 (1997). Its activity is described as zinc finger family protein.

Accordingly, in one embodiment, the process of the present invention for producing a plant with increased yield comprises increasing or generating the activity of a gene product conferring the activity “zinc finger family protein” from Arabidopsis thaliana or its functional equivalent or its homolog, e.g. the increase of
[0526] (a) a gene product of a gene comprising the nucleic acid molecule as shown in column 5 of table I, and being depicted in the same respective line as said AT5G62460.1 or a functional equivalent or a homologue thereof as shown depicted in column 7 of table I, preferably a homologue or functional equivalent as shown depicted in column 7 of table I B, and being depicted in the same respective line as said AT5G62460.1, e.g. cytoplasmic; or
[0527] (b) a polypeptide comprising a polypeptide, a consensus sequence or a polypeptide motif as shown depicted in column 5 of table II or column 7 of table IV, and being depicted in the same respective line as said AT5G62460.1 or a functional equivalent or a homologue thereof as depicted in column 7 of table II, preferably a homologue or functional equivalent as depicted in column 7 of table II B, and being depicted in the same respective line as said AT5G62460.1, e.g. cytoplasmic.

[0528] The sequence of AVINDRAFT_{—}2950 from Azotobacter vinelandii, e.g. as shown in column 5 of table I, is published: sequences from S. cerevisiae have been published in Goffeau et al., Science 274 (5287), 546 (1996), sequences from E. coli have been published in Blattner et al., Science 277 (5331), 1453 (1997). Its activity is described as Sulfatase.

Accordingly, in one embodiment, the process of the present invention for producing a plant with increased yield comprises increasing or generating the activity of a gene product conferring the activity “Sulfatase” from Azotobacter vinelandii or its functional equivalent or its homolog, e.g. the increase of
[0529] (a) a gene product of a gene comprising the nucleic acid molecule as shown in column 5 of table I, and being depicted in the same respective line as said AVINDRAFT_{—}2950 or a functional equivalent or a homologue thereof as shown depicted in column 7 of table I, preferably a homologue or functional equivalent as shown depicted in column 7 of table I B, and being depicted in the same respective line as said AVINDRAFT_{—}2950, e.g. cytoplasmic; or
[0530] (b) a polypeptide comprising a polypeptide, a consensus sequence or a polypeptide motif as shown depicted in column 5 of table II or column 7 of table IV, and being depicted in the same respective line as said AVINDRAFT_{—}2950 or a functional equivalent or a homologue thereof as depicted in column 7 of table II, preferably a homologue or functional equivalent as depicted in column 7 of table II B, and being depicted in the same respective line as said AVINDRAFT_{—}2950, e.g. cytoplasmic.

[0531] The sequence of AVINDRAFT_{—}0943 from Azotobacter vinelandii, e.g. as shown in column 5 of table I, is published: sequences from S. cerevisiae have been published in Goffeau et al., Science 274 (5287), 546 (1996), sequences from E. coli have been published in Blattner et al., Science 277 (5331), 1453 (1997). Its activity is described as Phosphoglucosamine mutase.

Accordingly, in one embodiment, the process of the present invention for producing a plant with increased yield comprises increasing or generating the activity of a gene product conferring the activity “Phosphoglucosamine mutase” from Azotobacter vinelandii or its functional equivalent or its homolog, e.g. the increase of
[0532] (a) a gene product of a gene comprising the nucleic acid molecule as shown in column 5 of table I, and being depicted in the same respective line as said AVINDRAFT_{—}0943 or a functional equivalent or a homologue thereof as shown depicted in column 7 of table I, preferably a homologue or functional equivalent as shown depicted in column 7 of table I B, and being depicted in the same respective line as said AVINDRAFT_{—}0943, e.g. cytoplasmic; or
[0533] (b) a polypeptide comprising a polypeptide, a consensus sequence or a polypeptide motif as shown depicted in column 5 of table II or column 7 of table IV, and being depicted in the same respective line as said AVINDRAFT_{—}0943 or a functional equivalent or a homologue thereof as depicted in column 7 of table II, preferably a homologue or functional equivalent as depicted in column 7 of table II B, and being depicted in the same respective line as said AVINDRAFT_{—}0943, e.g. cytoplasmic.

[0534] The sequence of SLL1797 from Synechocystis sp., e.g. as shown in column 5 of table I, is published: sequences from S. cerevisiae have been published in Goffeau et al., Science 274 (5287), 546 (1996), sequences from E. coli have been published in Blattner et al., Science 277 (5331), 1453 (1997). Its activity is described as SLL1797-protein.

Accordingly, in one embodiment, the process of the present invention for producing a plant with increased yield comprises increasing or generating the activity of a gene product conferring the activity “SLL1797-protein” from Synechocystis sp. or its functional equivalent or its homolog, e.g. the increase of
[0535] (a) a gene product of a gene comprising the nucleic acid molecule as shown in column 5 of table I, and being depicted in the same respective line as said SLL1797 or a functional equivalent or a homologue thereof as shown depicted in column 7 of table I, preferably a homologue or functional equivalent as shown depicted in column 7 of table I B, and being depicted in the same respective line as said SLL1797, e.g. cytoplasmic; or
[0536] (b) a polypeptide comprising a polypeptide, a consensus sequence or a polypeptide motif as shown depicted in column 5 of table II or column 7 of table IV, and being depicted in the same respective line as said SLL1797 or a functional equivalent or a homologue thereof as depicted in column 7 of table II, preferably a homologue or functional equivalent as depicted in column 7 of table II B, and being depicted in the same respective line as said SLL1797, e.g. cytoplasmic.

[0537] The sequence of YIL043C from Saccharomyces cerevisiae, e.g. as shown in column 5 of table I, is published: sequences from S. cerevisiae have been published in Goffeau et al., Science 274 (5287), 546 (1996), sequences from E. coli have been published in Blattner et al., Science 277 (5331), 1453 (1997). Its activity is described as Microsomal cytochrome b reductase.

Accordingly, in one embodiment, the process of the present invention for producing a plant with increased yield comprises increasing or generating the activity of a gene product conferring the activity “Microsomal cytochrome b reductase” from Saccharomyces cerevisiae or its functional equivalent or its homolog, e.g. the increase of
[0538] (a) a gene product of a gene comprising the nucleic acid molecule as shown in column 5 of table I, and being depicted in the same respective line as said YIL043C or a functional equivalent or a homologue thereof as shown depicted in column 7 of table I, preferably a homologue or functional equivalent as shown depicted in column 7 of table I B, and being depicted in the same respective line as said YIL043C, e.g. cytoplasmic; or
[0539] (b) a polypeptide comprising a polypeptide, a consensus sequence or a polypeptide motif as shown depicted in column 5 of table II or column 7 of table IV, and being depicted in the same respective line as said YIL043C or a functional equivalent or a homologue thereof as depicted in column 7 of table II, preferably a homologue or functional equivalent as depicted in column 7 of table II B, and being depicted in the same respective line as said YIL043C, e.g. cytoplasmic.

[0540] The sequence of B2940 from Escherichia coli, e.g. as shown in column 5 of table I, is published: sequences from S. cerevisiae have been published in Goffeau et al., Science 274 (5287), 546 (1996), sequences from E. coli have been published in Blattner et al., Science 277 (5331), 1453 (1997). Its activity is described as B2940-protein. Accordingly, in one embodiment, the process of the present invention for producing a plant with increased yield comprises increasing or generating the activity of a gene product conferring the activity “B2940-protein” from Escherichia coli or its functional equivalent or its homolog, e.g. the increase of
[0541] (a) a gene product of a gene comprising the nucleic acid molecule as shown in column 5 of table I, and being depicted in the same respective line as said B2940 or a functional equivalent or a homologue thereof as shown depicted in column 7 of table I, preferably a homologue or functional equivalent as shown depicted in column 7 of table I B, and being depicted in the same respective line as said B2940, e.g. plastidic; or
[0542] (b) a polypeptide comprising a polypeptide, a consensus sequence or a polypeptide motif as shown depicted in column 5 of table II or column 7 of table IV, and being depicted in the same respective line as said B2940 or a functional equivalent or a homologue thereof as depicted in column 7 of table II, preferably a homologue or functional equivalent as depicted in column 7 of table II B, and being depicted in the same respective line as said B2940, e.g. plastidic.

[0543] The sequence of AT2G19490 from Arabidopsis thaliana, e.g. as shown in column 5 of table I, is published: sequences from S. cerevisiae have been published in Goffeau et al., Science 274 (5287), 546 (1996), sequences from E. coli have been published in Blattner et al., Science 277 (5331), 1453 (1997). Its activity is described as recA family protein.

Accordingly, in one embodiment, the process of the present invention for producing a plant with increased yield comprises increasing or generating the activity of a gene product conferring the activity “recA family protein” from Arabidopsis thaliana or its functional equivalent or its homolog, e.g. the increase of
[0544] (a) a gene product of a gene comprising the nucleic acid molecule as shown in column 5 of table I, and being depicted in the same respective line as said AT2G19490 or a functional equivalent or a homologue thereof as shown depicted in column 7 of table I, preferably a homologue or functional equivalent as shown depicted in column 7 of table I B, and being depicted in the same respective line as said AT2G19490, e.g. cytoplasmic; or
[0545] (b) a polypeptide comprising a polypeptide, a consensus sequence or a polypeptide motif as shown depicted in column 5 of table II or column 7 of table IV, and being depicted in the same respective line as said AT2G19490 or a functional equivalent or a homologue thereof as depicted in column 7 of table II, preferably a homologue or functional equivalent as depicted in column 7 of table II B, and being depicted in the same respective line as said AT2G19490, e.g. cytoplasmic.

[0546] The sequence of B0951 from Escherichia coli, e.g. as shown in column 5 of table I, is published: sequences from S. cerevisiae have been published in Goffeau et al., Science 274 (5287), 546 (1996), sequences from E. coli have been published in Blattner et al., Science 277 (5331), 1453 (1997). Its activity is described as paraquat-inducible protein B.

Accordingly, in one embodiment, the process of the present invention for producing a plant with increased yield comprises increasing or generating the activity of a gene product conferring the activity “paraquat-inducible protein B” from Escherichia coli or its functional equivalent or its homolog, e.g. the increase of
[0547] (a) a gene product of a gene comprising the nucleic acid molecule as shown in column 5 of table I, and being depicted in the same respective line as said B0951 or a functional equivalent or a homologue thereof as shown depicted in column 7 of table I, preferably a homologue or functional equivalent as shown depicted in column 7 of table I B, and being depicted in the same respective line as said B0951, e.g. cytoplasmic; or
[0548] (b) a polypeptide comprising a polypeptide, a consensus sequence or a polypeptide motif as shown depicted in column 5 of table II or column 7 of table IV, and being depicted in the same respective line as said B0951 or a functional equivalent or a homologue thereof as depicted in column 7 of table II, preferably a homologue or functional equivalent as depicted in column 7 of table II B, and being depicted in the same respective line as said B0951, e.g. cytoplasmic.

[0549] The sequence of YER023W from Saccharomyces cerevisiae, e.g. as shown in column 5 of table I, is published: sequences from S. cerevisiae have been published in Goffeau et al., Science 274 (5287), 546 (1996), sequences from E. coli have been published in Blattner et al., Science 277 (5331), 1453 (1997). Its activity is described as Delta 1-pyrroline-5-carboxylate reductase.

Accordingly, in one embodiment, the process of the present invention for producing a plant with increased yield comprises increasing or generating the activity of a gene product conferring the activity “Delta 1-pyrroline-5-carboxylate reductase” from Saccharomyces cerevisiae or its functional equivalent or its homolog, e.g. the increase of
[0550] (a) a gene product of a gene comprising the nucleic acid molecule as shown in column 5 of table I, and being depicted in the same respective line as said YER023W or a functional equivalent or a homologue thereof as shown depicted in column 7 of table I, preferably a homologue or functional equivalent as shown depicted in column 7 of table I B, and being depicted in the same respective line as said YER023W, e.g. cytoplasmic; or
[0551] (b) a polypeptide comprising a polypeptide, a consensus sequence or a polypeptide motif as shown depicted in column 5 of table II or column 7 of table IV, and being depicted in the same respective line as said YER023W or a functional equivalent or a homologue thereof as depicted in column 7 of table II, preferably a homologue or functional equivalent as depicted in column 7 of table II B, and being depicted in the same respective line as said YER023W, e.g. cytoplasmic.

[0552] The sequence of B1189 from Escherichia coli, e.g. as shown in column 5 of table I, is published: sequences from S. cerevisiae have been published in Goffeau et al., Science 274 (5287), 546 (1996), sequences from E. coli have been published in Blattner et al., Science 277 (5331), 1453 (1997). Its activity is described as D-amino acid dehydrogenase.

Accordingly, in one embodiment, the process of the present invention for producing a plant with increased yield comprises increasing or generating the activity of a gene product conferring the activity “D-amino acid dehydrogenase” from Escherichia coli or its functional equivalent or its homolog, e.g. the increase of
[0553] (a) a gene product of a gene comprising the nucleic acid molecule as shown in column 5 of table I, and being depicted in the same respective line as said B1189 or a functional equivalent or a homologue thereof as shown depicted in column 7 of table I, preferably a homologue or functional equivalent as shown depicted in column 7 of table I B, and being depicted in the same respective line as said B1189, e.g. plastidic; or
[0554] (b) a polypeptide comprising a polypeptide, a consensus sequence or a polypeptide motif as shown depicted in column 5 of table II or column 7 of table IV, and being depicted in the same respective line as said B1189 or a functional equivalent or a homologue thereof as depicted in column 7 of table II, preferably a homologue or functional equivalent as depicted in column 7 of table II B, and being depicted in the same respective line as said B1189, e.g. plastidic.

[0555] The sequence of B2592 from Escherichia coli, e.g. as shown in column 5 of table I, is published: sequences from S. cerevisiae have been published in Goffeau et al., Science 274 (5287), 546 (1996), sequences from E. coli have been published in Blattner et al., Science 277 (5331), 1453 (1997). Its activity is described as protein disaggregation chaperone.

Accordingly, in one embodiment, the process of the present invention for producing a plant with increased yield comprises increasing or generating the activity of a gene product conferring the activity “protein disaggregation chaperone” from Escherichia coli or its functional equivalent or its homolog, e.g. the increase of
[0556] (a) a gene product of a gene comprising the nucleic acid molecule as shown in column 5 of table I, and being depicted in the same respective line as said B2592 or a functional equivalent or a homologue thereof as shown depicted in column 7 of table I, preferably a homologue or functional equivalent as shown depicted in column 7 of table I B, and being depicted in the same respective line as said B2592, e.g. plastidic; or
[0557] (b) a polypeptide comprising a polypeptide, a consensus sequence or a polypeptide motif as shown depicted in column 5 of table II or column 7 of table IV, and being depicted in the same respective line as said B2592 or a functional equivalent or a homologue thereof as depicted in column 7 of table II, preferably a homologue or functional equivalent as depicted in column 7 of table II B, and being depicted in the same respective line as said B2592, e.g. plastidic.

[0558] The sequence of AT1G07400.1 from Arabidopsis thaliana, e.g. as shown in column 5 of table I, is published: sequences from S. cerevisiae have been published in Goffeau et al., Science 274 (5287), 546 (1996), sequences from E. coli have been published in Blattner et al., Science 277 (5331), 1453 (1997). Its activity is described as 17.6 kDa class I heat shock protein.

Accordingly, in one embodiment, the process of the present invention for producing a plant with increased yield comprises increasing or generating the activity of a gene product conferring the activity “17.6 kDa class I heat shock protein” from Arabidopsis thaliana or its functional equivalent or its homolog, e.g. the increase of
[0559] (a) a gene product of a gene comprising the nucleic acid molecule as shown in column 5 of table I, and being depicted in the same respective line as said AT1G07400.1 or a functional equivalent or a homologue thereof as shown depicted in column 7 of table I, preferably a homologue or functional equivalent as shown depicted in column 7 of table I B, and being depicted in the same respective line as said AT1G07400.1, e.g. cytoplasmic; or
[0560] (b) a polypeptide comprising a polypeptide, a consensus sequence or a polypeptide motif as shown depicted in column 5 of table II or column 7 of table IV, and being depicted in the same respective line as said AT1G07400.1 or a functional equivalent or a homologue thereof as depicted in column 7 of table II, preferably a homologue or functional equivalent as depicted in column 7 of table II B, and being depicted in the same respective line as said AT1G07400.1, e.g. cytoplasmic.

[0561] The sequence of AT1G52560.1 from Arabidopsis thaliana, e.g. as shown in column 5 of table I, is published: sequences from S. cerevisiae have been published in Goffeau et al., Science 274 (5287), 546 (1996), sequences from E. coli have been published in Blattner et al., Science 277 (5331), 1453 (1997). Its activity is described as 26.5 kDa class I small heat shock protein.

Accordingly, in one embodiment, the process of the present invention for producing a plant with increased yield comprises increasing or generating the activity of a gene product conferring the activity “26.5 kDa class I small heat shock protein” from Arabidopsis thaliana or its functional equivalent or its homolog, e.g. the increase of
[0562] (a) a gene product of a gene comprising the nucleic acid molecule as shown in column 5 of table I, and being depicted in the same respective line as said AT1G52560.1 or a functional equivalent or a homologue thereof as shown depicted in column 7 of table I, preferably a homologue or functional equivalent as shown depicted in column 7 of table I B, and being depicted in the same respective line as said AT1G52560.1, e.g. cytoplasmic; or
[0563] (b) a polypeptide comprising a polypeptide, a consensus sequence or a polypeptide motif as shown depicted in column 5 of table II or column 7 of table IV, and being depicted in the same respective line as said AT1G52560.1 or a functional equivalent or a homologue thereof as depicted in column 7 of table II, preferably a homologue or functional equivalent as depicted in column 7 of table II B, and being depicted in the same respective line as said AT1G52560.1, e.g. cytoplasmic.

[0564] The sequence of AT1G63940.1 from Arabidopsis thaliana, e.g. as shown in column 5 of table I, is published: sequences from S. cerevisiae have been published in Goffeau et al., Science 274 (5287), 546 (1996), sequences from E. coli have been published in Blattner et al., Science 277 (5331), 1453 (1997). Its activity is described as monodehydroascorbate reductase.

Accordingly, in one embodiment, the process of the present invention for producing a plant with increased yield comprises increasing or generating the activity of a gene product conferring the activity “monodehydroascorbate reductase” from Arabidopsis thaliana or its functional equivalent or its homolog, e.g. the increase of
[0565] (a) a gene product of a gene comprising the nucleic acid molecule as shown in column 5 of table I, and being depicted in the same respective line as said AT1G63940.1 or a functional equivalent or a homologue thereof as shown depicted in column 7 of table I, preferably a homologue or functional equivalent as shown depicted in column 7 of table I B, and being depicted in the same respective line as said AT1G63940.1, e.g. cytoplasmic; or
[0566] (b) a polypeptide comprising a polypeptide, a consensus sequence or a polypeptide motif as shown depicted in column 5 of table II or column 7 of table IV, and being depicted in the same respective line as said AT1G63940.1 or a functional equivalent or a homologue thereof as depicted in column 7 of table II, preferably a homologue or functional equivalent as depicted in column 7 of table II B, and being depicted in the same respective line as said AT1G63940.1, e.g. cytoplasmic.

[0567] The sequence of AT1G63940.2 from Arabidopsis thaliana, e.g. as shown in column 5 of table I, is published: sequences from S. cerevisiae have been published in Goffeau et al., Science 274 (5287), 546 (1996), sequences from E. coli have been published in Blattner et al., Science 277 (5331), 1453 (1997). Its activity is described as monodehydroascorbate reductase.

Accordingly, in one embodiment, the process of the present invention for producing a plant with increased yield comprises increasing or generating the activity of a gene product conferring the activity “monodehydroascorbate reductase” from Arabidopsis thaliana or its functional equivalent or its homolog, e.g. the increase of
[0568] (a) a gene product of a gene comprising the nucleic acid molecule as shown in column 5 of table I, and being depicted in the same respective line as said AT1G63940.2 or a functional equivalent or a homologue thereof as shown depicted in column 7 of table I, preferably a homologue or functional equivalent as shown depicted in column 7 of table I B, and being depicted in the same respective line as said AT1G63940.2, e.g. cytoplasmic; or
[0569] (b) a polypeptide comprising a polypeptide, a consensus sequence or a polypeptide motif as shown depicted in column 5 of table II or column 7 of table IV, and being depicted in the same respective line as said AT1 G63940.2 or a functional equivalent or a homologue thereof as depicted in column 7 of table II, preferably a homologue or functional equivalent as depicted in column 7 of table II B, and being depicted in the same respective line as said AT1G63940.2, e.g. cytoplasmic.

[0570] The sequence of AT3G46230.1 from Arabidopsis thaliana, e.g. as shown in column 5 of table I, is published: sequences from S. cerevisiae have been published in Goffeau et al., Science 274 (5287), 546 (1996), sequences from E. coli have been published in Blattner et al., Science 277 (5331), 1453 (1997). Its activity is described as low-molecular-weight heat-shock protein.

Accordingly, in one embodiment, the process of the present invention for producing a plant with increased yield comprises increasing or generating the activity of a gene product conferring the activity “low-molecular-weight heat-shock protein” from Arabidopsis thaliana or its functional equivalent or its homolog, e.g. the increase of
[0571] (a) a gene product of a gene comprising the nucleic acid molecule as shown in column 5 of table I, and being depicted in the same respective line as said AT3G46230.1 or a functional equivalent or a homologue thereof as shown depicted in column 7 of table I, preferably a homologue or functional equivalent as shown depicted in column 7 of table I B, and being depicted in the same respective line as said AT3G46230.1, e.g. cytoplasmic; or
[0572] (b) a polypeptide comprising a polypeptide, a consensus sequence or a polypeptide motif as shown depicted in column 5 of table II or column 7 of table IV, and being depicted in the same respective line as said AT3G46230.1 or a functional equivalent or a homologue thereof as depicted in column 7 of table II, preferably a homologue or functional equivalent as depicted in column 7 of table II B, and being depicted in the same respective line as said AT3G46230.1, e.g. cytoplasmic.

[0573] The sequence of AT4G37930.1 from Arabidopsis thaliana, e.g. as shown in column 5 of table I, is published: sequences from S. cerevisiae have been published in Goffeau et al., Science 274 (5287), 546 (1996), sequences from E. coli have been published in Blattner et al., Science 277 (5331), 1453 (1997). Its activity is described as serine hydroxymethyltransferase.

Accordingly, in one embodiment, the process of the present invention for producing a plant with increased yield comprises increasing or generating the activity of a gene product conferring the activity “serine hydroxymethyltransferase” from Arabidopsis thaliana or its functional equivalent or its homolog, e.g. the increase of
[0574] (a) a gene product of a gene comprising the nucleic acid molecule as shown in column 5 of table I, and being depicted in the same respective line as said AT4G37930.1 or a functional equivalent or a homologue thereof as shown depicted in column 7 of table I, preferably a homologue or functional equivalent as shown depicted in column 7 of table I B, and being depicted in the same respective line as said AT4G37930.1, e.g. cytoplasmic; or
[0575] (b) a polypeptide comprising a polypeptide, a consensus sequence or a polypeptide motif as shown depicted in column 5 of table II or column 7 of table IV, and being depicted in the same respective line as said AT4G37930.1 or a functional equivalent or a homologue thereof as depicted in column 7 of table II, preferably a homologue or functional equivalent as depicted in column 7 of table II B, and being depicted in the same respective line as said AT4G37930.1, e.g. cytoplasmic.

[0576] The sequence of AT5G06290.1 from Arabidopsis thaliana, e.g. as shown in column 5 of table I, is published: sequences from S. cerevisiae have been published in Goffeau et al., Science 274 (5287), 546 (1996), sequences from E. coli have been published in Blattner et al., Science 277 (5331), 1453 (1997). Its activity is described as 2-Cys peroxiredoxin.

Accordingly, in one embodiment, the process of the present invention for producing a plant with increased yield comprises increasing or generating the activity of a gene product conferring the activity “2-Cys peroxiredoxin” from Arabidopsis thaliana or its functional equivalent or its homolog, e.g. the increase of
[0577] (a) a gene product of a gene comprising the nucleic acid molecule as shown in column 5 of table I, and being depicted in the same respective line as said AT5G06290.1 or a functional equivalent or a homologue thereof as shown depicted in column 7 of table I, preferably a homologue or functional equivalent as shown depicted in column 7 of table I B, and being depicted in the same respective line as said AT5G06290.1, e.g. cytoplasmic; or
[0578] (b) a polypeptide comprising a polypeptide, a consensus sequence or a polypeptide motif as shown depicted in column 5 of table II or column 7 of table IV, and being depicted in the same respective line as said AT5G06290.1 or a functional equivalent or a homologue thereof as depicted in column 7 of table II, preferably a homologue or functional equivalent as depicted in column 7 of table II B, and being depicted in the same respective line as said AT5G06290.1, e.g. cytoplasmic.

[0579] The sequence of CDS5399 from Populus trichocarpa, e.g. as shown in column 5 of table I, is published: sequences from S. cerevisiae have been published in Goffeau et al., Science 274 (5287), 546 (1996), sequences from E. coli have been published in Blattner et al., Science 277 (5331), 1453 (1997). Its activity is described as CDS5399-protein.

Accordingly, in one embodiment, the process of the present invention for producing a plant with increased yield comprises increasing or generating the activity of a gene product conferring the activity “CDS5399-protein” from Populus trichocarpa or its functional equivalent or its homolog, e.g. the increase of
[0580] (a) a gene product of a gene comprising the nucleic acid molecule as shown in column 5 of table I, and being depicted in the same respective line as said CDS5399 or a functional equivalent or a homologue thereof as shown depicted in column 7 of table I, preferably a homologue or functional equivalent as shown depicted in column 7 of table I B, and being depicted in the same respective line as said CDS5399, e.g. cytoplasmic; or
[0581] (b) a polypeptide comprising a polypeptide, a consensus sequence or a polypeptide motif as shown depicted in column 5 of table II or column 7 of table IV, and being depicted in the same respective line as said CDS5399 or a functional equivalent or a homologue thereof as depicted in column 7 of table II, preferably a homologue or functional equivalent as depicted in column 7 of table II B, and being depicted in the same respective line as said CDS5399, e.g. cytoplasmic.

[0582] The sequence of CDS5402 from Populus trichocarpa, e.g. as shown in column 5 of table I, is published: sequences from S. cerevisiae have been published in Goffeau et al., Science 274 (5287), 546 (1996), sequences from E. coli have been published in Blattner et al., Science 277 (5331), 1453 (1997). Its activity is described as Small nucleolar ribonucleoprotein complex subunit.

Accordingly, in one embodiment, the process of the present invention for producing a plant with increased yield comprises increasing or generating the activity of a gene product conferring the activity “Small nucleolar ribonucleoprotein complex subunit” from Populus trichocarpa or its functional equivalent or its homolog, e.g. the increase of
[0583] (a) a gene product of a gene comprising the nucleic acid molecule as shown in column 5 of table I, and being depicted in the same respective line as said CDS5402 or a functional equivalent or a homologue thereof as shown depicted in column 7 of table I, preferably a homologue or functional equivalent as shown depicted in column 7 of table I B, and being depicted in the same respective line as said CDS5402, e.g. cytoplasmic; or
[0584] (b) a polypeptide comprising a polypeptide, a consensus sequence or a polypeptide motif as shown depicted in column 5 of table II or column 7 of table IV, and being depicted in the same respective line as said CDS5402 or a functional equivalent or a homologue thereof as depicted in column 7 of table II, preferably a homologue or functional equivalent as depicted in column 7 of table II B, and being depicted in the same respective line as said CDS5402, e.g. cytoplasmic.

[0585] The sequence of CDS5423 from Populus trichocarpa, e.g. as shown in column 5 of table I, is published: sequences from S. cerevisiae have been published in Goffeau et al., Science 274 (5287), 546 (1996), sequences from E. coli have been published in Blattner et al., Science 277 (5331), 1453 (1997). Its activity is described as protein kinase. Accordingly, in one embodiment, the process of the present invention for producing a plant with increased yield comprises increasing or generating the activity of a gene product conferring the activity “protein kinase” from Populus trichocarpa or its functional equivalent or its homolog, e.g. the increase of
[0586] (a) a gene product of a gene comprising the nucleic acid molecule as shown in column 5 of table I, and being depicted in the same respective line as said CDS5423 or a functional equivalent or a homologue thereof as shown depicted in column 7 of table I, preferably a homologue or functional equivalent as shown depicted in column 7 of table I B, and being depicted in the same respective line as said CDS5423, e.g. cytoplasmic; or
[0587] (b) a polypeptide comprising a polypeptide, a consensus sequence or a polypeptide motif as shown depicted in column 5 of table II or column 7 of table IV, and being depicted in the same respective line as said CDS5423 or a functional equivalent or a homologue thereof as depicted in column 7 of table II, preferably a homologue or functional equivalent as depicted in column 7 of table II B, and being depicted in the same respective line as said CDS5423, e.g. cytoplasmic.

[0588] The sequence of YKL130C from Saccharomyces cerevisiae, e.g. as shown in column 5 of table I, is published: sequences from S. cerevisiae have been published in Goffeau et al., Science 274 (5287), 546 (1996), sequences from E. coli have been published in Blattner et al., Science 277 (5331), 1453 (1997). Its activity is described as YKL130C-protein.

Accordingly, in one embodiment, the process of the present invention for producing a plant with increased yield comprises increasing or generating the activity of a gene product conferring the activity “YKL130C-protein” from Saccharomyces cerevisiae or its functional equivalent or its homolog, e.g. the increase of
[0589] (a) a gene product of a gene comprising the nucleic acid molecule as shown in column 5 of table I, and being depicted in the same respective line as said YKL130C or a functional equivalent or a homologue thereof as shown depicted in column 7 of table I, preferably a homologue or functional equivalent as shown depicted in column 7 of table I B, and being depicted in the same respective line as said YKL130C, e.g. cytoplasmic; or
[0590] (b) a polypeptide comprising a polypeptide, a consensus sequence or a polypeptide motif as shown depicted in column 5 of table II or column 7 of table IV, and being depicted in the same respective line as said YKL130C or a functional equivalent or a homologue thereof as depicted in column 7 of table II, preferably a homologue or functional equivalent as depicted in column 7 of table II B, and being depicted in the same respective line as said YKL130C, e.g. cytoplasmic.

[0591] The sequence of YLR357W_{—}2 from Saccharomyces cerevisiae, e.g. as shown in column 5 of table I, is published: sequences from S. cerevisiae have been published in Goffeau et al., Science 274 (5287), 546 (1996), sequences from E. coli have been published in Blattner et al., Science 277 (5331), 1453 (1997). Its activity is described as chromatin structure-remodeling complex protein.

Accordingly, in one embodiment, the process of the present invention for producing a plant with increased yield comprises increasing or generating the activity of a gene product conferring the activity “chromatin structure-remodeling complex protein” from Saccharomyces cerevisiae or its functional equivalent or its homolog, e.g. the increase of
[0592] (a) a gene product of a gene comprising the nucleic acid molecule as shown in column 5 of table I, and being depicted in the same respective line as said YLR357W_{—}2 or a functional equivalent or a homologue thereof as shown depicted in column 7 of table I, preferably a homologue or functional equivalent as shown depicted in column 7 of table I B, and being depicted in the same respective line as said YLR357W_{—}2, e.g. cytoplasmic; or
[0593] (b) a polypeptide comprising a polypeptide, a consensus sequence or a polypeptide motif as shown depicted in column 5 of table II or column 7 of table IV, and being depicted in the same respective line as said YLR357W_{—}2 or a functional equivalent or a homologue thereof as depicted in column 7 of table II, preferably a homologue or functional equivalent as depicted in column 7 of table II B, and being depicted in the same respective line as said YLR357W_{—}2, e.g. cytoplasmic.

[0594] It was observed that increasing or generating the activity of a YRP gene shown in Table VIIIa, e.g. a nucleic acid molecule derived from the nucleic acid molecule shown in Table VIIIa in A. thaliana conferred increased nutrient use efficiency, e.g. an increased the nitrogen use efficiency, compared to the wild type control. Thus, in one embodiment, a nucleic acid molecule indicated in Table VIIIa or its homolog as indicated in Table I or the expression product is used in the method of the present invention to increased nutrient use efficiency, e.g. to increased the nitrogen use efficiency, of the a plant compared to the wild type control.

[0595] It was further observed that increasing or generating the activity of a YRP gene shown in Table VIIIa, e.g. a nucleic acid molecule derived from the nucleic acid molecule shown in Table VIIIa in A. thaliana conferred increased nutrient use efficiency, e.g. an increased the nitrogen use efficiency, compared with the wild type control. Thus, in one embodiment, a nucleic acid molecule indicated in Table VIIIa or its homolog as indicated in Table I or the expression product is used in the method of the present invention to increased nutrient use efficiency, e.g. to increased the nitrogen use efficiency, of the plant compared with the wild type control.

[0596] It was further observed that increasing or generating the activity of a YRP gene shown in Table VIIIb, e.g. a nucleic acid molecule derived from the nucleic acid molecule shown in Table VIIIb in A. thaliana conferred increased stress tolerance, e.g. increased low temperature tolerance, compared to the wild type control. Thus, in one embodiment, a nucleic acid molecule indicated in Table VIIIb or its homolog as indicated in Table I or the expression product is used in the method of the present invention to increase stress tolerance, e.g. increase low temperature, of a plant compared to the wild type control.

[0597] It was further observed that increasing or generating the activity of a YRP gene shown in Table VIIId, e.g. a nucleic acid molecule derived from the nucleic acid molecule shown in Table VIIId in A. thaliana conferred increase in intrinsic yield, e.g. increased biomass under standard conditions, e.g. increased biomass under non-deficiency or non-stress conditions, compared to the wild type control. Thus, in one embodiment, a nucleic acid molecule indicated in Table VIIId or its homolog as indicated in Table I or the expression product is used in the method of the present invention to increase intrinsic yield, e.g. to increase yield under standard conditions, e.g. increase biomass under non-deficiency or non-stress conditions, of the plant compared to the wild type control.

[0598] The term “expression” refers to the transcription and/or translation of a codogenic gene segment or gene. As a rule, the resulting product is an mRNA or a protein. However, expression products can also include functional RNAs such as, for example, antisense, nucleic acids, tRNAs, snRNAs, rRNAs, RNAi, siRNA, ribozymes etc. Expression may be systemic, local or temporal, for example limited to certain cell types, tissues organs or organelles or time periods.

[0599] In one embodiment, the process of the present invention comprises one or more of the following steps:

(a) stabilizing a protein conferring the increased expression of a YRP, e.g. a protein encoded by the nucleic acid molecule of the invention or of the polypeptide of the invention having the herein-mentioned activity selected from the group consisting of 17.6 kDa class I heat shock protein, 26.5 kDa class I small heat shock protein, 26S protease subunit, 2-Cys peroxiredoxin, 3-dehydroquinate synthase, 5-keto-D-gluconate-5-reductase, asparagine synthetase A, aspartate 1-decarboxylase precursor, ATP-dependent RNA helicase, B0567-protein, B1088-protein, B1289-protein, B2940-protein, calnexin homolog, CDS5399-protein, chromatin structure-remodeling complex protein, D-amino acid dehydrogenase, D-arabinono-1,4-lactone oxidase, Delta 1-pyrroline-5-carboxylate reductase, glycine cleavage complex lipoylprotein, ketodeoxygluconokinase, lipoyl synthase, low-molecular-weight heat-shock protein, Microsomal cytochrome b reductase, mitochondrial ribosomal protein, mitotic check point protein, monodehydroascorbate reductase, paraquat-inducible protein B, phosphatase, Phosphoglucosamine mutase, protein disaggregation chaperone, protein kinase, pyruvate decarboxylase, recA family protein, rhodanese-related sulfurtransferase, ribonuclease P protein component, ribosome modulation factor, sensory histidine kinase, serine hydroxymethyltransferase, SLL1280-protein, SLL1797-protein, small membrane lipoprotein, Small nucleolar ribonucleoprotein complex subunit, Sulfatase, transcription initiation factor subunit, tretraspanin, tRNA ligase, xyloglucan galactosyltransferase, YKL130C-protein, YLR443W-protein, YML096W-protein, and zinc finger family protein-activity and conferring increased yield, e.g. increasing a yield-related trait, for example enhanced tolerance to abiotic environmental stress, for example an increased drought tolerance and/or low temperature tolerance and/or an increased nutrient use efficiency, intrinsic yield and/or another mentioned yield-related trait as compared to a corresponding, e.g. non-transformed, wild type plant cell, plant or part thereof;
(b) stabilizing an mRNA conferring the increased expression of a YRP, e.g. encoding a polypeptide as mentioned in (a);
(c) increasing the specific activity of a protein conferring the increased expression of a YRP, e.g. a polypeptide as mentioned in (a);
(d) generating or increasing the expression of an endogenous or artificial transcription factor mediating the expression of a protein conferring the increased expression of a YRP, e.g. a polypeptide as mentioned in (a); (e) stimulating activity of a protein conferring the increased expression of a YRP, e.g. a polypeptide as mentioned in (a), by adding one or more exogenous inducing factors to the organism or parts thereof;
(f) expressing a transgenic gene encoding a protein conferring the increased expression of a YRP, e.g. a polypeptide as mentioned in (a); and/or
(g) increasing the copy number of a gene conferring the increased expression of a nucleic acid molecule encoding a YRP, e.g. a polypeptide as mentioned in (a);
(h) increasing the expression of the endogenous gene encoding the YRP, e.g. a polypeptide as mentioned in (a) by adding positive expression or removing negative expression elements, e.g. homologous recombination can be used to either introduce positive regulatory elements like for plants the 35S enhancer into the promoter or to remove repressor elements form regulatory regions. Further gene conversion methods can be used to disrupt repressor elements or to enhance to activity of positive elements-positive elements can be randomly introduced in plants by T-DNA or transposon mutagenesis and lines can be identified in which the positive elements have been integrated near to a gene of the invention, the expression of which is thereby enhanced; and/or
(i) modulating growth conditions of the plant in such a manner, that the expression or activity of the gene encoding the YRP, e.g. a polypeptide as mentioned in (a), or the protein itself is enhanced;
(j) selecting of organisms with especially high activity of the YRP, e.g. a polypeptide as mentioned in (a) from natural or from mutagenized resources and breeding them into the target organisms, e.g. the elite crops.

[0600] Preferably, said mRNA is encoded by the nucleic acid molecule of the present invention and/or the protein conferring the increased expression of a protein encoded by the nucleic acid molecule of the present invention alone or linked to a transit nucleic acid sequence or transit peptide encoding nucleic acid sequence or the polypeptide having the herein mentioned activity, e.g. conferring with increased yield, e.g. with an increased yield-related trait, for example enhanced tolerance to abiotic environmental stress, for example an increased drought tolerance and/or low temperature tolerance and/or an increased nutrient use efficiency, intrinsic yield and/or another mentioned yield-related trait as compared to a corresponding, e.g. non-transformed, wild type plant cell, plant or part thereof after increasing the expression or activity of the encoded polypeptide or having the activity of a polypeptide having an activity as the protein as shown in table II column 3 or its homologs.

[0601] In general, the amount of mRNA or polypeptide in a cell or a compartment of an organism correlates with the amount of encoded protein and thus with the overall activity of the encoded protein in said volume. Said correlation is not always linear, the activity in the volume is dependent on the stability of the molecules or the presence of activating or inhibiting co-factors. Further, product and educt inhibitions of enzymes are well known and described in textbooks, e.g. Stryer, Biochemistry.

[0602] In general, the amount of mRNA, polynucleotide or nucleic acid molecule in a cell or a compartment of an organism correlates with the amount of encoded protein and thus with the overall activity of the encoded protein in said volume. Said correlation is not always linear, the activity in the volume is dependent on the stability of the molecules, the degradation of the molecules or the presence of activating or inhibiting co-factors. Further, product and educt inhibitions of enzymes are well known, e.g. Zinser et al. “Enzyminhibitoren”/Enzyme inhibitors”.

[0603] The activity of the abovementioned proteins and/or polypeptides encoded by the nucleic acid molecule of the present invention can be increased in various ways. For example, the activity in an organism or in a part thereof, like a cell, is increased via increasing the gene product number, e.g. by increasing the expression rate, like introducing a stronger promoter, or by increasing the stability of the mRNA expressed, thus increasing the translation rate, and/or increasing the stability of the gene product, thus reducing the proteins decayed. Further, the activity or turnover of enzymes can be influenced in such a way that a reduction or increase of the reaction rate or a modification (reduction or increase) of the affinity to the substrate results, is reached. A mutation in the catalytic centre of an polypeptide of the invention, e.g. as enzyme, can modulate the turn over rate of the enzyme, e.g. a knock out of an essential amino acid can lead to a reduced or completely knock out activity of the enzyme, or the deletion or mutation of regulator binding sites can reduce a negative regulation like a feedback inhibition (or a substrate inhibition, if the substrate level is also increased). The specific activity of an enzyme of the present invention can be increased such that the turn over rate is increased or the binding of a co-factor is improved. Improving the stability of the encoding mRNA or the protein can also increase the activity of a gene product. The stimulation of the activity is also under the scope of the term “increased activity”.

[0604] Moreover, the regulation of the abovementioned nucleic acid sequences may be modified so that gene expression is increased. This can be achieved advantageously by means of heterologous regulatory sequences or by modifying, for example mutating, the natural regulatory sequences which are present. The advantageous methods may also be combined with each other.

[0605] In general, an activity of a gene product in an organism or part thereof, in particular in a plant cell or organelle of a plant cell, a plant, or a plant tissue or a part thereof or in a microorganism can be increased by increasing the amount of the specific encoding mRNA or the corresponding protein in said organism or part thereof.

[0606] “Amount of protein or mRNA” is understood as meaning the molecule number of polypeptides or mRNA molecules in an organism, especially a plant, a tissue, a cell or a cell compartment. “Increase” in the amount of a protein means the quantitative increase of the molecule number of said protein in an organism, especially a plant, a tissue, a cell or a cell compartment such as an organelle like a plastid or mitochondria or part thereof—for example by one of the methods described herein below—in comparison to a wild type, control or reference.

[0607] The increase in molecule number amounts preferably to 1% or more, preferably to 10% or more, more preferably to 30% or more, especially preferably to 50%, 70% or more, very especially preferably to 100%, most preferably to 500% or more. However, a de novo expression is also regarded as subject of the present invention.

[0608] A modification, i.e. an increase, can be caused by endogenous or exogenous factors. For example, an increase in activity in an organism or a part thereof can be caused by adding a gene product or a precursor or an activator or an agonist to the media or nutrition or can be caused by introducing said subjects into a organism, transient or stable. Furthermore such an increase can be reached by the introduction of the inventive nucleic acid sequence or the encoded protein in the correct cell compartment for example into the nucleus or cytoplasm respectively or into plastids either by transformation and/or targeting.

[0609] In one embodiment the increased yield, e.g. increased yield-related trait, for example enhanced tolerance to abiotic environmental stress, for example an increased drought tolerance and/or low temperature tolerance and/or an increased nutrient use efficiency, intrinsic yield and/or another mentioned yield-related trait as compared to a corresponding, e.g. non-transformed, wild type plant cell in the plant or a part thereof, e.g. in a cell, a tissue, a organ, an organelle, the cytoplasm etc., is achieved by increasing the endogenous level of the polypeptide of the invention.

Accordingly, in an embodiment of the present invention, the present invention relates to a process wherein the gene copy number of a gene encoding the polynucleotide or nucleic acid molecule of the invention is increased. Further, the endogenous level of the polypeptide of the invention can for example be increased by modifying the transcriptional or translational regulation of the polypeptide.

[0610] In one embodiment the increased yield, e.g. increased yield-related trait, for example enhanced tolerance to abiotic environmental stress, for example an increased drought tolerance and/or low temperature tolerance and/or an increased nutrient use efficiency, intrinsic yield and/or another mentioned yield-related trait of the plant or part thereof can be altered by targeted or random mutagenesis of the endogenous genes of the invention. For example homologous recombination can be used to either introduce positive regulatory elements like for plants the 35S enhancer into the promoter or to remove repressor elements form regulatory regions. In addition gene conversion like methods described by Kochevenko and Willmitzer (Plant Physiol. 132 (1), 174 (2003)) and citations therein can be used to disrupt repressor elements or to enhance to activity of positive regulatory elements. Furthermore positive elements can be randomly introduced in (plant) genomes by T-DNA or transposon mutagenesis and lines can be screened for, in which the positive elements have been integrated near to a gene of the invention, the expression of which is thereby enhanced. The activation of plant genes by random integrations of enhancer elements has been described by Hayashi et al. (Science 258, 1350 (1992)) or Weigel et al. (Plant Physiol. 122, 1003 (2000)) and others recited therein.

[0611] Reverse genetic strategies to identify insertions (which eventually carrying the activation elements) near in genes of interest have been described for various cases e.g. Krysan et al. (Plant Cell 11, 2283 (1999)); Sessions et al. (Plant Cell 14, 2985 (2002)); Young et al. (Plant Physiol. 125, 513 (2001)); Koprek et al. (Plant J. 24, 253 (2000)); Jeon et al. (Plant J. 22, 561 (2000)); Tissier et al. (Plant Cell 11, 1841 (1999)); Speulmann et al. (Plant Cell 11, 1853 (1999)). Briefly material from all plants of a large T-DNA or transposon mutagenized plant population is harvested and genomic DNA prepared. Then the genomic DNA is pooled following specific architectures as described for example in Krysan et al. (Plant Cell 11, 2283 (1999)). Pools of genomics DNAs are then screened by specific multiplex PCR reactions detecting the combination of the insertional mutagen (e.g. T-DNA or Transposon) and the gene of interest. Therefore PCR reactions are run on the DNA pools with specific combinations of T-DNA or transposon border primers and gene specific primers. General rules for primer design can again be taken from Krysan et al. (Plant Cell 11, 2283 (1999)). Rescreening of lower levels DNA pools lead to the identification of individual plants in which the gene of interest is activated by the insertional mutagen.

The enhancement of positive regulatory elements or the disruption or weakening of negative regulatory elements can also be achieved through common mutagenesis techniques: The production of chemically or radiation mutated populations is a common technique and known to the skilled worker. Methods for plants are described by Koorneef et al. (Mutat Res. Mar. 93 (1) (1982)) and the citations therein and by Lightner and Caspar in “Methods in Molecular Biology” Vol. 82. These techniques usually induce point mutations that can be identified in any known gene using methods such as TILLING (Colbert et al., Plant Physiol, 126, (2001)).

[0612] Accordingly, the expression level can be increased if the endogenous genes encoding a polypeptide conferring an increased expression of the polypeptide of the present invention, in particular genes comprising the nucleic acid molecule of the present invention, are modified via homologous recombination, Tilling approaches or gene conversion. It also possible to add as mentioned herein targeting sequences to the inventive nucleic acid sequences.

[0613] Regulatory sequences, if desired, in addition to a target sequence or part thereof can be operatively linked to the coding region of an endogenous protein and control its transcription and translation or the stability or decay of the encoding mRNA or the expressed protein. In order to modify and control the expression, promoter, UTRs, splicing sites, processing signals, polyadenylation sites, terminators, enhancers, repressors, post transcriptional or posttranslational modification sites can be changed, added or amended. For example, the activation of plant genes by random integrations of enhancer elements has been described by Hayashi et al. (Science 258, 1350 (1992)) or Weigel et al. (Plant Physiol. 122, 1003 (2000)) and others recited therein. For example, the expression level of the endogenous protein can be modulated by replacing the endogenous promoter with a stronger transgenic promoter or by replacing the endogenous 3′UTR with a 3′UTR, which provides more stability without amending the coding region. Further, the transcriptional regulation can be modulated by introduction of an artificial transcription factor as described in the examples. Alternative promoters, terminators and UTR are described below.

[0614] The activation of an endogenous polypeptide having above-mentioned activity, e.g. having the activity of a protein as shown in table II, column 3 or of the polypeptide of the invention, e.g. conferring increased yield, e.g. increased yield-related trait, for example enhanced tolerance to abiotic environmental stress, for example an increased drought tolerance and/or low temperature tolerance and/or an increased nutrient use efficiency, intrinsic yield and/or another mentioned yield-related trait as compared to a corresponding, e.g. non-transformed, wild type plant cell, plant or part thereof after increase of expression or activity in the cytoplasm and/or in an organelle like a plastid, can also be increased by introducing a synthetic transcription factor, which binds close to the coding region of the gene encoding the protein as shown in table II, column 3 and activates its transcription. A chimeric zinc finger protein can be constructed, which comprises a specific DNA-binding domain and an activation domain as e.g. the VP16 domain of Herpes Simplex virus. The specific binding domain can bind to the regulatory region of the gene encoding the protein as shown in table II, column 3. The expression of the chimeric transcription factor in a organism, in particular in a plant, leads to a specific expression of the protein as shown in table II, column 3. The methods thereto are known to a skilled person and/or disclosed e.g. in WO01/52620, Oriz, Proc. Natl. Acad. Sci. USA, 99, 13290 (2002) or Guan, Proc. Natl. Acad. Sci. USA 99, 13296 (2002).

[0615] In one further embodiment of the process according to the invention, organisms are used in which one of the abovementioned genes, or one of the abovementioned nucleic acids, is mutated in a way that the activity of the encoded gene products is less influenced by cellular factors, or not at all, in comparison with the not mutated proteins. For example, well known regulation mechanism of enzyme activity are substrate inhibition or feed back regulation mechanisms. Ways and techniques for the introduction of substitution, deletions and additions of one or more bases, nucleotides or amino acids of a corresponding sequence are described herein below in the corresponding paragraphs and the references listed there, e.g. in Sambrook et al., Molecular Cloning, Cold Spring Harbour, N.Y., 1989. The person skilled in the art will be able to identify regulation domains and binding sites of regulators by comparing the sequence of the nucleic acid molecule of the present invention or the expression product thereof with the state of the art by computer software means which comprise algorithms for the identifying of binding sites and regulation domains or by introducing into a nucleic acid molecule or in a protein systematically mutations and assaying for those mutations which will lead to an increased specific activity or an increased activity per volume, in particular per cell.

[0616] It can therefore be advantageous to express in an organism a nucleic acid molecule of the invention or a polypeptide of the invention derived from a evolutionary distantly related organism, as e.g. using a prokaryotic gene in a eukaryotic host, as in these cases the regulation mechanism of the host cell may not weaken the activity (cellular or specific) of the gene or its expression product.

[0617] The mutation is introduced in such a way that increased yield, e.g. increased yield-related trait, for example enhanced tolerance to abiotic environmental stress, for example an increased drought tolerance and/or low temperature tolerance and/or an increased nutrient use efficiency, intrinsic yield and/or another mentioned yield-related trait are not adversely affected.

[0618] Less influence on the regulation of a gene or its gene product is understood as meaning a reduced regulation of the enzymatic activity leading to an increased specific or cellular activity of the gene or its product. An increase of the enzymatic activity is understood as meaning an enzymatic activity, which is increased by 10% or more, advantageously 20%, 30% or 40% or more, especially advantageously by 50%, 60% or 70% or more in comparison with the starting organism. This leads to increased yield, e.g. an increased yield-related trait, for example enhanced tolerance to abiotic environmental stress, for example an increased drought tolerance and/or low temperature tolerance and/or an increased nutrient use efficiency, intrinsic yield and/or another mentioned yield-related trait as compared to a corresponding, e.g. non-transformed, wild type plant or part thereof.

[0619] The invention provides that the above methods can be performed such that enhanced tolerance to abiotic environmental stress, for example drought tolerance and/or low temperature tolerance and/or nutrient use efficiency, intrinsic yield and/or another mentioned yield-related traits increased, wherein particularly the tolerance to low temperature is increased. In a further embodiment the invention provides that the above methods can be performed such that the tolerance to abiotic stress, particularly the tolerance to low temperature and/or water use efficiency, and at the same time, the nutrient use efficiency, particularly the nitrogen use efficiency is increased. In another embodiment the invention provides that the above methods can be performed such that the yield is increased in the absence of nutrient deficiencies as well as the absence of stress conditions. In a further embodiment the invention provides that the above methods can be performed such that the nutrient use efficiency, particularly the nitrogen use efficiency, and the yield, in the absence of nutrient deficiencies as well as the absence of stress conditions, is increased. In a preferred embodiment the invention provides that the above methods can be performed such that the tolerance to abiotic stress, particularly the tolerance to low temperature and/or water use efficiency, and at the same time, the nutrient use efficiency, particularly the nitrogen use efficiency, and the yield in the absence of nutrient deficiencies as well as the absence of stress conditions, is increased.

[0620] The invention is not limited to specific nucleic acids, specific polypeptides, specific cell types, specific host cells, specific conditions or specific methods etc. as such, but may vary and numerous modifications and variations therein will be apparent to those skilled in the art. It is also to be understood that the terminology used herein is for the purpose of describing specific embodiments only and is not intended to be limiting.

[0621] The present invention also relates to isolated nucleic acids comprising a nucleic acid molecule selected from the group consisting of:
[0622] (a) a nucleic acid molecule encoding the polypeptide shown in column 7 of table II B, application no. 1;
[0623] (b) a nucleic acid molecule shown in column 7 of table I B, application no. 1;
[0624] (c) a nucleic acid molecule, which, as a result of the degeneracy of the genetic code, can be derived from a polypeptide sequence depicted in column 5 or 7 of table II, application no. 1, and confers increased yield, e.g. increased yield-related trait, for example enhanced tolerance to abiotic environmental stress, for example an increased drought tolerance and/or low temperature tolerance and/or an increased nutrient use efficiency, intrinsic yield and/or another mentioned yield-related trait as compared to a corresponding, e.g. non-transformed, wild type plant cell, a plant or a part thereof;
[0625] (d) a nucleic acid molecule having 30% or more identity, preferably 40%, 50%, 60%, 70%, 75%, 80%, 85%, 90%, 95%, 96%, 97%, 98%, 99%, 99.5%, or more with the nucleic acid molecule sequence of a polynucleotide comprising the nucleic acid molecule shown in column 5 or 7 of table I, application no. 1, and confers increased yield, e.g. increased yield-related trait, for example enhanced tolerance to abiotic environmental stress, for example an increased drought tolerance and/or low temperature tolerance and/or an increased nutrient use efficiency, intrinsic yield and/or another mentioned yield-related trait as compared to a corresponding, e.g. non-transformed, wild type plant cell, a plant or a part thereof;
[0626] (e) a nucleic acid molecule encoding a polypeptide having 30% or more identity, preferably at least 40%, 50%, 60%, 70%, 75%, 80%, 85%, 90%, 95%, 96%, 97%, 98%, 99%, 99.5% or more, with the amino acid sequence of the polypeptide encoded by the nucleic acid molecule of (a), (b), (c) or (d) and having the activity represented by a nucleic acid molecule comprising a polynucleotide as depicted in column 5 of table I, application no. 1, and confers increased yield, e.g. increased yield-related trait, for example enhanced tolerance to abiotic environmental stress, for example an increased drought tolerance and/or low temperature tolerance and/or an increased nutrient use efficiency, intrinsic yield and/or another mentioned yield-related trait as compared to a corresponding, e.g. non-transformed, wild type plant cell, a plant or a part thereof;
[0627] (f) nucleic acid molecule which hybridizes with a nucleic acid molecule of (a), (b), (c), (d) or (e) under stringent hybridization conditions and confers increased yield, e.g. an increased yield-related trait, for example enhanced tolerance to abiotic environmental stress, for example an increased drought tolerance and/or low temperature tolerance and/or an increased nutrient use efficiency, intrinsic yield and/or another mentioned yield-related trait as compared to a corresponding, e.g. non-transformed, wild type plant cell, a plant or a part thereof;
[0628] (g) a nucleic acid molecule encoding a polypeptide which can be isolated with the aid of monoclonal or polyclonal antibodies made against a polypeptide encoded by one of the nucleic acid molecules of (a), (b), (c), (d), (e) or (f) and having the activity represented by the nucleic acid molecule comprising a polynucleotide as depicted in column 5 of table I, application no. 1;
[0629] (h) a nucleic acid molecule encoding a polypeptide comprising the consensus sequence or one or more polypeptide motifs as shown in column 7 of table IV, application no. 1, and preferably having the activity represented by a protein comprising a polypeptide as depicted in column 5 of table II or IV, application no. 1;
[0630] (i) a nucleic acid molecule encoding a polypeptide having the activity represented by a protein as depicted in column 5 of table II, application no. 1, and confers increased yield, e.g. an increased yield-related trait, for example enhanced tolerance to abiotic environmental stress, for example an increased drought tolerance and/or low temperature tolerance and/or an increased nutrient use efficiency, intrinsic yield and/or another mentioned yield-related trait as compared to a corresponding, e.g. non-transformed, wild type plant cell, a plant or a part thereof; W nucleic acid molecule which comprises a polynucleotide, which is obtained by amplifying a cDNA library or a genomic library using the primers in column 7 of table III, application no. 1, and preferably having the activity represented by a protein comprising a polypeptide as depicted in column 5 of table II or IV, application no. 1; and
[0631] (k) a nucleic acid molecule which is obtainable by screening a suitable nucleic acid library, especially a cDNA library and/or a genomic library, under stringent hybridization conditions with a probe comprising a complementary sequence of a nucleic acid molecule of
[0632] (a) or (b) or with a fragment thereof, having 15 nt, preferably 20 nt, 30 nt, 50 nt, 100 nt, 200 nt, 500 nt, 750 nt or 1000 nt or more of a nucleic acid molecule complementary to a nucleic acid molecule sequence characterized in (a) to (e) and encoding a polypeptide having the activity represented by a protein comprising a polypeptide as depicted in column 5 of table II, application no. 1.
   In one embodiment, the nucleic acid molecule according to (a), (b), (c), (d), (e), (f), (g), (h), (i), (j) and (k) is at least in one or more nucleotides different from the sequence depicted in column 5 or 7 of table I A, application no. 1, and preferably which encodes a protein which differs at least in one or more amino acids from the protein sequences depicted in column 5 or 7 of table II A, application no. 1.

[0633] In one embodiment the invention relates to homologs of the aforementioned sequences, which can be isolated advantageously from yeast, fungi, viruses, algae, bacteria, such as Acetobacter (subgen. Acetobacter) aceti; Acidithiobacillus ferrooxidans; Acinetobacter sp.; Actinobacillus sp; Aeromonas salmonicida; Agrobacterium tumefaciens; Aquifex aeolicus; Arcanobacterium pyogenes; Aster yellows phytoplasma; Bacillus sp.; Bifidobacterium sp.; Borrelia burgdorferi; Brevibacterium linens; Brucella melitensis; Buchnera sp.; Butyrivibrio fibrisolvens; Campylobacter jejuni; Caulobacter crescentus; Chlamydia sp.; Chlamydophila sp.; Chlorobium limicola; Citrobacter rodentium; Clostridium sp.; Comamonas testosteroni; Corynebacterium sp.; Coxiella burnetii; Deinococcus radiodurans; Dichelobacter nodosus; Edwardsiella ictaluri; Enterobacter sp.; Erysipelothrix rhusiopathiae; E. coli; Flavobacterium sp.; Francisella tularensis; Frankia sp. Cpl1; Fusobacterium nucleatum; Geobacillus stearothermophilus; Gluconobacter oxydans; Haemophilus sp.; Helicobacter pylori; Klebsiella pneumoniae; Lactobacillus sp.; Lactococcus lactis; Listeria sp.; Mannheimia haemolytica; Mesorhizobium loti; Methylophaga thalassica; Microcystis aeruginosa; Microscilla sp. PRE1; Moraxella sp. TA144; Mycobacterium sp.; Mycoplasma sp.; Neisseria sp.; Nitrosomonas sp.; Nostoc sp. PCC 7120; Novosphingobium aromaticivorans; Oenococcus oeni; Pantoea citrea; Pasteurella multocida; Pediococcus pentosaceus; Phormidium foveolarum; Phytoplasma sp.; Plectonema boryanum; Prevotella ruminicola; Propionibacterium sp.; Proteus vulgaris; Pseudomonas sp.; Ralstonia sp.; Rhizobium sp.; Rhodococcus equi; Rhodothermus marinus; Rickettsia sp.; Riemerella anatipestifer; Ruminococcus flavefaciens; Salmonella sp.; Selenomonas ruminantium; Serratia entomophila; Shigella sp.; Sinorhizobium meliloti; Staphylococcus sp.; Streptococcus sp.; Streptomyces sp.; Synechococcus sp.; Synechocystis sp. PCC 6803; Thermotoga maritima; Treponema sp.; Ureaplasma urealyticum; Vibrio cholerae; Vibrio parahaemolyticus; Xylella fastidiosa; Yersinia sp.; Zymomonas mobilis, preferably Salmonella sp. or E. coli or plants, preferably from yeasts such as from the genera Saccharomyces, Pichia, Candida, Hansenula, Torulopsis or Schizosaccharomyces or plants such as A. thaliana, maize, wheat, rye, oat, triticale, rice, barley, soybean, peanut, cotton, borage, sunflower, linseed, primrose, rapeseed, canola and turnip rape, manihot, pepper, sunflower, tagetes, solanaceous plant such as potato, tobacco, eggplant and tomato, Vicia species, pea, alfalfa, bushy plants such as coffee, cacao, tea, Salix species, trees such as oil palm, coconut, perennial grass, such as ryegrass and fescue, and forage crops, such as alfalfa and clover and from spruce, pine or fir for example. More preferably homologs of aforementioned sequences can be isolated from S. cerevisiae, E. coli or Synechocystis sp. or plants, preferably Brassica napus, Glycine max, Zea mays, cotton or Oryza sativa.

[0634] The proteins of the present invention are preferably produced by recombinant DNA techniques. For example, a nucleic acid molecule encoding the protein is cloned into an expression vector, for example in to a binary vector, the expression vector is introduced into a host cell, for example the A. thaliana wild type NASC N906 or any other plant cell as described in the examples see below, and the protein is expressed in said host cell. Examples for binary vectors are pBIN19, pBI101, pBinAR, pGPTV, pCAMBIA, pBIB-HYG, pBecks, pGreen or pPZP (Hajukiewicz, P. et al., Plant Mol. Biol. 25, 989 (1994), and Hellens et al, Trends in Plant Science 5, 446 (2000)).

[0635] In one embodiment the protein of the present invention is preferably produced in an compartment of the cell, e.g. in the plastids. Ways of introducing nucleic acids into plastids and producing proteins in this compartment are known to the person skilled in the art have been also described in this application. In one embodiment, the polypeptide of the invention is a protein localized after expression as indicated in column 6 of table II, e.g. nontargeted, mitochondrial or plastidic, for example it is fused to a transit peptide as described above for plastidic localisation. In another embodiment the protein of the present invention is produced without further targeting signal (e.g. as mentioned herein), e.g. in the cytoplasm of the cell. Ways of producing proteins in the cytoplasm are known to the person skilled in the art. Ways of producing proteins without artificial targeting are known to the person skilled in the art.

[0636] Advantageously, the nucleic acid sequences according to the invention or the gene construct together with at least one reporter gene are cloned into an expression cassette, which is introduced into the organism via a vector or directly into the genome. This reporter gene should allow easy detection via a growth, fluorescence, chemical, bioluminescence or tolerance assay or via a photometric measurement. Examples of reporter genes which may be mentioned are antibiotic- or herbicide-tolerance genes, hydrolase genes, fluorescence protein genes, bioluminescence genes, sugar or nucleotide metabolic genes or biosynthesis genes such as the Ura3 gene, the Ilv2 gene, the luciferase gene, the β-galactosidase gene, the gfp gene, the 2-desoxyglucose-6-phosphate phosphatase gene, the β-glucuronidase gene, β-lactamase gene, the neomycin phosphotransferase gene, the hygromycin phosphotransferase gene, a mutated acetohydroxyacid synthase (AHAS) gene (also known as acetolactate synthase (ALS) gene), a gene for a D-amino acid metabolizing enzmye or the BASTA (=gluphosinate-tolerance) gene. These genes permit easy measurement and quantification of the transcription activity and hence of the expression of the genes. In this way genome positions may be identified which exhibit differing productivity.

[0637] In a preferred embodiment a nucleic acid construct, for example an expression cassette, comprises upstream, i.e. at the 5′ end of the encoding sequence, a promoter and downstream, i.e. at the 3′ end, a polyadenylation signal and optionally other regulatory elements which are operably linked to the intervening encoding sequence with one of the nucleic acids of SEQ ID NO as depicted in table I, column 5 and 7. By an operable linkage is meant the sequential arrangement of promoter, encoding sequence, terminator and optionally other regulatory elements in such a way that each of the regulatory elements can fulfill its function in the expression of the encoding sequence in due manner. In one embodiment the sequences preferred for operable linkage are targeting sequences for ensuring subcellular localization in plastids. However, targeting sequences for ensuring subcellular localization in the mitochondrium, in the endoplasmic reticulum (=ER), in the nucleus, in oil corpuscles or other compartments may also be employed as well as translation promoters such as the 5′ lead sequence in tobacco mosaic virus (Gallie et al., Nucl. Acids Res. 15 8693 (1987)).

[0638] A nucleic acid construct, for example an expression cassette may, for example, contain a constitutive promoter or a tissue-specific promoter (preferably the USP or napin promoter) the gene to be expressed and the ER retention signal. For the ER retention signal the KDEL amino acid sequence (lysine, aspartic acid, glutamic acid, leucine) or the KKX amino acid sequence (lysine-lysine-X-stop, wherein X means every other known amino acid) is preferably employed.

[0639] For expression in a host organism, for example a plant, the expression cassette is advantageously inserted into a vector such as by way of example a plasmid, a phage or other DNA which allows optimal expression of the genes in the host organism. Examples of suitable plasmids are: in E. coli pLG338, pACYC184, pBR series such as e.g. pBR322, pUC series such as pUC18 or pUC19, M113 mp series, pKC30, pRep4, pHS1, pHS2, pPLc236, pMBL24, pLG200, pUR290, pIN-III113-B1, λgt11 or pBdCI; in Streptomyces pIJ101, pIJ364, pIJ702 or pIJ361; in Bacillus pUB110, pC194 or pBD214; in Corynebacterium pSA77 or pAJ667; in fungi pALS1, pIL2 or pBB116; other advantageous fungal vectors are described by Romanos M. A. et al., Yeast 8, 423 (1992) and by van den Hondel, C.A.M.J. J. et al. [(1991) “Heterologous gene expression in filamentous fungi”] as well as in “More Gene Manipulations” in “Fungi” in Bennet J. W. & Lasure L. L., eds., pp. 396-428, Academic Press, San Diego, and in “Gene transfer systems and vector development for filamentous fungi” [van den Hondel, C.A.M.J.J. & Punt, P. J. (1991) in: Applied Molecular Genetics of Fungi, Peberdy, J. F. et al., eds., pp. 1-28, Cambridge University Press: Cambridge ]. Examples of advantageous yeast promoters are 2 μM, pAG-1, YEp6, YEp13 or pEMBLYe23. Examples of algal or plant promoters are pLGV23, pGHlac+, pBIN19, pAK2004, pVKH or pDH51 (see Schmidt, R. and Willmitzer, L., Plant Cell Rep. 7, 583 (1988))). The vectors identified above or derivatives of the vectors identified above are a small selection of the possible plasmids. Further plasmids are well known to those skilled in the art and may be found, for example, in “Cloning Vectors” (Eds. Pouwels P. H. et al. Elsevier, Amsterdam-New York-Oxford, 1985, ISBN 0 444 904018). Suitable plant vectors are described inter alia in “Methods in Plant Molecular Biology and Biotechnology” (CRC Press, Ch. 6/7, pp. 71-119). Advantageous vectors are known as shuttle vectors or binary vectors which replicate in E. coli and Agrobacterium.

[0640] By vectors is meant with the exception of plasmids all other vectors known to those skilled in the art such as by way of example phages, viruses such as SV40, CMV, baculovirus, adenovirus, transposons, IS elements, phasmids, phagemids, cosmids, linear or circular DNA. These vectors can be replicated autonomously in the host organism or be chromosomally replicated, chromosomal replication being preferred.

[0641] In a further embodiment of the vector the expression cassette according to the invention may also advantageously be introduced into the organisms in the form of a linear DNA and be integrated into the genome of the host organism by way of heterologous or homologous recombination. This linear DNA may be composed of a linearized plasmid or only of the expression cassette as vector or the nucleic acid sequences according to the invention.

[0642] In a further advantageous embodiment the nucleic acid sequence according to the invention can also be introduced into an organism on its own.

[0643] If in addition to the nucleic acid sequence according to the invention further genes are to be introduced into the organism, all together with a reporter gene in a single vector or each single gene with a reporter gene in a vector in each case can be introduced into the organism, whereby the different vectors can be introduced simultaneously or successively.

[0644] The vector advantageously contains at least one copy of the nucleic acid sequences according to the invention and/or the expression cassette (=gene construct) according to the invention.

[0645] The invention further provides an isolated recombinant expression vector comprising a nucleic acid encoding a polypeptide as depicted in table II, column 5 or 7, wherein expression of the vector in a host cell results in increased yield, e.g. increased yield-related trait, for example enhanced tolerance to abiotic environmental stress, for example an increased drought tolerance and/or low temperature tolerance and/or an increased nutrient use efficiency, intrinsic yield and/or another mentioned yield-related trait as compared to a wild type variety of the host cell.

[0646] As used herein, the term “vector” refers to a nucleic acid molecule capable of transporting another nucleic acid to which it has been linked. One type of vector is a “plasmid”, which refers to a circular double stranded DNA loop into which additional DNA segments can be ligated. Another type of vector is a viral vector, wherein additional DNA segments can be ligated into the viral genome. Certain vectors are capable of autonomous replication in a host cell into which they are introduced (e.g. bacterial vectors having a bacterial origin of replication and episomal mammalian vectors). Other vectors (e.g. non-episomal mammalian vectors) are integrated into the genome of a host cell or a organelle upon introduction into the host cell, and thereby are replicated along with the host or organelle genome. Moreover, certain vectors are capable of directing the expression of genes to which they are operatively linked. Such vectors are referred to herein as “expression vectors.” In general, expression vectors of utility in recombinant DNA techniques are often in the form of plasmids. In the present specification, “plasmid” and “vector” can be used interchangeably as the plasmid is the most commonly used form of vector. However, the invention is intended to include such other forms of expression vectors, such as viral vectors (e.g., replication defective retroviruses, adenoviruses, and adeno-associated viruses), which serve equivalent functions.

[0647] The recombinant expression vectors of the invention comprise a nucleic acid of the invention in a form suitable for expression of the nucleic acid in a host cell, which means that the recombinant expression vectors include one or more regulatory sequences, selected on the basis of the host cells to be used for expression, which is operatively linked to the nucleic acid sequence to be expressed. As used herein with respect to a recombinant expression vector, “operatively linked” is intended to mean that the nucleotide sequence of interest is linked to the regulatory sequence(s) in a manner which allows for expression of the nucleotide sequence (e.g. in an in vitro transcription/translation system or in a host cell when the vector is introduced into the host cell). The term “regulatory sequence” is intended to include promoters, enhancers, and other expression control elements (e.g. polyadenylation signals). Such regulatory sequences are described, for example, in Goeddel, Gene Expression Technology: Methods in Enzymology 185, Academic Press, San Diego, Calif. (1990), and Gruber and Crosby, in: Methods in Plant Molecular Biology and Biotechnology, eds. Glick and Thompson, Chapter 7, 89-108, CRC Press; Boca Raton, Fla., including the references therein. Regulatory sequences include those that direct constitutive expression of a nucleotide sequence in many types of host cells and those that direct expression of the nucleotide sequence only in certain host cells or under certain conditions. It will be appreciated by those skilled in the art that the design of the expression vector can depend on such factors as the choice of the host cell to be transformed, the level of expression of polypeptide desired, etc. The expression vectors of the invention can be introduced into host cells to thereby produce polypeptides or peptides, including fusion polypeptides or peptides, encoded by nucleic acids as described herein (e.g., fusion polypeptides, “Yield Related Proteins” or “YRPs” etc.).

[0648] The recombinant expression vectors of the invention can be designed for expression of the polypeptide of the invention in plant cells. For example, YRP genes can be expressed in plant cells (see Schmidt R., and Willmitzer L., Plant Cell Rep. 7 (1988); Plant Molecular Biology and Biotechnology, C Press, Boca Raton, Fla., Chapter 6/7, p. 71-119 (1993); White F. F., Jenes B. et al., Techniques for Gene Transfer, in: Transgenic Plants, Vol. 1, Engineering and Utilization, eds. Kung and Wu R., 128-43, Academic Press: 1993; Potrykus, Annu. Rev. Plant Physiol. Plant Molec. Biol. 42, 205 (1991) and references cited therein). Suitable host cells are discussed further in Goeddel, Gene Expression Technology: Methods in Enzymology 185, Academic Press: San Diego, Calif. (1990). Alternatively, the recombinant expression vector can be transcribed and translated in vitro, for example using T7 promoter regulatory sequences and T7 polymerase. Expression of polypeptides in prokaryotes is most often carried out with vectors containing constitutive or inducible promoters directing the expression of either fusion or non-fusion polypeptides. Fusion vectors add a number of amino acids to a polypeptide encoded therein, usually to the amino terminus of the recombinant polypeptide but also to the C-terminus or fused within suitable regions in the polypeptides. Such fusion vectors typically serve three purposes: 1) to increase expression of a recombinant polypeptide; 2) to increase the solubility of a recombinant polypeptide; and 3) to aid in the purification of a recombinant polypeptide by acting as a ligand in affinity purification. Often, in fusion expression vectors, a proteolytic cleavage site is introduced at the junction of the fusion moiety and the recombinant polypeptide to enable separation of the recombinant polypeptide from the fusion moiety subsequent to purification of the fusion polypeptide. Such enzymes, and their cognate recognition sequences, include Factor Xa, thrombin, and enterokinase.

[0649] By way of example the plant expression cassette can be installed in the pRT transformation vector ((a) Toepfer et al., Methods Enzymol. 217, 66 (1993), (b) Toepfer et al., Nucl. Acids. Res. 15, 5890 (1987)). Alternatively, a recombinant vector (=expression vector) can also be transcribed and translated in vitro, e.g. by using the T7 promoter and the T7 RNA polymerase.

[0650] Expression vectors employed in prokaryotes frequently make use of inducible systems with and without fusion proteins or fusion oligopeptides, wherein these fusions can ensue in both N-terminal and C-terminal manner or in other useful domains of a protein. Such fusion vectors usually have the following purposes: 1) to increase the RNA expression rate; 2) to increase the achievable protein synthesis rate; 3) to increase the solubility of the protein; 4) or to simplify purification by means of a binding sequence usable for affinity chromatography. Proteolytic cleavage points are also frequently introduced via fusion proteins, which allow cleavage of a portion of the fusion protein and purification. Such recognition sequences for proteases are recognized, e.g. factor Xa, thrombin and enterokinase. Typical advantageous fusion and expression vectors are pGEX (Pharmacia Biotech Inc; Smith D. B. and Johnson K. S., Gene 67, 31 (1988)), pMAL (New England Biolabs, Beverly, Mass.) and pRIT5 (Pharmacia, Piscataway, N.J.) which contains glutathione Stransferase (GST), maltose binding protein or protein A.

[0651] In one embodiment, the coding sequence of the polypeptide of the invention is cloned into a pGEX expression vector to create a vector encoding a fusion polypeptide comprising, from the N-terminus to the C-terminus, GST-thrombin cleavage site-X polypeptide. The fusion polypeptide can be purified by affinity chromatography using glutathioneagarose resin. Recombinant PK YRP unfused to GST can be recovered by cleavage of the fusion polypeptide with thrombin. Other examples of E. coli expression vectors are pTrc (Amann et al., Gene 69, 301 (1988)) and pET vectors (Studier et al., Gene Expression Technology: Methods in Enzymology 185, Academic Press, San Diego, Calif. (1990) 60-89; Stratagene, Amsterdam, The Netherlands).

[0652] Target gene expression from the pTrc vector relies on host RNA polymerase transcription from a hybrid trp-lac fusion promoter. Target gene expression from the pET 11d vector relies on transcription from a T7 gn10-lac fusion promoter mediated by a coexpressed viral RNA polymerase (T7 gn1). This viral polymerase is supplied by host strains BL21(DE3) or HMS174(DE3) from a resident I prophage harboring a T7 gn1 gene under the transcriptional control of the lacUV 5 promoter.

[0653] In an further embodiment of the present invention, the YRPs are expressed in plants and plants cells such as unicellular plant cells (e.g. algae) (see Falciatore et al., Marine Biotechnology 1 (3), 239 (1999) and references therein) and plant cells from higher plants (e.g., the spermatophytes, such as crop plants), for example to regenerate plants from the plant cells. A nucleic acid molecule coding for YRP as depicted in table II, column 5 or 7 may be “introduced” into a plant cell by any means, including transfection, transformation or transduction, electroporation, particle bombardment, agroinfection, and the like. One transformation method known to those of skill in the art is the dipping of a flowering plant into an Agrobacteria solution, wherein the Agrobacteria contains the nucleic acid of the invention, followed by breeding of the transformed gametes.

[0654] Other suitable methods for transforming or transfecting host cells including plant cells can be found in Sambrook et al., Molecular Cloning: A Laboratory Manual. 2nd, ed., Cold Spring Harbor Laboratory, Cold Spring Harbor Laboratory Press, Cold Spring Harbor, N.Y., 1989, and other laboratory manuals such as Methods in Molecular Biology, 1995, Vol. 44, Agrobacterium protocols, ed: Gartland and Davey, Humana Press, Totowa, New Jersey. As increased tolerance to abiotic environmental stress and/or yield is a general trait wished to be inherited into a wide variety of plants like maize, wheat, rye, oat, triticale, rice, barley, soybean, peanut, cotton, rapeseed and canola, manihot, pepper, sunflower and tagetes, solanaceous plants like potato, tobacco, eggplant, and tomato, Vicia species, pea, alfalfa, bushy plants (coffee, cacao, tea), Salix species, trees (oil palm, coconut), perennial grasses, and forage crops, these crop plants are also preferred target plants for a genetic engineering as one further embodiment of the present invention. Forage crops include, but are not limited to Wheatgrass, Canarygrass, Bromegrass, Wildrye Grass, Bluegrass, Orchardgrass, Alfalfa, Salfoin, Birdsfoot Trefoil, Alsike Clover, Red Clover and Sweet Clover.

[0655] In one embodiment of the present invention, transfection of a nucleic acid molecule coding for YRP as depicted in table II, column 5 or 7 into a plant is achieved by Agrobacterium mediated gene transfer. Agrobacterium mediated plant transformation can be performed using for example the GV3101(pMP90) (Koncz and Schell, Mol. Gen. Genet. 204, 383 (1986)) or LBA4404 (Clontech) Agrobacterium tumefaciens strain. Transformation can be performed by standard transformation and regeneration techniques (Deblaere et al., Nucl. Acids Res. 13, 4777 (1994), Gelvin, Stanton B. and Schilperoort Robert A, Plant Molecular Biology Manual, 2nd Ed.—Dordrecht: Kluwer Academic Publ., 1995.—in Sect., Ringbuc Zentrale Signatur: BT11-P ISBN 0-7923-2731-4; Glick Bernard R., Thompson John E., Methods in Plant Molecular Biology and Biotechnology, Boca Raton: CRC Press, 1993 360 S., ISBN 0-8493-5164-2). For example, rapeseed can be transformed via cotyledon or hypocotyl transformation (Moloney et al., Plant Cell Report 8, 238 (1989); De Block et al., Plant Physiol. 91, 694 (1989)). Use of antibiotics for Agrobacterium and plant selection depends on the binary vector and the Agrobacterium strain used for transformation. Rapeseed selection is normally performed using kanamycin as selectable plant marker. Agrobacterium mediated gene transfer to flax can be performed using, for example, a technique described by Mlynarova et al., Plant Cell Report 13, 282 (1994). Additionally, transformation of soybean can be performed using for example a technique described in European Patent No. 424 047, U.S. Pat. No. 5,322,783, European Patent No. 397 687, U.S. Pat. No. 5,376,543 or U.S. Pat. No. 5,169,770. Transformation of maize can be achieved by particle bombardment, polyethylene glycol mediated DNA uptake or via the silicon carbide fiber technique. (See, for example, Freeling and Walbot “The maize handbook” Springer Verlag: New York (1993) ISBN 3-540-97826-7). A specific example of maize transformation is found in U.S. Pat. No. 5,990,387, and a specific example of wheat transformation can be found in PCT Application No. WO 93/07256.

[0656] According to the present invention, the introduced nucleic acid molecule coding for YRP as depicted in table II, column 5 or 7 may be maintained in the plant cell stably if it is incorporated into a non-chromosomal autonomous replicon or integrated into the plant chromosomes or organelle genome. Alternatively, the introduced YRP may be present on an extra-chromosomal non-replicating vector and be transiently expressed or transiently active.

[0657] In one embodiment, a homologous recombinant microorganism can be created

[0658] wherein the YRP is integrated into a chromosome, a vector is prepared which contains at least a portion of a nucleic acid molecule coding for YRP as depicted in table II, column 5 or 7 into which a deletion, addition, or substitution has been introduced to thereby alter, e.g., functionally disrupt, the YRP gene. For example, the YRP gene is a yeast gene, like a gene of S. cerevisiae, or of Synechocystis, or a bacterial gene, like an E. coli gene, but it can be a homolog from a related plant or even from a mammalian or insect source. The vector can be designed such that, upon homologous recombination, the endogenous nucleic acid molecule coding for YRP as depicted in table II, column 5 or 7 is mutated or otherwise altered but still encodes a functional polypeptide (e.g., the upstream regulatory region can be altered to thereby alter the expression of the endogenous YRP). In a preferred embodiment the biological activity of the protein of the invention is increased upon homologous recombination. To create a point mutation via homologous recombination, DNA-RNA hybrids can be used in a technique known as chimeraplasty (Cole-Strauss et al., Nucleic Acids Research 27 (5), 1323 (1999) and Kmiec, Gene Therapy American Scientist. 87 (3), 240 (1999)). Homologous recombination procedures in Physcomitrella patens are also well known in the art and are contemplated for use herein.

[0659] Whereas in the homologous recombination vector, the altered portion of the nucleic acid molecule coding for YRP as depicted in table II, column 5 or 7 is flanked at its 5′ and 3′ ends by an additional nucleic acid molecule of the YRP gene to allow for homologous recombination to occur between the exogenous YRP gene carried by the vector and an endogenous YRP gene, in a microorganism or plant. The additional flanking YRP nucleic acid molecule is of sufficient length for successful homologous recombination with the endogenous gene. Typically, several hundreds of base pairs up to kilobases of flanking DNA (both at the 5′ and 3′ ends) are included in the vector. See, e.g., Thomas K. R., and Capecchi M. R., Cell 51, 503 (1987) for a description of homologous recombination vectors or Strepp et al., PNAS, 95 (8), 4368 (1998) for cDNA based recombination in Physcomitrella patens. The vector is introduced into a microorganism or plant cell (e.g. via polyethylene glycol mediated DNA), and cells in which the introduced YRP gene has homologously recombined with the endogenous YRP gene are selected using art-known techniques.

[0660] Whether present in an extra-chromosomal non-replicating vector or a vector that is integrated into a chromosome, the nucleic acid molecule coding for YRP as depicted in table II, column 5 or 7 preferably resides in a plant expression cassette. A plant expression cassette preferably contains regulatory sequences capable of driving gene expression in plant cells that are operatively linked so that each sequence can fulfill its function, for example, termination of transcription by polyadenylation signals. Preferred polyadenylation signals are those originating from Agrobacterium tumefaciens t-DNA such as the gene 3 known as octopine synthase of the Ti-plasmid pTiACH₅ (Gielen et al., EMBO J. 3, 835 (1984)) or functional equivalents thereof but also all other terminators functionally active in plants are suitable. As plant gene expression is very often not limited on transcriptional levels, a plant expression cassette preferably contains other operatively linked sequences like translational enhancers such as the overdrive-sequence containing the 5″-untranslated leader sequence from tobacco mosaic virus enhancing the polypeptide per RNA ratio (Gallie et al., Nucl. Acids Research 15, 8693 (1987)). Examples of plant expression vectors include those detailed in: Becker D. et al., Plant Mol. Biol. 20, 1195 (1992); and Bevan M. W., Nucl. Acid. Res. 12, 8711 (1984); and “Vectors for Gene Transfer in Higher Plants” in: Transgenic Plants, Vol. 1, Engineering and Utilization, eds. Kung and Wu R., Academic Press, 1993, S. 15-38.

[0661] “Transformation” is defined herein as a process for introducing heterologous DNA into a plant cell, plant tissue, or plant. It may occur under natural or artificial conditions using various methods well known in the art. Transformation may rely on any known method for the insertion of foreign nucleic acid sequences into a prokaryotic or eukaryotic host cell. The method is selected based on the host cell being transformed and may include, but is not limited to, viral infection, electroporation, lipofection, and particle bombardment. Such “transformed” cells include stably transformed cells in which the inserted DNA is capable of replication either as an autonomously replicating plasmid or as part of the host chromosome. They also include cells which transiently express the inserted DNA or RNA for limited periods of time. Transformed plant cells, plant tissue, or plants are understood to encompass not only the end product of a transformation process, but also transgenic progeny thereof.

[0662] The terms “transformed,” “transgenic,” and “recombinant” refer to a host organism such as a bacterium or a plant into which a heterologous nucleic acid molecule has been introduced. The nucleic acid molecule can be stably integrated into the genome of the host or the nucleic acid molecule can also be present as an extra-chromosomal molecule. Such an extra-chromosomal molecule can be auto-replicating. Transformed cells, tissues, or plants are understood to encompass not only the end product of a transformation process, but also transgenic progeny thereof. A “non-transformed”, “non-transgenic” or “nonrecombinant” host refers to a wild-type organism, e.g. a bacterium or plant, which does not contain the heterologous nucleic acid molecule.

[0663] A “transgenic plant”, as used herein, refers to a plant which contains a foreign nucleotide sequence inserted into either its nuclear genome or organelle genome. It encompasses further the offspring generations i.e. the T1-, T2- and consecutively generations or BC1-, BC2- and consecutively generation as well as crossbreeds thereof with non-transgenic or other transgenic plants.

[0664] The host organism (=transgenic organism) advantageously contains at least one copy of the nucleic acid according to the invention and/or of the nucleic acid construct according to the invention.

[0665] In principle all plants can be used as host organism. Preferred transgenic plants are, for example, selected from the families Aceraceae, Anacardiaceae, Apiaceae, Asteraceae, Brassicaceae, Cactaceae, Cucurbitaceae, Euphorbiaceae, Fabaceae, Malvaceae, Nymphaeaceae, Papaveraceae, Rosaceae, Salicaceae, Solanaceae, Arecaceae, Bromeliaceae, Cyperaceae, Iridaceae, Liliaceae, Orchidaceae, Gentianaceae, Labiaceae, Magnoliaceae, Ranunculaceae, Carifolaceae, Rubiaceae, Scrophulariaceae, Caryophyllaceae, Ericaceae, Polygonaceae, Violaceae, Juncaceae or Poaceae and preferably from a plant selected from the group of the families Apiaceae, Asteraceae, Brassicaceae, Cucurbitaceae, Fabaceae, Papaveraceae, Rosaceae, Solanaceae, Liliaceae or Poaceae. Preferred are crop plants such as plants advantageously selected from the group of the genus peanut, oilseed rape, canola, sunflower, safflower, olive, sesame, hazelnut, almond, avocado, bay, pumpkin/squash, linseed, soya, pistachio, borage, maize, wheat, rye, oats, sorghum and millet, triticale, rice, barley, cassaya, potato, sugarbeet, egg plant, alfalfa, and perennial grasses and forage plants, oil palm, vegetables (brassicas, root vegetables, tuber vegetables, pod vegetables, fruiting vegetables, onion vegetables, leafy vegetables and stem vegetables), buckwheat, Jerusalem artichoke, broad bean, vetches, lentil, dwarf bean, lupin, clover and Lucerne for mentioning only some of them.

[0666] In one embodiment of the invention transgenic plants are selected from the group comprising cereals, soybean, rapeseed (including oil seed rape, especially canola and winter oil seed rape), cotton sugarcane and potato, especially corn, soy, rapeseed (including oil seed rape, especially canola and winter oil seed rape), cotton, wheat and rice.

[0667] In another embodiment of the invention the transgenic plant is a gymnosperm plant, especially a spruce, pine or fir.

[0668] In one embodiment, the host plant is selected from the families Aceraceae, Anacardiaceae, Apiaceae, Asteraceae, Brassicaceae, Cactaceae, Cucurbitaceae, Euphorbiaceae, Fabaceae, Malvaceae, Nymphaeaceae, Papaveraceae, Rosaceae, Salicaceae, Solanaceae, Arecaceae, Bromeliaceae, Cyperaceae, Iridaceae, Liliaceae, Orchidaceae, Gentianaceae, Labiaceae, Magnoliaceae, Ranunculaceae, Carifolaceae, Rubiaceae, Scrophulariaceae, Caryophyllaceae, Ericaceae, Polygonaceae, Violaceae, Juncaceae or Poaceae and preferably from a plant selected from the group of the families Apiaceae, Asteraceae, Brassicaceae, Cucurbitaceae, Fabaceae, Papaveraceae, Rosaceae, Solanaceae, Liliaceae or Poaceae. Preferred are crop plants and in particular plants mentioned herein above as host plants such as the families and genera mentioned above for example preferred the species Anacardium occidentale, Calendula officinalis, Carthamus tinctorius, Cichorium intybus, Cynara scolymus, Helianthus annus, Tagetes lucida, Tagetes erecta, Tagetes tenuifolia; Daucus carota; Corylus avellana, Corylus colurna, Borago officinalis; Brassica napus, Brassica rapa ssp., Sinapis arvensis Brassica juncea, Brassica juncea var. juncea, Brassica juncea var. crispifolia, Brassica juncea var. foliosa, Brassica nigra, Brassica sinapioides, Melanosinapis communis, Brassica oleracea, Arabidopsis thaliana, Anana comosus, Ananas ananas, Bromelia comosa, Carica papaya, Cannabis sative, Ipomoea batatus, Ipomoea pandurata, Convolvulus batatas, Convolvulus tiliaceus, Ipomoeafastigiate, Ipomoea tiliacea, Ipomoea triloba, Convolvulus panduratus, Beta vulgaris, Beta vulgaris var. altissima, Beta vulgaris var. vulgaris, Beta maritima, Beta vulgaris var. perennis, Beta vulgaris var. conditiva, Beta vulgaris var. esculenta, Cucurbita maxima, Cucurbita mixta, Cucurbita pepo, Cucurbita moschata, Olea europaea, Manihot utilissima, Janipha manihot, Jatropha manihot., Manihot aipil, Manihot dulcis, Manihot manihot, Manihot melanobasis, Manihot esculenta, Ricinus communis, Pisum sativum, Pisum arvense, Pisum humile, Medicago sativa, Medicago falcata, Medicago varia, Glycine max Dolichos soja, Glycine gracilis, Glycine hispida, Phaseolus max, Soja hispida, Soja max, Cocos nucifera, Pelargonium grossularioides, Oleum cocoas, Laurus nobilis, Persea americana, Arachis hypogaea, Linum usitatissimum, Linum humile, Linum austriacum, Linum bienne, Linum angustifolium, Linum catharticum, Linum flavum, Linum grandiflorum, Adenolinum grandiflorum, Linum lewisii, Linum narbonense, Linum perenne, Linum perenne var. lewisii, Linum pratense, Linum trigynum, Punica granatum, Gossypium hirsutum, Gossypium arboreum, Gossypium barbadense, Gossypium herbaceum, Gossypium thurberi, Musa nana, Musa acuminata, Musa paradisiaca, Musa spp., Elaeis guineensis, Papaver orientale, Papaver rhoeas, Papaver dubium, Sesamum indicum, Piper aduncum, Piper amalago, Piper angustifolium, Piper auritum, Piper betel, Piper cubeba, Piper longum, Piper nigrum, Piper retrofractum, Artanthe adunca, Artanthe elongata, Peperomia elongata, Piper elongatum, Steffensia elongata, Hordeum vulgare, Hordeum jubatum, Hordeum murinum, Hordeum secalinum, Hordeum distichon Hordeum aegiceras, Hordeum hexastichon, Hordeum hexastichum, Hordeum irregulare, Hordeum sativum, Hordeum secalinum, Avena sativa, Avena fatua, Avena byzantina, Avena fatua var. sativa, Avena hybrida, Sorghum bicolor, Sorghum halepense, Sorghum saccharatum, Sorghum vulgare, Andropogon drummondii, Holcus bicolor, Holcus sorghum, Sorghum aethiopicum, Sorghum arundinaceum, Sorghum caffrorum, Sorghum cernuum, Sorghum dochna, Sorghum drummondii, Sorghum durra, Sorghum guineense, Sorghum lanceolatum, Sorghum nervosum, Sorghum saccharatum, Sorghum subglabrescens, Sorghum verticilliflorum, Sorghum vulgare, Holcus halepensis, Sorghum miliaceum millet, Panicum militaceum, Zea mays, Triticum aestivum, Triticum durum, Triticum turgidum, Triticum hybernum, Triticum macha, Triticum sativum or Triticum vulgare, Cofea spp., Coffea arabica, Coffea canephora, Coffea liberica, Capsicum annuum, Capsicum annuum var. glabriusculum, Capsicum frutescens, Capsicum annuum, Nicotiana tabacum, Solanum tuberosum, Solanum melongena, Lycopersicon esculentum, Lycopersicon lycopersicum, Lycopersicon pyriforme, Solanum integrifolium, Solanum lycopersicum Theobroma cacao or Camellia sinensis.

[0669] Anacardiaceae such as the genera Pistacia, Mangifera, Anacardium e.g. the species Pistacia vera [pistachios, Pistazie], Mangifer indica [Mango] or Anacardium occidentale [Cashew]; Asteraceae such as the genera Calendula, Carthamus, Centaurea, Cichorium, Cynara, Helianthus, Lactuca, Locusta, Tagetes, Valeriana e.g. the species Calendula officinalis [Marigold], Carthamus tinctorius [safflower], Centaurea cyanus [cornflower ], Cichorium intybus [blue daisy], Cynara scolymus [Artichoke], Helianthus annus [sunflower], Lactuca sativa, Lactuca crispa, Lactuca esculenta, Lactuca scariola L. ssp. sativa, Lactuca scariola L. var. integrate, Lactuca scariola L. var. integrifolia, Lactuca sativa subsp. romana, Locusta communis, Valeriana locusta [lettuce], Tagetes lucida, Tagetes erecta or Tagetes tenuifolia [Marigold]; Apiaceae such as the genera Daucus e.g. the species Daucus carota [carrot]; Betulaceae such as the genera Corylus e.g. the species Corylus avellana or Corylus colurna [hazelnut]; Boraginaceae such as the genera Borago e.g. the species Borago officinalis [borage]; Brassicaceae such as the genera Brassica, Melanosinapis, Sinapis, Arabadopsis e.g. the species Brassica napus, Brassica rapa ssp. [canola, oilseed rape, turnip rape], Sinapis arvensis Brassica juncea, Brassica juncea var. juncea, Brassica juncea var. crispifolia, Brassica juncea var. foliosa, Brassica nigra, Brassica sinapioides, Melanosinapis communis [mustard], Brassica oleracea [fodder beet] or Arabidopsis thaliana; Bromeliaceae such as the genera Anana, Bromelia e.g. the species Anana comosus, Ananas ananas or Bromelia comosa [pineapple]; Caricaceae such as the genera Carica e.g. the species Carica papaya [papaya]; Cannabaceae such as the genera Cannabis e.g. the species Cannabis sative [hemp], Convolvulaceae such as the genera Ipomea, Convolvulus e.g. the species Ipomoea batatus, Ipomoea pandurata, Convolvulus batatas, Convolvulus tiliaceus, Ipomoea fastigiata, Ipomoea tiliacea, Ipomoea triloba or Convolvulus panduratus [sweet potato, Man of the Earth, wild potato], Chenopodiaceae such as the genera Beta, i.e. the species Beta vulgaris, Beta vulgaris var. altissima, Beta vulgaris var. Vulgaris, Beta maritima, Beta vulgaris var. perennis, Beta vulgaris var. conditiva or Beta vulgaris var. esculenta [sugar beet]; Cucurbitaceae such as the genera Cucubita e.g. the species Cucurbita maxima, Cucurbita mixta, Cucurbita pepo or Cucurbita moschata [pumpkin, squash]; Elaeagnaceae such as the genera Elaeagnus e.g. the species Olea europaea [olive]; Ericaceae such as the genera Kalmia e.g. the species Kalmia latifolia, Kalmia angustifolia, Kalmia microphylla, Kalmia polifolia, Kalmia occidentalis, Cistus chamaerhodendros or Kalmia lucida [American laurel, broad-leafed laurel, calico bush, spoon wood, sheep laurel, alpine laurel, bog laurel, western bog-laurel, swamp-laurel]; Euphorbiaceae such as the genera Manihot, Janipha, Jatropha, Ricinus e.g. the species Manihot utilissima, Janipha manihot, Jatropha manihot, Manihot aipil, Manihot dulcis, Manihot manihot, Manihot melanobasis, Manihot esculenta [manihot, arrowroot, tapioca, cassaya] or Ricinus communis [castor bean, Castor Oil Bush, Castor Oil Plant, Palma Christi, Wonder Tree]; Fabaceae such as the genera Pisum, Albizia, Cathormion, Feuillea, Inga, Pithecolobium, Acacia, Mimosa, Medicajo, Glycine, Dolichos, Phaseolus, Soja e.g. the species Pisum sativum, Pisum arvense, Pisum humile [pea], Albizia berteriana, Albizia julibrissin, Albizia lebbeck, Acacia berteriana, Acacia littoralis, Albizia berteriana, Albizzia berteriana, Cathormion berteriana, Feuillea berteriana, Inga fragrans, Pithecellobium berterianum, Pithecellobium fragrans, Pithecolobium berterianum, Pseudalbizzia berteriana, Acacia julibrissin, Acacia nemu, Albizia nemu, Feuilleea julibrissin, Mimosa julibrissin, Mimosa speciosa, Sericanrda julibrissin, Acacia lebbeck, Acacia macrophylla, Albizia lebbek, Feuilleea lebbeck, Mimosa lebbeck, Mimosa speciosa [bastard logwood, silk tree, East Indian Walnut], Medicago sativa, Medicago falcata, Medicago varia [alfalfa] Glycine max Dolichos soja, Glycine gracilis, Glycine hispida, Phaseolus max, Soja hispida or Soja max [soybean ]; Geraniaceae such as the genera Pelargonium, Cocos, Oleum e.g. the species Cocos nucifera, Pelargonium grossularioides or Oleum cocois [coconut]; Gramineae such as the genera Saccharum e.g. the species Saccharum officinarum; Juglandaceae such as the genera Juglans, Wallia e.g. the species Juglans regia, Juglans ailanthifolia, Juglans sieboldiana, Juglans cinerea, Wallia cinerea, Juglans bixbyi, Juglans californica, Juglans hindsii, Juglans intermedia, Juglans jamaicensis, Juglans major, Juglans microcarpa, Juglans nigra or Wallia nigra [walnut, black walnut, common walnut, persian walnut, white walnut, butternut, black walnut]; Lauraceae such as the genera Persea, Laurus e.g. the species laurel Laurus nobilis [bay, laurel, bay laurel, sweet bay], Persea americana Persea americana, Persea gratissima or Persea persea [avocado]; Leguminosae such as the genera Arachis e.g. the species Arachis hypogaea [peanut]; Linaceae such as the genera Linum, Adenolinum e.g. the species Linum usitatissimum, Linum humile, Linum austriacum, Linum bienne, Linum angustifolium, Linum catharticum, Linum flavum, Linum grandiflorum, Adeno-linum grandiflorum, Linum lewisii, Linum narbonense, Linum perenne, Linum perenne var. lewisii, Linum pratense or Linum trigynum [flax, linseed]; Lythrarieae such as the genera Punica e.g. the species Punica granatum [pomegranate]; Malvaceae such as the genera Gossypium e.g. the species Gossypium hirsutum, Gossypium arboreum, Gossypium barbadense, Gossypium herbaceum or Gossypium thurberi [cotton]; Musaceae such as the genera Musa e.g. the species Musa nana, Musa acuminata, Musa paradisiaca, Musa spp. [banana]; Onagraceae such as the genera Camissonia, Oenothera e.g. the species Oenothera biennis or Camissonia brevipes [primrose, evening primrose]; Palmae such as the genera Elacis e.g. the species Elaeis guineensis [oil plam]; Papaveraceae such as the genera Papaver e.g. the species Papaver orientale, Papaver rhoeas, Papaver dubium [poppy, oriental poppy, corn poppy, field poppy, shirley poppies, field poppy, long-headed poppy, long-pod poppy]; Pedaliaceae such as the genera Sesamum e.g. the species Sesamum indicum [sesame]; Piperaceae such as the genera Piper, Artanthe, Peperomia, Steffensia e.g. the species Piper aduncum, Piper amalago, Piper angustifolium, Piper auritum, Piper betel, Piper cubeba, Piper longum, Piper nigrum, Piper retrofractum, Artanthe adunca, Artanthe elongata, Peperomia elongata, Piper elongatum, Steffensia elongata. [Cayenne pepper, wild pepper]; Poaceae such as the genera Hordeum, Secale, Avena, Sorghum, Andropogon, Holcus, Panicum, Oryza, Zea, Triticum e.g. the species Hordeum vulgare, Hordeum jubatum, Hordeum murinum, Hordeum secalinum, Hordeum distichon Hordeum aegiceras, Hordeum hexastichon, Hordeum hexastichum, Hordeum irregulare, Hordeum sativum, Hordeum secalinum [barley, pearl barley, foxtail barley, wall barley, meadow barley ], Secale cereale [rye], Avena sativa, Avena fatua, Avena byzantina, Avena fatua var. sativa, Avena hybrida [oat], Sorghum bicolor, Sorghum halepense, Sorghum saccharatum, Sorghum vulgare, Andropogon drummondii, Holcus bicolor, Holcus sorghum, Sorghum aethiopicum, Sorghum arundinaceum, Sorghum caffrorum, Sorghum cernuum, Sorghum dochna, Sorghum drummondii, Sorghum durra, Sorghum guineense, Sorghum lanceolatum, Sorghum nervosum, Sorghum saccharatum, Sorghum subglabrescens, Sorghum verticilliflorum, Sorghum vulgare, Holcus halepensis, Sorghum miliaceum millet, Panicum militaceum [Sorghum, millet], Oryza sativa, Oryza latifolia [rice], Zea mays [corn, maize] Triticum aestivum, Triticum durum, Triticum turgidum, Triticum hybernum, Triticum macha, Triticum sativum or Triticum vulgare [wheat, bread wheat, common wheat], Proteaceae such as the genera Macadamia e.g. the species Macadamia intergrifolia [macadamia]; Rubiaceae such as the genera Coffea e.g. the species Cofea spp., Coffea arabica, Coffea canephora or Coffea liberica [coffee]; Scrophulariaceae such as the genera Verbascum e.g. the species Verbascum blattaria, Verbascum chaixii, Verbascum densiflorum, Verbascum lagurus, Verbascum longifolium, Verbascum lychnitis, Verbascum nigrum, Verbascum olympicum, Verbascum phlomoides, Verbascum phoenicum, Verbascum pulverulentum or Verbascum thapsus [mullein, white moth mullein, nettle-leaved mullein, dense-flowered mullein, silver mullein, long-leaved mullein, white mullein, dark mullein, greek mullein, orange mullein, purple mullein, hoary mullein, great mullein]; Solanaceae such as the genera Capsicum, Nicotiana, Solanum, Lycopersicon e.g. the species Capsicum annuum, Capsicum annuum var. glabriusculum, Capsicum frutescens [pepper], Capsicum annuum [paprika], Nicotiana tabacum, Nicotiana alata, Nicotiana attenuata, Nicotiana glauca, Nicotiana langsdorffii, Nicotiana obtusifolia, Nicotiana quadrivalvis, Nicotiana repanda, Nicotiana rustica, Nicotiana sylvestris [tobacco], Solanum tuberosum [potato], Solanum melongena [egg-plant] (Lycopersicon esculentum, Lycopersicon lycopersicum, Lycopersicon pyriforme, Solanum integrifolium or Solanum lycopersicum [tomato]; Sterculiaceae such as the genera Theobroma e.g. the species Theobroma cacao [cacao]; Theaceae such as the genera Camellia e.g. the species Camellia sinensis) [tea].

[0670] The introduction of the nucleic acids according to the invention, the expression cassette or the vector into organisms, plants for example, can in principle be done by all of the methods known to those skilled in the art. The introduction of the nucleic acid sequences gives rise to recombinant or transgenic organisms.

[0671] Unless otherwise specified, the terms “polynucleotides”, “nucleic acid” and “nucleic acid molecule” as used herein are interchangeably. Unless otherwise specified, the terms “peptide”, “polypeptide” and “protein” are interchangeably in the present context. The term “sequence” may relate to polynucleotides, nucleic acids, nucleic acid molecules, peptides, polypeptides and proteins, depending on the context in which the term “sequence” is used. The terms “gene(s)”, “polynucleotide”, “nucleic acid sequence”, “nucleotide sequence”, or “nucleic acid molecule(s)” as used herein refers to a polymeric form of nucleotides of any length, either ribonucleotides or deoxyribonucleotides. The terms refer only to the primary structure of the molecule.

[0672] Thus, the terms “gene(s)”, “polynucleotide”, “nucleic acid sequence”, “nucleotide sequence”, or “nucleic acid molecule(s)” as used herein include double- and single-stranded DNA and RNA. They also include known types of modifications, for example, methylation, “caps”, substitutions of one or more of the naturally occurring nucleotides with an analog. Preferably, the DNA or RNA sequence of the invention comprises a coding sequence encoding the herein defined polypeptide.

[0673] The genes of the invention, coding for an activity selected from the group consisting of 17.6 kDa class I heat shock protein, 26.5 kDa class I small heat shock protein, 26S protease subunit, 2-Cys peroxiredoxin, 3-dehydroquinate synthase, 5-keto-D-gluconate-5-reductase, asparagine synthetase A, aspartate 1-decarboxylase precursor, ATP-dependent RNA helicase, B0567-protein, B1088-protein, B1289-protein, 62940-protein, calnexin homolog, CDS5399-protein, chromatin structure-remodeling complex protein, D-amino acid dehydrogenase, D-arabinono-1,4-lactone oxidase, Delta 1-pyrroline-5-carboxylate reductase, glycine cleavage complex lipoylprotein, ketodeoxygluconokinase, lipoyl synthase, low-molecular-weight heat-shock protein, Microsomal cytochrome b reductase, mitochondrial ribosomal protein, mitotic check point protein, monodehydroascorbate reductase, paraquat-inducible protein B, phosphatase, Phosphoglucosamine mutase, protein disaggregation chaperone, protein kinase, pyruvate decarboxylase, recA family protein, rhodanese-related sulfurtransferase, ribonuclease P protein component, ribosome modulation factor, sensory histidine kinase, serine hydroxymethyltransferase, SLL1280-protein, SLL1797-protein, small membrane lipoprotein, Small nucleolar ribonucleoprotein complex subunit, Sulfatase, transcription initiation factor subunit, tretraspanin, tRNA ligase, xyloglucan galactosyltransferase, YKL130C-protein, YLR443W-protein, YML096W-protein, and zinc finger family protein-activity are also called “YRP gene”.

[0674] A “coding sequence” is a nucleotide sequence, which is transcribed into mRNA and/or translated into a polypeptide when placed under the control of appropriate regulatory sequences. The boundaries of the coding sequence are determined by a translation start codon at the 5′-terminus and a translation stop codon at the 3′-terminus. The triplets taa, tga and tag represent the (usual) stop codons which are interchangeable. A coding sequence can include, but is not limited to mRNA, cDNA, recombinant nucleotide sequences or genomic DNA, while introns may be present as well under certain circumstances.

[0675] The transfer of foreign genes into the genome of a plant is called transformation. In doing this the methods described for the transformation and regeneration of plants from plant tissues or plant cells are utilized for transient or stable transformation. Suitable methods are protoplast transformation by poly(ethylene glycol)-induced DNA uptake, the “biolistic” method using the gene cannon—referred to as the particle bombardment method, electroporation, the incubation of dry embryos in DNA solution, microinjection and gene transfer mediated by Agrobacterium. Said methods are described by way of example in Jenes B. et al., Techniques for Gene Transfer, in: Transgenic Plants, Vol. 1, Engineering and Utilization, eds. Kung S. D and Wu R., Academic Press (1993) 128-143 and in Potrykus, Annu. Rev. Plant Physiol. Plant Molec. Biol. 42, 205 (1991). The nucleic acids or the construct to be expressed is preferably cloned into a vector which is suitable for transforming Agrobacterium tumefaciens, for example pBin19 (Bevan et al., Nucl. Acids Res. 12, 8711 (1984)). Agrobacteria transformed by such a vector can then be used in known manner for the transformation of plants, in particular of crop plants such as by way of example tobacco plants, for example by bathing bruised leaves or chopped leaves in an agrobacterial solution and then culturing them in suitable media. The transformation of plants by means of Agrobacterium tumefaciens is described, for example, by Hofgen and Willmitzer in Nucl. Acid Res. 16, 9877 (1988) or is known inter alia from White F. F., Vectors for Gene Transfer in Higher Plants; in Transgenic Plants, Vol. 1, Engineering and Utilization, eds. Kung S. D. and Wu R., Academic Press, 1993, pp. 15-38.

[0676] Agrobacteria transformed by an expression vector according to the invention may likewise be used in known manner for the transformation of plants such as test plants like Arabidopsis or crop plants such as cereal crops, corn, oats, rye, barley, wheat, soybean, rice, cotton, sugar beet, canola, sunflower, flax, hemp, potatoes, tobacco, tomatoes, carrots, paprika, oilseed rape, tapioca, cassaya, arrowroot, tagetes, alfalfa, lettuce and the various tree, nut and vine species, in particular oil-containing crop plants such as soybean, peanut, castor oil plant, sunflower, corn, cotton, flax, oilseed rape, coconut, oil palm, safflower (Carthamus tinctorius) or cocoa bean, or in particular corn, wheat, soybean, rice, cotton and canola, e.g. by bathing bruised leaves or chopped leaves in an agrobacterial solution and then culturing them in suitable media.

[0677] The genetically modified plant cells may be regenerated by all of the methods known to those skilled in the art. Appropriate methods can be found in the publications referred to above by Kung S. D. and Wu R., Potrykus or Hofgen and Willmitzer.

Accordingly, a further aspect of the invention relates to transgenic organisms transformed by at least one nucleic acid sequence, expression cassette or vector according to the invention as well as cells, cell cultures, tissue, parts—such as, for example, leaves, roots, etc. in the case of plant organisms—or reproductive material derived from such or ganisms. The terms “host organism”, “host cell”, “recombinant (host) organism” and “trans-genic (host) cell” are used here interchangeably. Of course these terms relate not only to the particular host organism or the particular target cell but also to the descendants or potential descendants of these organisms or cells. Since, due to mutation or environmental effects certain modifications may arise in successive generations, these descendants need not necessarily be identical with the parental cell but nevertheless are still encompassed by the term as used here.

[0678] For the purposes of the invention “transgenic” or “recombinant” means with regard for example to a nucleic acid sequence, an expression cassette (=gene construct, nucleic acid construct) or a vector containing the nucleic acid sequence according to the invention or an organism transformed by the nucleic acid sequences, expression cassette or vector according to the invention all those constructions produced by genetic engineering methods in which either
[0679] (a) the nucleic acid sequence depicted in table I, application no. 1, column 5 or 7 or its derivatives or parts thereof; or
[0680] (b) a genetic control sequence functionally linked to the nucleic acid sequence described under (a), for example a 3′- and/or 5′-genetic control sequence such as a promoter or terminator, or
[0681] (c) (a) and (b);

[0682] are not found in their natural, genetic environment or have been modified by genetic engineering methods, wherein the modification may by way of example be a substitution, addition, deletion, inversion or insertion of one or more nucleotide residues. Natural genetic environment means the natural genomic or chromosomal locus in the organism of origin or inside the host organism or presence in a genomic library. In the case of a genomic library the natural genetic environment of the nucleic acid sequence is preferably retained at least in part. The environment borders the nucleic acid sequence at least on one side and has a sequence length of at least 50 bp, preferably at least 500 bp, particularly preferably at least 1,000 bp, most particularly preferably at least 5,000 bp. A naturally occurring expression cassette—for example the naturally occurring combination of the natural promoter of the nucleic acid sequence according to the invention with the corresponding gene—turns into a transgenic expression cassette when the latter is modified by unnatural, synthetic (“artificial”) methods such as by way of example a mutagenation. Appropriate methods are described by way of example in U.S. Pat. No. 5,565,350 or WO 00/15815.

[0683] Suitable organisms or host organisms for the nucleic acid, expression cassette or vector according to the invention are advantageously in principle all organisms, which are suitable for the expression of recombinant genes as described above. Further examples which may be mentioned are plants such as Arabidopsis, Asteraceae such as Calendula or crop plants such as soybean, peanut, castor oil plant, sunflower, flax, corn, cotton, flax, oilseed rape, coconut, oil palm, safflower (Carthamus tinctorius) or cocoa bean.

[0684] In one embodiment of the invention host plants for the nucleic acid, expression cassette or vector according to the invention are selected from the group comprising corn, soy, oil seed rape (including canola and winter oil seed rape), cotton, wheat and rice.

[0685] A further object of the invention relates to the use of a nucleic acid construct, e.g. an expression cassette, containing one or more DNA sequences encoding one or more polypeptides shown in table II or comprising one or more nucleic acid molecules as depicted in table I or encoding or DNA sequences hybridizing therewith for the transformation of plant cells, tissues or parts of plants.

[0686] In doing so, depending on the choice of promoter, the nucleic acid molecules or sequences shown in table I or II can be expressed specifically in the leaves, in the seeds, the nodules, in roots, in the stem or other parts of the plant. Those transgenic plants over-producing sequences, e.g. as depicted in table I, the reproductive material thereof, together with the plant cells, tissues or parts thereof are a further object of the present invention.

[0687] The expression cassette or the nucleic acid sequences or construct according to the invention containing nucleic acid molecules or sequences according to table I can, moreover, also be employed for the transformation of the organisms identified by way of example above such as bacteria, yeasts, filamentous fungi and plants.

[0688] Within the framework of the present invention, increased yield, e.g. an increased yield-related trait, for example enhanced tolerance to abiotic environmental stress, for example an increased drought tolerance and/or low temperature tolerance and/or an increased nutrient use efficiency, intrinsic yield and/or another mentioned yield-related trait relates to, for example, the artificially acquired trait of increased yield, e.g. an increased yield-related trait, for example enhanced tolerance to abiotic environmental stress, for example an increased drought tolerance and/or low temperature tolerance and/or an increased nutrient use efficiency, intrinsic yield and/or another mentioned yield-related trait, by comparison with the non-genetically modified initial plants e.g. the trait acquired by genetic modification of the target organism, and due to functional over-expression of one or more polypeptide (sequences) of table II, e.g. encoded by the corresponding nucleic acid molecules as depicted in table I, column 5 or 7, and/or homologs, in the organisms according to the invention, advantageously in the transgenic plant according to the invention or produced according to the method of the invention, at least for the duration of at least one plant generation.

[0689] A constitutive expression of the polypeptide sequences of table II, encoded by the corresponding nucleic acid molecule as depicted in table I, column 5 or 7 and/or homologs is, moreover, advantageous. On the other hand, however, an inducible expression may also appear desirable. Expression of the polypeptide sequences of the invention can be either direct to the cytoplasm or the organelles, preferably the plastids of the host cells, preferably the plant cells.

[0690] The efficiency of the expression of the sequences of the of table II, encoded by the corresponding nucleic acid molecule as depicted in table I, column 5 or 7 and/or homologs can be determined, for example, in vitro by shoot meristem propagation. In addition, an expression of the sequences of table II, encoded by the corresponding nucleic acid molecule as depicted in table I, column 5 or 7 and/or homologs modified in nature and level and its effect on yield, e.g. on an increased yield-related trait, for example enhanced tolerance to abiotic environmental stress, for example an increased drought tolerance and/or low temperature tolerance and/or an increased nutrient use efficiency, but also on the metabolic pathways performance can be tested on test plants in greenhouse trials.

[0691] An additional object of the invention comprises transgenic organisms such as transgenic plants transformed by an expression cassette containing sequences of as depicted in table I, column 5 or 7 according to the invention or DNA sequences hybridizing therewith, as well as transgenic cells, tissue, parts and reproduction material of such plants. Particular preference is given in this case to transgenic crop plants such as by way of example barley, wheat, rye, oats, corn, soybean, rice, cotton, sugar beet, oilseed rape and canola, sunflower, flax, hemp, thistle, potatoes, tobacco, tomatoes, tapioca, cassaya, arrowroot, alfalfa, lettuce and the various tree, nut and vine species.

[0692] In one embodiment of the invention transgenic plants transformed by an expression cassette containing or comprising nucleic acid molecules or sequences as depicted in table I, column 5 or 7, in particular of table IIB, according to the invention or DNA sequences hybridizing therewith are selected from the group comprising corn, soy, oil seed rape (including canola and winter oil seed rape), cotton, wheat and rice.

[0693] For the purposes of the invention plants are mono- and dicotyledonous plants, mosses or algae, especially plants, for example in one embodiment monocotyledonous plants, or for example in another embodiment dicotyledonous plants. A further refinement according to the invention are transgenic plants as described above which contain a nucleic acid sequence or construct according to the invention or a expression cassette according to the invention.

[0694] However, transgenic also means that the nucleic acids according to the invention are located at their natural position in the genome of an organism, but that the sequence, e.g. the coding sequence or a regulatory sequence, for example the promoter sequence, has been modified in comparison with the natural sequence. Preferably, transgenic/recombinant is to be understood as meaning the transcription of one or more nucleic acids or molecules of the invention and being shown in table I, occurs at a non-natural position in the genome. In one embodiment, the expression of the nucleic acids or molecules is homologous. In another embodiment, the expression of the nucleic acids or molecules is heterologous. This expression can be transiently or of a sequence integrated stably into the genome.

[0695] The term “transgenic plants” used in accordance with the invention also refers to the progeny of a transgenic plant, for example the T1, T2, T3 and subsequent plant generations or the BC1, BC2, BC3 and subsequent plant generations. Thus, the transgenic plants according to the invention can be raised and selfed or crossed with other individuals in order to obtain further transgenic plants according to the invention. Transgenic plants may also be obtained by propagating transgenic plant cells vegetatively. The present invention also relates to transgenic plant material, which can be derived from a transgenic plant population according to the invention. Such material includes plant cells and certain tissues, or gans and parts of plants in all their manifestations, such as seeds, leaves, anthers, fibers, tubers, roots, root hairs, stems, embryo, calli, cotelydons, petioles, harvested material, plant tissue, reproductive tissue and cell cultures, which are derived from the actual transgenic plant and/or can be used for bringing about the transgenic plant. Any transformed plant obtained according to the invention can be used in a conventional breeding scheme or in in vitro plant propagation to produce more transformed plants with the same characteristics and/or can be used to introduce the same characteristic in other varieties of the same or related species. Such plants are also part of the invention. Seeds obtained from the trans-formed plants genetically also contain the same characteristic and are part of the invention. As mentioned before, the present invention is in principle applicable to any plant and crop that can be transformed with any of the transformation method known to those skilled in the art.

[0696] Advantageous inducible plant promoters are by way of example the PRP1 promoter (Ward et al., Plant. Mol. Biol. 22361 (1993)), a promoter inducible by benzenesulfonamide (EP 388 186), a promoter inducible by tetracycline (Gatz et al., Plant J. 2, 397 (1992)), a promoter inducible by salicylic acid (WO 95/19443), a promoter inducible by abscisic acid (EP 335 528) and a promoter inducible by ethanol or cyclohexanone (WO 93/21334). Other examples of plant promoters which can advantageously be used are the promoter of cytoplasmic FBPase from potato, the ST-LSI promoter from potato (Stockhaus et al., EMBO J. 8, 2445 (1989)), the promoter of phosphoribosyl pyrophosphate amidotrans-ferase from Glycine max (see also gene bank accession number U87999) or a nodienespecific promoter as described in EP 249 676.

[0697] Particular advantageous are those promoters which ensure expression upon onset of abiotic stress conditions. Particular advantageous are those promoters which ensure expression upon onset of low temperature conditions, e.g. at the onset of chilling and/or freezing temperatures as defined hereinabove, e.g. for the expression of nucleic acid molecules as shown in table VIIIb. Advantageous are those promoters which ensure expression upon conditions of limited nutrient availability, e.g. the onset of limited nitrogen sources in case the nitrogen of the soil or nutrient is exhausted, e.g. for the expression of the nucleic acid molecules or their gene products as shown in table VIIIa. Particular advantageous are those promoters which ensure expression upon onset of water deficiency, as defined hereinabove, e.g. for the expression of the nucleic acid molecules or their gene products as shown in table VIIIc. Particular advantageous are those promoters which ensure expression upon onset of standard growth conditions, e.g. under condition without stress and deficient nutrient provision, e.g. for the expression of the nucleic acid molecules or their gene products as shown in table VIIId.

[0698] Such promoters are known to the person skilled in the art or can be isolated from genes which are induced under the conditions mentioned above. In one embodiment, seed-specific promoters may be used for monocotylodonous or dicotylodonous plants.

[0699] In principle all natural promoters with their regulation sequences can be used like those named above for the expression cassette according to the invention and the method according to the invention. Over and above this, synthetic promoters may also advantageously be used. In the preparation of an expression cassette various DNA fragments can be manipulated in order to obtain a nucleotide sequence, which usefully reads in the correct direction and is equipped with a correct reading frame. To connect the DNA fragments (=nucleic acids according to the invention) to one another adaptors or linkers may be attached to the fragments. The promoter and the terminator regions can usefully be provided in the transcription direction with a linker or polylinker containing one or more restriction points for the insertion of this sequence. Generally, the linker has 1 to 10, mostly 1 to 8, preferably 2 to 6, restriction points. In general the size of the linker inside the regulatory region is less than 100 bp, frequently less than 60 bp, but at least 5 bp. The promoter may be both native or homologous as well as foreign or heterologous to the host organism, for example to the host plant. In the 5′-3′ transcription direction the expression cassette contains the promoter, a DNA sequence which shown in table I and a region for transcription termination. Different termination regions can be exchanged for one another in any desired fashion.

[0700] As also used herein, the terms “nucleic acid” and “nucleic acid molecule” are intended to include DNA molecules (e.g. cDNA or genomic DNA) and RNA molecules (e.g. mRNA) and analogs of the DNA or RNA generated using nucleotide analogs. This term also encompasses untranslated sequence located at both the 3′ and 5′ ends of the coding region of the gene—at least about 1000 nucleotides of sequence upstream from the 5′ end of the coding region and at least about 200 nucleotides of sequence downstream from the 3′ end of the coding region of the gene. The nucleic acid molecule can be single-stranded or double-stranded, but preferably is double-stranded DNA.

[0701] An “isolated” nucleic acid molecule is one that is substantially separated from other nucleic acid molecules, which are present in the natural source of the nucleic acid. That means other nucleic acid molecules are present in an amount less than 5% based on weight of the amount of the desired nucleic acid, preferably less than 2% by weight, more preferably less than 1% by weight, most preferably less than 0.5% by weight. Preferably, an “isolated” nucleic acid is free of some of the sequences that naturally flank the nucleic acid (i.e., sequences located at the 5′ and 3′ ends of the nucleic acid) in the genomic DNA of the organism from which the nucleic acid is derived. For example, in various embodiments, the isolated yield increasing, for example, low temperature resistance and/or tolerance related protein (YRP) encoding nucleic acid molecule can contain less than about 5 kb, 4 kb, 3 kb, 2 kb, 1 kb, 0.5 kb or 0.1 kb of nucleotide sequences which naturally flank the nucleic acid molecule in genomic DNA of the cell from which the nucleic acid is derived. Moreover, an “isolated” nucleic acid molecule, such as a cDNA molecule, can be free from some of the other cellular material with which it is naturally associated, or culture medium when produced by recombinant techniques, or chemical precursors or other chemicals when chemically synthesized.

[0702] A nucleic acid molecule of the present invention, e.g., a nucleic acid molecule encoding an YRP or a portion thereof which confers increased yield, e.g. an increased yield-related trait, e.g. an enhanced tolerance to abiotic environmental stress and/or increased nutrient use efficiency and/or enhanced cycling drought tolerance in plants, can be isolated using standard molecular biological techniques and the sequence information provided herein. For example, an A. thaliana YRP encoding cDNA can be isolated from a A. thaliana c-DNA library or a Synechocystis sp., Brassica napus, Glycine max, Zea mays, Populus trichocarpa or Oryza sativa YRP encoding cDNA can be isolated from a Synechocystis sp., Brassica napus, Glycine max, Zea mays, Populus trichocarpa or Oryza sativa cDNA library respectively using all or portion of one of the sequences shown in table I. Moreover, a nucleic acid molecule encompassing all or a portion of one of the sequences of table I can be isolated by the polymerase chain reaction using oligonucleotide primers designed based upon this sequence. For example, mRNA can be isolated from plant cells (e.g., by the guanidinium-thiocyanate extraction procedure of Chirgwin et al., Biochemistry 18, 5294 (1979)) and cDNA can be prepared using reverse transcriptase (e.g., Moloney MLV reverse transcriptase, available from Gibco/BRL, Bethesda, Md.; or AMV reverse transcriptase, available from Seikagaku America, Inc., St. Petersburg, Fla.). Synthetic oligonucleotide primers for polymerase chain reaction amplification can be designed based upon one of the nucleotide sequences shown in table I. A nucleic acid molecule of the invention can be amplified using cDNA or, alternatively, genomic DNA, as a template and appropriate oligonucleotide primers according to standard PCR amplification techniques. The nucleic acid molecule so amplified can be cloned into an appropriate vector and characterized by DNA sequence analysis. Furthermore, oligonucleotides corresponding to a YRP encoding nucleotide sequence can be prepared by standard synthetic techniques, e.g., using an automated DNA synthesizer.

[0703] In a embodiment, an isolated nucleic acid molecule of the invention comprises one of the nucleotide sequences or molecules as shown in table I encoding the YRP (i.e., the “coding region”), as well as a 5′ untranslated sequence and 3′ untranslated sequence.

[0704] Moreover, the nucleic acid molecule of the invention can comprise only a portion of the coding region of one of the sequences or molecules of a nucleic acid of table I, for example, a fragment which can be used as a probe or primer or a fragment encoding a biologically active portion of a YRP.

[0705] Portions of proteins encoded by the YRP encoding nucleic acid molecules of the invention are preferably biologically active portions described herein. As used herein, the term “biologically active portion of” a YRP is intended to include a portion, e.g. a domain/motif, of increased yield, e.g. increased or enhanced an yield related trait, e.g. increased the low temperature resistance and/or tolerance related protein that participates in an enhanced nutrient use efficiency e.g. nitrogen use efficency efficiency, and/or increased intrinsic yield in a plant. To determine whether a YRP, or a biologically active portion thereof, results in an increased yield, e.g. increased or enhanced an yield related trait, e.g. increased the low temperature resistance and/or tolerance related protein that participates in an enhanced nutrient use efficiency, e.g. nitrogen use efficency efficiency and/or increased intrinsic yield in a plant, an analysis of a plant comprising the YRP may be performed. Such analysis methods are well known to those skilled in the art, as detailed in the Examples. More specifically, nucleic acid fragments encoding biologically active portions of a YRP can be prepared by isolating a portion of one of the sequences of the nucleic acid of table I expressing the encoded portion of the YRP or peptide (e.g., by recombinant expression in vitro) and assessing the activity of the encoded portion of the YRP or peptide.

[0706] Biologically active portions of a YRP are encompassed by the present invention and include peptides comprising amino acid sequences derived from the amino acid sequence of a YRP encoding gene, or the amino acid sequence of a protein homologous to a YRP, which include fewer amino acids than a full length YRP or the full length protein which is homologous to a YRP, and exhibits at least some enzymatic or biological activity of a YRP. Typically, biologically active portions (e.g., peptides which are, for example, 5, 10, 15, 20, 30, 35, 36, 37, 38, 39, 40, 50, 100 or more amino acids in length) comprise a domain or motif with at least one activity of a YRP. Moreover, other biologically active portions in which other regions of the protein are deleted, can be prepared by recombinant techniques and evaluated for one or more of the activities described herein. Preferably, the biologically active portions of a YRP include one or more selected domains/motifs or portions thereof having biological activity.

[0707] The term “biological active portion” or “biological activity” means a polypeptide as depicted in table II, column 3 or a portion of said polypeptide which still has at least 10% or 20%, preferably 30%, 40%, 50% or 60%, especially preferably 70%, 75%, 80%, 90% or 95% of the enzymatic or biological activity of the natural or starting enzyme or protein.

[0708] In the process according to the invention nucleic acid sequences or molecules can be used, which, if appropriate, contain synthetic, non-natural or modified nucleotide bases, which can be incorporated into DNA or RNA. Said synthetic, non-natural or modified bases can for example increase the stability of the nucleic acid molecule outside or inside a cell. The nucleic acid molecules of the invention can contain the same modifications as aforementioned.

[0709] As used in the present context the term “nucleic acid molecule” may also encompass the untranslated sequence or molecule located at the 3′ and at the 5′ end of the coding gene region, for example at least 500, preferably 200, especially preferably 100, nucleotides of the sequence upstream of the 5′ end of the coding region and at least 100, preferably 50, especially preferably 20, nucleotides of the sequence downstream of the 3′ end of the coding gene region. It is often advantageous only to choose the coding region for cloning and expression purposes.

[0710] Preferably, the nucleic acid molecule used in the process according to the invention or the nucleic acid molecule of the invention is an isolated nucleic acid molecule. In one embodiment, the nucleic acid molecule of the invention is the nucleic acid molecule used in the process of the invention.

[0711] An “isolated” polynucleotide or nucleic acid molecule is separated from other polynucleotides or nucleic acid molecules, which are present in the natural source of the nucleic acid molecule. An isolated nucleic acid molecule may be a chromosomal fragment of several kb, or preferably, a molecule only comprising the coding region of the gene. Accordingly, an isolated nucleic acid molecule of the invention may comprise chromosomal regions, which are adjacent 5′ and 3′ or further adjacent chromosomal regions, but preferably comprises no such sequences which naturally flank the nucleic acid molecule sequence in the genomic or chromosomal context in the organism from which the nucleic acid molecule originates (for example sequences which are adjacent to the regions encoding the 5′- and 3′-UTRs of the nucleic acid molecule). In various embodiments, the isolated nucleic acid molecule used in the process according to the invention may, for example comprise less than approximately 5 kb, 4 kb, 3 kb, 2 kb, 1 kb, 0.5 kb or 0.1 kb nucleotide sequences which naturally flank the nucleic acid molecule in the genomic DNA of the cell from which the nucleic acid molecule originates.

[0712] The nucleic acid molecules used in the process, for example the polynucleotide of the invention or of a part thereof can be isolated using molecular-biological standard techniques and the sequence information provided herein. Also, for example a homologous sequence or homologous, conserved sequence regions at the DNA or amino acid level can be identified with the aid of comparison algorithms. The former can be used as hybridization probes under standard hybridization techniques (for example those described in Sambrook et al., Molecular Cloning: A Laboratory Manual. 2nd Ed., Cold Spring Harbor Laboratory, Cold Spring Harbor Laboratory Press, Cold Spring Harbor, N.Y., 1989) for isolating further nucleic acid sequences useful in this process.

[0713] A nucleic acid molecule encompassing a complete sequence of the nucleic acid molecules used in the process, for example the polynucleotide of the invention, or a part thereof may additionally be isolated by polymerase chain reaction, oligonucleotide primers based on this sequence or on parts thereof being used. For example, a nucleic acid molecule comprising the complete sequence or part thereof can be isolated by polymerase chain reaction using oligonucleotide primers which have been generated on the basis of this very sequence. For example, mRNA can be isolated from cells (for example by means of the guanidinium thiocyanate extraction method of Chirgwin et al., Biochemistry 18, 5294 (1979)) and cDNA can be generated by means of reverse transcriptase (for example Moloney, MLV reverse transcriptase, available from Gibco/BRL, Bethesda, Md., or AMV reverse transcriptase, obtainable from Seikagaku America, Inc., St. Petersburg, Fla.).

[0714] Synthetic oligonucleotide primers for the amplification, e.g. as shown in table III, column 7, by means of polymerase chain reaction can be generated on the basis of a sequence shown herein, for example the sequence shown in table I, columns 5 and 7 or the sequences derived from table II, columns 5 and 7.

[0715] Moreover, it is possible to identify a conserved protein by carrying out protein sequence alignments with the polypeptide encoded by the nucleic acid molecules of the present invention, in particular with the sequences encoded by the nucleic acid molecule shown in column 5 or 7 of table I, from which conserved regions, and in turn, degenerate primers can be derived. Conserved regions are those, which show a very little variation in the amino acid in one particular position of several homologs from different origin. The consensus sequence and polypeptide motifs shown in column 7 of table IV, are derived from said alignments. Moreover, it is possible to identify conserved regions from various organisms by carrying out protein sequence alignments with the polypeptide encoded by the nucleic acid of the present invention, in particular with the sequences encoded by the polypeptide molecule shown in column 5 or 7 of table II, from which conserved regions, and in turn, degenerate primers can be derived.

[0716] In one advantageous embodiment, in the method of the present invention the activity of a polypeptide comprising or consisting of a consensus sequence or a polypeptide motif shown in table IV, column 7 is increased and in one another embodiment, the present invention relates to a polypeptide comprising or consisting of a consensus sequence or a polypeptide motif shown in table IV, column 7 whereby less than 20, preferably less than 15 or 10, preferably less than 9, 8, 7, or 6, more preferred less than 5 or 4, even more preferred less then 3, even more preferred less then 2, even more preferred 0 of the amino acids positions indicated can be replaced by any amino acid. In one embodiment not more than 15%, preferably 10%, even more preferred 5%, 4%, 3%, or 2%, most preferred 1% or 0% of the amino acid position indicated by a letter are/is replaced another amino acid. In one embodiment less than 20, preferably less than 15 or 10, preferably less than 9, 8, 7, or 6, more preferred less than 5 or 4, even more preferred less than 3, even more preferred less than 2, even more preferred 0 amino acids are inserted into a consensus sequence or protein motif.

[0717] The consensus sequence was derived from a multiple alignment of the sequences as listed in table II. The letters represent the one letter amino acid code and indicate that the amino acids are conserved in at least 80% of the aligned proteins, whereas the letter X stands for amino acids, which are not conserved in at least 80% of the aligned sequences. The consensus sequence starts with the first conserved amino acid in the alignment, and ends with the last conserved amino acid in the alignment of the investigated sequences. The number of given X indicates the distances between conserved amino acid residues, e.g. Y-x(21,23)-F means that conserved tyrosine and phenylalanine residues in the alignment are separated from each other by minimum 21 and maximum 23 amino acid residues in the alignment of all investigated sequences.

[0718] Conserved domains were identified from all sequences and are described using a subset of the standard Prosite notation, e.g. the pattern Y-x(21,23)-[FW] means that a conserved tyrosine is separated by minimum 21 and maximum 23 amino acid residues from either a phenylalanine or tryptophane. Patterns had to match at least 80% of the investigated proteins. Conserved patterns were identified with the software tool MEME version 3.5.1 or manually. MEME was developed by Timothy L. Bailey and Charles Elkan, Dept. of Computer Science and Engeneering, University of California, San Diego, USA and is described by Timothy L. Bailey and Charles Elkan (Fitting a mixture model by expectation maximization to discover motifs in biopolymers, Proceedings of the Second International Conference on Intelligent Systems for Molecular Biology, pp. 28-36, AAAI Press, Menlo Park, Calif., 1994). The source code for the stand-alone program is public available from the San Diego Supercomputer centre (http://meme.sdsc.edu). For identifying common motifs in all sequences with the software tool MEME, the following settings were used: -maxsize 500000, -nmotifs 15, -evt 0.001, -maxw 60, -distance 1e-3, -minsites number of sequences used for the analysis. Input sequences for MEME were non-aligned sequences in Fasta format. Other parameters were used in the default settings in this software version. Prosite patterns for conserved domains were generated with the software tool Pratt version 2.1 or manually. Pratt was developed by Inge Jonassen, Dept. of Informatics, University of Bergen, Norway and is described by Jonassen et al. (I. Jonassen, J. F. Collins and D. G. Higgins, Finding flexible patterns in unaligned protein sequences, Protein Science 4 (1995), pp. 1587-1595; I. Jonassen, Efficient discovery of conserved patterns using a pattern graph, Submitted to CABIOS Febr. 1997]. The source code (ANSI C) for the standalone program is public available, e.g. at established Bioinformatic centers like EBI (European Bioinformatics Institute). For generating patterns with the software tool Pratt, following settings were used: PL (max Pattern Length): 100, PN (max Nr of Pattern Symbols): 100, PX (max Nr of consecutive x's): 30, FN (max Nr of flexible spacers): 5, FL (max Flexibility): 30, FP (max Flex.Product): 10, ON (max number patterns): 50. Input sequences for Pratt were distinct regions of the protein sequences exhibiting high similarity as identified from software tool MEME. The minimum number of sequences, which have to match the generated patterns (CM, min Nr of Seqs to Match) was set to at least 80% of the provided sequences. Parameters not mentioned here were used in their default settings. The Prosite patterns of the conserved domains can be used to search for protein sequences matching this pattern. Various established Bioinformatic centres provide public internet portals for using those patterns in database searches (e.g. PIR (Protein Information Resource, located at Georgetown University Medical Center) or ExPASy (Expert Protein Analysis System)). Alternatively, stand-alone software is available, like the program Fuzzpro, which is part of the EMBOSS software package. For example, the program Fuzzpro not only allows to search for an exact pattern-protein match but also allows to set various ambiguities in the performed search.

[0719] The alignment was performed with the software ClustalW (version 1.83) and is described by Thompson et al. (Nucleic Acids Research 22, 4673 (1994)). The source code for the stand-alone program is public available from the European Molecular Biology Laboratory; Heidelberg, Germany. The analysis was performed using the default parameters of ClustalW v1.83 (gap open penalty: 10.0; gap extension penalty: 0.2; protein matrix: Gonnet; protein/DNA endgap: -1; protein/DNA gapdist: 4).

[0720] Degenerated primers can then be utilized by PCR for the amplification of fragments of novel proteins having above-mentioned activity, e.g. conferring increased yield, e.g. the increased yield-related trait, in particular, the enhanced tolerance to abiotic environmental stress, e.g. low temperature tolerance, cycling drought tolerance, water use efficiency, nutrient (e.g. nitrogen) use efficiency and/or increased intrinsic yield as compared to a corresponding, e.g. non-transformed, wild type plant cell, plant or part thereof after increasing the expression or activity or having the activity of a protein as shown in table II, column 3 or further functional homologs of the polypeptide of the invention from other or ganisms.

[0721] These fragments can then be utilized as hybridization probe for isolating the complete gene sequence. As an alternative, the missing 5′ and 3′ sequences can be isolated by means of RACE-PCR. A nucleic acid molecule according to the invention can be amplified using cDNA or, as an alternative, genomic DNA as template and suitable oligonucleotide primers, following standard PCR amplification techniques. The nucleic acid molecule amplified thus can be cloned into a suitable vector and characterized by means of DNA sequence analysis. Oligonucleotides, which correspond to one of the nucleic acid molecules used in the process can be generated by standard synthesis methods, for example using an automatic DNA synthesizer.

[0722] Nucleic acid molecules which are advantageously for the process according to the invention can be isolated based on their homology to the nucleic acid molecules disclosed herein using the sequences or part thereof as or for the generation of a hybridization probe and following standard hybridization techniques under stringent hybridization conditions. In this context, it is possible to use, for example, isolated one or more nucleic acid molecules of at least 15, 20, 25, 30, 35, 40, 50, 60 or more nucleotides, preferably of at least 15, 20 or 25 nucleotides in length which hybridize under stringent conditions with the above-described nucleic acid molecules, in particular with those which encompass a nucleotide sequence of the nucleic acid molecule used in the process of the invention or encoding a protein used in the invention or of the nucleic acid molecule of the invention. Nucleic acid molecules with 30, 50, 100, 250 or more nucleotides may also be used.

[0723] The term “homology” means that the respective nucleic acid molecules or encoded proteins are functionally and/or structurally equivalent. The nucleic acid molecules that are homologous to the nucleic acid molecules described above and that are derivatives of said nucleic acid molecules are, for example, variations of said nucleic acid molecules which represent modifications having the same biological function, in particular encoding proteins with the same or substantially the same biological function. They may be naturally occurring variations, such as sequences from other plant varieties or species, or mutations. These mutations may occur naturally or may be obtained by mutagenesis techniques. The allelic variations may be naturally occurring allelic variants as well as synthetically produced or genetically engineered variants. Structurally equivalents can, for example, be identified by testing the binding of said polypeptide to antibodies or computer based predictions. Structurally equivalent have the similar immunological characteristic, e.g. comprise similar epitopes.

[0724] By “hybridizing” it is meant that such nucleic acid molecules hybridize under conventional hybridization conditions, preferably under stringent conditions such as described by, e.g., Sambrook (Molecular Cloning; A Laboratory Manual, 2nd Edition, Cold Spring Harbor Laboratory Press, Cold Spring Harbor, N.Y. (1989)) or in Current Protocols in Molecular Biology, John Wiley & Sons, N.Y. (1989), 6.3.1-6.3.6.

[0725] According to the invention, DNA as well as RNA molecules of the nucleic acid of the invention can be used as probes. Further, as template for the identification of functional homologues Northern blot assays as well as Southern blot assays can be performed. The Northern blot assay advantageously provides further information about the expressed gene product: e.g. expression pattern, occurrence of processing steps, like splicing and capping, etc. The Southern blot assay provides additional information about the chromosomal localization and organization of the gene encoding the nucleic acid molecule of the invention.

[0726] A preferred, non-limiting example of stringent hybridization conditions are hybridizations in 6× sodium chloride/sodium citrate (=SSC) at approximately 45° C., followed by one or more wash steps in 0.2×SSC, 0.1% SDS at 50 to 65° C., for example at 50° C., 55° C. or 60° C. The skilled worker knows that these hybridization conditions differ as a function of the type of the nucleic acid and, for example when organic solvents are present, with regard to the temperature and concentration of the buffer. The temperature under “standard hybridization conditions” differs for example as a function of the type of the nucleic acid between 42° C. and 58° C., preferably between 45° C. and 50° C. in an aqueous buffer with a concentration of 0.1×, 0.5×, 1×, 2×, 3×, 4× or 5×SSC (pH 7.2). If organic solvent(s) is/are present in the abovementioned buffer, for example 50% formamide, the temperature under standard conditions is approximately 40° C., 42° C. or 45° C. The hybridization conditions for DNA:DNA hybrids are preferably for example 0.1×SSC and 20° C., 25° C., 30° C., 35° C., 40° C. or 45° C., preferably between 30° C. and 45° C. The hybridization conditions for DNA:RNA hybrids are preferably for example 0.1×SSC and 30° C., 35° C., 40° C., 45° C., 50° C. or 55° C., preferably between 45° C. and 55° C. The abovementioned hybridization temperatures are determined for example for a nucleic acid approximately 100 bp (=base pairs) in length and a G+C content of 50% in the absence of formamide. The skilled worker knows to determine the hybridization conditions required with the aid of textbooks, for example the ones mentioned above, or from the following textbooks: Sambrook et al., “Molecular Cloning”, Cold Spring Harbor Laboratory, 1989; Hames and Higgins (Ed.) 1985, “Nucleic Acids Hybridization: A Practical Approach”, IRL Press at Oxford University Press, Oxford; Brown (Ed.) 1991, “Essential Molecular Biology: A Practical Approach”, IRL Press at Oxford University Press, Oxford.

[0727] A further example of one such stringent hybridization condition is hybridization at 4×SSC at 65° C., followed by a washing in 0.1×SSC at 65° C. for one hour. Alternatively, an exemplary stringent hybridization condition is in 50% formamide, 4×SSC at 42° C. Further, the conditions during the wash step can be selected from the range of conditions delimited by low-stringency conditions (approximately 2×SSC at 50° C.) and high-stringency conditions (approximately 0.2×SSC at 50° C., preferably at 65° C.) (20×SSC:0.3 M sodium citrate, 3 M NaCl, pH 7.0). In addition, the temperature during the wash step can be raised from low-stringency conditions at room temperature, approximately 22° C., to higher-stringency conditions at approximately 65° C. Both of the parameters salt concentration and temperature can be varied simultaneously, or else one of the two parameters can be kept constant while only the other is varied. Denaturants, for example formamide or SDS, may also be employed during the hybridization. In the presence of 50% formamide, hybridization is preferably effected at 42° C. Relevant factors like 1) length of treatment, 2) salt conditions, 3) detergent conditions, 4) competitor DNAs, 5) temperature and 6) probe selection can be combined case by case so that not all possibilities can be mentioned herein.

[0728] Thus, in a preferred embodiment, Northern blots are prehybridized with Rothi-Hybri-Quick buffer (Roth, Karlsruhe) at 68° C. for 2 h. Hybridization with radioactive labelled probe is done overnight at 68° C. Subsequent washing steps are performed at 68° C. with 1×SSC. For Southern blot assays the membrane is prehybridized with Rothi-Hybri-Quick buffer (Roth, Karlsruhe) at 68° C. for 2 h. The hybridzation with radioactive labelled probe is conducted over night at 68° C. Subsequently the hybridization buffer is discarded and the filter shortly washed using 2×SSC; 0.1% SDS. After discarding the washing buffer new 2×SSC; 0.1% SDS buffer is added and incubated at 68° C. for 15 minutes. This washing step is performed twice followed by an additional washing step using 1×SSC; 0.1% SDS at 68° C. for 10 min.

[0729] Some examples of conditions for DNA hybridization (Southern blot assays) and wash step are shown herein below:

(1) Hybridization conditions can be selected, for example, from the following conditions:

### (a) 4×SSC at 65° C.,

### (b) 6×SSC at 45° C.,

[0730] (c) 6×SSC, 100 mg/ml denatured fragmented fish sperm DNA at 68° C.,
(d) 6×SSC, 0.5% SDS, 100 mg/ml denatured salmon sperm DNA at 68° C.,
(e) 6×SSC, 0.5% SDS, 100 mg/ml denatured fragmented salmon sperm DNA, 50% formamide at 42° C.,
(f) 50% formamide, 4×SSC at 42° C.,
(g) 50% (v/v) formamide, 0.1% bovine serum albumin, 0.1% Ficoll, 0.1% polyvinylpyrrolidone, 50 mM sodium phosphate buffer pH 6.5, 750 mM NaCl, 75 mM sodium citrate at 42° C.,
(h) 2× or 4×SSC at 50° C. (low-stringency condition), or
(i) 30 to 40% formamide, 2× or 4×SSC at 42° C. (low-stringency condition).
(2) Wash steps can be selected, for example, from the following conditions:
(a) 0.015 M NaCl/0.0015 M sodium citrate/0.1% SDS at 50° C.

### (b) 0.1×SSC at 65° C.

### (c) 0.1×SSC, 0.5% SDS at 68° C.

[0731] (d) 0.1×SSC, 0.5% SDS, 50% formamide at 42° C.

### (e) 0.2×SSC, 0.1% SDS at 42° C.

[0732] (f) 2×SSC at 65° C. (low-stringency condition).

[0733] Polypeptides having above-mentioned activity, i.e. conferring increased yield, e.g. an increased yield-related trait as mentioned herein, e.g. increased abiotic stress tolerance, e.g. low temperature tolerance, e.g. with increased nutrient use efficiency, and/or water use efficiency and/or increased intrinsic yield as compared to a corresponding, e.g. non-transformed, wild type plant cell, plant or part thereof, derived from other organisms, can be encoded by other DNA sequences which hybridize to the sequences shown in table I, columns 5 and 7 under relaxed hybridization conditions and which code on expression for peptides conferring the increased yield, e.g. an increased yield-related trait as mentioned herein, e.g. increased abiotic stress tolerance, e.g. low temperature tolerance or enhanced cold tolerance, e.g. with increased nutrient use efficiency, and/or water use efficiency and/or increased intrinsic yield, as compared to a corresponding, e.g. non-transformed, wild type plant cell, plant or part thereof.

[0734] Further, some applications have to be performed at low stringency hybridization conditions, without any consequences for the specificity of the hybridization. For example, a Southern blot analysis of total DNA could be probed with a nucleic acid molecule of the present invention and washed at low stringency (55° C. in 2×SSPE, 0.1% SDS). The hybridization analysis could reveal a simple pattern of only genes encoding polypeptides of the present invention or used in the process of the invention, e.g. having the herein-mentioned activity of enhancing the increased yield, e.g. an increased yield-related trait as mentioned herein, e.g. increased abiotic stress tolerance, e.g. increased low temperature tolerance or enhanced cold tolerance, e.g. with increased nutrient use efficiency, and/or water use efficiency and/or increased intrinsic yield, as compared to a corresponding, e.g. non-transformed, wild type plant cell, plant or part thereof. A further example of such low-stringent hybridization conditions is 4×SSC at 50° C. or hybridization with 30 to 40% form amide at 42° C. Such molecules comprise those which are fragments, analogues or derivatives of the polypeptide of the invention or used in the process of the invention and differ, for example, by way of amino acid and/or nucleotide deletion(s), insertion(s), substitution (s), addition(s) and/or recombination (s) or any other modification(s) known in the art either alone or in combination from the above-described amino acid sequences or their underlying nucleotide sequence(s). However, it is preferred to use high stringency hybridization conditions.

[0735] Hybridization should advantageously be carried out with fragments of at least 5, 10, 15, 20, 25, 30, 35 or 40 bp, advantageously at least 50, 60, 70 or 80 bp, preferably at least 90, 100 or 110 bp. Most preferably are fragments of at least 15, 20, 25 or 30 bp. Preferably are also hybridizations with at least 100 bp or 200, very especially preferably at least 400 bp in length. In an especially preferred embodiment, the hybridization should be carried out with the entire nucleic acid sequence with conditions described above.

[0736] The terms “fragment”, “fragment of a sequence” or “part of a sequence” mean a truncated sequence of the original sequence referred to. The truncated sequence (nucleic acid or protein sequence) can vary widely in length; the minimum size being a sequence of sufficient size to provide a sequence with at least a comparable function and/or activity of the original sequence or molecule referred to or hybridizing with the nucleic acid molecule of the invention or used in the process of the invention under stringent conditions, while the maximum size is not critical. In some applications, the maximum size usually is not substantially greater than that required to provide the desired activity and/or function(s) of the original sequence.

[0737] Typically, the truncated amino acid sequence or molecule will range from about 5 to about 310 amino acids in length. More typically, however, the sequence will be a maximum of about 250 amino acids in length, preferably a maximum of about 200 or 100 amino acids. It is usually desirable to select sequences of at least about 10, 12 or 15 amino acids, up to a maximum of about 20 or 25 amino acids.

[0738] The term “epitope” relates to specific immunoreactive sites within an antigen, also known as antigenic determinates. These epitopes can be a linear array of monomers in a polymeric composition—such as amino acids in a protein—or consist of or comprise a more complex secondary or tertiary structure. Those of skill will recognize that immunogens (i.e., substances capable of eliciting an immune response) are antigens; however, some antigen, such as haptens, are not immunogens but may be made immunogenic by coupling to a carrier molecule. The term “antigen” includes references to a substance to which an antibody can be generated and/or to which the antibody is specifically immunoreactive.

[0739] In one embodiment the present invention relates to a epitope of the polypeptide of the present invention or used in the process of the present invention and confers an increased yield, e.g. an increased yield-related trait as mentioned herein, e.g. increased abiotic stress tolerance, e.g. low temperature tolerance or enhanced cold tolerance, e.g. with increased nutrient use efficiency, and/or water use efficiency and/or increased intrinsic yield etc., as compared to a corresponding, e.g. non-transformed, wild type plant cell, plant or part thereof.

[0740] The term “one or several amino acids” relates to at least one amino acid but not more than that number of amino acids, which would result in a homology of below 50% identity. Preferably, the identity is more than 70% or 80%, more preferred are 85%, 90%, 91%, 92%, 93%, 94% or 95%, even more preferred are 96%, 97%, 98%, or 99% identity.

[0741] Further, the nucleic acid molecule of the invention comprises a nucleic acid molecule, which is a complement of one of the nucleotide sequences of above mentioned nucleic acid molecules or a portion thereof. A nucleic acid molecule or its sequence which is complementary to one of the nucleotide molecules or sequences shown in table I, columns 5 and 7 is one which is sufficiently complementary to one of the nucleotide molecules or sequences shown in table I, columns 5 and 7 such that it can hybridize to one of the nucleotide sequences shown in table I, columns 5 and 7, thereby forming a stable duplex. Preferably, the hybridization is performed under stringent hybrization conditions. However, a complement of one of the herein disclosed sequences is preferably a sequence complement thereto according to the base pairing of nucleic acid molecules well known to the skilled person. For example, the bases A and G undergo base pairing with the bases T and U or C, resp. and visa versa. Modifications of the bases can influence the base-pairing partner.

[0742] The nucleic acid molecule of the invention comprises a nucleotide sequence which is at least about 30%, 35%, 40% or 45%, preferably at least about 50%, 55%, 60% or 65%, more preferably at least about 70%, 80%, or 90%, and even more preferably at least about 95%, 97%, 98%, 99% or more homologous to a nucleotide sequence shown in table I, columns 5 and 7, or a portion thereof and preferably has above mentioned activity, in particular having a increasing-yield activity, e.g. increasing an yield-related trait, for example enhancing tolerance to abiotic environmental stress, for example increasing drought tolerance and/or low temperature tolerance and/or increasing nutrient use efficiency, increased intrinsic yield and/or another mentioned yield-related trait after increasing the activity or an activity of a gene as shown in table I or of a gene product, e.g. as shown in table II, column 3, by for example expression either in the cytsol or cytoplasm or in an organelle such as a plastid or mitochondria or both, preferably in plastids.

[0743] In one embodiment, the nucleic acid molecules marked in table I, column 6 with “plastidic” or gene products encoded by said nucleic acid molecules are expressed in combination with a targeting signal as described herein.

[0744] The nucleic acid molecule of the invention comprises a nucleotide sequence or molecule which hybridizes, preferably hybridizes under stringent conditions as defined herein, to one of the nucleotide sequences or molecule shown in table I, columns 5 and 7, or a portion thereof and encodes a protein having above-mentioned activity, e.g. conferring an increased yield, e.g. an increased yield-related trait, for example enhanced tolerance to abiotic environmental stress, for example an increased drought tolerance and/or low temperature tolerance and/or an increased nutrient use efficiency, increased intrinsic yield and/or another mentioned yield-related trait as compared to a corresponding, e.g. non-transformed, wild type plant cell, plant or part thereof by for example expression either in the cytsol or in an organelle such as a plastid or mitochondria or both, preferably in plastids, and optionally, the activity selected from the group consisting of 17.6 kDa class I heat shock protein, 26.5 kDa class I small heat shock protein, 26S protease subunit, 2-Cys peroxiredoxin, 3-dehydroquinate synthase, 5-keto-D-gluconate-5-reductase, asparagine synthetase A, aspartate 1-decarboxylase precursor, ATP-dependent RNA helicase, B0567-protein, B1088-protein, B1289-protein, B2940-protein, calnexin homolog, CDS5399-protein, chromatin structure-remodeling complex protein, D-amino acid dehydrogenase, D-arabinono-1,4-lactone oxidase, Delta 1-pyrroline-5-carboxylate reductase, glycine cleavage complex lipoylprotein, ketodeoxygluconokinase, lipoyl synthase, low-molecular-weight heat-shock protein, Microsomal cytochrome b reductase, mitochondrial ribosomal protein, mitotic check point protein, monodehydroascorbate reductase, paraquat-inducible protein B, phosphatase, Phosphoglucosamine mutase, protein disaggregation chaperone, protein kinase, pyruvate decarboxylase, recA family protein, rhodanese-related sulfurtransferase, ribonuclease P protein component, ribosome modulation factor, sensory histidine kinase, serine hydroxymethyltransferase, SLL1280-protein, SLL1797-protein, small membrane lipoprotein, Small nucleolar ribonucleoprotein complex subunit, Sulfatase, transcription initiation factor subunit, tretraspanin, tRNA ligase, xyloglucan galactosyltransferase, YKL130C-protein, YLR443W-protein, YML096W-protein, and zinc finger family protein-activity.

[0745] Moreover, the nucleic acid molecule of the invention can comprise only a portion of the coding region of one of the sequences shown in table I, columns 5 and 7, for example a fragment which can be used as a probe or primer or a fragment encoding a biologically active portion of the polypeptide of the present invention or of a polypeptide used in the process of the present invention, i.e. having above-mentioned activity, e.g. conferring an increased yield, e.g. with an increased yield-related trait, for example enhanced tolerance to abiotic environmental stress, for example an increased drought tolerance and/or low temperature tolerance and/or an increased nutrient use efficiency, increased intrinsic yield and/or another mentioned yield-related trait as compared to a corresponding, e.g. non-transformed, wild type plant cell, plant or part thereof f its activity is increased by for example expression either in the cytsol or in an organelle such as a plastid or mitochondria or both, preferably in plastids. The nucleotide sequences determined from the cloning of the present protein-according-to-the-invention-encoding gene allows for the generation of probes and primers designed for use in identifying and/or cloning its homologues in other cell types and organisms. The probe/primer typically comprises substantially purified oligonucleotide. The oligonucleotide typically comprises a region of nucleotide sequence that hybridizes under stringent conditions to at least about 12, 15 preferably about 20 or 25, more preferably about 40, 50 or 75 consecutive nucleotides of a sense strand of one of the sequences set forth, e.g., in table I, columns 5 and 7, an anti-sense sequence of one of the sequences, e.g., set forth in table I, columns 5 and 7, or naturally occurring mutants thereof. Primers based on a nucleotide of invention can be used in PCR reactions to clone homologues of the polypeptide of the invention or of the polypeptide used in the process of the invention, e.g. as the primers described in the examples of the present invention, e.g. as shown in the examples. A PCR with the primers shown in table III, column 7 will result in a fragment of the gene product as shown in table II, column 3.

[0746] Primer sets are interchangeable. The person skilled in the art knows to combine said primers to result in the desired product, e.g. in a full length clone or a partial sequence. Probes based on the sequences of the nucleic acid molecule of the invention or used in the process of the present invention can be used to detect transcripts or genomic sequences encoding the same or homologous proteins. The probe can further comprise a label group attached thereto, e.g. the label group can be a radioisotope, a fluorescent compound, an enzyme, or an enzyme co-factor. Such probes can be used as a part of a genomic marker test kit for identifying cells which express an polypeptide of the invention or used in the process of the present invention, such as by measuring a level of an encoding nucleic acid molecule in a sample of cells, e.g., detecting mRNA levels or determining, whether a genomic gene comprising the sequence of the polynucleotide of the invention or used in the processes of the present invention has been mutated or deleted.

[0747] The nucleic acid molecule of the invention encodes a polypeptide or portion thereof which includes an amino acid sequence which is sufficiently homologous to the amino acid sequence shown in table II, columns 5 and 7 such that the protein or portion thereof maintains the ability to participate in increasing yield, e.g. increasing a yield-related trait, for example enhancing tolerance to abiotic environmental stress, for example increasing drought tolerance and/or low temperature tolerance and/or increasing nutrient use efficiency, increasing intrinsic yield and/or another mentioned yield-related trait as compared to a corresponding, e.g. non-transformed, wild type plant cell, plant or part thereof, in particular increasing the activity as mentioned above or as described in the examples in plants is comprised.

[0748] As used herein, the language “sufficiently homologous” refers to proteins or portions thereof which have amino acid sequences which include a minimum number of identical or equivalent amino acid residues (e.g., an amino acid residue which has a similar side chain as an amino acid residue in one of the sequences of the polypeptide of the present invention) to an amino acid sequence shown in table II, columns 5 and 7 such that the protein or portion thereof is able to participate in increasing yield, e.g. increasing a yield-related trait, for example enhancing tolerance to abiotic environmental stress, for example increasing drought tolerance and/or low temperature tolerance and/or increasing nutrient use efficiency, increasing intrinsic yield and/or another mentioned yield-related trait as compared to a corresponding, e.g. non-transformed, wild type plant cell, plant or part thereof. For examples having the activity of a protein as shown in table II, column 3 and as described herein.

[0749] In one embodiment, the nucleic acid molecule of the present invention comprises a nucleic acid that encodes a portion of the protein of the present invention. The protein is at least about 30%, 35%, 40%, 45% or 50%, preferably at least about 55%, 60%, 65% or 70%, and more preferably at least about 75%, 80%, 85%, 90%, 91%, 92%, 93% or 94% and most preferably at least about 95%, 97%, 98%, 99% or more homologous to an entire amino acid sequence of table II, columns 5 and 7 and having above-mentioned activity, e.g. conferring an increased yield, e.g. an increased yield-related trait, for example enhanced tolerance to abiotic environmental stress, for example an increased drought tolerance and/or low temperature tolerance and/or an increased nutrient use efficiency, intrinsic yield and/or another mentioned yield-related trait as compared to a corresponding, e.g. non-transformed, wild type plant cell, plant or part thereof by for example expression either in the cytsol or in an organelle such as a plastid or mitochondria or both, preferably in plastids.

[0750] Portions of proteins encoded by the nucleic acid molecule of the invention are preferably biologically active, preferably having above-mentioned annotated activity, e.g. conferring an increased yield, e.g. an increased yield-related trait, for example enhanced tolerance to abiotic environmental stress, for example an increased drought tolerance and/or low temperature tolerance and/or an increased nutrient use efficiency, intrinsic yield and/or another mentioned yield-related trait as compared to a corresponding, e.g. non-transformed, wild type plant cell, plant or part thereof after increase of activity.

[0751] As mentioned herein, the term “biologically active portion” is intended to include a portion, e.g., a domain/motif, that confers an increased yield, e.g. an increased yield-related trait, for example enhanced tolerance to abiotic environmental stress, for example an increased drought tolerance and/or low temperature tolerance and/or an increased nutrient use efficiency, intrinsic yield and/or another mentioned yield-related trait as compared to a corresponding, e.g. non-transformed, wild type plant cell, plant or part thereof or has an immunological activity such that it is binds to an antibody binding specifically to the polypeptide of the present invention or a polypeptide used in the process of the present invention for increasing yield, e.g. increasing a yield-related trait, for example enhancing tolerance to abiotic environmental stress, for example increasing drought tolerance and/or low temperature tolerance and/or increasing nutrient use efficiency, increasing intrinsic yield and/or another mentioned yield-related traitas compared to a corresponding, e.g. non-transformed, wild type plant cell, plant or part thereof.

[0752] The invention further relates to nucleic acid molecules that differ from one of the nucleotide sequences shown in table I A, columns 5 and 7 (and portions thereof) due to degeneracy of the genetic code and thus encode a polypeptide of the present invention, in particular a polypeptide having above mentioned activity, e.g. as that polypeptides depicted by the sequence shown in table II, columns 5 and 7 or the functional homologues. Advantageously, the nucleic acid molecule of the invention comprises, or in an other embodiment has, a nucleotide sequence encoding a protein comprising, or in an other embodiment having, an amino acid sequence shown in table II, columns 5 and 7 or the functional homologues. In a still further embodiment, the nucleic acid molecule of the invention encodes a full length protein which is substantially homologous to an amino acid sequence shown in table II, columns 5 and 7 or the functional homologues. However, in one embodiment, the nucleic acid molecule of the present invention does not consist of the sequence shown in table I, preferably table IA, columns 5 and 7.

[0753] in addition, it will be appreciated by those skilled in the art that DNA sequence polymorphisms that lead to changes in the amino acid sequences may exist within a population. Such genetic polymorphism in the gene encoding the polypeptide of the invention or comprising the nucleic acid molecule of the invention may exist among individuals within a population due to natural variation.

[0754] As used herein, the terms “gene” and “recombinant gene” refer to nucleic acid molecules comprising an open reading frame encoding the polypeptide of the invention or comprising the nucleic acid molecule of the invention or encoding the polypeptide used in the process of the present invention, preferably from a crop plant or from a microorgansim useful for the method of the invention. Such natural variations can typically result in 1 to 5% variance in the nucleotide sequence of the gene. Any and all such nucleotide variations and resulting amino acid polymorphisms in genes encoding a polypeptide of the invention or comprising a the nucleic acid molecule of the invention that are the result of natural variation and that do not alter the functional activity as described are intended to be within the scope of the invention.

[0755] Nucleic acid molecules corresponding to natural variants homologues of a nucleic acid molecule of the invention, which can also be a cDNA, can be isolated based on their homology to the nucleic acid molecules disclosed herein using the nucleic acid molecule of the invention, or a portion thereof, as a hybridization probe according to standard hybridization techniques under stringent hybridization conditions.

[0756] Accordingly, in another embodiment, a nucleic acid molecule of the invention is at least 15, 20, 25 or 30 nucleotides in length. Preferably, it hybridizes under stringent conditions to a nucleic acid molecule comprising a nucleotide sequence of the nucleic acid molecule of the present invention or used in the process of the present invention, e.g. comprising the sequence shown in table I, columns 5 and 7. The nucleic acid molecule is preferably at least 20, 30, 50, 100, 250 or more nucleotides in length.

[0757] The term “hybridizes under stringent conditions” is defined above. In one embodiment, the term “hybridizes under stringent conditions” is intended to describe conditions for hybridization and washing under which nucleotide sequences at least 30%, 40%, 50% or 65% identical to each other typically remain hybridized to each other. Preferably, the conditions are such that sequences at least about 70%, more preferably at least about 75% or 80%, and even more preferably at least about 85%, 90% or 95% or more identical to each other typically remain hybridized to each other.

[0758] Preferably, nucleic acid molecule of the invention that hybridizes under stringent conditions to a sequence shown in table I, columns 5 and 7 corresponds to a naturallyoccurring nucleic acid molecule of the invention. As used herein, a “naturally-occurring” nucleic acid molecule refers to an RNA or DNA molecule having a nucleotide sequence that occurs in nature (e.g., encodes a natural protein). Preferably, the nucleic acid molecule encodes a natural protein having above-mentioned activity, e.g. conferring increasing yield, e.g. increasing a yield-related trait, for example enhancing tolerance to abiotic environmental stress, for example increasing drought tolerance and/or low temperature tolerance and/or increasing nutrient use efficiency, increasing intrinsic yield and/or another mentioned yield-related trait after increasing the expression or activity thereof or the activity of a protein of the invention or used in the process of the invention by for example expression the nucleic acid sequence of the gene product in the cytsol and/or in an organelle such as a plastid or mitochondria, preferably in plastids.

[0759] In addition to naturally-occurring variants of the sequences of the polypeptide or nucleic acid molecule of the invention as well as of the polypeptide or nucleic acid molecule used in the process of the invention that may exist in the population, the skilled artisan will further appreciate that changes can be introduced by mutation into a nucleotide sequence of the nucleic acid molecule encoding the polypeptide of the invention or used in the process of the present invention, thereby leading to changes in the amino acid sequence of the encoded said polypeptide, without altering the functional ability of the polypeptide, preferably not decreasing said activity.

[0760] For example, nucleotide substitutions leading to amino acid substitutions at “non-essential” amino acid residues can be made in a sequence of the nucleic acid molecule of the invention or used in the process of the invention, e.g. shown in table I, columns 5 and 7.

[0761] A “non-essential” amino acid residue is a residue that can be altered from the wild-type sequence of one without altering the activity of said polypeptide, whereas an “essential” amino acid residue is required for an activity as mentioned above, e.g. leading to increasing yield, e.g. increasing a yield-related trait, for example enhancing tolerance to abiotic environmental stress, for example increasing drought tolerance and/or low temperature tolerance and/or increasing nutrient use efficiency, increasing intrinsic yield and/or another mentioned yield-related trait as compared to a corresponding, e.g. non-transformed, wild type plant cell, plant or part thereof in an organism after an increase of activity of the polypeptide. Other amino acid residues, however, (e.g., those that are not conserved or only semi-conserved in the domain having said activity) may not be essential for activity and thus are likely to be amenable to alteration without altering said activity.

[0762] Further, a person skilled in the art knows that the codon usage between organisms can differ. Therefore, he may adapt the codon usage in the nucleic acid molecule of the present invention to the usage of the organism or the cell compartment for example of the plastid or mitochondria in which the polynucleotide or polypeptide is expressed.

Accordingly, the invention relates to nucleic acid molecules encoding a polypeptide having above-mentioned activity, in an organisms or parts thereof by for example expression either in the cytsol or in an organelle such as a plastid or mitochondria or both, preferably in plastids that contain changes in amino acid residues that are not essential for said activity. Such polypeptides differ in amino acid sequence from a sequence contained in the sequences shown in table II, columns 5 and 7 yet retain said activity described herein. The nucleic acid molecule can comprise a nucleotide sequence encoding a polypeptide, wherein the polypeptide comprises an amino acid sequence at least about 50% identical to an amino acid sequence shown in table II, columns 5 and 7 and is capable of participation in increasing yield, e.g. increasing a yield-related trait, for example enhancing tolerance to abiotic environmental stress, for example increasing drought tolerance and/or low temperature tolerance and/or increasing nutrient use efficiency, increasing intrinsic yield and/or another mentioned yield-related trait as compared to a corresponding, e.g. non-transformed, wild type plant cell, plant or part thereof after increasing its activity, e.g. its expression by for example expression either in the cytsol or in an organelle such as a plastid or mitochondria or both, preferably in plastids. Preferably, the protein encoded by the nucleic acid molecule is at least about 60% identical to the sequence shown in table II, columns 5 and 7, more preferably at least about 70% identical to one of the sequences shown in table II, columns 5 and 7, even more preferably at least about 80%, 90%, 95% homologous to the sequence shown in table II, columns 5 and 7, and most preferably at least about 96%, 97%, 98%, or 99% identical to the sequence shown in table II, columns 5 and 7.

[0763] To determine the percentage homology (=identity, herein used interchangeably) of two amino acid sequences or of two nucleic acid molecules, the sequences are written one underneath the other for an optimal comparison (for example gaps may be inserted into the sequence of a protein or of a nucleic acid in order to generate an optimal alignment with the other protein or the other nucleic acid).

[0764] The amino acid residues or nucleic acid molecules at the corresponding amino acid positions or nucleotide positions are then compared. If a position in one sequence is occupied by the same amino acid residue or the same nucleic acid molecule as the corresponding position in the other sequence, the molecules are homologous at this position (i.e. amino acid or nucleic acid “homology” as used in the present context corresponds to amino acid or nucleic acid “identity”. The percentage homology between the two sequences is a function of the number of identical positions shared by the sequences (i.e. % homology=number of identical positions/total number of positions×100). The terms “homology” and “identity” are thus to be considered as synonyms.

[0765] For the determination of the percentage homology (=identity) of two or more amino acids or of two or more nucleotide sequences several computer software programs have been developed. The homology of two or more sequences can be calculated with for example the software fasta, which presently has been used in the version fasta 3 (W. R. Pearson and D. J. Lipman, PNAS 85, 2444 (1988); W. R. Pearson, Methods in Enzymology 183, 63 (1990); W. R. Pearson and D. J. Lipman, PNAS 85, 2444 (1988); W. R. Pearson, Enzymology 183, 63 (1990)). Another useful program for the calculation of homologies of different sequences is the standard blast program, which is included in the Biomax pedant software (Biomax, Munich, Federal Republic of Germany). This leads unfortunately sometimes to suboptimal results since blast does not always include complete sequences of the subject and the querry. Nevertheless as this program is very efficient it can be used for the comparison of a huge number of sequences. The following settings are typically used for such a comparisons of sequences: -p Program Name [String]; -d Database [String]; default=nr; -i Query File [File In]; default=stdin; -e Expectation value (E) [Real]; default=10.0; m alignment view options: 0=pairwise; 1=query-anchored showing identities; 2=queryanchored no identities; 3=flat query-anchored, show identities; 4=flat query-anchored, no identities; 5=query-anchored no identities and blunt ends; 6=flat query-anchored, no identities and blunt ends; 7=XML Blast output; 8=tabular; 9 tabular with comment lines [Integer]; default=0; -o BLAST report Output File [File Out] Optional; default=stdout; -F Filter query sequence (DUST with blastn, SEG with others) [String]; default=T; -G Cost to open a gap (zero invokes default behavior) [Integer]; default=0; -E Cost to extend a gap (zero invokes default behavior) [Integer]; default=0; -X X dropoff value for gapped alignment (in bits) (zero invokes default behavior); blastn 30, megablast 20, tblastx 0, all others 15 [Integer]; default=0; -I Show GI's in deflines [T/F]; default=F; -q Penalty for a nucleotide mismatch (blastn only) [Integer]; default=−3; -r Reward for a nucleotide match (blastn only) [Integer]; default=1; -v Number of database sequences to show one-line descriptions for (V) [Integer]; default=500; -b Number of database sequence to show alignments for (B) [Integer]; default=250; -f Threshold for extending hits, default if zero; blastp 11, blastn 0, blastx 12, tblastn 13; tblastx 13, megablast 0 [Integer]; default=0; -g Perfom gapped alignment (not available with tblastx) [T/F]; default=T; -Q Query Genetic code to use [Integer ]; default=1; -D DB Genetic code (for tblast[nx] only) [Integer]; default=1; -a Number of processors to use [Integer]; default=1; -O SeqAlign file [File Out] Optional; -J Believe the query defline [T/F]; default=F; -M Matrix [String]; default=BLOSUM62; -W Word size, default if zero (blastn 11, megablast 28, all others 3) [Integer]; default=0; -z Effective length of the database (use zero for the real size) [Real]; default=0; -K Number of best hits from a region to keep (off by default, if used a value of 100 is recommended) [Integer]; default=0; -P 0 for multiple hit, 1 for single hit [Integer]; default=0; -Y Effective length of the search space (use zero for the real size) [Real]; default=0; -S Query strands to search against database (for blast[nx], and tblastx); 3 is both, 1 is top, 2 is bottom [Integer]; default=3; -T Produce HTML output [T/F]; default=F; -I Restrict search of database to list of GI's

[0766] [String] Optional; -U Use lower case filtering of FASTA sequence [T/F] Optional; default=F; -y X dropoff value for ungapped extensions in bits (0.0 invokes default behavior); blastn 20, megablast 10, all others 7 [Real]; default=0.0; -Z X dropoff value for final gapped alignment in bits (0.0 invokes default behavior); blastn/megablast 50, tblastx 0, all others 25 [Integer]; default=0; -R PSI-TBLASTN checkpoint file [File In] Optional; -n MegaBlast search [THF]; default=F; -L Location on query sequence [String] Optional; -A Multiple Hits window size, default if zero (blastn/megablast 0, all others 40 [Integer]; default=0; -w Frame shift penalty (OOF algorithm for blastx) [Integer]; default=0; -t Length of the largest intron allowed in tblastn for linking HSPs (0 disables linking) [Integer]; default=0.

[0767] Results of high quality are reached by using the algorithm of Needleman and Wunsch or Smith and Waterman. Therefore programs based on said algorithms are preferred. Advantageously the comparisons of sequences can be done with the program PileUp (J. Mol. Evolution., 25, 351 (1987), Higgins et al., CABIOS 5, 151 (1989)) or preferably with the programs “Gap” and “Needle”, which are both based on the algorithms of Needleman and Wunsch (J. Mol. Biol. 48; 443 (1970)), and “BestFit”, which is based on the algorithm of Smith and Waterman (Adv. Appl. Math. 2; 482 (1981)). “Gap” and “BestFit” are part of the GCG software-package (Genetics Computer Group, 575 Science Drive, Madison, Wis., USA 53711 (1991); Altschul et al., (Nucleic Acids Res. 25, 3389 (1997)), “Needle” is part of the The European Molecular Biology Open Software Suite (EMBOSS) (Trends in Genetics 16 (6), 276 (2000)). Therefore preferably the calculations to determine the percentages of sequence homology are done with the programs “Gap” or “Needle” over the whole range of the sequences. The following standard adjustments for the comparison of nucleic acid sequences were used for “Needle”: matrix: EDNAFULL, Gap_penalty: 10.0, Extend_penalty: 0.5. The following standard adjustments for the comparison of nucleic acid sequences were used for “Gap”: gap weight: 50, length weight: 3, average match: 10.000, average mismatch: 0.000.

[0768] For example a sequence, which has 80% homology with sequence SEQ ID NO: 63 at the nucleic acid level is understood as meaning a sequence which, upon comparison with the sequence SEQ ID NO: 63 bp the above program “Needle” with the above parameter set, has a 80% homology.

[0769] Homology between two polypeptides is understood as meaning the identity of the amino acid sequence over in each case the entire sequence length which is calculated by comparison with the aid of the above program “Needle” using Matrix: EBLOSUM62, Gap_penalty: 8.0, Extend_penalty: 2.0.

[0770] For example a sequence which has a 80% homology with sequence SEQ ID NO: 64 at the protein level is understood as meaning a sequence which, upon comparison with the sequence SEQ ID NO: 64 by the above program “Needle” with the above parameter set, has a 80% homology.

[0771] Functional equivalents derived from the nucleic acid sequence as shown in table I, columns 5 and 7 according to the invention by substitution, insertion or deletion have at least 30%, 35%, 40%, 45% or 50%, preferably at least 55%, 60%, 65% or 70% by preference at least 80%, especially preferably at least 85% or 90%, 91%, 92%, 93% or 94%, very especially preferably at least 95%, 97%, 98% or 99% homology with one of the polypeptides as shown in table II, columns 5 and 7 according to the invention and encode polypeptides having essentially the same properties as the polypeptide as shown in table II, columns 5 and 7. Functional equivalents derived from one of the polypeptides as shown in table II, columns 5 and 7 according to the invention by substitution, insertion or deletion have at least 30%, 35%, 40%, 45% or 50%, preferably at least 55%, 60%, 65% or 70% by preference at least 80%, especially preferably at least 85% or 90%, 91%, 92%, 93% or 94%, very especially preferably at least 95%, 97%, 98% or 99% homology with one of the polypeptides as shown in table II, columns 5 and 7 according to the invention and having essentially the same properties as the polypeptide as shown in table II, columns 5 and 7.

[0772] “Essentially the same properties” of a functional equivalent is above all understood as meaning that the functional equivalent has above mentioned activity, by for example expression either in the cytsol or in an organelle such as a plastid or mitochondria or both, preferably in plastids while increasing the amount of protein, activity or function of said functional equivalent in an organism, e.g. a microorgansim, a plant or plant tissue or animal tissue, plant or animal cells or a part of the same.

[0773] A nucleic acid molecule encoding an homologous to a protein sequence of table II, columns 5 and 7 can be created by introducing one or more nucleotide substitutions, additions or deletions into a nucleotide sequence of the nucleic acid molecule of the present invention, in particular of table I, columns 5 and 7 such that one or more amino acid substitutions, additions or deletions are introduced into the encoded protein. Mutations can be introduced into the encoding sequences of table I, columns 5 and 7 by standard techniques, such as site-directed mutagenesis and PCR-mediated mutagenesis.

[0774] Preferably, conservative amino acid substitutions are made at one or more predicted non-essential amino acid residues. A “conservative amino acid substitution” is one in which the amino acid residue is replaced with an amino acid residue having a similar side chain. Families of amino acid residues having similar side chains have been defined in the art. These families include amino acids with basic side chains (e.g., lysine, arginine, histidine), acidic side chains (e.g., aspartic acid, glutamic acid), uncharged polar side chains (e.g., glycine, asparagine, glutamine, serine, threonine, tyrosine, cysteine), nonpolar side chains (e.g., alanine, valine, leucine, isoleucine, proline, phenylalanine, methionine, tryptophane), beta-branched side chains (e.g., threonine, valine, isoleucine) and aromatic side chains (e.g., tyrosine, phenylalanine, tryptophane, histidine).

[0775] Thus, a predicted nonessential amino acid residue in a polypeptide of the invention or a polypeptide used in the process of the invention is preferably replaced with another amino acid residue from the same family. Alternatively, in another embodiment, mutations can be introduced randomly along all or part of a coding sequence of a nucleic acid molecule of the invention or used in the process of the invention, such as by saturation mutagenesis, and the resultant mutants can be screened for activity described herein to identify mutants that retain or even have increased above mentioned activity, e.g. conferring increased yield, e.g. an increased yield-related trait, for example enhanced tolerance to abiotic environmental stress, for example an increased drought tolerance and/or low temperature tolerance and/or an increased nutrient use efficiency, intrinsic yield and/or another mentioned yield-related trait as compared to a corresponding, e.g. non-transformed, wild type plant cell, plant or part thereof.

[0776] Following mutagenesis of one of the sequences as shown herein, the encoded protein can be expressed recombinantly and the activity of the protein can be determined using, for example, assays described herein (see Examples).

[0777] The highest homology of the nucleic acid molecule used in the process according to the invention was found for the following database entries by Gap search.

[0778] Homologues of the nucleic acid sequences used, with the sequence shown in table I, columns 5 and 7, comprise also allelic variants with at least approximately 30%, 35%, 40% or 45% homology, by preference at least approximately 50%, 60% or 70%, more preferably at least approximately 90%, 91%, 92%, 93%, 94% or 95% and even more preferably at least approximately 96%, 97%, 98%, 99% or more homology with one of the nucleotide sequences shown or the abovementioned derived nucleic acid sequences or their homologues, derivatives or analogues or parts of these. Allelic variants encompass in particular functional variants which can be obtained by deletion, insertion or substitution of nucleotides from the sequences shown, preferably from table I, columns 5 and 7, or from the derived nucleic acid sequences, the intention being, however, that the enzyme activity or the biological activity of the resulting proteins synthesized is advantageously retained or increased.

[0779] In one embodiment of the present invention, the nucleic acid molecule of the invention or used in the process of the invention comprises the sequences shown in any of the table I, columns 5 and 7. It is preferred that the nucleic acid molecule comprises as little as possible other nucleotides not shown in any one of table I, columns 5 and 7. In one embodiment, the nucleic acid molecule comprises less than 500, 400, 300, 200, 100, 90, 80, 70, 60, 50 or 40 further nucleotides. In a further embodiment, the nucleic acid molecule comprises less than 30, 20 or 10 further nucleotides. In one embodiment, the nucleic acid molecule use in the process of the invention is identical to the sequences shown in table I, columns 5 and 7.

[0780] Also preferred is that the nucleic acid molecule used in the process of the invention encodes a polypeptide comprising the sequence shown in table II, columns 5 and 7. In one embodiment, the nucleic acid molecule encodes less than 150, 130, 100, 80, 60, 50, 40 or 30 further amino acids. In a further embodiment, the encoded polypeptide comprises less than 20, 15, 10, 9, 8, 7, 6 or 5 further amino acids. In one embodiment used in the inventive process, the encoded polypeptide is identical to the sequences shown in table II, columns 5 and 7.

[0781] In one embodiment, the nucleic acid molecule of the invention or used in the process encodes a polypeptide comprising the sequence shown in table II, columns 5 and 7 comprises less than 100 further nucleotides. In a further embodiment, said nucleic acid molecule comprises less than 30 further nucleotides. In one embodiment, the nucleic acid molecule used in the process is identical to a coding sequence of the sequences shown in table I, columns 5 and 7.

[0782] Polypeptides (=proteins), which still have the essential biological or enzymatic activity of the polypeptide of the present invention conferring increased yield, e.g. an increased yield-related trait, for example enhanced tolerance to abiotic environmental stress, for example an increased drought tolerance and/or low temperature tolerance and/or an increased nutrient use efficiency, intrinsic yield and/or another mentioned yield-related trait as compared to a corresponding, e.g. non-transformed, wild type plant cell, plant or part thereof i.e. whose activity is essentially not reduced, are polypeptides with at least 10% or 20%, by preference 30% or 40%, especially preferably 50% or 60%, very especially preferably 80% or 90 or more of the wild type biological activity or enzyme activity, advantageously, the activity is essentially not reduced in comparison with the activity of a polypeptide shown in table II, columns 5 and 7 expressed under identical conditions.

[0783] Homologues of table I, columns 5 and 7 or of the derived sequences of table II, columns 5 and 7 also mean truncated sequences, cDNA, single-stranded DNA or RNA of the coding and noncoding DNA sequence. Homologues of said sequences are also understood as meaning derivatives, which comprise noncoding regions such as, for example, UTRs, terminators, enhancers or promoter variants. The promoters upstream of the nucleotide sequences stated can be modified by one or more nucleotide substitution(s), insertion (s) and/or deletion(s) without, however, interfering with the functionality or activity either of the promoters, the open reading frame (═ORF) or with the 3′-regulatory region such as terminators or other 3′-regulatory regions, which are far away from the ORF. It is furthermore possible that the activity of the promoters is increased by modification of their sequence, or that they are replaced completely by more active promoters, even promoters from heterologous organisms. Appropriate promoters are known to the person skilled in the art and are mentioned herein below.

[0784] In addition to the nucleic acid molecules encoding the YRPs described above, another aspect of the invention pertains to negative regulators of the activity of a nucleic acid molecules selected from the group according to table I, column 5 and/or 7, preferably column 7. Antisense polynucleotides thereto are thought to inhibit the downregulating activity of those negative regulators by specifically binding the target polynucleotide and interfering with transcription, splicing, transport, translation, and/or stability of the target polynucleotide. Methods are described in the prior art for targeting the antisense polynucleotide to the chromosomal DNA, to a primary RNA transcript, or to a processed mRNA. Preferably, the target regions include splice sites, translation initiation codons, translation termination codons, and other sequences within the open reading frame.

[0785] The term “antisense,” for the purposes of the invention, refers to a nucleic acid comprising a polynucleotide that is sufficiently complementary to all or a portion of a gene, primary transcript, or processed mRNA, so as to interfere with expression of the endogenous gene. “Complementary” polynucleotides are those that are capable of base pairing according to the standard Watson-Crick complementarity rules. specifically, purines will base pair with pyrimidines to form a combination of guanine paired with cytosine (G:C) and adenine paired with either thymine (A:T) in the case of DNA, or adenine paired with uracil (A:U) in the case of RNA. It is understood that two polynucleotides may hybridize to each other even if they are not completely complementary to each other, provided that each has at least one region that is substantially complementary to the other. The term “antisense nucleic acid” includes single stranded RNA as well as double-stranded DNA expression cassettes that can be transcribed to produce an antisense RNA. “Active” antisense nucleic acids are antisense RNA molecules that are capable of selectively hybridizing with a negative regulator of the activity of a nucleic acid molecules encoding a polypeptide having at least 80% sequence identity with the polypeptide selected from the group according to table II, column 5 and/or 7, preferably column 7.

[0786] The antisense nucleic acid can be complementary to an entire negative regulator strand, or to only a portion thereof. In an embodiment, the antisense nucleic acid molecule is antisense to a “noncoding region” of the coding strand of a nucleotide sequence encoding a YRP. The term “noncoding region” refers to 5′ and 3′ sequences that flank the coding region that are not translated into amino acids (i.e., also referred to as 5′ and 3′ untranslated regions). The antisense nucleic acid molecule can be complementary to only a portion of the noncoding region of YRP mRNA. For example, the antisense oligonucleotide can be complementary to the region surrounding the translation start site of YRP mRNA. An antisense oligonucleotide can be, for example, about 5, 10, 15, 20, 25, 30, 35, 40, 45 or 50 nucleotides in length. Typically, the antisense molecules of the present invention comprise an RNA having 60-100% sequence identity with at least 14 consecutive nucleotides of a noncoding region of one of the nucleic acid of table I. Preferably, the sequence identity will be at least 70%, more preferably at least 75%, 80%, 85%, 90%, 95%, 98% and most preferably 99%.

[0787] An antisense nucleic acid of the invention can be constructed using chemical synthesis and enzymatic ligation reactions using procedures known in the art. For example, an antisense nucleic acid (e.g., an antisense oligonucleotide) can be chemically synthesized using naturally occurring nucleotides or variously modified nucleotides designed to increase the biological stability of the molecules or to increase the physical stability of the duplex formed between the antisense and sense nucleic acids, e.g., phosphorothioate derivatives and acridine substituted nucleotides can be used. Examples of modified nucleotides which can be used to generate the antisense nucleic acid include 5-fluorouracil, 5-bromouracil, 5-chlorouracil, 5-iodouracil, hypoxanthine, xanthine, 4-acetylcytosine, 5-(carboxyhydroxylmethyl)-uracil, 5-carboxymethylaminomethyl-2-thiouridine, 5-carboxymethylaminomethyluracil, dihydrouracil, beta-D-galactosylqueosine, inosine, N6-isopentenyladenine, 1-methylguanine, 1-methylinosine, 2,2-dimethylguanine, 2-methyladenine, 2-methylguanine, 3-methylcytosine, 5-methylcytosine, N6-adenine, 7-methylguanine, 5-methylaminomethyluracil, 5-methoxyaminomethyl-2-thiouracil, beta-D-mannosylqueosine, 5′-methoxycarboxymethyluracil, 5-methoxyuracil, 2-methylthio-N-6-isopentenyladenine, uracil-5-oxyacetic acid (v), wybutoxosine, pseudouracil, queosine, 2-thiocytosine, 5-methyl-2-thiouracil, 2-thiouracil, 4-thiouracil, 5-methyluracil, uracil-5-oxyacetic acid methylester, 5-methyl-2-thiouracil, 3-(3-amino-3-N2-carboxypropyl)-uracil, acp3 and 2,6-diaminopurine. Alternatively, the antisense nucleic acid can be produced biologically using an expression vector into which a nucleic acid has been subcloned in an antisense orientation (i.e., RNA transcribed from the inserted nucleic acid will be of an antisense orientation to a target nucleic acid of interest, described further in the following subsection).

[0788] In yet another embodiment, the antisense nucleic acid molecule of the invention is an alpha-anomeric nucleic acid molecule. An alpha-anomeric nucleic acid molecule forms specific double-stranded hybrids with complementary RNA in which, contrary to the usual b-units, the strands run parallel to each other (Gaultier et al., Nucleic Acids. Res. 15, 6625 (1987)). The antisense nucleic acid molecule can also comprise a 2′-o-methylribonucleotide (Inoue et al., Nucleic Acids Res. 15, 6131 (1987)) or a chimeric RNA-DNA analogue (Inoue et al., FEBS Lett. 215, 327 (1987)).

[0789] The antisense nucleic acid molecules of the invention are typically administered to a cell or generated in situ such that they hybridize with or bind to cellular mRNA and/or genomic DNA. The hybridization can be by conventional nucleotide complementarity to form a stable duplex, or, for example, in the case of an antisense nucleic acid molecule which binds to DNA duplexes, through specific interactions in the major groove of the double helix. The antisense molecule can be modified such that it specifically binds to a receptor or an antigen expressed on a selected cell surface, e.g., by linking the antisense nucleic acid molecule to a peptide or an antibody which binds to a cell surface receptor or antigen. The antisense nucleic acid molecule can also be delivered to cells using the vectors described herein. To achieve sufficient intracellular concentrations of the antisense molecules, vector constructs in which the antisense nucleic acid molecule is placed under the control of a strong prokaryotic, viral, or eukaryotic (including plant) promoter are preferred.

[0790] As an alternative to antisense polynucleotides, ribozymes, sense polynucleotides, or double stranded RNA (dsRNA) can be used to reduce expression of a YRP polypeptide. By “ribozyme” is meant a catalytic RNA-based enzyme with ribonuclease activity which is capable of cleaving a single-stranded nucleic acid, such as an mRNA, to which it has a complementary region. Ribozymes (e.g., hammerhead ribozymes described in Haselhoff and Gerlach, Nature 334, 585 (1988)) can be used to catalytically cleave YRP mRNA transcripts to thereby inhibit translation of YRP mRNA. A ribozyme having specificity for a YRP-encoding nucleic acid can be designed based upon the nucleotide sequence of a YRP cDNA, as disclosed herein or on the basis of a heterologous sequence to be isolated according to methods taught in this invention. For example, a derivative of a Tetrahymena L-19 IVS RNA can be constructed in which the nucleotide sequence of the active site is complementary to the nucleotide sequence to be cleaved in a YRP-encoding mRNA. See, e.g. U.S. Pat. Nos. 4,987,071 and 5,116,742 to Cech et al. Alternatively, YRP mRNA can be used to select a catalytic RNA having a specific ribonuclease activity from a pool of RNA molecules. See, e.g. Bartel D., and Szostak J. W., Science 261, 1411 (1993). In preferred embodiments, the ribozyme will contain a portion having at least 7, 8, 9, 10, 12, 14, 16, 18 or 20 nucleotides, and more preferably 7 or 8 nucleotides, that have 100% complementarity to a portion of the target RNA. Methods for making ribozymes are known to those skilled in the art. See, e.g. U.S. Pat. Nos. 6,025,167, 5,773,260 and 5,496,698.

[0791] The term “dsRNA,” as used herein, refers to RNA hybrids comprising two strands of RNA. The dsRNAs can be linear or circular in structure. In a preferred embodiment, dsRNA is specific for a polynucleotide encoding either the polypeptide according to table II or a polypeptide having at least 70% sequence identity with a polypeptide according to table II. The hybridizing RNAs may be substantially or completely complementary. By “substantially complementary,” is meant that when the two hybridizing RNAs are optimally aligned using the BLAST program as described above, the hybridizing portions are at least 95% complementary. Preferably, the dsRNA will be at least 100 base pairs in length. Typically, the hybridizing RNAs will be of identical length with no over hanging 5′ or 3′ ends and no gaps. However, dsRNAs having 5′ or 3′ overhangs of up to 100 nucleotides may be used in the methods of the invention.

[0792] The dsRNA may comprise ribonucleotides or ribonucleotide analogs, such as 2′-O-methyl ribosyl residues, or combinations thereof. See, e.g. U.S. Pat. Nos. 4,130,641 and 4,024,222. A dsRNA polyriboinosinic acid:polyribocytidylic acid is described in U.S. Pat. No. 4,283,393. Methods for making and using dsRNA are known in the art. One method comprises the simultaneous transcription of two complementary DNA strands, either in vivo, or in a single in vitro reaction mixture. See, e.g. U.S. Pat. No. 5,795,715. In one embodiment, dsRNA can be introduced into a plant or plant cell directly by standard transformation procedures. Alternatively, dsRNA can be expressed in a plant cell by transcribing two complementary RNAs.

[0793] Other methods for the inhibition of endogenous gene expression, such as triple helix formation (Moser et al., Science 238, 645 (1987), and Cooney et al., Science 241, 456 (1988)) and co-suppression (Napoli et al., The Plant Cell 2,279, 1990) are known in the art. Partial and full-length cDNAs have been used for the c-osuppression of endogenous plant genes. See, e.g. U.S. Pat. Nos. 4,801,340, 5,034,323, 5,231,020, and 5,283,184; Van der Kroll et al., The Plant Cell 2, 291, (1990); Smith et al., Mol. Gen. Genetics 224, 477 (1990), and Napoli et al., The Plant Cell 2, 279 (1990).

[0794] For sense suppression, it is believed that introduction of a sense polynucleotide blocks transcription of the corresponding target gene. The sense polynucleotide will have at least 65% sequence identity with the target plant gene or RNA. Preferably, the percent identity is at least 80%, 90%, 95% or more. The introduced sense polynucleotide need not be full length relative to the target gene or transcript. Preferably, the sense polynucleotide will have at least 65% sequence identity with at least 100 consecutive nucleotides of one of the nucleic acids as depicted in table I, application no. 1. The regions of identity can comprise introns and/or exons and untranslated regions. The introduced sense polynucleotide may be present in the plant cell transiently, or may be stably integrated into a plant chromosome or extra-chromosomal replicon.

[0795] Further, object of the invention is an expression vector comprising a nucleic acid molecule comprising a nucleic acid molecule selected from the group consisting of:
[0796] (a) a nucleic acid molecule encoding the polypeptide shown in column 5 or 7 of table II, application no. 1;
[0797] (b) a nucleic acid molecule shown in column 5 or 7 of table I, application no. 1;
[0798] (c) a nucleic acid molecule, which, as a result of the degeneracy of the genetic code, can be derived from a polypeptide sequence depicted in column 5 or 7 of table II, and confers an increased yield, e.g. an increased yield-related trait, for example enhanced tolerance to abiotic environmental stress, for example an increased drought tolerance and/or low temperature tolerance and/or an increased nutrient use efficiency, intrinsic yield and/or another mentioned yield-related trait as compared to a corresponding, e.g. non-transformed, wild type plant cell, a plant or a part thereof;
[0799] (d) a nucleic acid molecule having at least 30% identity, preferably at least 40%, 50%, 60%, 70%, 75%, 80%, 85%, 90%, 95%, 96%, 97%, 98%, 99%, 99.5% with the nucleic acid molecule sequence of a polynucleotide comprising the nucleic acid molecule shown in column 5 or 7 of table I, and confers increased yield, e.g. an increased yield-related trait, for example enhanced tolerance to abiotic environmental stress, for example an increased drought tolerance and/or low temperature tolerance and/or an increased nutrient use efficiency, intrinsic yield and/or another mentioned yield-related trait as compared to a corresponding, e.g. non-transformed, wild type plant cell, a plant or a part thereof ;
[0800] (e) a nucleic acid molecule encoding a polypeptide having at least 30% identity, preferably at least 40%, 50%, 60%, 70%, 75%, 80%, 85%, 90%, 95%, 96%, 97%, 98%, 99%, 99.5%, with the amino acid sequence of the polypeptide encoded by the nucleic acid molecule of (a), (b), (c) or (d) and having the activity represented by a nucleic acid molecule comprising a polynucleotide as depicted in column 5 of table I, and confers increased yield, e.g. an increased yield-related trait, for example enhanced tolerance to abiotic environmental stress, for example an increased drought tolerance and/or low temperature tolerance and/or an increased nutrient use efficiency, intrinsic yield and/or another mentioned yield-related trait as compared to a corresponding, e.g. non-transformed, wild type plant cell, a plant or a part thereof;
[0801] (f) nucleic acid molecule which hybridizes with a nucleic acid molecule of (a), (b), (c), (d) or (e) under stringent hybridization conditions and confers increased yield, e.g. an increased yield-related trait, for example enhanced tolerance to abiotic environmental stress, for example an increased drought tolerance and/or low temperature tolerance and/or an increased nutrient use efficiency, intrinsic yield and/or another mentioned yield-related trait as compared to a corresponding, e.g. non-transformed, wild type plant cell, a plant or a part thereof;
[0802] (g) a nucleic acid molecule encoding a polypeptide which can be isolated with the aid of monoclonal or polyclonal antibodies made against a polypeptide encoded by one of the nucleic acid molecules of (a), (b), (c), (d), (e) or (f) and having the activity represented by the nucleic acid molecule comprising a polynucleotide as depicted in column 5 of table I, application no. 1;
[0803] (h) a nucleic acid molecule encoding a polypeptide comprising the consensus sequence or one or more polypeptide motifs as shown in column 7 of table IV, and preferably having the activity represented by a protein comprising a polypeptide as depicted in column 5 of table II or IV, application no. 1;
[0804] (i) a nucleic acid molecule encoding a polypeptide having the activity represented by a protein as depicted in column 5 of table II, and confers increased yield, e.g. an increased yield-related trait, for example enhanced tolerance to abiotic environmental stress, for example an increased drought tolerance and/or low temperature tolerance and/or an increased nutrient use efficiency, intrinsic yield and/or another mentioned yield-related trait as compared to a corresponding, e.g. non-transformed, wild type plant cell, a plant or a part thereof; W nucleic acid molecule which comprises a polynucleotide, which is obtained by amplifying a cDNA library or a genomic library using the primers in column 7 of table III, and preferably having the activity represented by a protein comprising a polypeptide as depicted in column 5 of table II or IV, application no. 1; and
[0805] (k) a nucleic acid molecule which is obtainable by screening a suitable nucleic acid library, especially a cDNA library and/or a genomic library, under stringent hybridization conditions with a probe comprising a complementary sequence of a nucleic acid molecule of
[0806] (a) or (b) or with a fragment thereof, having at least 15 nt, preferably 20 nt, 30 nt, 50 nt, 100 nt, 200 nt, 500 nt, 750 or 1000 nt of a nucleic acid molecule complementary to a nucleic acid molecule sequence characterized in (a) to (e) and encoding a polypeptide having the activity represented by a protein comprising a polypeptide as depicted in column 5 of table II, application no. 1.

[0807] The invention further provides an isolated recombinant expression vector comprising a YRP encoding nucleic acid as described above, wherein expression of the vector or YRP encoding nucleic acid, respectively in a host cell results in an increased yield, e.g. an increased yield-related trait, for example enhanced tolerance to abiotic environmental stress, for example an increased drought tolerance and/or low temperature tolerance and/or an increased nutrient use efficiency, intrinsic yield and/or another mentioned yield-related trait as compared to the corresponding, e.g. non-transformed, wild type of the host cell. As used herein, the term “vector” refers to a nucleic acid molecule capable of transporting another nucleic acid to which it has been linked. One type of vector is a “plasmid”, which refers to a circular double stranded DNA loop into which additional DNA segments can be ligated. Another type of vector is a viral vector, wherein additional DNA segments can be ligated into the viral genome. Further types of vectors can be linearized nucleic acid sequences, such as transposons, which are pieces of DNA which can copy and insert themselves. There have been 2 types of transposons found: simple transposons, known as Insertion Sequences and composite transposons, which can have several genes as well as the genes that are required for transposition. Certain vectors are capable of autonomous replication in a host cell into which they are introduced (e.g., bacterial vectors having a bacterial origin of replication and episomal mammalian vectors). Other vectors (e.g., non-episomal mammalian vectors) are integrated into the genome of a host cell upon introduction into the host cell, and thereby are replicated along with the host genome. Moreover, certain vectors are capable of directing the expression of genes to which they are operatively linked. Such vectors are referred to herein as “expression vectors”. In general, expression vectors of utility in recombinant DNA techniques are often in the form of plasmids. In the present specification, “plasmid” and “vector” can be used interchangeably as the plasmid is the most commonly used form of vector. However, the invention is intended to include such other forms of expression vectors, such as viral vectors (e.g., replication defective retroviruses, adenoviruses and adeno-associated viruses), which serve equivalent functions.

[0808] A plant expression cassette preferably contains regulatory sequences capable of driving gene expression in plant cells and operably linked so that each sequence can fulfill its function, for example, termination of transcription by polyadenylation signals. Preferred polyadenylation signals are those originating from Agrobacterium tumefaciens T-DNA such as the gene 3 known as octopine synthase of the Ti-plasmid pTiACH5 (Gielen et al., EMBO J. 3, 835 1(984)) or functional equivalents thereof but also all other terminators functionally active in plants are suitable. As plant gene expression is very often not limited on transcriptional levels, a plant expression cassette preferably contains other operably linked sequences like translational enhancers such as the overdrive-sequence containing the 5″-untranslated leader sequence from tobacco mosaic virus enhancing the protein per RNA ratio (Gallie et al., Nucl. Acids Research 15, 8693 (1987)).

[0809] Plant gene expression has to be operably linked to an appropriate promoter conferring gene expression in a timely, cell or tissue specific manner. Preferred are promoters driving constitutive expression (Benfey et al., EMBO J. 8, 2195 (1989)) like those derived from plant viruses like the 35S CaMV (Franck et al., Cell 21, 285 (1980)), the 19S CaMV (see also U.S. Pat. No. 5,352,605 and PCT Application No. WO 84/02913) or plant promoters like those from Rubisco small subunit described in U.S. Pat. No. 4,962,028.

[0810] Additional advantageous regulatory sequences are, for example, included in the plant promoters such as CaMV/35S (Franck et al., Cell 21 285 (1980)), PRP1 (Ward et al., Plant. Mol. Biol. 22, 361 (1993)), SSU, OCS, lib4, usp, STLS1, B33, LEB4, nos, ubiquitin, napin or phaseolin promoter. Also advantageous in this connection are inducible promoters such as the promoters described in EP 388 186 (benzyl sulfonamide inducible), Gatz et al., Plant J. 2, 397 (1992) (tetracyclin inducible), EP-A-0 335 528 (abscisic acid inducible) or WO 93/21334 (ethanol or cyclohexenol inducible). Additional useful plant promoters are the cytoplasmic FBPase promoter or ST-LSI promoter of potato (Stockhaus et al., EMBO J. 8, 2445 (1989)), the phosphorybosyl phyrophoshate amido transferase promoter of Glycine max (gene bank accession No. U87999) or the noden specific promoter described in EP-A-0 249 676. Additional particularly advantageous promoters are seed specific promoters which can be used for monocotyledones or dicotyledones and are described in U.S. Pat. No. 5,608,152 (napin promoter from rapeseed), WO 98/45461 (phaseolin promoter from Arabidopsis), U.S. Pat. No. 5,504,200 (phaseolin promoter from Phaseolus vulgaris), WO 91/13980 (Bce4 promoter from Brassica) and Baeumlein et al., Plant J., 2 (2), 233 (1992) (LEB4 promoter from leguminosa). Said promoters are useful in dicotyledones. The following promoters are useful for example in monocotyledones Ipt-2- or Ipt-1-promoter from barley (WO 95/15389 and WO 95/23230) or hordein promoter from barley. Other useful promoters are described in WO 99/16890. It is possible in principle to use all natural promoters with their regulatory sequences like those mentioned above for the novel process. It is also possible and advantageous in addition to use synthetic promoters.

[0811] The gene construct may also comprise further genes which are to be inserted into the organisms and which are for example involved in stress tolerance and yield increase. It is possible and advantageous to insert and express in host organisms regulatory genes such as genes for inducers, repressors or enzymes which intervene by their enzymatic activity in the regulation, or one or more or all genes of a biosynthetic pathway. These genes can be heterologous or homologous in origin. The inserted genes may have their own promoter or else be under the control of same promoter as the sequences of the nucleic acid of table I or their homologs.

[0812] The gene construct advantageously comprises, for expression of the other genes present, additionally 3′ and/or 5′ terminal regulatory sequences to enhance expression, which are selected for optimal expression depending on the selected host organism and gene or genes.

[0813] These regulatory sequences are intended to make specific expression of the genes and protein expression possible as mentioned above. This may mean, depending on the host organism, for example that the gene is expressed or over-expressed only after induction, or that it is immediately expressed and/or over-expressed.

[0814] The regulatory sequences or factors may moreover preferably have a beneficial effect on expression of the introduced genes, and thus increase it. It is possible in this way for the regulatory elements to be enhanced advantageously at the transcription level by using strong transcription signals such as promoters and/or enhancers. However, in addition, it is also possible to enhance translation by, for example, improving the stability of the mRNA.

[0815] Other preferred sequences for use in plant gene expression cassettes are targeting-sequences necessary to direct the gene product in its appropriate cell compartment (for review see Kermode, Crit. Rev. Plant Sci. 15 (4), 285 (1996) and references cited therein) such as the vacuole, the nucleus, all types of plastids like amyloplasts, chloroplasts, chromoplasts, the extracellular space, mitochondria, the endoplasmic reticulum, oil bodies, peroxisomes and other compartments of plant cells.

[0816] Plant gene expression can also be facilitated via an inducible promoter (for review see Gatz, Annu. Rev. Plant Physiol. Plant Mol. Biol. 48, 89 (1997)). Chemically inducible promoters are especially suitable if gene expression is wanted to occur in a time specific manner.

[0817] Table VI lists several examples of promoters that may be used to regulate transcription of the nucleic acid coding sequences of the present invention.

TABLE VI
Examples of tissue-specific and inducible promoters in plants

| Expression | Reference |
|---|---|
| Cor78 - Cold, drought, | Ishitani, et al., Plant Cell 9, 1935 (1997), |
| salt, ABA, wounding- | Yamaguchi-Shinozaki and Shinozaki, Plant |
| inducible | Cell 6, 251 (1994) |
| Rci2A - Cold, dehydration- | Capel et al., Plant Physiol 115, 569 (1997) |
| inducible | |
| Rd22 - Drought, salt | Yamaguchi-Shinozaki and Shinozaki, Mol. |
| | Gen. Genet 238, 17 (1993) |
| Cor15A - Cold, | Baker et al., Plant Mol. Biol. 24, 701 (1994) |
| dehydration, ABA | |
| GH3- Auxin inducible | Liu et al., Plant Cell 6, 645 (1994) |
| ARSK1-Root, salt inducible | Hwang and Goodman, Plant J. 8, 37 (1995) |
| PtxA - Root, salt inducible | GenBank accession X67427 |
| SbHRGP3 - Root specific | Ahn et al., Plant Cell 8, 1477 (1998). |
| KST1 - Guard cell specific | Plesch et al., Plant Journal. 28(4): 455- |
| | (2001) |
| KAT1 - Guard cell specific | Plesch et al., Gene 249, 83 (2000), |
| | Nakamura et al., Plant Physiol. 109, 371 |
| | (1995) |
| salicylic acid inducible | PCT Application No. WO 95/19443 |
| tetracycline inducible | Gatz et al. Plant J. 2, 397 (1992) |
| Ethanol inducible | PCT Application No. WO 93/21334 |
| Pathogen inducible PRP1 | Ward et al., Plant. Mol. Biol. 22, 361 - |
| | (1993) |
| Heat inducible hsp80 | U.S. Pat. No. 5,187,267 |
| Cold inducible alpha- | PCT Application No. WO 96/12814 |
| amylase | |
| Wound-inducible pinII | European Patent No. 375 091 |
| RD29A - salt-inducible | Yamaguchi-Shinozalei et al. Mol. Gen. |
| | Genet. 236, 331 (1993) |
| Plastid-specific viral | PCT Application No. WO 95/16783, PCT |
| RNA-polymerase | Application WO 97/06250 |

[0818] Other promoters, e.g. super-promoter (Ni et al., Plant Journal 7, 661 (1995)), Ubiquitin promoter (Callis et al., J. Biol. Chem., 265, 12486 (1990); U.S. Pat. No. 5,510,474; U.S. Pat. No. 6,020,190; Kawalleck et al., Plant. Molecular Biology, 21, 673 (1993)) or 34S promoter (GenBank Accession numbers M59930 and X16673) were similar useful for the present invention and are known to a person skilled in the art. Developmental stage-preferred promoters are preferentially expressed at certain stages of development. Tissue and organ preferred promoters include those that are preferentially expressed in certain tissues or or gans, such as leaves, roots, seeds, or xylem. Examples of tissue preferred and organ preferred promoters include, but are not limited to fruit-preferred, ovule-preferred, male tissue-preferred, seed-preferred, integument-preferred, tuber-preferred, stalk-preferred, pericarp-preferred, and leaf-preferred, stigma-preferred, pollen-preferred, anther-preferred, a petal-preferred, sepal-preferred, pedicel-preferred, silique-preferred, stem-preferred, root-preferred promoters, and the like. Seed preferred promoters are preferentially expressed during seed development and/or germination. For example, seed preferred promoters can be embryo-preferred, endosperm preferred, and seed coat-preferred. See Thompson et al., BioEssays 10, 108 (1989). Examples of seed preferred promoters include, but are not limited to, cellulose synthase (celA), Cim1, gamma-zein, globulin-1, maize 19 kD zein (cZ19B1), and the like.

[0819] Other promoters useful in the expression cassettes of the invention include, but are not limited to, the major chlorophyll a/b binding protein promoter, histone promoters, the Ap3 promoter, the β-conglycin promoter, the napin promoter, the soybean lectin promoter, the maize 15 kD zein promoter, the 22 kD zein promoter, the 27 kD zein promoter, the g-zein promoter, the waxy, shrunken 1, shrunken 2 and bronze promoters, the Zm13 promoter (U.S. Pat. No. 5,086,169), the maize polygalacturonase promoters (PG) (U.S. Patent Nos. 5,412,085 and 5,545,546), and the SGB6 promoter (U.S. Pat. No. 5,470,359), as well as synthetic or other natural promoters.

[0820] Additional flexibility in controlling heterologous gene expression in plants may be obtained by using DNA binding domains and response elements from heterologous sources (i.e., DNA binding domains from non-plant sources). An example of such a heterologous DNA binding domain is the LexA DNA binding domain (Brent and Ptashne, Cell 43, 729 (1985)).

[0821] The invention further provides a recombinant expression vector comprising a YRP DNA molecule of the invention cloned into the expression vector in an antisense orientation. That is, the DNA molecule is operatively linked to a regulatory sequence in a manner that allows for expression (by transcription of the DNA molecule) of an RNA molecule that is antisense to a YRP mRNA. Regulatory sequences operatively linked to a nucleic acid molecule cloned in the antisense orientation can be chosen which direct the continuous expression of the antisense RNA molecule in a variety of cell types. For instance, viral promoters and/or enhancers, or regulatory sequences can be chosen which direct constitutive, tissue specific, or cell type specific expression of antisense RNA. The antisense expression vector can be in the form of a recombinant plasmid, phagemid, or attenuated virus wherein antisense nucleic acids are produced under the control of a high efficiency regulatory region. The activity of the regulatory region can be determined by the cell type into which the vector is introduced. For a discussion of the regulation of gene expression using antisense genes, see Weintraub H. et al., Reviews—Trends in Genetics, Vol. 1(1), 23 (1986) and Mol et al., FEBS Letters 268, 427 (1990).

[0822] Another aspect of the invention pertains to isolated YRPs, and biologically active portions thereof. An “isolated” or “purified” polypeptide or biologically active portion thereof is free of some of the cellular material when produced by recombinant DNA techniques, or chemical precursors or other chemicals when chemically synthesized. The language “substantially free of cellular material” includes preparations of YRP in which the polypeptide is separated from some of the cellular components of the cells in which it is naturally or recombinantly produced. In one embodiment, the language “substantially free of cellular material” includes preparations of a YRP having less than about 30% (by dry weight) of non-YRP material (also referred to herein as a “contaminating polypeptide”), more preferably less than about 20% of non-YRP material, still more preferably less than about 10% of non-YRP material, and most preferably less than about 5% non-YRP material.

[0823] When the YRP or biologically active portion thereof is recombinantly produced, it is also preferably substantially free of culture medium, i.e., culture medium represents less than about 20%, more preferably less than about 10%, and most preferably less than about 5% of the volume of the polypeptide preparation. The language “substantially free of chemical precursors or other chemicals” includes preparations of YRP in which the polypeptide is separated from chemical precursors or other chemicals that are involved in the synthesis of the polypeptide. In one embodiment, the language “substantially free of chemical precursors or other chemicals” includes preparations of a YRP having less than about 30% (by dry weight) of chemical precursors or non-YRP chemicals, more preferably less than about 20% chemical precursors or non-YRP chemicals, still more preferably less than about 10% chemical precursors or non-YRP chemicals, and most preferably less than about 5% chemical precursors or non-YRP chemicals. In preferred embodiments, isolated polypeptides, or biologically active portions thereof, lack contaminating polypeptides from the same organism from which the YRP is derived. Typically, such polypeptides are produced by recombinant expression of, for example, a S. cerevisiae, E. coli or Brassica napus, Glycine max, Zea mays or Oryza sativa YRP, in an microorganism like S. cerevisiae, E. coli, C. glutamicum, ciliates, algae, fungi or plants, provided that the polypeptide is recombinant expressed in an organism being different to the original organism.

[0824] The nucleic acid molecules, polypeptides, polypeptide homologs, fusion polypeptides, primers, vectors, and host cells described herein can be used in one or more of the following methods: identification of S. cerevisiae, E. coli, Azotobacter vinelandii, Synechocystis sp. or Brassica napus, Glycine max, Zea mays, Populus trichocarpa or Oryza sativa and related organisms; mapping of genomes of organisms related to S. cerevisiae, E. coli; identification and localization of S. cerevisiae, E. coli, Azotobacter vinelandii, Synechocystis sp. or Brassica napus, Glycine max, Zea mays, Populus trichocarpa or Oryza sativa sequences of interest; evolutionary studies; determination of YRP regions required for function; modulation of a YRP activity; modulation of the metabolism of one or more cell functions; modulation of the transmembrane transport of one or more compounds; modulation of yield, e.g. of a yield-related trait, e.g. of tolerance to abiotic environmental stress, e.g. to low temperature tolerance, drought tolerance, water use efficiency, nutrient use efficiency and/or intrinsic yield; and modulation of expression of YRP nucleic acids.

[0825] The YRP nucleic acid molecules of the invention are also useful for evolutionary and polypeptide structural studies. The metabolic and transport processes in which the molecules of the invention participate are utilized by a wide variety of prokaryotic and eukaryotic cells; by comparing the sequences of the nucleic acid molecules of the present invention to those encoding similar enzymes from other organisms, the evolutionary relatedness of the organisms can be assessed. Similarly, such a comparison permits an assessment of which regions of the sequence are conserved and which are not, which may aid in determining those regions of the polypeptide that are essential for the functioning of the enzyme. This type of determination is of value for polypeptide engineering studies and may give an indication of what the polypeptide can tolerate in terms of mutagenesis without losing function.

[0826] Manipulation of the YRP nucleic acid molecules of the invention may result in the production of SRPs having functional differences from the wild-type YRPs. These polypeptides may be improved in efficiency or activity, may be present in greater numbers in the cell than is usual, or may be decreased in efficiency or activity.

[0827] There are a number of mechanisms by which the alteration of a YRP of the invention may directly affect yield, e.g. yield-related trait, for example tolerance to abiotic environmental stress, for example drought tolerance and/or low temperature tolerance, and/or nutrient use efficiency, intrinsic yield and/or another mentioned yield-related trait.

[0828] The effect of the genetic modification in plants regarding yield, e.g. yield-related trait, for example tolerance to abiotic environmental stress, for example drought tolerance and/or low temperature tolerance, and/or nutrient use efficiency, intrinsic yield and/or another mentioned yield-related trait can be assessed by growing the modified plant under less than suitable conditions and then analyzing the growth characteristics and/or metabolism of the plant. Such analysis techniques are well known to one skilled in the art, and include dry weight, fresh weight, polypeptide synthesis, carbohydrate synthesis, lipid synthesis, evapotranspiration rates, general plant and/or crop yield, flowering, reproduction, seed setting, root growth, respiration rates, photosynthesis rates, etc. (Applications of HPLC in Biochemistry in: Laboratory Techniques in Biochemistry and Molecular Biology, Vol. 17; Rehm et al., 1993 Biotechnology, Vol. 3, Chapter III: Product recovery and purification, page 469-714, VCH: Weinheim; Belter P. A. et al., 1988, Bioseparations: downstream processing for biotechnology, John Wiley and Sons; Kennedy J. F., and Cabral J. M. S., 1992, Recovery processes for biological materials, John Wiley and Sons; Shaeiwitz J. A. and Henry J. D., 1988, Biochemical separations, in Ulmann's Encyclopedia of Industrial Chemistry, Vol. B3, Chapter 11, page 1-27, VCH: Weinheim; and Dechow F. J., 1989, Separation and purification techniques in biotechnology, Noyes Publications).

[0829] For example, yeast expression vectors comprising the nucleic acids disclosed herein, or fragments thereof, can be constructed and transformed into S. cerevisiae using standard protocols. The resulting transgenic cells can then be assayed for generation or alteration of their yield, e.g. their yield-related traits, for example tolerance to abiotic environmental stress, for example drought tolerance and/or low temperature tolerance, and/or nutrient use efficiency, intrinsic yield and/or another mentioned yield-related trait. Similarly, plant expression vectors comprising the nucleic acids disclosed herein, or fragments thereof, can be constructed and transformed into an appropriate plant cell such as Arabidopsis, soy, rape, maize, cotton, rice, wheat, Medicago truncatula, etc., using standard protocols. The resulting transgenic cells and/or plants derived therefrom can then be assayed for generation or alteration of their yield, e.g. their yield-related traits, for example tolerance to abiotic environmental stress, for example drought tolerance and/or low temperature tolerance, and/or nutrient use efficiency, intrinsic yield and/or another mentioned yield-related trait.

[0830] The engineering of one or more genes according to table I and coding for the YRP of table II of the invention may also result in YRPs having altered activities which indirectly and/or directly impact the tolerance to abiotic environmental stress of algae, plants, ciliates, fungi, or other microorganisms like C. glutamicum.

[0831] Additionally, the sequences disclosed herein, or fragments thereof, can be used to generate knockout mutations in the genomes of various organisms, such as bacteria, mammalian cells, yeast cells, and plant cells (Girke, T., The Plant Journal 15, 39 (1998)). The resultant knockout cells can then be evaluated for their ability or capacity for increasing yield, e.g. increasing a yield-related trait, for example enhancing tolerance to abiotic environmental stress, for example increasing drought tolerance and/or low temperature tolerance and/or increasing nutrient use efficiency, increasing intrinsic yield and/or another mentioned yield-related trait, their response to various abiotic environmental stress conditions, and the effect on the phenotype and/or genotype of the mutation. For other methods of gene inactivation, see U.S. Pat. No. 6,004,804 and Puttaraju et al., Nature Biotechnology 17, 246 (1999).

[0832] The aforementioned mutagenesis strategies for YRPs resulting in increasing yield, e.g. increasing a yield-related trait, for example enhancing tolerance to abiotic environmental stress, for example increasing drought tolerance and/or low temperature tolerance and/or increasing nutrient use efficiency, increasing intrinsic yield and/or another mentioned yield-related trait are not meant to be limiting; variations on these strategies will be readily apparent to one skilled in the art. Using such strategies, and incorporating the mechanisms disclosed herein, the nucleic acid and polypeptide molecules of the invention may be utilized to generate algae, ciliates, plants, fungi, or other microorganisms like C. glutamicum expressing mutated YRP nucleic acid and polypeptide molecules such that the tolerance to abiotic environmental stress and/or yield is improved.

[0833] The present invention also provides antibodies that specifically bind to a YRP, or a portion thereof, as encoded by a nucleic acid described herein. Antibodies can be made by many well-known methods (see, e.g. Harlow and Lane, “Antibodies; A Laboratory Manual”, Cold Spring Harbor Laboratory, Cold Spring Harbor, N.Y., (1988)). Briefly, purified antigen can be injected into an animal in an amount and in intervals sufficient to elicit an immune response. Antibodies can either be purified directly, or spleen cells can be obtained from the animal. The cells can then fused with an immortal cell line and screened for antibody secretion. The antibodies can be used to screen nucleic acid clone libraries for cells secreting the antigen. Those positive clones can then be sequenced. See, for example, Kelly et al., Bio/Technology 10, 163 (1992); Bebbington et al., Bio/Technology 10, 169 (1992).

[0834] The phrases “selectively binds” and “specifically binds” with the polypeptide refer to a binding reaction that is determinative of the presence of the polypeptide in a heterogeneous population of polypeptides and other biologics. Thus, under designated immunoassay conditions, the specified antibodies bound to a particular polypeptide do not bind in a significant amount to other polypeptides present in the sample. Selective binding of an anti-body under such conditions may require an antibody that is selected for its specificity for a particular polypeptide. A variety of immunoassay formats may be used to select antibodies that selectively bind with a particular polypeptide. For example, solid-phase ELISA immunoassays are routinely used to select antibodies selectively immunoreactive with a polypeptide. See Harlow and Lane, “Antibodies, A Laboratory Manual,” Cold Spring Harbor Publications, New York, (1988), for a description of immunoassay formats and conditions that could be used to determine selective binding.

[0835] in some instances, it is desirable to prepare monoclonal antibodies from various hosts. A description of techniques for preparing such monoclonal antibodies may be found in Stites et al., eds., “Basic and Clinical Immunology,” (Lange Medical Publications, Los Altos, Calif., Fourth Edition) and references cited therein, and in Harlow and Lane, “Antibodies, A Laboratory Manual,” Cold Spring Harbor Publications, New York, (1988).

[0836] Gene expression in plants is regulated by the interaction of protein transcription factors with specific nucleotide sequences within the regulatory region of a gene. One example of transcription factors are polypeptides that contain zinc finger (ZF) motifs. Each ZF module is approximately 30 amino acids long folded around a zinc ion. The DNA recognition domain of a ZF protein is a α-helical structure that inserts into the major grove of the DNA double helix. The module contains three amino acids that bind to the DNA with each amino acid contacting a single base pair in the target DNA sequence. ZF motifs are arranged in a modular repeating fashion to form a set of fingers that recognize a contiguous DNA sequence. For example, a three-fingered ZF motif will recognize 9 bp of DNA. Hundreds of proteins have been shown to contain ZF motifs with between 2 and 37 ZF modules in each protein (Isalan M. et al., Biochemistry 37 (35), 12026 (1998); Moore M. et al., Proc. Natl. Acad. Sci. USA 98 (4), 1432 (2001) and Moore M. et al., Proc. Natl. Acad. Sci. USA 98 (4), 1437 (2001); US patents U.S. Pat. No. 6,007,988 and U.S. Pat. No. 6,013,453).

[0837] The regulatory region of a plant gene contains many short DNA sequences (cis-acting elements) that serve as recognition domains for transcription factors, including ZF proteins. Similar recognition domains in different genes allow the coordinate expression of several genes encoding enzymes in a metabolic pathway by common transcription factors. Variation in the recognition domains among members of a gene family facilitates differences in gene expression within the same gene family, for example, among tissues and stages of development and in response to environmental conditions.

[0838] Typical ZF proteins contain not only a DNA recognition domain but also a functional domain that enables the ZF protein to activate or repress transcription of a specific gene. Experimentally, an activation domain has been used to activate transcription of the target gene (U.S. Pat. No. 5,789,538 and patent application WO 95/19431), but it is also possible to link a transcription repressor domain to the ZF and thereby inhibit transcription (patent applications WO 00/47754 and WO 01/002019). It has been reported that an enzymatic function such as nucleic acid cleavage can be linked to the ZF (patent application WO 00/20622).

[0839] The invention provides a method that allows one skilled in the art to isolate the regulatory region of one or more YRP encoding genes from the genome of a plant cell and to design zinc finger transcription factors linked to a functional domain that will interact with the regulatory region of the gene. The interaction of the zinc finger protein with the plant gene can be designed in such a manner as to alter expression of the gene and preferably thereby to confer increasing yield, e.g. increasing a yield-related trait, for example enhancing tolerance to abiotic environmental stress, for example increasing drought tolerance and/or low temperature tolerance and/or increasing nutrient use efficiency, increasing intrinsic yield and/or another mentioned yield-related trait.

[0840] In particular, the invention provides a method of producing a transgenic plant with a YRP coding nucleic acid, wherein expression of the nucleic acid(s) in the plant results in increasing yield, e.g. increasing a yield-related trait, for example enhancing tolerance to abiotic environmental stress, for example increasing drought tolerance and/or low temperature tolerance and/or increasing nutrient use efficiency, increasing intrinsic yield and/or another mentioned yield-related trait as compared to a wild type plant comprising: (a) transforming a plant cell with an expression vector comprising a YRP encoding nucleic acid, and (b) generating from the plant cell a transgenic plant with enhanced tolerance to abiotic environmental stress and/or increased yield as compared to a wild type plant. For such plant transformation, binary vectors such as pBinAR can be used (Hofgen and Willmitzer, Plant Science 66, 221 (1990)). Moreover suitable binary vectors are for example pBIN19, pBI101, pGPTV or pPZP (Hajukiewicz P. et al., Plant Mol. Biol., 25, 989 (1994)).

[0841] Construction of the binary vectors can be performed by ligation of the cDNA into the T-DNA. 5′ to the cDNA a plant promoter activates transcription of the cDNA. A polyadenylation sequence is located 3′ to the cDNA. Tissue-specific expression can be achieved by using a tissue specific promoter as listed above. Also, any other promoter element can be used. For constitutive expression within the whole plant, the CaMV 35S promoter can be used. The expressed protein can be targeted to a cellular compartment using a signal peptide, for example for plastids, mitochondria or endoplasmic reticulum (Kermode, Crit. Rev. Plant Sci. 4 (15), 285 (1996)). The signal peptide is cloned 5′ in frame to the cDNA to archive subcellular localization of the fusion protein. One skilled in the art will recognize that the promoter used should be operatively linked to the nucleic acid such that the promoter causes transcription of the nucleic acid which results in the synthesis of a mRNA which encodes a polypeptide.

[0842] Alternate methods of transfection include the direct transfer of DNA into developing flowers via electroporation or Agrobacterium mediated gene transfer. Agrobacterium mediated plant transformation can be performed using for example the GV3101(pMP90) (Koncz and Schell, Mol. Gen. Genet. 204, 383 (1986)) or LBA4404 (Ooms et al., Plasmid, 7, 15 (1982); Hoekema et al., Nature, 303, 179 (1983)) Agrobacterium tumefaciens strain. Transformation can be performed by standard transformation and regeneration techniques (Deblaere et al., Nucl. Acids. Res. 13, 4777 (1994); Gelvin and Schilperoort, Plant Molecular Biology Manual, 2nd Ed.—Dordrecht:Kluwer Academic Publ., 1995.—in Sect., Ringbuc Zentrale Signatur: BT11-P ISBN 0-7923-2731-4; Glick B. R. and Thompson J. E., Methods in Plant Molecular Biology and Biotechnology, Boca Raton: CRC Press, 1993.—360 S., ISBN 0-8493-5164-2). For example, rapeseed can be transformed via cotyledon or hypocotyl transformation (Moloney et al., Plant Cell Reports 8, 238 (1989); De Block et al., Plant Physiol. 91, 694 (1989)). Use of antibiotics for Agrobacterium and plant selection depends on the binary vector and the Agrobacterium strain used for transformation. Rapeseed selection is normally performed using kanamycin as selectable plant marker. Agrobacterium mediated gene transfer to flax can be performed using, for example, a technique described by Mlynarova et al., Plant Cell Report 13, 282 (1994)). Additionally, transformation of soybean can be performed using for example a technique described in European Patent No. 424 047, U.S. Pat. No. 5,322,783, European Patent No. 397 687, U.S. Pat. No. 5,376,543 or U.S. Pat. No. 5,169,770. Transformation of maize can be achieved by particle bombardment, polyethylene glycol mediated DNA uptake or via the silicon carbide fiber technique (see, for example, Freeling and Walbot “The maize handbook” Springer Verlag: New York (1993) ISBN 3-540-97826-7). A specific example of maize transformation is found in U.S. Pat. No. 5,990,387 and a specific example of wheat transformation can be found in PCT Application No. WO 93/07256.

[0843] [Growing the modified plants under defined N-conditions, in an especial embodiment under abiotic environmental stress conditions, and then screening and analyzing the growth characteristics and/or metabolic activity assess the effect of the genetic modification in plants on increasing yield, e.g. increasing a yield-related trait, for example enhancing tolerance to abiotic environmental stress, for example increasing drought tolerance and/or low temperature tolerance and/or increasing nutrient use efficiency, increasing intrinsic yield and/or another mentioned yield-related trait. Such analysis techniques are well known to one skilled in the art. They include beneath to screening (Römpp Lexikon Biotechnologie, Stuttgart/New York: Georg Thieme Verlag 1992, “screening” p. 701) dry weight, fresh weight, protein synthesis, carbohydrate synthesis, lipid synthesis, evapotranspiration rates, general plant and/or crop yield, flowering, reproduction, seed setting, root growth, respiration rates, photosynthesis rates, etc. (Applications of HPLC in Biochemistry in: Laboratory Techniques in Biochemistry and Molecular Biology, Vol. 17; Rehm et al., 1993 Biotechnology, Vol. 3, Chapter III: Product recovery and purification, page 469-714, VCH: Weinheim; Belter, P. A. et al., 1988 Bioseparations: downstream processing for biotechnology, John Wiley and Sons; Kennedy J. F. and Cabral J. M. S., 1992 Recovery processes for biological materials, John Wiley and Sons; Shaeiwitz J. A. and Henry J. D., 1988 Biochemical separations, in: Ullmann's Encyclopedia of Industrial Chemistry, Vol. B3, Chapter 11, page 1-27, VCH: Weinheim; and Dechow F. J. (1989) Separation and purification techniques in biotechnology, Noyes Publications).

[0844] In one embodiment, the present invention relates to a method for the identification of a gene product conferring in increasing yield, e.g. increasing a yield-related trait, for example enhancing tolerance to abiotic environmental stress, for example increasing drought tolerance and/or low temperature tolerance and/or increasing nutrient use efficiency, increasing intrinsic yield and/or another mentioned yield-related trait as compared to a corresponding, e.g. non-transformed, wild type cell in a cell of an organism for example plant, comprising the following steps:
[0845] (a) contacting, e.g. hybridizing, some or all nucleic acid molecules of a sample, e.g. cells, tissues, plants or microorganisms or a nucleic acid library, which can contain a candidate gene encoding a gene product conferring increasing yield, e.g. increasing a yield-related trait, for example enhancing tolerance to abiotic environmental stress, for example increasing drought tolerance and/or low temperature tolerance and/or increasing nutrient use efficiency, increasing i, with a nucleic acid molecule as shown in column 5 or 7 of table I A or B, or a functional homologue thereof;
[0846] (b) identifying the nucleic acid molecules, which hybridize under relaxed stringent conditions with said nucleic acid molecule, in particular to the nucleic acid molecule sequence shown in column 5 or 7 of table I, and, optionally, isolating the full length cDNA clone or complete genomic clone;
[0847] (c) identifying the candidate nucleic acid molecules or a fragment thereof in host cells, preferably in a plant cell;
[0848] (d) increasing the expressing of the identified nucleic acid molecules in the host cells for which enhanced tolerance to abiotic environmental stress and/or increased yield are desired;
[0849] (e) assaying the level of enhanced tolerance to abiotic environmental stress and/or increased yield of the host cells; and
[0850] (f) identifying the nucleic acid molecule and its gene product which confers increasing yield, e.g. increasing a yield-related trait, for example enhancing tolerance to abiotic environmental stress, for example increasing drought tolerance and/or low temperature tolerance and/or increasing nutrient use efficiency, increasing intrinsic yield and/or another mentioned yield-related trait in the host cell compared to the wild type.

[0851] Relaxed hybridization conditions are: After standard hybridization procedures washing steps can be performed at low to medium stringency conditions usually with washing conditions of 40°-55° C. and salt conditions between 2×SSC and 0.2×SSC with 0.1% SDS in comparison to stringent washing conditions as e.g. 60° to 68° C. with 0.1% SDS. Further examples can be found in the references listed above for the stringend hybridization conditions. Usually washing steps are repeated with increasing stringency and length until a useful signal to noise ratio is detected and depend on many factors as the target, e.g. its purity, GC-content, size etc, the probe, e.g. its length, is it a RNA or a DNA probe, salt conditions, washing or hybridization temperature, washing or hybridization time etc.

[0852] In another embodiment, the present invention relates to a method for the identification of a gene product the expression of which confers increased yield, e.g. an increased yield-related trait, for example enhanced tolerance to abiotic environmental stress, for example an increased drought tolerance and/or low temperature tolerance and/or an increased nutrient use efficiency, intrinsic yield and/or another mentioned yield-related trait in a cell, comprising the following steps:
[0853] (a) identifying a nucleic acid molecule in an organism, which is at least 20%, preferably 25%, more preferably 30%, even more preferred are 35%. 40% or 50%, even more preferred are 60%, 70% or 80%, most preferred are 90% or 95% or more homolog to the nucleic acid molecule encoding a protein comprising the polypeptide molecule as shown in column 5 or 7 of table II, or comprising a consensus sequence or a polypeptide motif as shown in column 7 of table IV, or being encoded by a nucleic acid molecule comprising a polynucleotide as shown in column 5 or 7 of table I application no. 1, or a homologue thereof as described herein, for example via homology search in a data bank;
[0854] (b) enhancing the expression of the identified nucleic acid molecules in the host cells;
[0855] (c) assaying the level of enhancement of in increasing yield, e.g. increasing a yield-related trait, for example enhancing tolerance to abiotic environmental stress, for example increasing drought tolerance and/or low temperature tolerance and/or increasing nutrient use efficiency, increasing intrinsic yield and/or another mentioned yield-related trait in the host cells; and
[0856] (d) identifying the host cell, in which the enhanced expression confers in increasing yield, e.g. increasing a yield-related trait, for example enhancing tolerance to abiotic environmental stress, for example increasing drought tolerance and/or low temperature tolerance and/or increasing nutrient use efficiency, increasing intrinsic yield and/or another mentioned yield-related trait in the host cell compared to a wild type.

[0857] Further, the nucleic acid molecule disclosed herein, in particular the nucleic acid molecule shown column 5 or 7 of table I A or B, may be sufficiently homologous to the sequences of related species such that these nucleic acid molecules may serve as markers for the construction of a genomic map in related organism or for association mapping. Furthermore natural variation in the genomic regions corresponding to nucleic acids disclosed herein, in particular the nucleic acid molecule shown column 5 or 7 of table I A or B, or homologous thereof may lead to variation in the activity of the proteins disclosed herein, in particular the proteins comprising polypeptides as shown in column 5 or 7 of table II A or B, or comprising the consensus sequence or the polypeptide motif as shown in column 7 of table IV, and their homolgous and in consequence in a natural variation of an increased yield, e.g. an increased yield-related trait, for example enhanced tolerance to abiotic environmental stress, for example an increased drought tolerance and/or low temperature tolerance and/or an increased nutrient use efficiency, and/or another mentioned yield-related trait.

[0858] In consequence natural variation eventually also exists in form of more active allelic variants leading already to a relative increase in yield, e.g. an increase in an yield-related trait, for example enhanced tolerance to abiotic environmental stress, for example drought tolerance and/or low temperature tolerance and/or nutrient use efficiency, and/or another mentioned yield-related trait. Different variants of the nucleic acids molecule disclosed herein, in particular the nucleic acid comprising the nucleic acid molecule as shown column 5 or 7 of table I A or B, which corresponds to different levels of increased yield, e.g. different levels of increased yield-related trait, for example different enhancing tolerance to abiotic environmental stress, for example increased drought tolerance and/or low temperature tolerance and/or increasing nutrient use efficiency, increasing intrinsic yield and/or another mentioned yield-related trait, can be identified and used for marker assisted breeding for an increased yield, e.g. an increased yield-related trait, for example enhanced tolerance to abiotic environmental stress, for example an increased drought tolerance and/or low temperature tolerance and/or an increased nutrient use efficiency, and/or another mentioned yield-related trait.

[0859] Accordingly, the present invention relates to a method for breeding plants with an increased yield, e.g. an increased yield-related trait, for example enhanced tolerance to abiotic environmental stress, for example an increased drought tolerance and/or low temperature tolerance and/or an increased nutrient use efficiency, and/or anot, comprising
[0860] (a) selecting a first plant variety with an increased yield, e.g. an increased yield-related trait, for example enhanced tolerance to abiotic environmental stress, for example an increased drought tolerance and/or low temperature tolerance and/or an increased nutrient use efficiency, and/or anot based on increased expression of a nucleic acid of the invention as disclosed herein, in particular of a nucleic acid molecule comprising a nucleic acid molecule as shown in column 5 or 7 of table I A or B, or a polypeptide comprising a polypeptide as shown in column 5 or 7 of table II A or B, or comprising a consensus sequence or a polypeptide motif as shown in column 7 of table IV, or a homologue thereof as described herein;
[0861] (b) associating the level of increased yield, e.g. increased yield-related trait, for example enhanced tolerance to abiotic environmental stress, for example increased drought tolerance and/or low temperature tolerance and/or an increased nutrient use efficiency, and/or another mentioned yield-related trait with the expression level or the genomic structure of a gene encoding said polypeptide or said nucleic acid molecule;

[0862] (c) crossing the first plant variety with a second plant variety, which significantly differs in its level of increased yield, e.g. increased yield-related trait, for example enhanced tolerance to abiotic environmental stress, for example an increased drought tolerance and/or low temperature tolerance and/or an increased nutrient use efficiency, and/or another mentioned yield-related trait; and

[0863] (d) identifying, which of the offspring varieties has got increased levels of an increased yield, e.g. an increased yield-related trait, for example enhanced tolerance to abiotic environmental stress, for example an increased drought tolerance and/or low temperature tolerance and/or an increased nutrient use efficiency, and/or another mentioned yield-related trait by the expression level of said polypeptide or nucleic acid molecule or the genomic structure of the genes encoding said polypeptide or nucleic acid molecule of the invention.

[0864] In one embodiment, the expression level of the gene according to step (b) is increased.

[0865] Yet another embodiment of the invention relates to a process for the identification of a compound conferring an increased yield, e.g. an increased yield-related trait, for example enhanced tolerance to abiotic environmental stress, for example an increased drought tolerance and/or low temperature tolerance and/or an increased nutrient use efficiency, and/or another mentioned yield-related trait as compared to a corresponding, e.g. non-transformed, wild type plant cell, a plant or a part thereof in a plant cell, a plant or a part thereof, a plant or a part thereof, comprising the steps:
[0866] (a) culturing a plant cell; a plant or a part thereof maintaining a plant expressing the polypeptide as shown in column 5 or 7 of table II, or being encoded by a nucleic acid molecule comprising a polynucleotide as shown in column 5 or 7 of table I, or a homologue thereof as described herein or a polynucleotide encoding said polypeptide and conferring with increased yield, e.g. with an increased yield-related trait, for example enhanced tolerance to abiotic environmental stress, for example an increased drought tolerance and/or low temperature tolerance and/or an increased nutrient use efficiency, intrinsic yield and/or another mentioned yield-related trait as compared to a corresponding, e.g. non-transformed, wild type plant cell, a plant or a part thereof; a non-transformed wild type plant or a part thereof and providing a readout system capable of interacting with the polypeptide under suitable conditions which permit the interaction of the polypeptide with this readout system in the presence of a chemical compound or a sample comprising a plurality of chemical compounds and capable of providing a detectable signal in response to the binding of a chemical compound to said polypeptide under conditions which permit the expression of said readout system and of the protein as shown in column 5 or 7 of table II, or being encoded by a nucleic acid molecule comprising a polynucleotide as shown in column 5 or 7 of table I application no. 1, or a homologue thereof as described herein; and
[0867] (b) identifying if the chemical compound is an effective agonist by detecting the presence or absence or decrease or increase of a signal produced by said readout system.

[0868] Said compound may be chemically synthesized or microbiologically produced and/or comprised in, for example, samples, e.g., cell extracts from, e.g., plants, animals or microorganisms, e.g. pathogens. Furthermore, said compound(s) may be known in the art but hitherto not known to be capable of suppressing the polypeptide of the present invention. The reaction mixture may be a cell free extract or may comprise a cell or tissue culture. Suitable set ups for the process for identification of a compound of the invention are known to the person skilled in the art and are, for example, generally described in Alberts et al., Molecular Biology of the Cell, third edition (1994), in particular Chapter 17. The compounds may be, e.g., added to the reaction mixture, culture medium, injected into the cell or sprayed onto the plant.

[0869] If a sample containing a compound is identified in the process, then it is either possible to isolate the compound from the original sample identified as containing the compound capable of activating or enhancing or increasing the yield, e.g. yield-related trait, for example tolerance to abiotic environmental stress, for example drought tolerance and/or low temperature tolerance and/or increased nutrient use efficiency, and/or another mentioned yield-related trait as compared to a corresponding, e.g. non-transformed, wild type, or one can further subdivide the original sample, for example, if it consists of a plurality of different compounds, so as to reduce the number of different substances per sample and repeat the method with the subdivisions of the original sample. Depending on the complexity of the samples, the steps described above can be performed several times, preferably until the sample identified according to the said process only comprises a limited number of or only one substance(s). Preferably said sample comprises substances of similar chemical and/or physical properties, and most preferably said substances are identical. Preferably, the compound identified according to the described method above or its derivative is further formulated in a form suitable for the application in plant breeding or plant cell and tissue culture.

[0870] The compounds which can be tested and identified according to said process may be expression libraries, e.g., cDNA expression libraries, peptides, proteins, nucleic acids, antibodies, small organic compounds, hormones, peptidomimetics, PNAs or the like (Milner, Nature Medicine 1, 879 (1995); Hupp, Cell 83, 237 (1995); Gibbs, Cell 79, 193 (1994), and references cited supra). Said compounds can also be functional derivatives or analogues of known inhibitors or activators. Methods for the preparation of chemical derivatives and analogues are well known to those skilled in the art and are described in, for example, Beilstein, Handbook of Organic Chemistry, Springer, N.Y. Inc., 175 Fifth Avenue, New York, N.Y. 10010 U.S.A. and Organic Synthesis, Wiley, New York, USA. Furthermore, said derivatives and analogues can be tested for their effects according to methods known in the art. Furthermore, peptidomimetics and/or computer aided design of appropriate derivatives and analogues can be used, for example, according to the methods described above. The cell or tissue that may be employed in the process preferably is a host cell, plant cell or plant tissue of the invention described in the embodiments hereinbefore.

[0871] Thus, in a further embodiment the invention relates to a compound obtained or identified according to the method for identifying an agonist of the invention said compound being an antagonist of the polypeptide of the present invention.

[0872] Accordingly, in one embodiment, the present invention further relates to a compound identified by the method for identifying a compound of the present invention.

[0873] In one embodiment, the invention relates to an antibody specifically recognizing the compound or agonist of the present invention.

[0874] The invention also relates to a diagnostic composition comprising at least one of the aforementioned nucleic acid molecules, antisense nucleic acid molecule, RNAi, snRNA, dsRNA, siRNA, miRNA, ta-siRNA, cosuppression molecule, ribozyme, vectors, proteins, antibodies or compounds of the invention and optionally suitable means for detection.

[0875] The diagnostic composition of the present invention is suitable for the isolation of mRNA from a cell and contacting the mRNA so obtained with a probe comprising a nucleic acid probe as described above under hybridizing conditions, detecting the presence of mRNA hybridized to the probe, and thereby detecting the expression of the protein in the cell. Further methods of detecting the presence of a protein according to the present invention comprise immunotechniques well known in the art, for example enzyme linked immunoadsorbent assay. Furthermore, it is possible to use the nucleic acid molecules according to the invention as molecular markers or primers in plant breeding. Suitable means for detection are well known to a person skilled in the art, e.g. buffers and solutions for hydridization assays, e.g. the afore-mentioned solutions and buffers, further and means for Southern-, Western-, Northern—etc. —blots, as e.g. described in Sambrook et al. are known. In one embodiment diagnostic composition contain PCR primers designed to specifically detect the presence or the expression level of the nucleic acid molecule to be reduced in the process of the invention, e.g. of the nucleic acid molecule of the invention, or to discriminate between different variants or alleles of the nucleic acid molecule of the invention or which activity is to be reduced in the process of the invention.

[0876] In another embodiment, the present invention relates to a kit comprising the nucleic acid molecule, the vector, the host cell, the polypeptide, or the antisense, RNAi, snRNA, dsRNA, siRNA, miRNA, ta-siRNA, cosuppression molecule, or ribozyme molecule, or the viral nucleic acid molecule, the antibody, plant cell, the plant or plant tissue, the harvestable part, the propagation material and/or the compound and/or agonist identified according to the method of the invention.

[0877] The compounds of the kit of the present invention may be packaged in containers such as vials, optionally with/in buffers and/or solution. If appropriate, one or more of said components might be packaged in one and the same container. Additionally or alternatively, one or more of said components might be adsorbed to a solid support as, e.g. a nitrocellulose filter, a glass plate, a chip, or a nylon membrane or to the well of a micro titer-plate. The kit can be used for any of the herein described methods and embodiments, e.g. for the production of the host cells, transgenic plants, pharmaceutical compositions, detection of homologous sequences, identification of antagonists or agonists, as food or feed or as a supplement thereof or as supplement for the treating of plants, etc. Further, the kit can comprise instructions for the use of the kit for any of said embodiments. In one embodiment said kit comprises further a nucleic acid molecule encoding one or more of the aforementioned protein, and/or an antibody, a vector, a host cell, an antisense nucleic acid, a plant cell or plant tissue or a plant. In another embodiment said kit comprises PCR primers to detect and discriminate the nucleic acid molecule to be reduced in the process of the invention, e.g. of the nucleic acid molecule of the invention.

[0878] In a further embodiment, the present invention relates to a method for the production of an agricultural composition providing the nucleic acid molecule for the use according to the process of the invention, the nucleic acid molecule of the invention, the vector of the invention, the antisense, RNAi, snRNA, dsRNA, siRNA, miRNA, ta-siRNA, cosuppression molecule, ribozyme, or antibody of the invention, the viral nucleic acid molecule of the invention, or the polypeptide of the invention or comprising the steps of the method according to the invention for the identification of said compound or agonist; and formulating the nucleic acid molecule, the vector or the polypeptide of the invention or the agonist, or compound identified according to the methods or processes of the present invention or with use of the subject matters of the present invention in a form applicable as plant agricultural composition.

[0879] In another embodiment, the present invention relates to a method for the production of the plant culture composition comprising the steps of the method of the present invention; and formulating the compound identified in a form acceptable as agricultural composition.

[0880] Under “acceptable as agricultural composition” is understood, that such a composition is in agreement with the laws regulating the content of fungicides, plant nutrients, herbizides, etc. Preferably such a composition is without any harm for the protected plants and the animals (humans included) fed therewith.

[0881] Throughout this application, various publications are referenced. The disclosures of all of these publications and those references cited within those publications in their entireties are hereby incorporated by reference into this application in order to more fully describe the state of the art to which this invention pertains.

[0882] It should also be understood that the foregoing relates to preferred embodiments of the present invention and that numerous changes and variations may be made therein without departing from the scope of the invention. The invention is further illustrated by the following examples, which are not to be construed in any way as limiting. On the contrary, it is to be clearly understood that various other embodiments, modifications and equivalents thereof, which, after reading the description herein, may suggest themselves to those skilled in the art without departing from the spirit of the present invention and/or the scope of the claims.

[0883] In one embodiment, the increased yield results in an increase of the production of a specific ingredient including, without limitation, an enhanced and/or improved sugar content or sugar composition, an enhanced or improved starch content and/or starch composition, an enhanced and/or improved oil content and/or oil composition (such as enhanced seed oil content), an enhanced or improved protein content and/or protein composition (such as enhanced seed protein content), an enhanced and/or improved vitamin content and/or vitamin composition, or the like.

[0884] Further, in one embodiment, the method of the present invention comprises harvesting the plant or a part of the plant produced or planted and producing fuel with or from the harvested plant or part thereof. Further, in one embodiment, the method of the present invention comprises harvesting a plant part useful for starch isolation and isolating starch from this plant part, wherein the plant is plant useful for starch production, e.g. potato. Further, in one embodiment, the method of the present invention comprises harvesting a plant part useful for oil isolation and isolating oil from this plant part, wherein the plant is plant useful for oil production, e.g. oil seed rape or Canola, cotton, soy, or sunflower.

[0885] For example, in one embodiment, the oil content in the corn seed is increased. Thus, the present invention relates to the production of plants with increased oil content per acre (harvestable oil).

[0886] For example, in one embodiment, the oil content in the soy seed is increased. Thus, the present invention relates to the production of soy plants with increased oil content per acre (harvestable oil).

[0887] For example, in one embodiment, the oil content in the OSR seed is increased. Thus, the present invention relates to the production of OSR plants with increased oil content per acre (harvestable oil).

[0888] For example, the present invention relates to the production of cotton plants with increased oil content per acre (harvestable oil).

[0889] Incorporated by reference are further the following applications of which the present application claims the priority: EP patent application no. 09160788.7 filed on May 20, 2009, EP patent application no. 09156090.4 filed on Mar. 25, 2009; EP patent application no. 09153318.2 filed on Feb. 20, 2009, EP patent application no.: 08167446.7 filed on Oct. 23, 2008. U.S. patent application Ser. No. 61/162,747 filed in Mar. 24, 2009, EP patent application no. 09010851.5 filed on Aug. 25, 2009 and U.S. patent application U.S. Ser. No. 61/240,676 filed on Sep. 9, 2009.

[0890] The present invention is illustrated by the following examples which are not meant to be limiting.

[0891] For the purposes of the invention, as a rule the plural is intended to encompass the singular and vice versa.

### EXAMPLE 1

[0892] Engineering Arabidopsis plants with an increased yield, e.g. an increased yield-related trait, for example enhanced tolerance to abiotic environmental stress, for example an increased drought tolerance and/or low temperature tolerance and/or an increased nutrient use efficiency, and/or another mentioned yield-related trait by over-expressing YRP genes, e.g. expressing genes of the present invention.

[0893] Cloning of the sequences of the present invention as shown in table I, column 5 and 7, for the expression in plants.

[0894] Unless otherwise specified, standard methods as described in Sambrook et al., Molecular Cloning: A laboratory manual, Cold Spring Harbor 1989, Cold Spring Harbor Laboratory Press are used.

[0895] The inventive sequences as shown in table I, column 5, were amplified by PCR as described in the protocol of the Pfu Ultra, Pfu Turbo or Herculase DNA polymerase (Stratagene). The composition for the protocol of the Pfu Ultra, Pfu Turbo or Herculase DNA polymerase was as follows: 1×PCR buffer (Stratagene), 0.2 mM of each dNTP, 100 ng genomic DNA of Saccharomyces cerevisiae (strain S288C; Research Genetics, Inc., now Invitrogen), Escherichia coli (strain MG1655; E. coli Genetic Stock Center), Synechocystis sp. (strain PCC6803), Azotobacter vinelandii (strain N. R. Smith, 16), Thermus thermophilus (HB8) or 50 ng cDNA from various tissues and development stages of Arabidopsis thaliana (ecotype Columbia), Physcomitrella patens, Populus trichocarpa, Glycine max (variety Resnick), or Zea mays (variety B73, Mo17, A188), 50 μmol forward primer, 50 μmol reverse primer, with or without 1 M Betaine, 2.5 u Pfu Ultra, Pfu Turbo or Herculase DNA polymerase.

[0896] The amplification cycles were as follows:

[0897] 1 cycle of 2-3 minutes at 94-95° C., then 25-36 cycles with 30-60 seconds at 94-95° C., 30-45 seconds at 50-60° C. and 210-480 seconds at 72° C., followed by 1 cycle of 5-10 minutes at 72° C., then 4-16° C.—preferably for Saccharomyces cerevisiae, Escherichia coli, Synechocystis sp., Azotobacter vinelandii, Thermus thermophilus.

[0898] In case of Arabidopsis thaliana, Brassica napus, Glycine max, Oryza sativa, Physcomitrella patens, Populus trichocarpa, Zea mays the amplification cycles were as follows:

1 cycle with 30 seconds at 94° C., 30 seconds at 61° C., 15 minutes at 72° C., then 2 cycles with 30 seconds at 94° C., 30 seconds at 60° C., 15 minutes at 72° C., then 3 cycles with 30 seconds at 94° C., 30 seconds at 59° C., 15 minutes at 72° C., then 4 cycles with 30 seconds at 94° C., 30 seconds at 58° C., 15 minutes at 72° C., then 25 cycles with 30 seconds at 94° C., 30 seconds at 57° C., 15 minutes at 72° C., then 1 cycle with 10 minutes at 72° C., then finally 4-16° C.

[0899] RNA were generated with the RNeasy Plant Kit according to the standard protocol (Qiagen) and Superscript II Reverse Transkriptase was used to produce double stranded cDNA according to the standard protocol (Invitrogen).

[0900] ORF specific primer pairs for the genes to be expressed are shown in table III, column 7. The following adapter sequences were added to Saccharomyces cerevisiae ORF specific primers (see table III) for cloning purposes:

| i) foward primer: | |
|---|---|
| 5′-GGAATTCCAGCTGACCACC-3′ | SEQ ID NO: 1 |
| ii) reverse primer: | |
| 5′-GATCCCCGGGAATTGCCATG-3′ | SEQ ID NO: 2 |

[0901] These adaptor sequences allow cloning of the ORF into the various vectors containing the Resgen adaptors, see table column E of table VII.

[0902] The following adapter sequences were added to Saccharomyces cerevisiae, Escherichia coli, Synechocystis sp., Azotobacter vinelandii, Thermus thermophilus, Arabidopsis thaliana, Brassica napus, Glycine max, Oryza sativa , Physcomitrella patens, Populus trichocarpa, or Zea mays ORF specific primers for cloning purposes:

| iii) forward primer: | |
|---|---|
| 5′-TTGCTCTTCC-3′ | SEQ ID NO: 3 |
| iiii) reverse primer: | |
| 5′-TTGCTCTTCG-3′ | SEQ ID NO: 4 |

[0903] The adaptor sequences allow cloning of the ORF into the various vectors containing the Colic adaptors, see table column E of table VII.

[0904] Therefore for amplification and cloning of Saccharomyces cerevisiae SEQ ID NO: 2416, a primer consisting of the adaptor sequence i) and the ORF specific sequence SEQ ID NO: 2436 and a second primer consisting of the adaptor sequence ii) and the ORF specific sequence SEQ ID NO: 2437 were used.

[0905] For amplification and cloning of Escherichia coli SEQ ID NO: 63, a primer consisting of the adaptor sequence iii) and the ORF specific sequence SEQ ID NO: 73 and a second primer consisting of the adaptor sequence iiii) and the ORF specific sequence SEQ ID NO: 74 were used.

[0906] For amplification and cloning of Synechocystis sp. SEQ ID NO: 2146, a primer consisting of the adaptor sequence iii) and the ORF specific sequence SEQ ID NO: 2412 and a second primer consisting of the adaptor sequence iiii) and the ORF specific sequence SEQ ID NO: 2413 were used.

For amplification and cloning of Azotobacter vinelandii SEQ ID NO: 5807, a primer consisting of the adaptor sequence iii) and the ORF specific sequence SEQ ID NO: 6301 and a second primer consisting of the adaptor sequence iiii) and the ORF specific sequence SEQ ID NO: 6302 were used.

[0907] For amplification and cloning of Arabidopsis thaliana SEQ ID NO: 3769, a primer consisting of the adaptor sequence iii) and the ORF specific sequence SEQ ID NO: 4003 and a second primer consisting of the adaptor sequence iiii) and the ORF specific sequence SEQ ID NO: 4004 were used.

[0908] For amplification and cloning of Populus trichocarpa SEQ ID NO: 11061, a primer consisting of the adaptor sequence iii) and the ORF specific sequence SEQ ID NO: 11133 and a second primer consisting of the adaptor sequence iiii) and the ORF specific sequence SEQ ID NO: 11134 were used.

[0909] Following these examples every sequence disclosed in table I, preferably column 5, can be cloned by fusing the adaptor sequences to the respective specific primers sequences as disclosed in table III, column 7 using the respective vectors shown in Table VII.

TABLE VII
Overview of the different vectors used for cloning the ORFs and shows their SEQIDs
(column A), their vector names (column B), the promotors they contain for expression
of the ORFs (column C), the additional artificial targeting sequence column D), the adapter
sequence (column E), the expression type conferred by the promoter mentioned in column B
(column F) and the figure number (column G).

| A | | C | D | E | | |
|---|---|---|---|---|---|---|
| Seq- | B | Promoter | Target | Adapter | F | G |
| ID | Vector Name | Name | Sequence | Sequence | Expression Type | FIG. |
| 9 | pMTX0270p | Super | | Colic | non targeted constitutive | 6 |
| | | | | | expression preferentially | |
| | | | | | in green tissues | |
| 31 | pMTX155 | Big35S | | Resgen | non targeted constitutive | 7 |
| | | | | | expression preferentially | |
| | | | | | in green tissues | |
| 32 | VC- | Super | FNR | Resgen | plastidic targeted constitutive | 3 |
| | MME354- | | | | expression preferentially | |
| | 1QCZ | | | | in green tissues | |
| 34 | VC- | Super | IVD | Resgen | mitochondric targeted | 8 |
| | MME356- | | | | constitutive expression | |
| | 1QCZ | | | | preferentially in green | |
| | | | | | tissues | |
| 36 | VC- | USP | | Resgen | non targeted expression | 9 |
| | MME301- | | | | preferentially in seeds | |
| | 1QCZ | | | | | |
| 37 | pMTX461korrp | USP | FNR | Resgen | plastidic targeted expression | 10 |
| | | | | | preferentially | |
| | | | | | in seeds | |
| 39 | VC- | USP | IVD | Resgen | mitochondric targeted | 11 |
| | MME462- | | | | expression preferentially | |
| | 1QCZ | | | | in seeds | |
| 41 | VC- | Super | | Colic | non targeted constitutive | 1 |
| | MME220- | | | | expression preferentially | |
| | 1qcz | | | | in green tissues | |
| 42 | VC- | Super | FNR | Colic | plastidic targeted constitutive | 4 |
| | MME432- | | | | expression preferentially | |
| | 1qcz | | | | in green tissues | |
| 44 | VC- | Super | IVD | Colic | mitochondric targeted | 12 |
| | MME431- | | | | constitutive expression | |
| | 1qcz | | | | preferentially in green | |
| | | | | | tissues | |
| 46 | VC- | PcUbi | | Colic | non targeted constitutive | 2 |
| | MME221- | | | | expression preferentially | |
| | 1qcz | | | | in green tissues | |
| 47 | pMTX447korr | PcUbi | FNR | Colic | plastidic targeted constitutive | 13 |
| | | | | | expression preferentially | |
| | | | | | in green tissues | |
| 49 | VC- | PcUbi | IVD | Colic | mitochondric targeted | 14 |
| | MME445- | | | | constitutive expression | |
| | 1qcz | | | | preferentially in green | |
| | | | | | tissues | |
| 51 | VC- | USP | | Colic | non targeted expression | 15 |
| | MME289- | | | | preferentially in seeds | |
| | 1qcz | | | | | |
| 52 | VC- | USP | FNR | Colic | plastidic targeted expression | 15 |
| | MME464- | | | | preferentially | |
| | 1qcz | | | | in seeds | |
| 54 | VC- | USP | IVD | Colic | mitochondric targeted | 17 |
| | MME465- | | | | expression in preferentially | |
| | 1qcz | | | | seeds | |
| 56 | VC- | Super | | Resgen | non targeted constitutive | 5 |
| | MME489- | | | | expression preferentially | |
| | 1QCZ | | | | in green tissues | |

### EXAMPLE 1b

### Construction of Binary Vectors for Non-Targeted Expression of Proteins

[0910] “Non-targeted” expression in this context means, that no additional targeting sequence were added to the ORF to be expressed.

[0911] For non-targeted expression the binary vectors used for cloning were VCMME 220-1qcz SEQ ID NO 41 (FIG. 1), VC-MME221-1qcz SEQ ID NO 46 (FIG. 2), and VC-MME489-1QCZ SEQ ID NO: 56 (FIG. 5), respectively. The binary vectors used for cloning the targeting sequence were VC-MME489-1QCZ SEQ ID NO: 56 (FIG. 5) and pMTX0270p SEQ ID NO 9 (FIG. 6), respectively. Other useful binary vectors are known to the skilled worker; an overview of binary vectors and their use can be found in Hellens R., Mullineaux P. and Klee H., (Trends in Plant Science, 5 (10), 446 (2000)). Such vectors have to be equally equipped with appropriate promoters and targeting sequences.

### EXAMPLE 1c

[0912] Amplification of the plastidic targeting sequence of the gene FNR from Spinacia oleracea and construction of vector for plastid-targeted expression in preferential green tissues or preferential in seeds.

[0913] In order to amplify the targeting sequence of the FNR gene from S. oleracea, genomic DNA was extracted from leaves of 4 weeks old S. oleracea plants (DNeasy Plant Mini Kit, Qiagen, Hilden). The gDNA was used as the template for a PCR.

[0914] To enable cloning of the transit sequence into the vector VC-MME489-1QCZ and VC-MME301-1QCZ an EcoRI restriction enzyme recognition sequence was added to both the forward and reverse primers, whereas for cloning in the vectors pMTX0270p, VCMME 220-1qcz, VC-MME221-1qcz and VC-MME289-1qcz a PmeI restriction enzyme recognition sequence was added to the forward primer and a NcoI site was added to the reverse primer.

FNR5EcoResgen
SEQ ID NO: 5
ATA GAA TTC GCA TAA ACT TAT CTT CAT AGT TGC C
FNR3EcoResgen
SEQ ID NO: 6
ATA GAA TTC AGA GGC GAT CTG GGC CCT
FNR5PmeColic
SEQ ID NO: 7
ATA GTT TAA ACG CAT AAA CTT ATC TTC ATA GTT GCC
FNR3NcoColic
SEQ ID NO: 8
ATA CCA TGG AAG AGC AAG AGG CGA TCT GGG CCC T

[0915] The resulting sequence SEQ ID NO: 29 amplified from genomic spinach DNA, comprised a 5″UTR (bp 1-165), and the coding region (bp 166-273 and 351-419). The coding sequence is interrupted by an intronic sequence from by 274 to by 350:

(SEQ ID NO: 29)
gcataaacttatcttcatagttgccactccaatttgctccttgaatctc
ctccacccaatacataatccactcctccatcacccacttcactactaaa
tcaaacttaactctgtttttctctctcctcctttcatttcttattcttc
caatcatcgtactccgccatgaccaccgctgtcaccgccgctgtttctt
tcccctctaccaaaaccacctctctctccgcccgaagctcctccgtcat
ttcccctgacaaaatcagctacaaaaaggtgattcccaatttcactgtg
ttttttattaataatttgttattttgatgatgagatgattaatttgggt
gctgcaggttcctttgtactacaggaatgtatctgcaactgggaaaatg
ggacccatcagggcccagatcgcctct

[0916] The PCR fragment derived with the primers FNR5EcoResgen and FNR3EcoResgen was digested with EcoRI and ligated in the vectors VC-MME489-1QCZ and VC-MME301-1QCZ, that had also been digested with EcoRI. The correct orientation of the FNR targeting sequence was tested by sequencing. The vector generated in this ligation step were VC-MME354-1QCZ and pMTX461korrp, respectively.

[0917] The PCR fragment derived with the primers FNR5PmeColic and FNR3NcoColic was digested with PmeI and NcoI and ligated in the vectors pMTX0270p, VC-MME220-1qcz, VC-MME221-1qcz and VC-MME289-1qcz that had been digested with SmaI and NcoI. The vectors generated in this ligation step were VC-MME432-1qcz, VC-MME464-1qcz and pMTX447korr, respectively.

[0918] For plastidic-targeted constitutive expression in preferentially green tissues an artificial promoter A(ocs)₃AmasPmas promoter (Super promoter)) (Ni et al., Plant Journal 7, 661 (1995), WO 95/14098) was used in context of the vector VC-MME354-1 QCZ for ORFs from Saccharomyces cerevisiae and in context of the vector VC-MME432-1 qcz for ORFs from Escherichia coli, resulting in each case in an “in-frame” fusion of the FNR targeting sequence with the ORFs.

[0919] For plastidic-targeted expression in preferentially seeds the USP promoter (Bäumlein et al., Mol Gen Genet. 225(3):459-67 (1991)) was used in context of either the vector

[0920] pMTX461 korrp for ORFs from Saccharomyces cerevisiae or in context of the vector VC-MME464-1 qcz for ORFs from Escherichia coli, resulting in each case in an “inframe” fusion of the FNR targeting sequence with the ORFs.

[0921] For plastidic-targeted constitutive expression in preferentially green tissues and seeds the PcUbi promoter was used in context of the vector pMTX447korr for ORFs from Saccharomyces cerevisiae, Escherichia coli, Synechocystis sp., Azotobacter vinelandii, Thermus thermophilus, Arabidopsis thaliana, Brassica napus, Glycine max, Oryza sativa, Physcomitrella patens, or Zea mays, resulting in each case in an “in-frame” fusion of the FNR targeting sequence with the ORFs.

### EXAMPLE 1d)

### Construction of Binary Vectors for Mitochondric-Targeted Expression of Proteins

[0922] Amplification of the mitochondrial targeting sequence of the gene IVD from Arabidopsis thaliana and construction of vector for mitochondrial-targeted expression in preferential green tissues or preferential in seeds.

[0923] In order to amplify the targeting sequence of the IVD gene from A. thaliana, genomic DNA was extracted from leaves of A. thaliana plants (DNeasy Plant Mini Kit, Qiagen, Hilden). The gDNA was used as the template for a PCR.

[0924] To enable cloning of the transit sequence into the vectors VC-MME489-1 QCZ and VC-MME301-1QCZ an EcoRI restriction enzyme recognition sequence was added to both the forward and reverse primers, whereas for cloning in the vectors VC-MME220-1qcz, VC-MME221-1qcz and VC-MME289-1qcz a PmeI restriction enzyme recognition sequence was added to the forward primer and a NcoI site was added to the reverse primer.

IVD5EcoResgen
SEQ ID NO: 57
ATA GAA TTC ATG CAG AGG TTT TTC TCC GC
IVD3EcoResgen
SEQ ID NO: 58
ATAg AAT TCC gAA gAA CgA gAA gAg AAA g
IVD5PmeColic
SEQ ID NO: 59
ATA GTT TAA ACA TGC AGA GGT TTT TCT CCG C
IVD3NcoColic
SEQ ID NO: 60
ATA CCA TGG AAG AGC AAA GGA GAG ACG AAG AAC GAG

[0925] The resulting sequence (SEQ ID NO: 61) amplified from genomic A. thaliana DNA with IVD5EcoResgen and IVD3EcoResgen comprised 81 bp:

SEQ ID NO: 61
atgcagaggtttttctccgccagatcgattctcggttacgccgtcaaga
cgcggaggaggtctttctcttctcgttcttcg

The resulting sequence (SEQ ID NO: 62) amplified from genomic A. thaliana DNA with IVD5PmeColic and IVD3NcoColic comprised 89 bp:

SEQ ID NO: 62
atgcagaggtttttctccgccagatcgattctcggttacgccgtcaaga
cgcggaggaggtctttctcttctcgttcttcgtctctcct

[0926] The PCR fragment derived with the primers IVD5EcoResgen and IVD3EcoResgen was digested with EcoRI and ligated in the vectors VC-MME489-1QCZ and VC-MME301-1QCZ that had also been digested with EcoRI. The correct orientation of the IVD targeting sequence was tested by sequencing. The vectors generated in this ligation step were VC-MME356-1QCZ and VC-MME462-1QCZ, respectively.

The PCR fragment derived with the primers IVD5PmeColic and IVD3NcoColic was digested with PmeI and NcoI and ligated in the vectors VC-MME220-1qcz, VCMME 221-1qcz and VC-MME289-1qcz that had been digested with SmaI and NcoI. The vectors generated in this ligation step were VC-MME431-1qcz, VC-MME465-1qcz and VCMME 445-1 qcz, respectively.

[0927] For mitochondrial-targeted constitutive expression in preferentially green tissues an artificial promoter A(ocs)₃AmasPmas promoter (Super promoter) (Ni et al., Plant Journal 7, 661 (1995), WO 95/14098) was used in context of the vector VC-MME356-1 QCZ for ORFs from Saccharomyces cerevisiae and in context of the vector VC-MME431-1qcz for ORFs from Escherichia coli, resulting in each case in an “in-frame” fusion between the IVD sequence and the respective ORFs.

[0928] For mitochondrial-targeted constitutive expression in preferentially seeds the USP promoter (Bäumlein et al., Mol Gen Genet. 225(3):459-67 (1991)) was used in context of the vector VC-MME462-1 QCZ for ORFs from Saccharomyces cerevisiae and in context of the vector VC-MME465-1 qcz for ORFs from Escherichia coli, resulting in each case in an “in-frame” fusion between the IVD sequence and the respective ORFs.

[0929] For mitochondrial-targeted constitutive expression in preferentially green tissues and seeds the PcUbi promoter was used in context of the vector VC-MME445-1 qcz for ORFs from Saccharomyces cerevisiae, Escherichia coli, Synechocystis sp., Azotobacter vinelandii, Thermus thermophilus, Arabidopsis thaliana, Brassica napus, Glycine max, Oryza sativa, Physcomitrella patens, or Zea mays, resulting in each case in an “in-frame” fusion between the IVD sequence and the respective ORFs.

[0930] Other useful binary vectors are known to the skilled worker; an overview of binary vectors and their use can be found in Hellens R., Mullineaux P. and Klee H., (Trends in Plant Science, 5 (10), 446 (2000)). Such vectors have to be equally equipped with appropriate promoters and targeting sequences.

### EXAMPLE 1e

[0931] Cloning of inventive sequences as shown in table I, column 5 in the different expression vectors.

[0932] For cloning the ORFs of SEQ ID NO: 2416, from S. cerevisiae into vectors containing the Resgen adaptor sequence the respective vector DNA was treated with the restriction enzyme NcoI. For cloning of ORFs from Saccharomyces cerevisiae into vectors containing the Colic adaptor sequence, the respective vector DNA was treated with the restriction enzymes PacI and NcoI following the standard protocol (MBI Fermentas). For cloning of ORFs from Escherichia coli , Synechocystis sp., Azotobacter vinelandii, Thermus thermophilus, Arabidopsis thaliana, Brassica napus, Glycine max, Oryza sativa, Physcomitrella patens, Populus trichocarpa, or Zea mays the vector DNA was treated with the restriction enzymes PacI and NcoI following the standard protocol (MBI Fermentas). In all cases the reaction was stopped by inactivation at 70° C. for 20 minutes and purified over QIAquick or NucleoSpin Extract II columns following the standard protocol (Qiagen or Macherey-Nagel).

[0933] Then the PCR-product representing the amplified ORF with the respective adapter sequences and the vector DNA were treated with T4 DNA polymerase according to the standard protocol (MBI Fermentas) to produce single stranded overhangs with the parameters 1 unit T4 DNA polymerase at 37° C. for 2-10 minutes for the vector and 1-2 u T4 DNA polymerase at 15-17° C. for 10-60 minutes for the PCR product representing NO: 2416.

[0934] The reaction was stopped by addition of high-salt buffer and purified over QIAquick or NucleoSpin Extract II columns following the standard protocol (Qiagen or Macherey-Nagel).

[0935] According to this example the skilled person is able to clone all sequences disclosed in table I, preferably column 5.

[0936] Approximately 30-60 ng of prepared vector and a defined amount of prepared amplificate were mixed and hybridized at 65° C. for 15 minutes followed by 37° C. 0.1° C./1 seconds, followed by 37° C. 10 minutes, followed by 0.1° C./1 seconds, then 4-10° C.

[0937] The ligated constructs were transformed in the same reaction vessel by addition of competent E. coli cells (strain DH5alpha) and incubation for 20 minutes at 1° C. followed by a heat shock for 90 seconds at 42° C. and cooling to 1-4° C. Then, complete medium (SOC) was added and the mixture was incubated for 45 minutes at 37° C. The entire mixture was subsequently plated onto an agar plate with 0.05 mg/ml kanamycin and incubated overnight at 37° C.

[0938] The outcome of the cloning step was verified by amplification with the aid of primers which bind upstream and downstream of the integration site, thus allowing the amplification of the insertion. The amplifications were carried out as described in the protocol of Taq DNA polymerase (Gibco-BRL). The amplification cycles were as follows:

[0939] 1 cycle of 1-5 minutes at 94° C., followed by 35 cycles of in each case 15-60 seconds at 94° C., 15-60 seconds at 50-66° C. and 5-15 minutes at 72° C., followed by 1 cycle of 10 minutes at 72° C., then 4-16° C.

[0940] Several colonies were checked, but only one colony for which a PCR product of the expected size was detected was used in the following steps.

[0941] A portion of this positive colony was transferred into a reaction vessel filled with complete medium (LB) supplemented with kanamycin and incubated overnight at 37° C.

[0942] The plasmid preparation was carried out as specified in the Qiaprep or NucleoSpin Multi-96 Plus standard protocol (Qiagen or Macherey-Nagel).

[0943] Generation of transgenic plants which express SEQ ID NO: 2416 or any other sequence disclosed in table I, preferably column 5

[0944] 1-5 ng of the plasmid DNA isolated was transformed by electroporation or trans-formation into competent cells of Agrobacterium tumefaciens, of strain GV 3101 pMP90 (Koncz and Schell, Mol. Gen. Gent. 204, 383 (1986)). Thereafter, complete medium (YEP) was added and the mixture was transferred into a fresh reaction vessel for 3 hours at 28° C. Thereafter, all of the reaction mixture was plated onto YEP agar plates supplemented with the respective antibiotics, e.g. rifampicine (0.1 mg/ml), gentamycine (0.025 mg/ml and kanamycin (0.05 mg/ml) and incubated for 48 hours at 28° C.

[0945] The agrobacteria that contains the plasmid construct were then used for the transformation of plants.

[0946] A colony was picked from the agar plate with the aid of a pipette tip and taken up in 3 ml of liquid TB medium, which also contained suitable antibiotics as described above. The preculture was grown for 48 hours at 28° C. and 120 rpm.

[0947] 400 ml of LB medium containing the same antibiotics as above were used for the main culture. The preculture was transferred into the main culture. It was grown for 18 hours at 28° C. and 120 rpm. After centrifugation at 4 000 rpm, the pellet was resuspended in infiltration medium (MS medium, 10% sucrose).

[0948] In order to grow the plants for the transformation, dishes (Piki Saat 80, green, provided with a screen bottom, 30×20×4.5 cm, from Wiesauplast, Kunststofftechnik, Germany) were half-filled with a GS 90 substrate (standard soil, Werkverband E. V., Germany). The dishes were watered overnight with 0.05% Proplant solution (Chimac-Apriphar, Belgium). A. thaliana C24 seeds (Nottingham Arabidopsis Stock Centre, UK ; NASC Stock N906) were scattered over the dish, approximately 1 000 seeds per dish. The dishes were covered with a hood and placed in the stratification facility (8 h, 110 μmol/m²s¹, 22° C.; 16 h, dark, 6° C.). After 5 days, the dishes were placed into the short-day controlled environment chamber (8 h, 130 μmol/m²s¹, 22° C.; 16 h, dark, 20° C.), where they remained for approximately 10 days until the first true leaves had formed.

[0949] The seedlings were transferred into pots containing the same substrate (Teku pots, 7 cm, LC series, manufactured by Poppelmann GmbH & Co, Germany). Five plants were pricked out into each pot. The pots were then returned into the short-day controlled environment chamber for the plant to continue growing. After 10 days, the plants were transferred into the greenhouse cabinet (supplementary illumination, 16 h, 340 μE/m²s, 22° C.; 8 h, dark, 20° C.), where they were allowed to grow for further 17 days.

[0950] For the transformation, 6-week-old Arabidopsis plants, which had just started flowering were immersed for 10 seconds into the above-described agrobacterial suspension which had previously been treated with 10 μl Silwett L77 (Crompton S. A., Osi Specialties, Switzerland). The method in question is described by Clough J. C. and Bent A. F. (Plant J. 16, 735 (1998)).

[0951] The plants were subsequently placed for 18 hours into a humid chamber. Thereafter, the pots were returned to the greenhouse for the plants to continue growing. The plants remained in the greenhouse for another 10 weeks until the seeds were ready for harvesting.

[0952] Depending on the tolerance marker used for the selection of the transformed plants the harvested seeds were planted in the greenhouse and subjected to a spray selection or else first sterilized and then grown on agar plates supplemented with the respective selection agent. Since the vector contained the bar gene as the tolerance marker, plantlets were sprayed four times at an interval of 2 to 3 days with 0.02% BASTA® and transformed plants were allowed to set seeds.

The seeds of the transgenic A. thaliana plants were stored in the freezer (at −20° C.).

[0953] Plant Screening (Arabidopsis) for Growth Under Limited Nitrogen Supply

[0954] Three different procedures were used for screening:

Procedure 1). Per transgenic construct 4 independent transgenic lines (=events) were tested (22-28 plants per construct). Arabidopsis thaliana seeds were sown in pots containing a 1:1 (v:v) mixture of nutrient depleted soil (“Einheitserde Typ 0”, 30% clay, Tantau, Wansdorf Germany) and sand. Germination was induced by a four day period at 4° C., in the dark. Subsequently the plants were grown under standard growth conditions (photoperiod of 16 h light and 8 h dark, 20° C., 60% relative humidity, and a photon flux density of 200 μE). The plants were grown and cultured, inter alia they are watered every second day with a N-depleted nutrient solution. The N-depleted nutrient solution e.g. contained beneath water

| mineral nutrient | final concentration | |
|---|---|---|
| KCl | 3.00 | mM |
| MgSO₄ × 7 H₂O | 0.5 | mM |
| CaCl₂ × 6 H₂O | 1.5 | mM |
| K₂SO₄ | 1.5 | mM |
| NaH₂PO₄ | 1.5 | mM |
| Fe-EDTA | 40 | μM |
| H₃BO₃ | 25 | μM |
| MnSO₄ × H₂O | 1 | μM |
| ZnSO₄ × 7 H₂O | 0.5 | μM |
| Cu₂SO₄ × 5 H₂O | 0.3 | μM |
| Na₂MoO₄ × 2 H₂O | 0.05 | μM |

[0955] After 9 to 10 days the plants were individualized. After a total time of 28 to 31 days the plants were harvested and rated by the fresh weight of the aerial parts of the plants. The biomass increase has been measured as ratio of the fresh weight of the aerial parts of the respective transgenic plant and the non-transgenic wild type plant.

[0956] Procedure 2) Per transgenic construct 4-7 independent transgenic lines (=events) were tested (21-28 plants per construct). Arabidopsis thaliana seeds were sown in pots containing a 1:0.45:0.45 (v:v:v) mixture of nutrient depleted soil (“Einheitserde Typ 0”, 30% clay, Tantau, Wansdorf Germany), sand and vermiculite. Dependent on the nutrient-content of each batch of nutrient-depleted soil, macronutrients, except nitrogen, were added to the soil-mixture to obtain a nutrient-content in the pre-fertilized soil comparable to fully fertilized soil. Nitrogen was added to a content of about 15% compared to fully fertilized soil. The median concentration of macronutrients in fully fertilized and nitrogen-depleted soil is stated in the following table.

| | Median concentration of | Median concentration of |
|---|---|---|
| | macronutrients in nitro- | macronutrients in fully |
| Macronutrient | gen-depleted soil [mg/l] | fertilized soil [mg/l] |
| N (soluble) | 27.9 | 186.0 |
| P | 142.0 | 142.0 |
| K | 246.0 | 246.0 |
| Mg | 115.0 | 115.0 |

[0957] Germination was induced by a four day period at 4° C., in the dark. Subsequently the plants are grown under standard growth conditions (photoperiod of 16 h light and 8 h dark, 20° C., 60% relative humidity, and a photon flux density of 200 μE). The plants are grown and cultured, inter alia they are watered with de-ionized water every second day. After 9 to 10 days the plants are individualized. After a total time of 28 to 31 days the plants are harvested and rated by the fresh weight of the aerial parts of the plants. The biomass increase has been measured as ratio of the fresh weight of the aerial parts of the respective transgenic plant and the non-transgenic wild type plant.

[0958] —Procedure 3. For screening of transgenic plants a specific culture facility was used. For high-throughput purposes plants were screened for biomass production on agar plates with limited supply of nitrogen (adapted from Estelle and Somerville, 1987). This screening pipeline consists of two level. Transgenic lines were subjected to subsequent level if biomass production was significantly improved in comparison to wild type plants. With each level number of replicates and statistical stringency was increased.

[0959] For the sowing, the seeds were removed from the Eppendorf tubes with the aid of a toothpick and transferred onto the above-mentioned agar plates, with limited supply of nitrogen (0.05 mM KNO₃). In total, approximately 15-30 seeds were distributed horizontally on each plate (12×12 cm).

[0960] After the seeds had been sown, plates are subjected to stratification for 2-4 days in the dark at 4° C. After the stratification, the test plants were grown for 22 to 25 days at a 16-h-light, 8-h-dark rhythm at 20° C., an atmospheric humidity of 60% and a CO₂ concentration of approximately 400 ppm. The light sources used generate a light resembling the solar color spectrum with a light intensity of approximately 100 μE/m²s. After 10 to 11 days the plants are individualized. Improved growth under nitrogen limited conditions was assessed by biomass production of shoots and roots of transgenic plants in comparison to wild type control plants after 20-25 days growth.

[0961] Transgenic lines showing a significant improved biomass production in comparison to wild type plants are subjected to following experiment of the subsequent level on soil as described in procedure 1, however, 3-6 lines per construct were tested (up to 60 plants per construct).

[0962] Biomass production of transgenic Arabidopsis thaliana grown under limited nitrogen supply is shown in Table VIIIa: Biomass production was measured by weighing plant rosettes. Biomass increase was calculated as ratio of average weight for transgenic plants compared to average weight of wild type control plants from the same experiment. The mean biomass increase of transgenic constructs is given (significance value <0.3 and biomass increase >10% (ratio >1.1))

TABLE VIII-A
(nitrogen use efficency)

| SeqID | Target | Locus | Biomass Increase |
|---|---|---|---|
| 63 | cytoplasmic | B0567 | 1.79 |
| 81 | plastidic | B0953 | 1.22 |
| 138 | cytoplasmic | B1088 | 1.54 |
| 200 | cytoplasmic | B1289 | 1.25 |
| 289 | cytoplasmic | B2904 | 1.45 |
| 820 | plastidic | B3389 | 1.15 |
| 1295 | plastidic | B3526 | 1.29 |
| 1365 | cytoplasmic | B3611 | 1.46 |
| 1453 | plastidic | B3744 | 1.23 |
| 1557 | plastidic | B3869 | 1.25 |
| 1748 | cytoplasmic | B4266 | 1.79 |
| 2146 | cytoplasmic | SLL0892 | 1.72 |
| 2416 | cytoplasmic | YJL087C | 1.44 |
| 2450 | cytoplasmic | YJR053W | 1.14 |
| 2469 | cytoplasmic | YLR357W | 1.14 |
| 2501 | cytoplasmic | YLR361C | 1.48 |
| 2523 | cytoplasmic | YML086C | 1.46 |
| 2567 | cytoplasmic | YML091C | 1.29 |
| 2593 | cytoplasmic | YML096W | 1.46 |
| 2619 | cytoplasmic | YMR236W | 1.2 |
| 2678 | cytoplasmic | YNL137C | 1.23 |
| 2701 | cytoplasmic | YOR196C | 1.14 |
| 3310 | cytoplasmic | YPL119C | 1.11 |
| 3668 | cytoplasmic | B2617 | 1.11 |
| 3690 | cytoplasmic | SLL1280 | 1.10 |
| 4705 | cytoplasmic | YLR443W | 1.13 |
| 4717 | cytoplasmic | YOR259C | 1.14 |
| 3769 | cytoplasmic | AT2G19580.1 | 1.18 |
| 4009 | cytoplasmic | AT2G20370.1 | 1.31 |
| 4077 | cytoplasmic | AT4G33070.1 | 1.23 |
| 4337 | cytoplasmic | AT5G07340.1 | 1.22 |
| 4619 | cytoplasmic | AT5G62460.1 | 1.32 |
| 6310 | cytoplasmic | AVINDRAFT_2950 | 1.17 |
| 5807 | cytoplasmic | AVINDRAFT_0943 | 1.23 |
| 7540 | cytoplasmic | SLL1797 | 1.11 |
| 7974 | cytoplasmic | YIL043C | 1.51 |
| 7534 | plastidic | B2940 | 1.23 |
| 5257 | cytoplasmic | AT2G19490 | 1.11 |
| 6332 | cytoplasmic | B0951 | 1.11 |
| 7592 | cytoplasmic | YER023W | 1.16 |
| 6436 | plastidic | B1189 | 1.44 |
| 6723 | plastidic | B2592 | 1.13 |
| 8090 | cytoplasmic | AT1G07400.1 | 1.407 |
| 8673 | cytoplasmic | AT1G52560.1 | 1.446 |
| 8721 | cytoplasmic | AT1G63940.1 | 1.422 |
| 8912 | cytoplasmic | AT1G63940.2 | 1.248 |
| 9109 | cytoplasmic | AT3G46230.1 | 1.302 |
| 9727 | cytoplasmic | AT4G37930.1 | 1.348 |
| 10737 | cytoplasmic | AT5G06290.1 | 1.298 |
| 11061 | cytoplasmic | CDS5399 | 1.249 |
| 11138 | cytoplasmic | CDS5402 | 1.208 |
| 11305 | cytoplasmic | CDS5423 | 1.140 |
| 11496 | cytoplasmic | YKL130C | 1.232 |
| 11513 | cytoplasmic | YLR357W_2 | 1.14 |

[0963] Plant Screening for Growth Under Low Temperature Conditions

[0964] In a standard experiment soil was prepared as 3.5:1 (v/v) mixture of nutrient rich soil (GS90, Tantau, Wansdorf, Germany) and sand. Pots were filled with soil mixture and placed into trays. Water was added to the trays to let the soil mixture take up appropriate amount of water for the sowing procedure. The seeds for transgenic A. thaliana plants were sown in pots (6 cm diameter). Stratification was established for a period of 3-4 days in the dark at 4° C.-5° C. Germination of seeds and growth was initiated at a growth condition of 20° C., approx. 60% relative humidity, 16 h photoperiod and illumination with fluorescent light at 150-200 μmol/m2s. BASTA selection was done at day 9 after sowing by spraying pots with plantlets from the top. Therefore, a 0.07% (v/v) solution of BASTA concentrate (183 g/l glufosinate-ammonium) in tap water was sprayed. The wild-type control plants were sprayed with tap water only (instead of spraying with BASTA dissolved in tap water) but were otherwise treated identically. Transgenic events and wildtype control plants were distributed randomly over the chamber. Watering was carried out every two days after covers were removed from the trays. Plants were individualized 12-13 days after sowing by removing the surplus of seedlings leaving one seedling in a pot. Cold (chilling to 11° C.-12° C.) was applied 14-16 days after sowing until the end of the experiment. For measuring biomass performance, plant fresh weight was determined at harvest time (35-37 days after sowing) by cutting shoots and weighing them. Plants were in the stage prior to flowering and prior to growth of inflorescence when harvested. Transgenic plants were compared to the non-transgenic wild-type control plants harvested at the same day. Significance values for the statistical significance of the biomass changes were calculated by applying the ‘student's’ t test (parameters: two-sided, unequal variance).

Per transgenic construct 3-4 independent transgenic lines (=events) were tested (22-30 plants per construct) and biomass performance was evaluated as described above.

TABLE VIII-B
(LT): Biomass production of transgenic A. thaliana
after imposition of chilling stress.

| SeqID | Target | Locus | Biomass Increase |
|---|---|---|---|
| 2146 | cytoplasmic | SLL0892 | 1.145 |
| 2501 | plastidic | YLR361C | 1.108 |
| 2593 | cytoplasmic | YML096W | 1.266 |
| 3668 | cytoplasmic | B2617 | 1.105 |
| 3690 | cytoplasmic | SLL1280 | 1.080 |
| 4009 | cytoplasmic | AT2G20370.1 | 1.115 |
| 4077 | cytoplasmic | AT4G33070.1 | 1.154 |
| 4619 | cytoplasmic | AT5G62460.1 | 1.089 |
| 6310 | cytoplasmic | AVINDRAFT_2950 | 1.144 |
| 5807 | cytoplasmic | AVINDRAFT_0943 | 1.148 |
| 7540 | cytoplasmic | SLL1797 | 1.086 |
| 7974 | cytoplasmic | YIL043C | 1.076 |
| 7534 | plastidic | B2940 | 1.251 |
| 8090 | cytoplasmic | AT1G07400.1 | 1.151 |
| 8673 | cytoplasmic | AT1G52560.1 | 1.536 |
| 8721 | cytoplasmic | AT1G63940.1 | 1.192 |
| 9109 | cytoplasmic | AT3G46230.1 | 1.257 |
| 9727 | cytoplasmic | AT4G37930.1 | 1.176 |
| 11061 | cytoplasmic | CDS5399 | 1.376 |
| 11138 | cytoplasmic | CDS5402 | 1.359 |
| 11305 | cytoplasmic | CDS5423 | 1.147 |
| 11496 | cytoplasmic | YKL130C | 1.154 |

Biomass production was measured by weighing plant rosettes. Biomass increase was calculated as ratio of average weight of transgenic plants compared to average weight of wild-type control plants from the same experiment. The mean biomass increase of transgenic constructs is given (significance value <0.3 and biomass increase >5% (ratio >1.05)).

[0965] Plant screening for growth under cycling drought conditions

[0966] In a cycling drought assay repetitive stress can be applied to plants without leading to desiccation. In a standard experiment soil is prepared as 1:1 (v/v) mixture of nutrient rich soil (GS90, Tantau, Wansdorf, Germany) and quarz sand. Pots (6 cm diameter) are filled with this mixture and placed into trays. Water is added to the trays to let the soil mixture take up appropriate amount of water for the sowing procedure (day 1) and subsequently seeds of transgenic A. thaliana plants and their wild-type controls are sown in pots. Then the filled tray is covered with a transparent lid and transferred into a precooled (4° C.-5° C.) and darkened growth chamber. Stratification was established for a period of 3 days in the dark at 4° C.-5° C. or, alternatively, for 4 days in the dark at 4° C. Germination of seeds and growth is initiated at a growth condition of 20° C., 60% relative humidity, 16 h photoperiod and illumination with fluorescent light at approximately 200 μmol/m2s. Covers are removed 7-8 days after sowing. BASTA selection is done at day 10 or day 11 (9 or 10 days after sowing) by spraying pots with plantlets from the top. In the standard experiment, a 0.07% (v/v) solution of BASTA concentrate (183 g/l glufosinate-ammonium) in tap water could be sprayed once or, alternatively, a 0.02% (v/v) solution of BASTA could be sprayed three times. The wild-type control plants are sprayed with tap water only (instead of spraying with BASTA dissolved in tap water) but are otherwise treated identically. Plants are individualized 13-14 days after sowing by removing the surplus of seedlings and leaving one seedling in soil. Transgenic events and wild-type control plants are evenly distributed over the chamber.

[0967] The water supply throughout the experiment is limited and plants were subjected to cycles of drought and re-watering. Watering could be carried out at day 1 (before sowing), day 14 or day 15, day 21 or day 22, and, finally, day 27 or day 28. For measuring biomass production, plant fresh weight is determined one day after the final watering (day 28 or day 29) by cutting shoots and weighing them. Besides weighing, phenotypic information was added in case of plants that differ from the wild type control. Plants are in the stage prior to flowering and prior to growth of inflorescence when harvested. Significance values for the statistical significance of the biomass changes are calculated by applying the ‘student's’ t test (parameters: two-sided, unequal variance).

[0968] Up to five lines (events) per transgenic construct are tested in successive experimental levels (up to 4). Only constructs that display positive performance are subjected to the next experimental level. Usually in the first level five plants per construct are tested and in the subsequent levels 30-60 plants are tested.

[0969] Biomass performance can be evaluated as described above.

[0970] Biomass production can be measured by weighing plant rosettes. Biomass increase can be calculated as ratio of average weight for transgenic plants compared to average weight of wild type control plants from the same experiment. The mean biomass increase of transgenic constructs can be given, e.g. significance value <0.3 and biomass increase >5% (ratio >1.05)).

[0971] Plant screening for yield increase under standardised growth conditions

[0972] In this experiment, a plant screening for yield increase (in this case: biomass yield increase) under standardised growth conditions in the absence of substantial abiotic stress has been performed. In a standard experiment soil is prepared as 3.5:1 (v/v) mixture of nutrient rich soil (GS90, Tantau, Wansdorf, Germany) and quarz sand. Alternatively, plants were sown on nutrient rich soil (GS90, Tantau, Germany). Pots were filled with soil mixture and placed into trays. Water was added to the trays to let the soil mixture take up appropriate amount of water for the sowing procedure. The seeds for transgenic A. thaliana plants and their non-trangenic wild-type controls were sown in pots (6 cm diameter). Then the filled tray was covered with a transparent lid and transferred into a precooled (4° C.-5° C.) and darkened growth chamber. Stratification was established for a period of 3-4 days in the dark at 4° C.-5° C. Germination of seeds and growth was initiated at a growth condition of 20° C., 60% relative humidity, 16 h photoperiod and illumination with fluorescent light at approximately 170 μmol/m2s. Covers were removed 7-8 days after sowing. BASTA selection was done at day 10 or day 11 (9 or 10 days after sowing) by spraying pots with plantlets from the top. In the standard experiment, a 0.07% (v/v) solution of BASTA concentrate (183 g/l glufosinate-ammonium) in tap water was sprayed once or, alternatively, a 0.02% (v/v) solution of BASTA was sprayed three times. The wild-type control plants were sprayed with tap water only (instead of spraying with BASTA dissolved in tap water) but were otherwise treated identically. Plants were individualized 13-14 days after sowing by removing the surplus of seedlings and leaving one seedling in soil. Transgenic events and wild-type control plants were evenly distributed over the chamber.

[0973] Watering was carried out every two days after removing the covers in a standard experiment or, alternatively, every day. For measuring biomass performance, plant fresh weight was determined at harvest time (28-29 days after sowing) by cutting shoots and weighing them. Plants were in the stage prior to flowering and prior to growth of inflorescence when harvested. Transgenic plants were compared to the non-transgenic wild-type control plants harvested at the same day. Significance values for the statistical significance of the biomass changes were calculated by applying the ‘student's’ t test (parameters: two-sided, unequal variance).

[0974] Per transgenic construct up to 4 independent transgenic lines (=events) were tested and biomass performance was evaluated as described above.

TABLE VIII-D
(BM): Biomass production of transgenic A. thaliana
grown under standardised growth conditions.

| SeqID | Target | Locus | Biomass Increase |
|---|---|---|---|
| 63 | cytoplasmic | B0567 | 1.120 |
| 1295 | plastidic | B3526 | 1.208 |
| 1365 | cytoplasmic | B3611 | 1.208 |
| 2416 | cytoplasmic | YJL087C | 1.323 |
| 2501 | plastidic | YLR361C | 1.165 |
| 2593 | cytoplasmic | YML096W | 1.130 |
| 3769 | cytoplasmic | AT2G19580.1 | 1.232 |
| 4009 | cytoplasmic | AT2G20370.1 | 1.273 |
| 4337 | cytoplasmic | AT5G07340.1 | 1.223 |
| 4619 | cytoplasmic | AT5G62460.1 | 1.115 |
| 5807 | cytoplasmic | AVINDRAFT_0943 | 1.129 |
| 7974 | cytoplasmic | YIL043C | 1.365 |
| 7534 | plastidic | B2940 | 1.119 |
| 7592 | cytoplasmic | YER023W | 1.116 |
| 8090 | cytoplasmic | AT1G07400.1 | 1.069 |
| 8673 | cytoplasmic | AT1G52560.1 | 1.194 |
| 8721 | cytoplasmic | AT1G63940.1 | 1.080 |
| 8912 | cytoplasmic | AT1G63940.2 | 1.164 |
| 10737 | cytoplasmic | AT5G06290.1 | 1.059 |
| 11305 | cytoplasmic | CDS5423 | 1.074 |

Biomass production was measured by weighing plant rosettes. Biomass increase was calculated as ratio of average weight of transgenic plants compared to average weight of wild-type control plants from the same experiment. The mean biomass increase of transgenic constructs is given (significance value <0.3 and biomass increase >5% (ratio >1.05)).

[0975] Arabidopsis Mature Trait Screen (Total Seed Weight)

[0976] Seed Sources and Treatment

Following transformation into Arabidopsis, four events per construct are assigned for screening with barcodes printed for seed tubes. 40 seeds per event were then aliquoted into tubes for chlorine gas sterilization. Sterilized seeds were then plated onto 100×100×15 MM square plates containing 50 mL of growth media (½X MS Salts, 0.5 g/L MES, 1% Sucrose, pH to 5.7 with KOH and 6 g/L Phytoagar) in a laminar flow hood. After autoclaving, filtered sterilized solutions of 500 μg/ml Cefotaxmine (antibiotic), 2 μg/mL Benomyl (fungicide), and 10 μg/ml Phosphinothricin (PPT or Basta) were added to the media for trans-genic seeds but not to the media for control seeds lacking the BASTA resistance marker. The plates of seeds were incubated at 4° C. for four days for stratification. The plates were then transferred into a Percival Growth Chamber (22° C.; 16 hours light) for germination and growth for eight days. The seedlings segregating for the transgenic selection gene were actively growing and green as compared to those lacking the transgenic selection gene, which were small, white and non-viable indicating sensitivity to the selection herbicide. Healthy green seedlings were subsequently selected from plates regardless of size for transplanting.

[0977] Growth Conditions

[0978] Pots (“4.5 SVD Top International”, 4×4 inch square by 5 inch deep) were prepared one day prior to transplantation as follows. The pots were filled with turface and soil (Sungro Redi Earth mixed with 1% marathon pesticide) in a layered patterned of 250 mL soil, then 250 mL turface followed by more soil on the top of the pots. The pots were then saturated with water. Seedlings were carefully transplanted into the pots labeled with printed PlantID and the ID entered into a LIMS. After transplanting, the pots were soaked with a fertilizer solution consisting of 50 mL of 160 g/L Peters (20/20/20) fertilizer stock solution added to 16 L of water. Subsequently, plants were watered as needed to ensure no water stress throughout the assay.

[0979] Data Collection and Analysis

Flowering time was estimated by recording the day when bolting occurred for each pot as follows. Starting 20 days after transfer to Percival Growth Chamber, all plants were assessed for the presence of floral buds and at least one cm of stem growth for bolting. These data were collected daily for one week until all plants completed bolting. The data were collected using a Palm hand-held scanner and uploaded into LIMS. Flowering time was calculated by subtracting planting date of when the seedlings were transferred to Percival Growth Chamber from the recorded bolting date.
One week after flowering, a four inch aluminum ring support was added to each pot to help support the plants in an upright stature. By day 48 after transplantation, the entire above-soil portion of the plants was harvested into glassine envelopes. The harvested plants were dried for at least 2 weeks at room temperature. Harvested seeds were placed into pre-weighed Thermo Scientific 1.4 mL screen mate tubes that were held in 96-well snap racks. Each tube containing seeds were weighed using a Bohdan robot fitted with a Mettler Toledo balance to ascertain seed weight per plant.
Exactly 100 seeds from all events of a construct likely to be a lead based on differences of seed weight per plant between the transgenic lines and control were removed from each tube and placed into barcoded Falcon 6-well plate (35-3934) for imaging on the C1990 LemnaTec System. Image data were analyzed using customized software from Definiens.

[0980] Experimental Design and Analysis Information

Each construct was represented in an assay by four independent events with 10 plants per event that were distributed randomly across the growth environment. Non-transgenic plants and a transgenic pool of Arabidopsis thaliana C24 were included to assess experimental conditions as controls. For analytical purposes, the experimental average of all constructs tested together was also used as a control. All analyses were conducted at the construct level treating events as replicates. The mean of total seed weight per plant was calculated for the constructs and non-transgenic controls. A Student's T-test was performed to calculate the probability of a random difference between the means of each construct and the experimental average. Constructs showing a minimum of 10% or more positive difference between the construct mean and the greater value of either the experimental average or the non-transgenic control at a significance of P<0.05 were chosen as leads.

TABLE IX
Increased total seed weight production of transgenic
A. thaliana grown under standardised growth conditions.

| | | | Bolting | Total Seed Weight |
|---|---|---|---|---|
| SeqID | Target | Locus | Difference | per Plant Increase |
| 8673 | cytoplasmic | AT1G52560.1 | −2.9 | 1.236 |

The bolting difference compares the relative difference in days to bolting between the transgenic versus non-transgenic controls and shows that the transgenic lines are flowering earlier. Total seed weight per plant increase was calculated as ratio of average weight of total seeds produced by transgenic plants compared to average weight of total seeds produced by non-transgenic control plants from the same experiment (both data hava a significance value ≦0.05).

This gene product when expressed in plants generates this beneficial earlier flowering effect and improved total seed weight per plant, providing a very useful set of traits towards enhanced yields.

### EXAMPLE 2

[0981] Engineering Arabidopsis plants with an increased yield, e.g. an increased yield-related trait, for example enhanced tolerance to abiotic environmental stress, for example an increased drought tolerance and/or low temperature tolerance and/or an increased nutrient use efficiency, and/or another mentioned yield-related trait by over-expressing, the yield-increasing, e.g. YRP-protein, e.g. low temperature resistance and/or tolerance related protein encoding genes from Saccharomyces cerevisiae or Synechocystis or E. coli or Azotobacter vinelandii using tissue-specific and/or stress inducible promoters.

[0982] Transgenic Arabidopsis plants can be created as in example 1 to express the YRP, e.g. yield increasing, e.g. low temperature resistance and/or tolerance related protein encoding transgenes under the control of a tissue-specific and/or stress inducible promoter.

[0983] T2 generation plants are produced and are grown under stress conditions, preferably conditions of low temperature. Biomass production is determined after a total time of 29 to 30 days starting with the sowing. The transgenic Arabidopsis plant produces more biomass than non-transgenic control plants.

### EXAMPLE 3

[0984] Over-expression of the yield-increasing, e.g. YRP-protein, e.g. low temperature resistance and/or tolerance related protein, e.g. stress related genes from Saccharomyces cerevisiae or Synechocystis or E. coli or Azotobacter vinelandii provides tolerance of multiple abiotic stresses

[0985] Plants that exhibit tolerance of one abiotic stress often exhibit tolerance of another environmental stress. This phenomenon of cross-tolerance is not understood at a mechanistic level (McKersie and Leshem, 1994). Nonetheless, it is reasonable to expect that plants exhibiting enhanced tolerance to low temperature, e.g. chilling temperatures and/or freezing temperatures, due to the expression of a transgene might also exhibit tolerance to drought and/or salt and/or other abiotic stresses. In support of this hypothesis, the expression of several genes are up or down-regulated by multiple abiotic stress factors including low temperature, drought, salt, osmoticum, ABA, etc. (e.g. Hong et al., Plant Mol Biol 18, 663 (1992); Jagendorf and Takabe, Plant Physiol 127, 1827 (2001)); Mizoguchi et al., Proc Natl Acad Sci USA 93, 765 (1996); Zhu, Curr Opin Plant Biol 4, 401 (2001)).

[0986] To determine salt tolerance, seeds of A. thaliana can be sterilized (100% bleach, 0.1% TritonX for five minutes two times and rinsed five times with ddH2O). Seeds were plated on non-selection media (½ MS, 0.6% phytagar, 0.5 g/L MES, 1% sucrose, 2 μg/ml benamyl). Seeds are allowed to germinate for approximately ten days. At the 4-5 leaf stage, transgenic plants were potted into 5.5 cm diameter pots and allowed to grow (22° C., continuous light) for approximately seven days, watering as needed. To begin the assay, two liters of 100 mM NaCl and ⅛ MS are added to the tray under the pots. To the tray containing the control plants, three liters of ⅛ MS are added. The concentrations of NaCl supplementation are increased stepwise by 50 mM every 4 days up to 200 mM. After the salt treatment with 200 mM, fresh and survival and biomass production of the plants is determined.

[0987] To determine drought tolerance, seeds of the transgenic and low temperature lines can be germinated and grown for approximately 10 days to the 4-5 leaf stage as above. The plants are then transferred to drought conditions and can be grown through the flowering and seed set stages of development. Photosynthesis can be measured using chlorophyll fluorescence as an indicator of photosynthetic fitness and integrity of the photosystems. Survival and plant biomass production as an indicators for seed yield is determined.

[0988] Plants that have tolerance to salinity or low temperature have higher survival rates and biomass production including seed yield and dry matter production than susceptible plants.

### EXAMPLE 4

[0989] Engineering alfalfa plants with an increased yield, e.g. an increased yield-related trait, for example enhanced tolerance to abiotic environmental stress, for example an increased drought tolerance and/or low temperature tolerance and/or an increased nutrient use efficiency, and/or another mentioned yield-related trait, e.g. enhanced abiotic environmental stress tolerance and/or increased biomass production by over-expressing yield-increasing, e.g. YRP-protein-coding, e.g. low temperature resistance and/or tolerance related genes from Saccharomyces cerevisiae or Synechocystis, Azotobacter vinelandii or E. coli

[0990] A regenerating clone of alfalfa (Medicago sativa) can be transformed using state of the art methods (e.g. McKersie et al., Plant Physiol 119, 839 (1999)). Regeneration and transformation of alfalfa is genotype dependent and therefore a regenerating plant is required. Methods to obtain regenerating plants have been described. For example, these can be selected from the cultivar Rangelander (Agriculture Canada) or any other commercial alfalfa variety as described by Brown D. C. W. and Atanassov A. (Plant Cell Tissue Organ Culture 4, 111 (1985)). Alternatively, the RA3 variety (University of Wisconsin) is selected for use in tissue culture (Walker et al., Am. J. Bot. 65, 654 (1978)).

[0991] Petiole explants are cocultivated with an overnight culture of Agrobacterium tumefaciens C58C1 pMP90 (McKersie et al., Plant Physiol 119, 839 (1999)) or LBA4404 containing a binary vector. Many different binary vector systems have been described for plant transformation (e.g. An G., in Agrobacterium Protocols, Methods in Molecular Biology, Vol 44, pp 47-62, Gartland K. M. A. and Davey M. R. eds. Humana Press, Totowa, N.J.). Many are based on the vector pBIN19 described by Bevan (Nucleic Acid Research. 12, 8711 (1984)) that includes a plant gene expression cassette flanked by the left and right border sequences from the Ti plasmid of Agrobacterium tumefaciens. A plant gene expression cassette consists of at least two genes—a selection marker gene and a plant promoter regulating the transcription of the cDNA or genomic DNA of the trait gene. Various selection marker genes can be used including the Arabidopsis gene encoding a mutated acetohydroxy acid synthase (AHAS) enzyme (U.S. Pat. Nos. 5,7673,666 and 6,225,105). Similarly, various promoters can be used to regulate the trait gene that provides constitutive, developmental, tissue or environmental regulation of gene transcription. In this example, the 34S promoter (GenBank Accession numbers M59930 and X16673) is used to provide constitutive expression of the trait gene.

[0992] The explants are cocultivated for 3 days in the dark on SH induction medium containing 288 mg/L Pro, 53 mg/L thioproline, 4.35 g/L K₂SO₄, and 100 μm acetosyringinone. The explants are washed in half-strength Murashige-Skoog medium (Murashige and Skoog, 1962) and plated on the same SH induction medium without acetosyringinone but with a suitable selection agent and suitable antibiotic to inhibit Agrobacterium growth. After several weeks, somatic embryos are transferred to BOi2Y development medium containing no growth regulators, no antibiotics, and 50 g/L sucrose. Somatic embryos are subsequently germinated on half-strength Murashige-Skoog medium. Rooted seedlings are transplanted into pots and grown in a greenhouse.

[0993] T1 or T2 generation plants are produced and subjected to low temperature experiments, e.g. as described above in example 1. For the assessment of yield increase, e.g. tolerance to low temperature, biomass production, intrinsic yield and/or dry matter production and/or seed yield is compared to plants lacking the transgene, e.g. corresponding non-transgenic wild type plants.

### EXAMPLE 5

[0994] Engineering ryegrass plants with an increased yield, e.g. an increased yield-related trait, for example enhanced tolerance to abiotic environmental stress, for example an increased drought tolerance and/or low temperature tolerance and/or an increased nutrient use efficiency, and/or another mentioned yield-related trait e.g. enhanced stress tolerance, preferably tolerance to low temperature, and/or increased biomass production by over-expressing yield-increasing, e.g. YRP-protein-coding, e.g. tolerance to low temperature related genes from Saccharomyces cerevisiae or Synechocystis, Azotobacter vinelandii or E. coli

[0995] Seeds of several different ryegrass varieties may be used as explant sources for transformation, including the commercial variety Gunne available from Svalof Weibull seed company or the variety Affinity. Seeds are surface-sterilized sequentially with 1% Tween-20 for 1 minute, 100% bleach for 60 minutes, 3 rinses with 5 minutes each with deionized and distilled H₂O, and then germinated for 3-4 days on moist, sterile filter paper in the dark. Seedlings are further sterilized for 1 minute with 1% Tween-20, 5 minutes with 75% bleach, and rinsed 3 times with dd H₂O, 5 min each.

[0996] Surface-sterilized seeds are placed on the callus induction medium containing Murashige and Skoog basal salts and vitamins, 20 g/L sucrose, 150 mg/L asparagine, 500 mg/L casein hydrolysate, 3 g/L Phytagel, 10 mg/L BAP, and 5 mg/L dicamba. Plates are incubated in the dark at 25° C. for 4 weeks for seed germination and embryogenic callus induction.

[0997] After 4 weeks on the callus induction medium, the shoots and roots of the seedlings are trimmed away, the callus is transferred to fresh media, maintained in culture for another 4 weeks, and then transferred to MSO medium in light for 2 weeks. Several pieces of callus (11-17 weeks old) are either strained through a 10 mesh sieve and put onto callus induction medium, or cultured in 100 ml of liquid ryegrass callus induction media (same medium as for callus induction with agar) in a 250 ml flask. The flask is wrapped in foil and shaken at 175 rpm in the dark at 23° C. for 1 week. Sieving the liquid culture with a 40-mesh sieve collected the cells. The fraction collected on the sieve is plated and cultured on solid ryegrass callus induction medium for 1 week in the dark at 25° C. The callus is then transferred to and cultured on MS medium containing 1% sucrose for 2 weeks.

[0998] Transformation can be accomplished with either Agrobacterium of with particle bombardment methods. An expression vector is created containing a constitutive plant promoter and the cDNA of the gene in a pUC vector. The plasmid DNA is prepared from E. coli cells using with Qiagen kit according to manufacturer's instruction. Approximately 2 g of embryogenic callus is spread in the center of a sterile filter paper in a Petri dish. An aliquot of liquid MSO with 10 g/L sucrose is added to the filter paper. Gold particles (1.0 μm in size) are coated with plasmid DNA according to method of Sanford et al., 1993 and delivered to the embryogenic callus with the following parameters: 500 μg particles and 2 μg DNA per shot, 1300 psi and a target distance of 8.5 cm from stopping plate to plate of callus and 1 shot per plate of callus.

[0999] After the bombardment, calli are transferred back to the fresh callus development medium and maintained in the dark at room temperature for a 1-week period. The callus is then transferred to growth conditions in the light at 25° C. to initiate embryo differentiation with the appropriate selection agent, e.g. 250 nM Arsenal, 5 mg/L PPT or 50 mg/L kanamycin. Shoots resistant to the selection agent are appearing and once rotted are transferred to soil.

[1000] Samples of the primary transgenic plants (T0) are analyzed by PCR to confirm the presence of T-DNA. These results are confirmed by Southern hybridization in which DNA is electrophoresed on a 1% agarose gel and transferred to a positively charged nylon membrane (Roche Diagnostics). The PCR DIG Probe Synthesis Kit (Roche Diagnostics) is used to prepare a digoxigenin-labelled probe by PCR, and used as recommended by the manufacturer.

[1001] Transgenic T0 ryegrass plants can be propagated vegetatively by excising tillers. The transplanted tillers are maintained in the greenhouse for 2 months until well established. The shoots are defoliated and allowed to grow for 2 weeks.

[1002] T1 or T2 generation plants are produced and subjected to low temperature experiments, e.g. as described above in example 1. For the assessment of t yield increase, e.g. tolerance to low temperature, biomass production, intrinsic yield and/or dry matter production and/or seed yield is compared to plants lacking the transgene, e.g. corresponding non-transgenic wild type plants.

### EXAMPLE 6

[1003] Engineering soybean plants with an increased yield, e.g. an increased yield-related trait, for example enhanced tolerance to abiotic environmental stress, for example an increased drought tolerance and/or low temperature tolerance and/or an increased nutrient use efficiency, and/or another mentioned yield-related trait e.g. enhanced stress tolerance, preferably tolerance to low temperature, and/or increased biomass production by over-expressing yield-increasing, e.g. YRP-protein coding, e.g. tolerance to low temperature related genes from Saccharomyces cerevisiae or Synechocystis, Azotobacter vinelandii or E. coli

[1004] Soybean can be transformed according to the following modification of the method described in the Texas A&M patent U.S. Pat. No. 5,164,310. Several commercial soybean varieties are amenable to transformation by this method. The cultivar Jack (available from the Illinois Seed Foundation) is a commonly used for transformation. Seeds are sterilized by immersion in 70% (v/v) ethanol for 6 min and in 25% commercial bleach (NaOCl) supplemented with 0.1% (v/v) Tween for 20 min, followed by rinsing 4 times with sterile double distilled water. Seven-day seedlings are propagated by removing the radicle, hypocotyl and one cotyledon from each seedling. Then, the epicotyl with one cotyledon is transferred to fresh germination media in petri dishes and incubated at 25° C. under a 16-h photoperiod (approx. 100 μmol/m²s) for three weeks. Axillary nodes (approx. 4 mm in length) were cut from 3-4 week-old plants. Axillary nodes are excised and incubated in Agrobacterium LBA4404 culture.

[1005] Many different binary vector systems have been described for plant transformation (e.g. An G., in Agrobacterium Protocols. Methods in Molecular Biology Vol. 44, p. 47-62, Gartland K. M. A. and Davey M. R. eds. Humana Press, Totowa, N.J.). Many are based on the vector pBIN19 described by Bevan (Nucleic Acid Research. 12, 8711 (1984)) that includes a plant gene expression cassette flanked by the left and right border sequences from the Ti plasmid of Agrobacterium tumefaciens. A plant gene expression cassette consists of at least two genes—a selection marker gene and a plant promoter regulating the transcription of the cDNA or genomic DNA of the trait gene. Various selection marker genes can be used including the Arabidopsis gene encoding a mutated acetohydroxy acid synthase (AHAS) enzyme (U.S. Pat. Nos. 5,7673,666 and 6,225,105). Similarly, various promoters can be used to regulate the trait gene to provide constitutive, developmental, tissue or environmental regulation of gene transcription. In this example, the 34S promoter (GenBank Accession numbers M59930 and X16673) can be used to provide constitutive expression of the trait gene.

[1006] After the co-cultivation treatment, the explants are washed and transferred to selection media supplemented with 500 mg/L timentin. Shoots are excised and placed on a shoot elongation medium. Shoots longer than 1 cm are placed on rooting medium for two to four weeks prior to transplanting to soil.

[1007] The primary transgenic plants (T0) are analyzed by PCR to confirm the presence of T-DNA. These results are confirmed by Southern hybridization in which DNA is electrophoresed on a 1% agarose gel and transferred to a positively charged nylon membrane (Roche Diagnostics). The PCR DIG Probe Synthesis Kit (Roche Diagnostics) is used to prepare a digoxigenin-labelled probe by PCR, and used as recommended by the manufacturer.

[1008] T1 or T2 generation plants are produced and subjected to low temperature experiments, e.g. as described above in example 1. For the assessment of yield increase, e.g. tolerance to low temperature, biomass production, intrinsic yield and/or dry matter production and/or seed yield is compared to plants lacking the transgene, e.g. corresponding non-transgenic wild type plants.

### EXAMPLE 7

[1009] Engineering Rapeseed/Canola plants with an increased yield, e.g. an increased yield-related trait, for example enhanced tolerance to abiotic environmental stress, for example an increased drought tolerance and/or low temperature tolerance and/or an increased nutrient use efficiency, and/or another mentioned yield-related trait, e.g. enhanced stress tolerance, preferably tolerance to low temperature, and/or increased biomass production by over-expressing yield-increasing, e.g. YRP-protein coding, e.g. tolerance to low temperature related genes from Saccharomyces cerevisiae, Azotobacter vinelandii or Synechocystis or E. coli

[1010] Cotyledonary petioles and hypocotyls of 5-6 day-old young seedlings can be used as explants for tissue culture and transformed according to Babic et al. (Plant Cell Rep 17, 183 (1998)). The commercial cultivar Westar (Agriculture Canada) is the standard variety used for transformation, but other varieties can be used.

[1011] Agrobacterium tumefaciens LBA4404 containing a binary vector can be used for canola transformation. Many different binary vector systems have been described for plant transformation (e.g. An G., in Agrobacterium Protocols. Methods in Molecular Biology Vol. 44, p. 47-62, Gartland K. M. A. and Davey M. R. eds. Humana Press, Totowa, N.J.). Many are based on the vector pBIN19 described by Bevan (Nucleic Acid Research. 12, 8711 (1984)) that includes a plant gene expression cassette flanked by the left and right border sequences from the Ti plasmid of Agrobacterium tumefaciens. A plant gene expression cassette consists of at least two genes—a selection marker gene and a plant promoter regulating the transcription of the cDNA or genomic DNA of the trait gene. Various selection marker genes can be used including the Arabidopsis gene encoding a mutated acetohydroxy acid synthase (AHAS) enzyme (U.S. Pat. Nos. 5,7673,666 and 6,225,105). Similarly, various promoters can be used to regulate the trait gene to provide constitutive, developmental, tissue or environmental regulation of gene transcription. In this example, the 34S promoter (GenBank Accession numbers M59930 and X16673) can be used to provide constitutive expression of the trait gene.

[1012] Canola seeds are surface-sterilized in 70% ethanol for 2 min., and then in 30% Clorox with a drop of Tween-20 for 10 min, followed by three rinses with sterilized distilled water. Seeds are then germinated in vitro 5 days on half strength MS medium without hormones, 1% sucrose, 0.7% Phytagar at 23° C., 16 h light. The cotyledon petiole explants with the cotyledon attached are excised from the in vitro seedlings, and inoculated with Agrobacterium by dipping the cut end of the petiole explant into the bacterial suspension. The explants are then cultured for 2 days on MSBAP-3 medium containing 3 mg/L BAP, 3% sucrose, 0.7% Phytagar at 23° C., 16 h light. After two days of co-cultivation with Agrobacterium, the petiole explants are transferred to MSBAP-3 medium containing 3 mg/L BAP, cefotaxime, carbenicillin, or timentin (300 mg/L) for 7 days, and then cultured on MSBAP-3 medium with cefotaxime, carbenicillin, or timentin and selection agent until shoot regeneration. When the shoots were 5-10 mm in length, they are cut and transferred to shoot elongation medium (MSBAP-0.5, containing 0.5 mg/L BAP). Shoots of about 2 cm in length are transferred to the rooting medium (MSO) for root induction.

[1013] Samples of the primary transgenic plants (T0) are analyzed by PCR to confirm the presence of T-DNA. These results are confirmed by Southern hybridization in which DNA is electrophoresed on a 1% agarose gel and transferred to a positively charged nylon membrane (Roche Diagnostics). The PCR DIG Probe Synthesis Kit (Roche Diagnostics) is used to prepare a digoxigenin-labelled probe by PCR, and used as recommended by the manufacturer.

T1 or T2 generation plants are produced and subjected to low temperature experiments, e.g. as described above in example 1. For the assessment of yield increase, e.g. tolerance to low temperature, biomass production, intrinsic yield and/or dry matter production and/or seed yield is compared to plants lacking the transgene, e.g. corresponding non-transgenic wild type plants.

### EXAMPLE 8

[1014] Engineering corn plants with an increased yield, e.g. an increased yield-related trait, for example enhanced tolerance to abiotic environmental stress, for example an increased drought tolerance and/or low temperature tolerance and/or an increased nutrient use efficiency, and/or another mentioned yield-related trait, e.g. enhanced stress tolerance, preferably tolerance to low temperature, and/or increased biomass production by over-expressing yield-increasing, e.g. YRP-protein coding, e.g. low temperature resistance and/or tolerance related genes from Saccharomyces cerevisiae or Synechocystis, Azotobacter vinelandii or E. coli

[1015] Transformation of maize (Zea Mays L.) can be performed with a modification of the method described by Ishida et al. (Nature Biotech 14745 (1996)). Transformation is genotype-dependent in corn and only specific genotypes are amenable to transformation and regeneration. The inbred line A188 (University of Minnesota) or hybrids with A188 as a parent are good sources of donor material for transformation (Fromm et al. Biotech 8, 833 (1990)), but other genotypes can be used successfully as well. Ears are harvested from corn plants at approximately 11 days after pollination (DAP) when the length of immature embryos is about 1 to 1.2 mm. Immature embryos are co-cultivated with Agrobacterium tumefaciens that carry “super binary” vectors and transgenic plants are recovered through organogenesis. The super binary vector system of Japan Tobacco is described in WO patents WO 94/00977 and WO 95/06722. Vectors were constructed as described. Various selection marker genes can be used including the maize gene encoding a mutated acetohydroxy acid synthase (AHAS) enzyme (U.S. Pat. No. 6,025,541). Similarly, various promoters can be used to regulate the trait gene to provide constitutive, developmental, tissue or environmental regulation of gene transcription. In this example, the 34S promoter (GenBank Accession numbers M59930 and X16673) was used to provide constitutive expression of the trait gene.

[1016] Excised embryos are grown on callus induction medium, then maize regeneration medium, containing imidazolinone as a selection agent. The Petri plates are incubated in the light at 25° C. for 2-3 weeks, or until shoots develop. The green shoots are transferred from each embryo to maize rooting medium and incubated at 25° C. for 2-3 weeks, until roots develop. The rooted shoots are transplanted to soil in the greenhouse. T1 seeds are produced from plants that exhibit tolerance to the imidazolinone herbicides and which are PCR positive for the transgenes.

[1017] The T1 transgenic plants are then evaluated for their enhanced stress tolerance, like tolerance to low temperature, and/or increased biomass production according to the method described in Example 1. The T1 generation of single locus insertions of the T-DNA will segregate for the transgene in a 3:1 ratio. Those progeny containing one or two copies of the transgene are tolerant regarding the imidazolinone herbicide, and exhibit an increased yield, e.g. an increased yield-related trait, for example an enhancement of stress tolerance, like tolerance to low temperature, and/or increased biomass production than those progeny lacking the transgenes.

[1018] T1 or T2 generation plants are produced and subjected to low temperature experiments, e.g. as described above in example 2. For the assessment of yield increase, e.g. tolerance to low temperature, biomass production, intrinsic yield and/or dry matter production and/or seed yield is compared to e.g. corresponding non-transgenic wild type plants.

[1019] Homozygous T2 plants exhibited similar phenotypes. Hybrid plants (F1 progeny) of homozygous transgenic plants and non-transgenic plants also exhibited increased yield, e.g. an increased yield-related trait, for example enhanced tolerance to abiotic environmental stress, for example an increased drought tolerance and/or an increased nutrient use efficiency, and/or another mentioned yield-related trait, e.g. enhanced tolerance to low temperature.

### EXAMPLE 9

[1020] Engineering wheat plants with an increased yield, e.g. an increased yield-related trait, for example enhanced tolerance to abiotic environmental stress, for example an increased drought tolerance and/or low temperature tolerance and/or an increased nutrient use efficiency, and/or another mentioned yield-related trait, e.g. enhanced stress tolerance, preferably tolerance to low temperature, and/or increased biomass production by over-expressing yield-increasing, e.g. YRP-protein coding, e.g. low temperature resistance and/or tolerance related genes from Saccharomyces cerevisiae or Synechocystis or Azotobacter vinelandii or E. coli

[1021] Transformation of wheat can be performed with the method described by Ishida et al. (Nature Biotech. 14745 (1996)). The cultivar Bobwhite (available from CYMMIT, Mexico) is commonly used in transformation. Immature embryos are co-cultivated with Agrobacterium tumefaciens that carry “super binary” vectors, and transgenic plants are recovered through organogenesis. The super binary vector system of Japan Tobacco is described in WO patents WO 94/00977 and WO 95/06722. Vectors were constructed as described. Various selection marker genes can be used including the maize gene encoding a mutated acetohydroxy acid synthase (AHAS) enzyme (U.S. Pat. No. 6,025,541). Similarly, various promoters can be used to regulate the trait gene to provide constitutive, developmental, tissue or environmental regulation of gene transcription. In this example, the 34S promoter (GenBank Accession numbers M59930 and X16673) was used to provide constitutive expression of the trait gene.

[1022] After incubation with Agrobacterium, the embryos are grown on callus induction medium, then regeneration medium, containing imidazolinone as a selection agent. The Petri plates are incubated in the light at 25° C. for 2-3 weeks, or until shoots develop. The green shoots are transferred from each embryo to rooting medium and incubated at 25° C. for 2-3 weeks, until roots develop. The rooted shoots are transplanted to soil in the greenhouse. T1 seeds are produced from plants that exhibit tolerance to the imidazolinone herbicides and which are PCR positive for the transgenes.

[1023] The T1 transgenic plants are then evaluated for their enhanced tolerance to low temperature and/or increased biomass production according to the method described in example 2. The T1 generation of single locus insertions of the T-DNA will segregate for the transgene in a 3:1 ratio. Those progeny containing one or two copies of the transgene are tolerant regarding the imidazolinone herbicide, and exhibit an increased yield, e.g. an increased yield-related trait, for example an enhanced tolerance to low temperature and/or increased biomass production compared to the progeny lacking the transgenes. Homozygous T2 plants exhibit similar phenotypes.

[1024] For the assessment of yield increase, e.g. tolerance to low temperature, biomass production, intrinsic yield and/or dry matter production and/or seed yield can be compared to e.g. corresponding non-transgenic wild type plants. For example, plants with an increased yield, e.g. an increased yield-related trait, e.g. higher tolerance to stress, e.g. with an increased nutrient use efficiency or an increased intrinsic yield, and e.g. with higher tolerance to low temperature may show increased biomass production and/or dry matter production and/or seed yield under low temperature when compared to plants lacking the transgene, e.g. to corresponding non-transgenic wild type plants.

### EXAMPLE 10

### Identification of Identical and Heterologous Genes

[1025] Gene sequences can be used to identify identical or heterologous genes from cDNA or genomic libraries. Identical genes (e.g. full-length cDNA clones) can be isolated via nucleic acid hybridization using for example cDNA libraries. Depending on the abundance of the gene of interest, 100,000 up to 1,000,000 recombinant bacteriophages are plated and transferred to nylon membranes. After denaturation with alkali, DNA is immobilized on the membrane by e.g. UV cross linking. Hybridization is carried out at high stringency conditions. In aqueous solution, hybridization and washing is performed at an ionic strength of 1 M NaCl and a temperature of 68° C. Hybridization probes are generated by e.g. radioactive (32P) nick transcription labeling (High Prime, Roche, Mannheim, Germany). Signals are detected by autoradiography.

[1026] Partially identical or heterologous genes that are related but not identical can be identified in a manner analogous to the above-described procedure using low stringency hybridization and washing conditions. For aqueous hybridization, the ionic strength is normally kept at 1 M NaCl while the temperature is progressively lowered from 68 to 42° C.

[1027] Isolation of gene sequences with homology (or sequence identity/similarity) only in a distinct domain of (for example 10-20 amino acids) can be carried out by using synthetic radio labeled oligonucleotide probes. Radiolabeled oligonucleotides are prepared by phosphorylation of the 5-prime end of two complementary oligonucleotides with T4 polynucleotide kinase. The complementary oligonucleotides are annealed and ligated to form concatemers. The double stranded concatemers are than radiolabeled by, for example, nick transcription. Hybridization is normally performed at low stringency conditions using high oligonucleotide concentrations.

[1028] Oligonucleotide hybridization solution:

### 6×SSC

[1029] 0.01 M sodium phosphate

### 1 mM EDTA (pH 8)

### 0.5% SDS

[1030] 100 μg/ml denatured salmon sperm DNA
0.1% nonfat dried milk
During hybridization, temperature is lowered stepwise to 5-10° C. below the estimated oligonucleotide Tₘ or down to room temperature followed by washing steps and autoradiography. Washing is performed with low stringency such as 3 washing steps using 4×SSC. Further details are described by Sambrook J. et al., 1989, “Molecular Cloning: A Laboratory Manual,” Cold Spring Harbor Laboratory Press or Ausubel F. M. et al., 1994, “Current Protocols in Molecular Biology,” John Wiley & Sons.

### EXAMPLE 11

### Identification of Identical Genes by Screening Expression Libraries with Antibodies

[1031] c-DNA clones can be used to produce recombinant polypeptide for example in E. coli (e.g. Qiagen QIAexpress pQE system). Recombinant polypeptides are then normally affinity purified via Ni-NTA affinity chromatography (Qiagen). Recombinant polypeptides are then used to produce specific antibodies for example by using standard techniques for rabbit immunization. Antibodies are affinity purified using a Ni-NTA column saturated with the recombinant antigen as described by Gu et al., BioTechniques 17, 257 (1994). The anti-body can than be used to screen expression cDNA libraries to identify identical or heterologous genes via an immunological screening (Sambrook, J. et al., 1989, “Molecular Cloning: A Laboratory Manual,” Cold Spring Harbor Laboratory Press or Ausubel, F. M. et al., 1994, “Current Protocols in Molecular Biology”, John Wiley & Sons).

### EXAMPLE 12

### In Vivo Mutagenesis

[1032] In vivo mutagenesis of microorganisms can be performed by passage of plasmid (or other vector) DNA through E. coli or other microorganisms (e.g. Bacillus spp. or yeasts such as S. cerevisiae) which are impaired in their capabilities to maintain the integrity of their genetic information. Typical mutator strains have mutations in the genes for the DNA repair system (e.g., mutHLS, mutD, mutT, etc.; for reference, see Rupp W. D., DNA repair mechanisms, in: E. coli and Salmonella, p. 2277-2294, ASM, 1996, Washington.) Such strains are well known to those skilled in the art. The use of such strains is illustrated, for example, in Greener A. and Callahan M., Strategies 7, 32 (1994). Transfer of mutated DNA molecules into plants is preferably done after selection and testing in microorganisms. Transgenic plants are generated according to various examples within the exemplification of this document.

### EXAMPLE 13

[1033] Engineering Arabidopsis plants with increased yield, e.g. an increased yield-related trait, for example an enhanced stress tolerance, preferably tolerance to low temperature, and/or increased biomass production by over-expressing YRP encoding genes for example from A. thaliana, Brassica napus, Glycine max, Zea mays, Populus trichocarpa or Oryza sativa using tissue-specific or stress-inducible promoters.

[1034] Transgenic Arabidopsis plants over-expressing YRP genes, e.g. low temperature resistance and/or tolerance related protein encoding genes, from for example A. thaliana, Brassica napus, Glycine max, Zea mays, Populus trichocarpa and Oryza sativa can be created as described in example 1 to express the YRP encoding transgenes under the control of a tissue-specific or stress-inducible promoter. T2 generation plants are produced and grown under stress or non-stress conditions, e.g. low temperature conditions. Plants with an increased yield, e.g. an increased yield-related trait, e.g. higher tolerance to stress, e.g. low temperature, or with an increased nutrient use efficiency or an increased intrinsic yield, show increased biomass production and/or dry matter production and/or seed yield under low temperature conditions when compared to plants lacking the transgene, e.g. to corresponding non-transgenic wild type plants.

### EXAMPLE 14

[1035] Engineering alfalfa plants with increased yield, e.g. an increased yield-related trait, for example an enhanced stress tolerance, preferably tolerance to low temperature, and/or increased biomass production by over-expressing YRP genes, e.g. low temperature resistance and/or tolerance related genes for example from A. thaliana, Brassica napus, Glycine max, Zea mays, Populus trichocarpa or Oryza sativa for example

[1036] A regenerating clone of alfalfa (Medicago sativa) can be transformed using the method of McKersie et al., (Plant Physiol. 119, 839 (1999)). Regeneration and transformation of alfalfa is genotype dependent and therefore a regenerating plant is required. Methods to obtain regenerating plants have been described. For example, these can be selected from the cultivar Rangelander (Agriculture Canada) or any other commercial alfalfa variety as described by Brown and Atanassov (Plant Cell Tissue Organ Culture 4, 111 (1985)). Alternatively, the RA3 variety (University of Wisconsin) has been selected for use in tissue culture (Walker et al., Am. J. Bot. 65, 54 (1978)).

[1037] Petiole explants are cocultivated with an overnight culture of Agrobacterium tumefaciens C58C1 pMP90 (McKersie et al., Plant Physiol 119, 839 (1999)) or LBA4404 containing a binary vector. Many different binary vector systems have been described for plant transformation (e.g. An G., in Agrobacterium Protocols. Methods in Molecular Biology Vol. 44, p. 47-62, Gartland K. M. A. and Davey M. R. eds. Humana Press, Totowa, N.J.). Many are based on the vector pBIN19 described by Bevan (Nucleic Acid Research. 12, 8711 (1984)) that includes a plant gene expression cassette flanked by the left and right border sequences from the Ti plasmid of Agrobacterium tumefaciens. A plant gene expression cassette consists of at least two genes—a selection marker gene and a plant promoter regulating the transcription of the cDNA or genomic DNA of the trait gene. Various selection marker genes can be used including the Arabidopsis gene encoding a mutated acetohydroxy acid synthase (AHAS) enzyme (U.S. Pat. Nos. 5,7673,666 and 6,225,105). Similarly, various promoters can be used to regulate the trait gene that provides constitutive, developmental, tissue or environmental regulation of gene transcription. In this example, the 34S promoter (GenBank Accession numbers M59930 and X16673) was used to provide constitutive expression of the trait gene.

[1038] The explants are cocultivated for 3 days in the dark on SH induction medium containing 288 mg/L Pro, 53 mg/L thioproline, 4.35 g/L K₂SO₄, and 100 μm acetosyringinone. The explants were washed in half-strength Murashige-Skoog medium (Murashige and Skoog, 1962) and plated on the same SH induction medium without acetosyringinone but with a suitable selection agent and suitable antibiotic to inhibit Agrobacterium growth.

[1039] After several weeks, somatic embryos are transferred to BOi2Y development medium containing no growth regulators, no antibiotics, and 50 g/L sucrose. Somatic embryos are subsequently germinated on half-strength Murashige-Skoog medium. Rooted seedlings are transplanted into pots and grown in a greenhouse.

[1040] The T0 transgenic plants are propagated by node cuttings and rooted in Turface growth medium. T1 or T2 generation plants are produced and subjected to experiments comprising stress or non-stress conditions, e.g. low temperature conditions as described in previous examples.

[1041] For the assessment of yield increase, e.g. tolerance to low temperature, biomass production, intrinsic yield and/or dry matter production and/or seed yield is compared to e.g. corresponding non-transgenic wild type plants.

[1042] For example, plants with an increased yield, e.g. an increased yield-related trait, e.g. higher tolerance to stress, e.g. with an increased nutrient use efficiency or an increased intrinsic yield, and e.g. with higher tolerance to low temperature may show increased biomass production and/or dry matter production and/or seed yield under low temperature when compared to plants lacking the transgene, e.g. to corresponding non-transgenic wild type plants.

### EXAMPLE 15

[1043] Engineering ryegrass plants with increased yield, e.g. an increased yield-related trait, for example an enhanced stress tolerance, preferably tolerance to low temperature, and/or increased biomass production by over-expressing YRP genes, e.g. low temperature resistance and/or tolerance related genes for example from A. thaliana, Brassica napus, Glycine max, Zea mays, Populus trichocarpa or Oryza sativa

[1044] Seeds of several different ryegrass varieties may be used as explant sources for transformation, including the commercial variety Gunne available from Svalof Weibull seed company or the variety Affinity. Seeds are surface-sterilized sequentially with 1% Tween-20 for 1 minute, 100% bleach for 60 minutes, 3 rinses of 5 minutes each with deionized and distilled H₂O, and then germinated for 3-4 days on moist, sterile filter paper in the dark. Seedlings are further sterilized for 1 minute with 1% Tween-20, 5 minutes with 75% bleach, and rinsed 3 times with double destilled H₂O, 5 min each.

[1045] Surface-sterilized seeds are placed on the callus induction medium containing Murashige and Skoog basal salts and vitamins, 20 g/L sucrose, 150 mg/L asparagine, 500 mg/L casein hydrolysate, 3 g/L Phytagel, 10 mg/L BAP, and 5 mg/L dicamba. Plates are incubated in the dark at 25° C. for 4 weeks for seed germination and embryogenic callus induction.

[1046] After 4 weeks on the callus induction medium, the shoots and roots of the seedlings are trimmed away, the callus is transferred to fresh media, maintained in culture for another 4 weeks, and then transferred to MSO medium in light for 2 weeks. Several pieces of callus (11-17 weeks old) are either strained through a 10 mesh sieve and put onto callus induction medium, or cultured in 100 ml of liquid ryegrass callus induction media (same medium as for callus induction with agar) in a 250 ml flask. The flask is wrapped in foil and shaken at 175 rpm in the dark at 23° C. for 1 week. Sieving the liquid culture with a 40-mesh sieve collect the cells. The fraction collected on the sieve is plated and cultured on solid ryegrass callus induction medium for 1 week in the dark at 25° C. The callus is then transferred to and cultured on MS medium containing 1% sucrose for 2 weeks.

[1047] Transformation can be accomplished with either Agrobacterium of with particle bombardment methods. An expression vector is created containing a constitutive plant promoter and the cDNA of the gene in a pUC vector. The plasmid DNA is prepared from E. coli cells using with Qiagen kit according to manufacturer's instruction. Approximately 2 g of embryogenic callus is spread in the center of a sterile filter paper in a Petri dish. An aliquot of liquid MSO with 10 g/l sucrose is added to the filter paper. Gold particles (1.0 μm in size) are coated with plasmid DNA according to method of Sanford et al., 1993 and delivered to the embryogenic callus with the following parameters: 500 μg particles and 2 μg DNA per shot, 1300 psi and a target distance of 8.5 cm from stopping plate to plate of callus and 1 shot per plate of callus.

[1048] After the bombardment, calli are transferred back to the fresh callus development medium and maintained in the dark at room temperature for a 1-week period. The callus is then transferred to growth conditions in the light at 25° C. to initiate embryo differentiation with the appropriate selection agent, e.g. 250 nM Arsenal, 5 mg/L PPT or 50 mg/L kanamycin. Shoots resistant to the selection agent appeared and once rooted are transferred to soil.

[1049] Samples of the primary transgenic plants (T0) are analyzed by PCR to confirm the presence of T-DNA. These results are confirmed by Southern hybridization in which DNA is electrophoresed on a 1% agarose gel and transferred to a positively charged nylon membrane (Roche Diagnostics). The PCR DIG Probe Synthesis Kit (Roche Diagnostics) is used to prepare a digoxigenin-labelled probe by PCR, and used as recommended by the manufacturer.

[1050] Transgenic T0 ryegrass plants are propagated vegetatively by excising tillers. The transplanted tillers are maintained in the greenhouse for 2 months until well established. T1 or T2 generation plants are produced and subjected to stress or non-stress conditions, e.g. low temperature experiments, e.g. as described above in example 1.

[1051] For the assessment of yield increase, e.g. tolerance to low temperature, biomass production, intrinsic yield and/or dry matter production and/or seed yield is compared to e.g. corresponding non-transgenic wild type plants. For example, plants with an increased yield, e.g. an increased yield-related trait, e.g. higher tolerance to stress, e.g. with an increased nutrient use efficiency or an increased intrinsic yield, and e.g. with higher tolerance to low temperature may show increased biomass production and/or dry matter production and/or seed yield under low temperature when compared to plants lacking the transgene, e.g. to corresponding non-transgenic wild type plants.

### EXAMPLE 16

[1052] Engineering soybean plants with increased yield, e.g. an increased yield-related trait, for example an enhanced stress tolerance, preferably tolerance to low temperature, and/or increased biomass production by over-expressing YRP genes, e.g. low temperature resistance and/or tolerance related genes, for example from A. thaliana, Brassica napus, Glycine max, Zea mays, Populus trichocarpa or Oryza sativa

[1053] Soybean can be transformed according to the following modification of the method described in the Texas A&M patent U.S. Pat. No. 5,164,310. Several commercial soybean varieties are amenable to transformation by this method. The cultivar Jack (available from the Illinois Seed Foundation) is a commonly used for transformation. Seeds are sterilized by immersion in 70% (v/v) ethanol for 6 min and in 25% commercial bleach (NaOCl) supplemented with 0.1% (v/v) Tween for 20 min, followed by rinsing 4 times with sterile double distilled water. Seven-day old seedlings are propagated by removing the radicle, hypocotyl and one cotyledon from each seedling. Then, the epicotyl with one cotyledon is transferred to fresh germination media in petri dishes and incubated at 25° C. under a 16 h photoperiod (approx. 100 μmol/ms) for three weeks. Axillary nodes (approx. 4 mm in length) are cut from 3-4 week-old plants. Axillary nodes are excised and incubated in Agrobacterium LBA4404 culture.

[1054] Many different binary vector systems have been described for plant transformation (e.g. An G., in Agrobacterium Protocols. Methods in Molecular Biology Vol 44, p. 47-62, Gartland K. M. A. and Davey M. R. eds. Humana Press, Totowa, N.J.). Many are based on the vector pBIN19 described by Bevan (Nucleic Acid Research. 12, 8711 (1984)) that includes a plant gene expression cassette flanked by the left and right border sequences from the Ti plasmid of Agrobacterium tumefaciens. A plant gene expression cassette consists of at least two genes—a selection marker gene and a plant promoter regulating the transcription of the cDNA or genomic DNA of the trait gene. Various selection marker genes can be used including the Arabidopsis gene encoding a mutated acetohydroxy acid synthase (AHAS) enzyme (U.S. Pat. Nos. 5,7673,666 and 6,225,105). Similarly, various promoters can be used to regulate the trait gene to provide constitutive, developmental, tissue or environmental regulation of gene transcription. In this example, the 34S promoter (GenBank Accession numbers M59930 and X16673) is used to provide constitutive expression of the trait gene.

[1055] After the co-cultivation treatment, the explants are washed and transferred to selection media supplemented with 500 mg/L timentin. Shoots are excised and placed on a shoot elongation medium. Shoots longer than 1 cm are placed on rooting medium for two to four weeks prior to transplanting to soil.

[1056] The primary transgenic plants (T0) are analyzed by PCR to confirm the presence of T-DNA. These results are confirmed by Southern hybridization in which DNA is electrophoresed on a 1% agarose gel and transferred to a positively charged nylon membrane (Roche Diagnostics). The PCR DIG Probe Synthesis Kit (Roche Diagnostics) is used to prepare a digoxigenin-labelled probe by PCR, and used as recommended by the manufacturer.

[1057] Soybean plants over-expressing YRP genes, e.g. low temperature resistance and/or tolerance related genes from A. thaliana, Brassica napus, Glycine max, Zea mays, Populus trichocarpa or Oryza sativa, show increased yield, for example, have higher seed yields.

[1058] T1 or T2 generation plants are produced and subjected to stress and non-stress conditions, e.g. low temperature experiments, e.g. as described above in example 1.

[1059] For the assessment of yield increase, e.g. tolerance to low temperature, biomass production, intrinsic yield and/or dry matter production and/or seed yield is compared to e.g. corresponding non-transgenic wild type plants. For example, plants with an increased yield, e.g. an increased yield-related trait, e.g. higher tolerance to stress, e.g. with an increased nutrient use efficiency or an increased intrinsic yield, and e.g. with higher tolerance to low temperature may show increased biomass production and/or dry matter production and/or seed yield under low temperature when compared to plants lacking the transgene, e.g. to corresponding non-transgenic wild type plants.

### EXAMPLE 17

[1060] Engineering rapeseed/canola plants with increased yield, e.g. an increased yield-related trait, for example an enhanced stress tolerance, preferably tolerance to low temperature, and/or increased biomass production by over-expressing YRP genes, e.g. low temperature resistance and/or tolerance related genes for example from A. thaliana, Brassica napus, Glycine max, Zea mays, Populus trichocarpa or Oryza sativa

[1061] Cotyledonary petioles and hypocotyls of 5-6 day-old young seedlings can be used as explants for tissue culture and transformed according to Babic et al. (Plant Cell Rep 17, 183 (1998)). The commercial cultivar Westar (Agriculture Canada) is the standard variety used for transformation, but other varieties can be used.

[1062] Agrobacterium tumefaciens LBA4404 containing a binary vector can be used for canola transformation. Many different binary vector systems have been described for plant transformation (e.g. An G., in Agrobacterium Protocols. Methods in Molecular Biology Vol. 44, p. 47-62, Gartland K. M. A. and Davey M. R. eds. Humana Press, Totowa, N.J.). Many are based on the vector pBIN19 described by Bevan (Nucleic Acid Research. 12, 8711 (1984)) that includes a plant gene expression cassette flanked by the left and right border sequences from the Ti plasmid of Agrobacterium tumefaciens. A plant gene expression cassette consists of at least two genes—a selection marker gene and a plant promoter regulating the transcription of the cDNA or genomic DNA of the trait gene. Various selection marker genes can be used including the Arabidopsis gene encoding a mutated acetohydroxy acid synthase (AHAS) enzyme (U.S. Pat. Nos. 5,7673,666 and 6,225,105). Similarly, various promoters can be used to regulate the trait gene to provide constitutive, developmental, tissue or environmental regulation of gene transcription. In this example, the 34S promoter (GenBank Accession numbers M59930 and X16673) is used to provide constitutive expression of the trait gene.

[1063] Canola seeds are surface-sterilized in 70% ethanol for 2 min., and then in 30% Clorox with a drop of Tween-20 for 10 min, followed by three rinses with sterilized distilled water. Seeds are then germinated in vitro 5 days on half strength MS medium without hormones, 1% sucrose, 0.7% Phytagar at 23° C., 16 h light. The cotyledon petiole explants with the cotyledon attached are excised from the in vitro seedlings, and inoculated with Agrobacterium by dipping the cut end of the petiole explant into the bacterial suspension. The explants are then cultured for 2 days on MSBAP-3 medium containing 3 mg/L BAP, 3% sucrose, 0.7% Phytagar at 23° C., 16 h light. After two days of co-cultivation with Agrobacterium, the petiole explants are transferred to MSBAP-3 medium containing 3 mg/l BAP, cefotaxime, carbenicillin, or timentin (300 mg/L) for 7 days, and then cultured on MSBAP-3 medium with cefotaxime, carbenicillin, or timentin and selection agent until shoot regeneration. When the shoots are 5-10 mm in length, they are cut and transferred to shoot elongation medium (MSBAP-0.5, containing 0.5 mg/L BAP). Shoots of about 2 cm in length are transferred to the rooting medium (MSO) for root induction.

[1064] Samples of the primary transgenic plants (T0) are analyzed by PCR to confirm the presence of T-DNA. These results are confirmed by Southern hybridization in which DNA is electrophoresed on a 1% agarose gel and transferred to a positively charged nylon membrane (Roche Diagnostics). The PCR DIG Probe Synthesis Kit (Roche Diagnostics) is used to prepare a digoxigenin-labelled probe by PCR, and used as recommended by the manufacturer.

[1065] The transgenic plants can then be evaluated for their increased yield, e.g. an increased yield-related trait, e.g. higher tolerance to stress, e.g. enhanced tolerance to low temperature and/or increased biomass production according to the method described in

### EXAMPLE 2

[1066] It is found that transgenic rapeseed/canola over-expressing YRP genes, e.g. low temperature resistance and/or tolerance related genes, from A. thaliana, Brassica napus, Glycine max, Zea mays, Populus trichocarpa or Oryza sativa show increased yield, for example show an increased yield, e.g. an increased yield-related trait, e.g. higher tolerance to stress, e.g. with enhanced tolerance to low temperature and/or increased biomass production compared to plants without the transgene, e.g. corresponding non-transgenic control plants.

### EXAMPLE 18

[1067] Engineering corn plants with increased yield, e.g. an increased yield-related trait, for example an enhanced stress tolerance, preferably tolerance to low temperature, and/or increased biomass production by over-expressing YRP genes, e.g. tolerance to low temperature related genes for example from A. thaliana, Brassica napus, Glycine max, Zea mays, Populus trichocarpa or Oryza sativa

[1068] Transformation of corn (Zea mays L.) can be performed with a modification of the method described by Ishida et al. (Nature Biotech 14745 (1996)). Transformation is genotype-dependent in corn and only specific genotypes are amenable to transformation and regeneration. The inbred line A188 (University of Minnesota) or hybrids with A188 as a parent are good sources of donor material for transformation (Fromm et al. Biotech 8, 833 (1990), but other genotypes can be used successfully as well. Ears are harvested from corn plants at approximately 11 days after pollination (DAP) when the length of immature embryos is about 1 to 1.2 mm. Immature embryos can be co-cultivated with Agrobacterium tumefaciens that carry “super binary” vectors and transgenic plants are recovered through organogenesis. The super binary vector system of Japan Tobacco is described in WO patents WO 94/00977 and WO 95/06722. Vectors are constructed as described. Various selection marker genes can be used including the corn gene encoding a mutated acetohydroxy acid synthase (AHAS) enzyme (U.S. Pat. No. 6,025,541). Similarly, various promoters can be used to regulate the trait gene to provide constitutive, developmental, tissue or environmental regulation of gene transcription. In this example, the 34S promoter (GenBank Accession numbers M59930 and X16673) is used to provide constitutive expression of the trait gene.

[1069] Excised embryos are grown on callus induction medium, then corn regeneration medium, containing imidazolinone as a selection agent. The Petri plates were incubated in the light at 25° C. for 2-3 weeks, or until shoots develop. The green shoots from each embryo are transferred to corn rooting medium and incubated at 25° C. for 2-3 weeks, until roots develop. The rooted shoots are transplanted to soil in the greenhouse. T1 seeds are produced from plants that exhibit tolerance to the imidazolinone herbicides and are PCR positive for the transgenes.

[1070] The T1 transgenic plants can then be evaluated for increased yield, e.g. an increased yield-related trait, e.g. higher tolerance to stress, e.g. with enhanced tolerance to low temperature and/or increased biomass production according to the methods described in Example 2. The T1 generation of single locus insertions of the T-DNA will segregate for the transgene in a 1:2:1 ratio. Those progeny containing one or two copies of the transgene (¾ of the progeny) are tolerant regarding the imidazolinone herbicide, and exhibit an increased yield, e.g. an increased yield-related trait, e.g. higher tolerance to stress, e.g. with enhanced tolerance to low temperature and/or increased biomass production compared to those progeny lacking the transgenes. Tolerant plants have higher seed yields. Homozygous T2 plants exhibited similar phenotypes. Hybrid plants (F1 progeny) of homozygous transgenic plants and non-transgenic plants also exhibited an increased yield, e.g. an increased yield-related trait, e.g. higher tolerance to stress, e.g. with enhanced tolerance to low temperature and/or increased biomass production.

### EXAMPLE 19

[1071] Engineering wheat plants with increased yield, e.g. an increased yield-related trait, for example an enhanced stress tolerance, preferably tolerance to low temperature, and/or increased biomass production by over-expressing YRP genes, e.g. low temperature resistance and/or tolerance related genes, for example from A. thaliana, Brassica napus, Glycine max, Zea mays, Populus trichocarpa or Oryza sativa

[1072] Transformation of wheat can be performed with the method described by Ishida et al. (Nature Biotech. 14745 (1996)). The cultivar Bobwhite (available from CYMMIT, Mexico) is commonly used in transformation. Immature embryos are co-cultivated with Agrobacterium tumefaciens that carry “super binary” vectors, and transgenic plants are recovered through organogenesis. The super binary vector system of Japan Tobacco is described in WO patents WO 94/00977 and WO 95/06722. Vectors are constructed as described. Various selection marker genes can be used including the maize gene encoding a mutated acetohydroxy acid synthase (AHAS) enzyme (U.S. Pat. No. 6,025,541). Similarly, various promoters can be used to regulate the trait gene to provide constitutive, developmental, tissue or environmental regulation of gene transcription. In this example, the 34S promoter (GenBank Accession numbers M59930 and X16673) is used to provide constitutive expression of the trait gene.

[1073] After incubation with Agrobacterium, the embryos are grown on callus induction medium, then regeneration medium, containing imidazolinone as a selection agent. The Petri plates are incubated in the light at 25° C. for 2-3 weeks, or until shoots develop. The green shoots are transferred from each embryo to rooting medium and incubated at 25° C. for 2-3 weeks, until roots develop. The rooted shoots are transplanted to soil in the greenhouse. T1 seeds are produced from plants that exhibit tolerance to the imidazolinone herbicides and which are PCR positive for the transgenes.

[1074] The T1 transgenic plants can then be evaluated for their increased yield, e.g. an increased yield-related trait, e.g. higher tolerance to stress, e.g. with enhanced tolerance to low temperature and/or increased biomass production according to the method described in example 2. The T1 generation of single locus insertions of the T-DNA will segregate for the transgene in a 1:2:1 ratio. Those progeny containing one or two copies of the transgene (¾ of the progeny) are tolerant regarding the imidazolinone herbicide, and exhibit an increased yield, e.g. an increased yield-related trait, e.g. higher tolerance to stress, e.g. with enhanced tolerance to low temperature and/or increased biomass production compared to those progeny lacking the transgenes.

[1075] For the assessment of yield increase, e.g. tolerance to low temperature, biomass production, intrinsic yield and/or dry matter production and/or seed yield can be compared to e.g. corresponding non-transgenic wild type plants. For example, plants with an increased yield, e.g. an increased yield-related trait, e.g. higher tolerance to stress, e.g. with an increased nutrient use efficiency or an increased intrinsic yield, and e.g. with higher tolerance to low temperature may show increased biomass production and/or dry matter production and/or seed yield under low temperature when compared plants lacking the transgene, e.g. to corresponding non-transgenic wild type plants.

### EXAMPLE 20

[1076] Engineering rice plants with increased yield under condition of transient and repetitive abiotic stress by over-expressing stress related genes from Saccharomyces cerevisiae or E. coli or Azotobacter vinelandii or Synechocystis

### Rice Transformation

[1077] The Agrobacterium containing the expression vector of the invention can be used to transform Oryza sativa plants. Mature dry seeds of the rice japonica cultivar Nipponbare are dehusked. Sterilization is carried out by incubating for one minute in 70% ethanol, followed by 30 minutes in 0.2% HgCl₂, followed by a 6 times 15 minutes wash with sterile distilled water. The sterile seeds are then germinated on a medium containing 2,4-D (callus induction medium). After incubation in the dark for four weeks, embryogenic, scutellum-derived calli are excised and propagated on the same medium. After two weeks, the calli are multiplied or propagated by subculture on the same medium for another 2 weeks. Embryogenic callus pieces are sub-cultured on fresh medium 3 days before co-cultivation (to boost cell division activity).

[1078] Agrobacterium strain LBA4404 containing the expression vector of the invention can be used for co-cultivation. Agrobacterium is inoculated on AB medium with the appropriate antibiotics and cultured for 3 days at 28° C. The bacteria are then collected and suspended in liquid co-cultivation medium to a density (OD₆₀₀) of about 1. The suspension is then transferred to a Petri dish and the calli immersed in the suspension for 15 minutes. The callus tissues are then blotted dry on a filter paper and transferred to solidified, co-cultivation medium and incubated for 3 days in the dark at 25° C. Co-cultivated calli are grown on 2,4-D-containing medium for 4 weeks in the dark at 28° C. in the presence of a selection agent. During this period, rapidly growing resistant callus islands developed. After transfer of this material to a regeneration medium and incubation in the light, the embryogenic potential is released and shoots developed in the next four to five weeks. Shoots are excised from the calli and incubated for 2 to 3 weeks on an auxin-containing medium from which they are transferred to soil. Hardened shoots are grown under high humidity and short days in a greenhouse.

[1079] Approximately 35 independent T0 rice transformants are generated for one construct. The primary transformants are transferred from a tissue culture chamber to a greenhouse. After a quantitative PCR analysis to verify copy number of the T-DNA insert, only single copy transgenic plants that exhibit tolerance to the selection agent are kept for harvest of T1 seed. Seeds are then harvested three to five months after transplanting. The method yielded single locus transformants at a rate of over 50% (Aldemita and Hodges 1996, Chan et al. 1993, Hiei et al. 1994).

[1080] For the cycling drought assay repetitive stress is applied to plants without leading to desiccation. The water supply throughout the experiment is limited and plants are subjected to cycles of drought and re-watering. For measuring biomass production, plant fresh weight is determined one day after the final watering by cutting shoots and weighing them.

### EXAMPLE 21

[1081] Engineering rice plants with increased yield under condition of transient and repetitive abiotic stress by over-expressing yield and stress related genes for example from A. thaliana, Brassica napus, Glycine max, Zea mays, Populus trichocarpa or Oryza sativa for example

### Rice Transformation

[1082] The Agrobacterium containing the expression vector of the invention can be used to transform Oryza sativa plants. Mature dry seeds of the rice japonica cultivar Nipponbare are dehusked. Sterilization is carried out by incubating for one minute in 70% ethanol, followed by 30 minutes in 0.2% HgCl2, followed by a 6 times 15 minutes wash with sterile distilled water. The sterile seeds are then germinated on a medium containing 2,4-D (callus induction medium). After incubation in the dark for four weeks, embryogenic, scutellum-derived calli are excised and propagated on the same medium. After two weeks, the calli are multiplied or propagated by subculture on the same medium for another 2 weeks. Embryogenic callus pieces are sub-cultured on fresh medium 3 days before co-cultivation (to boost cell division activity).

[1083] Agrobacterium strain LBA4404 containing the expression vector of the invention can be used for co-cultivation. Agrobacterium is inoculated on AB medium with the appropriate antibiotics and cultured for 3 days at 28° C. The bacteria are then collected and suspended in liquid co-cultivation medium to a density (OD₆₀₀) of about 1. The suspension is then transferred to a Petri dish and the calli immersed in the suspension for 15 minutes. The callus tissues are then blotted dry on a filter paper and transferred to solidified, co-cultivation medium and incubated for 3 days in the dark at 25° C. Co-cultivated calli are grown on 2,4-D-containing medium for 4 weeks in the dark at 28° C. in the presence of a selection agent. During this period, rapidly growing resistant callus islands developed. After transfer of this material to a regeneration medium and incubation in the light, the embryogenic potential is released and shoots developed in the next four to five weeks. Shoots are excised from the calli and incubated for 2 to 3 weeks on an auxin-containing medium from which they are transferred to soil. Hardened shoots are grown under high humidity and short days in a greenhouse.

[1084] Approximately 35 independent T0 rice transformants are generated for one construct. The primary transformants are transferred from a tissue culture chamber to a greenhouse. After a quantitative PCR analysis to verify copy number of the T-DNA insert, only single copy transgenic plants that exhibit tolerance to the selection agent are kept for harvest of T1 seed. Seeds are then harvested three to five months after transplanting. The method yielded single locus transformants at a rate of over 50% (Aldemita and Hodges 1996, Chan et al. 1993, Hiei et al. 1994).

[1085] For the cycling drought assay repetitive stress is applied to plants without leading to desiccation. The water supply throughout the experiment is limited and plants are subjected to cycles of drought and re-watering. For measuring biomass production, plant fresh weight is determined one day after the final watering by cutting shoots and weighing them. At an equivalent degree of drought stress, tolerant plants are able to resume normal growth whereas susceptible plants have died or suffer significant injury resulting in shorter leaves and less dry matter.

### FIGURES

[1086] FIG. 1. Vector VC-MME220-1qcz (SEQ ID NO: 41) used for cloning gene of interest for non-targeted expression.

[1087] FIG. 2. Vector VC-MME221-1qcz (SEQ ID NO: 46) used for cloning gene of interest for non-targeted expression.

[1088] FIG. 3. Vector VC-MME354-1QCZ (SEQ ID NO: 32) used for cloning gene of interest for plastidic targeted expression.

[1089] FIG. 4. Vector VC-MME432-1qcz (SEQ ID NO: 42) used for cloning gene of interest for plastidic targeted expression.

[1090] FIG. 5. Vector VC-MME489-1QCZ (SEQ ID NO: 56) used for cloning gene of interest for non-targeted expression and cloning of a targeting sequence.

[1091] FIG. 6. Vector pMTX0270p (SEQ ID NO: 9) used for cloning of a targeting sequence.

[1092] FIG. 7. Vector pMTX155 (SEQ ID NO: 31) used for used for cloning gene of interest for non-targeted expression.

[1093] FIG. 8. Vector VC-MME356-1 QCZ (SEQ ID NO: 34) used for mitochondric targeted expression.

[1094] FIG. 9. Vector VC-MME301-1QCZ (SEQ ID NO: 36) used for non-targeted expression in preferentially seeds.

[1095] FIG. 10. Vector pMTX461 korrp (SEQ ID NO: 37) used for plastidic targeted expression in preferentially seeds.

[1096] FIG. 11. Vector VC-MME462-1QCZ (SEQ ID NO: 39) used for mitochondric targeted expression in preferentially seeds.

[1097] FIG. 12. Vector VC-MME431-1qcz (SEQ ID NO: 44) used for mitochondric targeted expression.

[1098] FIG. 13. Vector pMTX447korr (SEQ ID NO: 47) used for plastidic targeted expression.

[1099] FIG. 14. Vector VC-MME445-1qcz (SEQ ID NO: 49) used for mitochondric targeted expression.

[1100] FIG. 15. Vector VC-MME289-1qcz (SEQ ID NO: 51) used for non targeted expression in preferentially seeds.

[1101] FIG. 16. Vector VC-MME464-1 qcz (SEQ ID NO: 52) used for plastidic targeted expression in preferentially seeds.

[1102] FIG. 17. Vector VC-MME465-1 qcz (SEQ ID NO: 54) used for mitochondric targeted expression in preferentially seeds.

TABLE I

| | | | | | |
|---|---|---|---|---|---|
| | 1. | 2. | 3. | 4. | 5. |
| Application | Hit | Project | Locus | Organism | Lead SEQ ID |

A: Nucleic acid sequence ID numbers

| | | | | | |
|---|---|---|---|---|---|
| 1 | 1 | NUE_{—OEX2}_1 | B0567 | E. coli | 63 |
| 1 | 2 | NUE_{—OEX2}_1 | B0953 | E. coli | 81 |
| 1 | 3 | NUE_{—OEX2}_1 | B1088 | E. coli | 138 |
| 1 | 4 | NUE_{—OEX2}_1 | B1289 | E. coli | 200 |
| 1 | 5 | NUE_{—OEX2}_1 | B2904 | E. coli | 289 |
| 1 | 6 | NUE_{—OEX2}_1 | B3389 | E. coli | 820 |
| 1 | 7 | NUE_{—OEX2}_1 | B3526 | E. coli | 1295 |
| 1 | 8 | NUE_{—OEX2}_1 | B3611 | E. coli | 1365 |
| 1 | 9 | NUE_{—OEX2}_1 | B3744 | E. coli | 1453 |
| 1 | 10 | NUE_{—OEX2}_1 | B3869 | E. coli | 1557 |
| 1 | 11 | NUE_{—OEX2}_1 | B4266 | E. coli | 1748 |
| 1 | 12 | NUE_OEX2_1 | SLL0892 | Synechocystis | 2146 |
| | | | | sp. | |
| 1 | 13 | NUE_OEX2_1 | YJL087C | S. cerevisiae | 2146 |
| 1 | 14 | NUE_OEX2_1 | YJR053W | S. cerevisiae | 2450 |
| 1 | 15 | NUE_OEX2_1 | YLR357W | S. cerevisiae | 2469 |
| 1 | 16 | NUE_OEX2_1 | YLR361C | S. cerevisiae | 2501 |
| 1 | 17 | NUE_OEX2_1 | YML086C | S. cerevisiae | 2523 |
| 1 | 18 | NUE_OEX2_1 | YML091C | S. cerevisiae | 2567 |
| 1 | 19 | NUE_OEX2_1 | YML096W | S. cerevisiae | 2593 |
| 1 | 20 | NUE_OEX2_1 | YMR236W | S. cerevisiae | 2619 |
| 1 | 21 | NUE_OEX2_1 | YNL137C | S. cerevisiae | 2678 |
| 1 | 22 | NUE_OEX2_1 | YOR196C | S. cerevisiae | 2701 |
| 1 | 23 | NUE_OEX2_1 | YPL119C | S. cerevisiae | 3310 |
| 1 | 24 | NUE_OEX2_1 | B2617 | E. coli | 3668 |
| 1 | 25 | NUE_OEX2_1 | SII1280 | Synechocystis | 3690 |
| | | | | sp. | |
| 1 | 26 | NUE_OEX2_1 | YLR443W | S. cerevisiae | 4705 |
| 1 | 27 | NUE_OEX2_1 | YOR259C | S. cerevisiae | 4717 |
| 1 | 28 | NUE_OEX2_1 | AT2G19580.1 | A. th. | 3769 |
| 1 | 29 | NUE_OEX2_1 | AT2G20370.1 | A. th. | 4009 |
| 1 | 30 | NUE_OEX2_1 | AT4G33070.1 | A. th. | 4077 |
| 1 | 31 | NUE_OEX2_1 | AT5G07340.1 | A. th. | 4337 |
| 1 | 32 | NUE_OEX2_1 | AT5G62460.1 | A. th. | 4619 |
| 1 | 33 | NUE_OEX2_1 | AVINDRAFT_2950 | A. vinelandii | 6310 |
| 1 | 34 | NUE_OEX2_1 | AVINDRAFT_0943 | A. vinelandii | 5807 |
| 1 | 35 | NUE_OEX2_1 | SLL1797 | Synechocystis | 7540 |
| | | | | sp. | |
| 1 | 36 | NUE_OEX2_1 | YIL043C | S. cerevisiae | 7974 |
| 1 | 37 | NUE_OEX2_1 | B2940 | E. coli | 7534 |
| 1 | 38 | NUE_OEX2_1 | AT2G19490 | A. th. | 5257 |
| 1 | 39 | NUE_OEX2_1 | B0951 | E. coli | 6332 |
| 1 | 40 | NUE_OEX2_1 | YER023W | S. cerevisiae | 7592 |
| 1 | 41 | NUE_OEX2_1 | B1189 | E. coli | 6436 |
| 1 | 42 | NUE_OEX2_1 | B2592 | E. coli | 6723 |
| 1 | 43 | NUE_OEX2_1 | AT1G07400.1 | A. th. | 8090 |
| 1 | 44 | NUE_OEX2_1 | AT1G52560.1 | A. th. | 8673 |
| 1 | 45 | NUE_OEX2_1 | AT1G63940.1 | A. th. | 8721 |
| 1 | 46 | NUE_OEX2_1 | AT1G63940.2 | A. th. | 8912 |
| 1 | 47 | NUE_OEX2_1 | AT3G46230.1 | A. th. | 9109 |
| 1 | 48 | NUE_OEX2_1 | AT4G37930.1 | A. th. | 9727 |
| 1 | 49 | NUE_OEX2_1 | AT5G06290.1 | A. th. | 10737 |
| 1 | 50 | NUE_OEX2_1 | CDS5399 | P. trichocarpa | 11061 |
| 1 | 51 | NUE_OEX2_1 | CDS5402 | P. trichocarpa | 11138 |
| 1 | 52 | NUE_OEX2_1 | CDS5423 | P. trichocarpa | 11305 |
| 1 | 53 | NUE_OEX2_1 | YKL130C | S. cerevisiae | 11496 |
| 1 | 54 | NUE_OEX2_1 | YLR357W_2 | S. cerevisiae | 11513 |

B: Nucleic acid sequence ID numbers

| | | | | | |
|---|---|---|---|---|---|
| 1 | 1 | NUE_OEX2_1 | B0567 | E. coli | 63 |
| 1 | 2 | NUE_OEX2_1 | B0953 | E. coli | 81 |
| 1 | 3 | NUE_OEX2_1 | B1088 | E. coli | 138 |
| 1 | 4 | NUE_OEX2_1 | B1289 | E. coli | 200 |
| 1 | 5 | NUE_OEX2_1 | B2904 | E. coli | 289 |
| 1 | 6 | NUE_OEX2_1 | B3389 | E. coli | 820 |
| 1 | 7 | NUE_OEX2_1 | B3526 | E. coli | 1295 |
| 1 | 8 | NUE_OEX2_1 | B3611 | E. coli | 1365 |
| 1 | 9 | NUE_OEX2_1 | B3744 | E. coli | 1453 |
| 1 | 10 | NUE_OEX2_1 | B3869 | E. coli | 1557 |
| 1 | 11 | NUE_OEX2_1 | B4266 | E. coli | 1748 |
| 1 | 12 | NUE_OEX2_1 | SLL0892 | Synechocystis | 2146 |
| | | | | sp. | |
| 1 | 13 | NUE_OEX2_1 | YJL087C | S. cerevisiae | 2416 |
| 1 | 14 | NUE_OEX2_1 | YJR053W | S. cerevisiae | 2450 |
| 1 | 15 | NUE_OEX2_1 | YLR357W | S. cerevisiae | 2469 |
| 1 | 16 | NUE_OEX2_1 | YLR361C | S. cerevisiae | 2501 |
| 1 | 17 | NUE_OEX2_1 | YML086C | S. cerevisiae | 2523 |
| 1 | 18 | NUE_OEX2_1 | YML091C | S. cerevisiae | 2567 |
| 1 | 19 | NUE_OEX2_1 | YML096W | S. cerevisiae | 2593 |
| 1 | 20 | NUE_OEX2_1 | YMR236W | S. cerevisiae | 2619 |
| 1 | 21 | NUE_OEX2_1 | YNL137C | S. cerevisiae | 2678 |
| 1 | 22 | NUE_OEX2_1 | YOR196C | S. cerevisiae | 2701 |
| 1 | 23 | NUE_OEX2_1 | YPL119C | S. cerevisiae | 3310 |
| 1 | 24 | NUE_OEX2_1 | B2617 | E. coli | 3668 |
| 1 | 25 | NUE_OEX2_1 | SII1280 | Synechocystis | 3690 |
| | | | | sp. | |
| 1 | 26 | NUE_OEX2_1 | YLR443W | S. cerevisiae | 4705 |
| 1 | 27 | NUE_OEX2_1 | YOR259C | S. cerevisiae | 4717 |
| 1 | 28 | NUE_OEX2_1 | AT2G19580.1 | A. th. | 3769 |
| 1 | 29 | NUE_OEX2_1 | AT2G20370.1 | A. th. | 4009 |
| 1 | 30 | NUE_OEX2_1 | AT4G33070.1 | A. th. | 4077 |
| 1 | 31 | NUE_OEX2_1 | AT5G07340.1 | A. th. | 4337 |
| 1 | 32 | NUE_OEX2_1 | AT5G62460.1 | A. th. | 4619 |
| 1 | 33 | NUE_OEX2_1 | AVINDRAFT_2950 | A. vinelandii | 6310 |
| 1 | 34 | NUE_OEX2_1 | AVINDRAFT_0943 | A. vinelandii | 5807 |
| 1 | 35 | NUE_OEX2_1 | SLL1797 | Synechocystis | 7540 |
| | | | | sp. | |
| 1 | 36 | NUE_OEX2_1 | YIL043C | S. cerevisiae | 7974 |
| 1 | 37 | NUE_OEX2_1 | B2940 | E. coli | 7534 |
| 1 | 38 | NUE_OEX2_1 | AT2G19490 | A. th. | 5257 |
| 1 | 39 | NUE_OEX2_1 | B0951 | E. coli | 6332 |
| 1 | 40 | NUE_OEX2_1 | YER023W | S. cerevisiae | 7592 |
| 1 | 41 | NUE_OEX2_1 | B1189 | E. coli | 6436 |
| 1 | 42 | NUE_OEX2_1 | B2592 | E. coli | 6723 |
| 1 | 43 | NUE_OEX2_1 | AT1G07400.1 | A. th. | 8090 |
| 1 | 44 | NUE_OEX2_1 | AT1G52560.1 | A. th. | 8673 |
| 1 | 45 | NUE_OEX2_1 | AT1G63940.1 | A. th. | 8721 |
| 1 | 46 | NUE_OEX2_1 | AT1G63940.2 | A. th. | 8912 |
| 1 | 47 | NUE_OEX2_1 | AT3G46230.1 | A. th. | 9109 |
| 1 | 48 | NUE_OEX2_1 | AT4G37930.1 | A. th. | 9727 |
| 1 | 49 | NUE_OEX2_1 | AT5G06290.1 | A. th. | 10737 |
| 1 | 50 | NUE_OEX2_1 | CDS5399 | P. trichocarpa | 11061 |
| 1 | 51 | NUE_OEX2_1 | CDS5402 | P. trichocarpa | 11138 |
| 1 | 52 | NUE_OEX2_1 | CDS5423 | P. trichocarpa | 11305 |
| 1 | 53 | NUE_OEX2_1 | YKL130C | S. cerevisiae | 11496 |
| 1 | 54 | NUE_OEX2_1 | YLR357W_2 | S. cerevisiae | 11513 |

| | | |
|---|---|---|
| | 6. | 7. |
| Application | Target | SEQ IDs of Nucleic Acid Homologs |

A: Nucleic acid sequence ID numbers

| | | |
|---|---|---|
| 1 | cytoplasmic | 65, 67, 69, 71 |
| 1 | plastidic | 83, 85, 87, 89, 91, 93, 95, 97, 99, 101, 103, 105, 107, 109, 111, |
| | | 113, 115, 117, 119, 121, 123, 125, 127, 129, 131 |
| 1 | cytoplasmic | 140, 142, 144, 146, 148, 150, 152, 154, 156, 158, 160, 162, 164, |
| | | 166, 168, 170, 172, 174, 176, 178, 180, 182, 184, 186, 188, 190, |
| | | 192 |
| 1 | cytoplasmic | 202, 204, 206, 208, 210, 212, 214, 216, 218, 220, 222, 224, 226, |
| | | 228, 230, 232, 234, 236, 238, 240, 242, 244, 246, 248, 250, 252, |
| | | 254, 256, 258, 260, 262, 264, 266, 268, 270, 272, 274, 276, 278, |
| | | 280, 282 |
| 1 | cytoplasmic | 291, 293, 295, 297, 299, 301, 303, 305, 307, 309, 311, 313, 315, |
| | | 317, 319, 321, 323, 325, 327, 329, 331, 333, 335, 337, 339, 341, |
| | | 343, 345, 347, 349, 351, 353, 355, 357, 359, 361, 363, 365, 367, |
| | | 369, 371, 373, 375, 377, 379, 381, 383, 385, 387, 389, 391, 393, |
| | | 395, 397, 399, 401, 403, 405, 407, 409, 411, 413, 415, 417, 419, |
| | | 421, 423, 425, 427, 429, 431, 433, 435, 437, 439, 441, 443, 445, |
| | | 447, 449, 451, 453, 455, 457, 459, 461, 463, 465, 467, 469, 471, |
| | | 473, 475, 477, 479, 481, 483, 485, 487, 489, 491, 493, 495, 497, |
| | | 499, 501, 503, 505, 507, 509, 511, 513, 515, 517, 519, 521, 523, |
| | | 525, 527, 529, 531, 533, 535, 537, 539, 541, 543, 545, 547, 549, |
| | | 551, 553, 555, 557, 559, 561, 563, 565, 567, 569, 571, 573, 575, |
| | | 577, 579, 581, 583, 585, 587, 589, 591, 593, 595, 597, 599, 601, |
| | | 603, 605, 607, 609, 611, 613, 615, 617, 619, 621, 623, 625, 627, |
| | | 629, 631, 633, 635, 637, 639, 641, 643, 645, 647, 649, 651, 653, |
| | | 655, 657, 659, 661, 663, 665, 667, 669, 671, 673, 675, 677, 679, |
| | | 681, 683, 685, 687, 689, 691, 693, 695, 697, 699, 701, 703, 705, |
| | | 707, 709, 711, 713, 715, 717, 719, 721, 723, 725, 727, 729, 731, |
| | | 733, 735, 737, 739, 741, 743, 745, 747, 749, 751, 753 |
| 1 | plastidic | 822, 824, 826, 828, 830, 832, 834, 836, 838, 840, 842, 844, 846, |
| | | 848, 850, 852, 854, 856, 858, 860, 862, 864, 866, 868, 870, 872, |
| | | 874, 876, 878, 880, 882, 884, 886, 888, 890, 892, 894, 896, 898, |
| | | 900, 902, 904, 906, 908, 910, 912, 914, 916, 918, 920, 922, 924, |
| | | 926, 928, 930, 932, 934, 936, 938, 940, 942, 944, 946, 948, 950, |
| | | 952, 954, 956, 958, 960, 962, 964, 966, 968, 970, 972, 974, 976, |
| | | 978, 980, 982, 984, 986, 988, 990, 992, 994, 996, 998, 1000, |
| | | 1002, 1004, 1006, 1008, 1010, 1012, 1014, 1016, 1018, 1020, |
| | | 1022, 1024, 1026, 1028, 1030, 1032, 1034, 1036, 1038, 1040, |
| | | 1042, 1044, 1046, 1048, 1050, 1052, 1054, 1056, 1058, 1060, |
| | | 1062, 1064, 1066, 1068, 1070, 1072, 1074, 1076, 1078, 1080, |
| | | 1082, 1084, 1086, 1088, 1090, 1092, 1094, 1096, 1098, 1100, |
| | | 1102, 1104, 1106, 1108, 1110, 1112, 1114, 1116, 1118, 1120, |
| | | 1122, 1124, 1126, 1128, 1130, 1132, 1134, 1136, 1138, 1140, |
| | | 1142, 1144, 1146, 1148, 1150, 1152, 1154, 1156, 1158, 1160, |
| | | 1162, 1164, 1166, 1168, 1170, 1172, 1174, 1176, 1178, 1180, |
| | | 1182, 1184, 1186, 1188, 1190, 1192, 1194, 1196, 1198, 1200, |
| | | 1202, 1204, 1206, 1208, 1210, 1212, 1214, 1216, 1218, 1220, |
| | | 1222, 1224, 1226, 1228, 1230, 1232, 1234, 1236, 1238, 1240, |
| | | 1242, 1244, 1246, 1248, 1250, 1252, 1254, 1256, 1258, 1260, |
| | | 1262, 1264, 1266, 1268, 1270, 1272, 1274, 1276, 1278, 1280, |
| | | 1282 |
| 1 | plastidic | 1297, 1299, 1301, 1303, 1305, 1307, 1309, 1311, 1313, 1315, |
| | | 1317, 1319, 1321, 1323, 1325, 1327, 1329, 1331, 1333, 1335, |
| | | 1337, 1339, 1341, 1343, 1345, 1347, 1349, 1351 |
| 1 | cytoplasmic | 1367, 1369, 1371, 1373, 1375, 1377, 1379, 1381, 1383, 1385, |
| | | 1387, 1389, 1391, 1393, 1395, 1397, 1399, 1401, 1403, 1405, |
| | | 1407, 1409, 1411, 1413, 1415, 1417, 1419, 1421, 1423, 1425, |
| | | 1427, 1429, 1431, 1433, 1435, 1437, 1439, 1441, 1443, 1445, |
| | | 1447 |
| 1 | plastidic | 1455, 1457, 1459, 1461, 1463, 1465, 1467, 1469, 1471, 1473, |
| | | 1475, 1477, 1479, 1481, 1483, 1485, 1487, 1489, 1491, 1493, |
| | | 1495, 1497, 1499, 1501, 1503, 1505, 1507, 1509, 1511, 1513, |
| | | 1515, 1517, 1519, 1521, 1523, 1525, 1527, 1529, 1531, 1533, |
| | | 1535, 1537, 1539, 1541, 1543, 1545 |
| 1 | plastidic | 1559, 1561, 1563, 1565, 1567, 1569, 1571, 1573, 1575, 1577, |
| | | 1579, 1581, 1583, 1585, 1587, 1589, 1591, 1593, 1595, 1597, |
| | | 1599, 1601, 1603, 1605, 1607, 1609, 1611, 1613, 1615, 1617, |
| | | 1619, 1621, 1623, 1625, 1627, 1629, 1631, 1633, 1635, 1637, |
| | | 1639, 1641, 1643, 1645, 1647, 1649, 1651, 1653, 1655, 1657, |
| | | 1659, 1661, 1663, 1665, 1667, 1669, 1671, 1673, 1675, 1677, |
| | | 1679, 1681, 1683, 1685, 1687, 1689, 1691, 1693, 1695, 1697, |
| | | 1699, 1701, 1703, 1705, 1707, 1709, 1711, 1713, 1715, 1717, |
| | | 1719, 1721, 1723, 1725, 1727, 1729, 1731, 1733, 1735, 1737, |
| | | 1739 |
| 1 | cytoplasmic | 1750, 1752, 1754, 1756, 1758, 1760, 1762, 1764, 1766, 1768, |
| | | 1770, 1772, 1774, 1776, 1778, 1780, 1782, 1784, 1786, 1788, |
| | | 1790, 1792, 1794, 1796, 1798, 1800, 1802, 1804, 1806, 1808, |
| | | 1810, 1812, 1814, 1816, 1818, 1820, 1822, 1824, 1826, 1828, |
| | | 1830, 1832, 1834, 1836, 1838, 1840, 1842, 1844, 1846, 1848, |
| | | 1850, 1852, 1854, 1856, 1858, 1860, 1862, 1864, 1866, 1868, |
| | | 1870, 1872, 1874, 1876, 1878, 1880, 1882, 1884, 1886, 1888, |
| | | 1890, 1892, 1894, 1896, 1898, 1900, 1902, 1904, 1906, 1908, |
| | | 1910, 1912, 1914, 1916, 1918, 1920, 1922, 1924, 1926, 1928, |
| | | 1930, 1932, 1934, 1936, 1938, 1940, 1942, 1944, 1946, 1948, |
| | | 1950, 1952, 1954, 1956, 1958, 1960, 1962, 1964, 1966 |
| 1 | cytoplasmic | 2148, 2150, 2152, 2154, 2156, 2158, 2160, 2162, 2164, 2166, |
| | | 2168, 2170, 2172, 2174, 2176, 2178, 2180, 2182, 2184, 2186, |
| | | 2188, 2190, 2192, 2194, 2196, 2198, 2200, 2202, 2204, 2206, |
| | | 2208, 2210, 2212, 2214, 2216, 2218, 2220, 2222, 2224, 2226, |
| | | 2228, 2230, 2232, 2234, 2236, 2238, 2240, 2242, 2244, 2246, |
| | | 2248, 2250, 2252, 2254, 2256, 2258, 2260, 2262, 2264, 2266, |
| | | 2268, 2270, 2272, 2274, 2276, 2278, 2280, 2282, 2284, 2286, |
| | | 2288, 2290, 2292, 2294, 2296, 2298, 2300, 2302, 2304, 2306, |
| | | 2308, 2310, 2312, 2314, 2316, 2318, 2320, 2322, 2324, 2326, |
| | | 2328, 2330, 2332, 2334, 2336, 2338, 2340, 2342, 2344, 2346, |
| | | 2348, 2350, 2352, 2354, 2356, 2358, 2360, 2362, 2364, 2366, |
| | | 2368, 2370, 2372, 2374, 2376, 2378, 2380, 2382, 2384, 2386, |
| | | 2388, 2390, 2392, 2394, 2396, 2398, 2400, 2402, 2404, 2406, |
| | | 2408, 2410 |
| 1 | cytoplasmic | 2418, 2420, 2422, 2424, 2426, 2428, 2430, 2432, 2434 |
| 1 | cytoplasmic | 2452, 2454, 2456 |
| 1 | cytoplasmic | 2471, 2473, 2475, 2477, 2479, 2481 |
| 1 | cytoplasmic | 2503, 2505, 2507 |
| 1 | cytoplasmic | 2525, 2527, 2529, 2531, 2533, 2535, 2537, 2539, 2541, 2543, |
| | | 2545, 2547, 2549, 2551 |
| 1 | cytoplasmic | 2569, 2571, 2573 |
| 1 | cytoplasmic | 2595, 2597, 2599, 2601, 2603, 2605, 2607 |
| 1 | cytoplasmic | 2621, 2623, 2625, 2627, 2629, 2631, 2633, 2635, 2637, 2639, |
| | | 2641, 2643, 2645, 2647, 2649, 2651, 2653, 2655 |
| 1 | cytoplasmic | 2680, 2682, 2684, 2686, 2688, 2690, 2692 |
| 1 | cytoplasmic | 2703, 2705, 2707, 2709, 2711, 2713, 2715, 2717, 2719, 2721, |
| | | 2723, 2725, 2727, 2729, 2731, 2733, 2735, 2737, 2739, 2741, |
| | | 2743, 2745, 2747, 2749, 2751, 2753, 2755, 2757, 2759, 2761, |
| | | 2763, 2765, 2767, 2769, 2771, 2773, 2775, 2777, 2779, 2781, |
| | | 2783, 2785, 2787, 2789, 2791, 2793, 2795, 2797, 2799, 2801, |
| | | 2803, 2805, 2807, 2809, 2811, 2813, 2815, 2817, 2819, 2821, |
| | | 2823, 2825, 2827, 2829, 2831, 2833, 2835, 2837, 2839, 2841, |
| | | 2843, 2845, 2847, 2849, 2851, 2853, 2855, 2857, 2859, 2861, |
| | | 2863, 2865, 2867, 2869, 2871, 2873, 2875, 2877, 2879, 2881, |
| | | 2883, 2885, 2887, 2889, 2891, 2893, 2895, 2897, 2899, 2901, |
| | | 2903, 2905, 2907, 2909, 2911, 2913, 2915, 2917, 2919, 2921, |
| | | 2923, 2925, 2927, 2929, 2931, 2933, 2935, 2937, 2939, 2941, |
| | | 2943, 2945, 2947, 2949, 2951, 2953, 2955, 2957, 2959, 2961, |
| | | 2963, 2965, 2967, 2969, 2971, 2973, 2975, 2977, 2979, 2981, |
| | | 2983, 2985, 2987, 2989, 2991, 2993, 2995, 2997, 2999, 3001, |
| | | 3003, 3005, 3007, 3009, 3011, 3013, 3015, 3017, 3019, 3021, |
| | | 3023, 3025, 3027, 3029, 3031, 3033, 3035, 3037, 3039, 3041, |
| | | 3043, 3045, 3047, 3049, 3051, 3053, 3055, 3057, 3059, 3061, |
| | | 3063, 3065, 3067, 3069, 3071, 3073, 3075, 3077, 3079, 3081, |
| | | 3083, 3085, 3087, 3089, 3091, 3093, 3095, 3097, 3099, 3101, |
| | | 3103, 3105, 3107, 3109, 3111, 3113, 3115, 3117, 3119, 3121, |
| | | 3123, 3125, 3127, 3129, 3131, 3133, 3135, 3137, 3139, 3141, |
| | | 3143, 3145, 3147, 3149, 3151, 3153, 3155, 3157, 3159, 3161, |
| | | 3163, 3165, 3167, 3169, 3171, 3173, 3175, 3177, 3179, 3181, |
| | | 3183, 3185, 3187, 3189, 3191, 3193, 3195, 3197, 3199, 3201, |
| | | 3203, 3205, 3207, 3209, 3211, 3213, 3215, 3217, 3219, 3221, |
| | | 3223, 3225, 3227, 3229, 3231, 3233, 3235, 3237, 3239, 3241, |
| | | 3243, 3245, 3247, 3249, 3251, 3253, 3255, 3257, 3259, 3261, |
| | | 3263, 3265, 3267, 3269, 3271, 3273, 3275, 3277, 3279, 3281, |
| | | 3283, 3285, 3287 |
| 1 | cytoplasmic | 3312, 3314, 3316, 3318, 3320, 3322, 3324, 3326, 3328, 3330, |
| | | 3332, 3334, 3336, 3338, 3340, 3342, 3344, 3346, 3348, 3350, |
| | | 3352, 3354, 3356, 3358, 3360, 3362, 3364, 3366, 3368, 3370, |
| | | 3372, 3374, 3376, 3378, 3380, 3382, 3384, 3386, 3388, 3390, |
| | | 3392, 3394, 3396, 3398, 3400, 3402, 3404, 3406, 3408, 3410, |
| | | 3412, 3414, 3416, 3418, 3420, 3422, 3424, 3426, 3428, 3430, |
| | | 3432, 3434, 3436, 3438, 3440, 3442, 3444, 3446, 3448, 3450, |
| | | 3452, 3454, 3456, 3458, 3460, 3462, 3464, 3466, 3468, 3470, |
| | | 3472, 3474, 3476, 3478, 3480, 3482, 3484, 3486, 3488, 3490, |
| | | 3492, 3494, 3496, 3498, 3500, 3502, 3504, 3506, 3508, 3510, |
| | | 3512, 3514, 3516, 3518, 3520, 3522, 3524, 3526, 3528, 3530, |
| | | 3532, 3534, 3536, 3538, 3540, 3542, 3544, 3546, 3548, 3550, |
| | | 3552, 3554, 3556, 3558, 3560, 3562, 3564, 3566, 3568, 3570, |
| | | 3572, 3574, 3576, 3578, 3580, 3582, 3584, 3586, 3588, 3590, |
| | | 3592, 3594, 3596, 3598, 3600, 3602, 3604, 3606, 3608, 3610, |
| | | 3612, 3614, 3616 |
| 1 | cytoplasmic | 3670, 3672, 3674, 3676, 3678, 3680, 3682, 3684 |
| 1 | cytoplasmic | 3692, 3694, 3696, 3698, 3700, 3702, 3704, 3706, 3708, 3710, |
| | | 3712, 3714, 3716, 3718, 3720, 3722, 3724, 3726, 3728, 3730, |
| | | 3732, 3734, 3736, 3738, 3740, 3742, 3744, 3746, 3748, 3750, |
| | | 3752, 3754, 3756 |
| 1 | cytoplasmic | 4707, 4709 |
| 1 | cytoplasmic | 4719, 4721, 4723, 4725, 4727, 4729, 4731, 4733, 4735, 4737, |
| | | 4739, 4741, 4743, 4745, 4747, 4749, 4751, 4753, 4755, 4757, |
| | | 4759, 4761, 4763, 4765, 4767, 4769, 4771, 4773, 4775, 4777, |
| | | 4779, 4781, 4783, 4785, 4787, 4789, 4791, 4793, 4795, 4797, |
| | | 4799, 4801, 4803, 4805, 4807, 4809, 4811, 4813, 4815, 4817, |
| | | 4819, 4821, 4823, 4825, 4827, 4829, 4831, 4833, 4835, 4837, |
| | | 4839, 4841, 4843, 4845, 4847, 4849, 4851, 4853, 4855, 4857, |
| | | 4859, 4861, 4863, 4865, 4867, 4869, 4871, 4873, 4875, 4877, |
| | | 4879, 4881, 4883, 4885, 4887, 4889, 4891, 4893, 4895, 4897, |
| | | 4899, 4901, 4903, 4905, 4907, 4909, 4911, 4913, 4915, 4917, |
| | | 4919, 4921, 4923, 4925, 4927, 4929, 4931, 4933, 4935, 4937, |
| | | 4939, 4941, 4943, 4945, 4947, 4949, 4951, 4953, 4955, 4957, |
| | | 4959, 4961, 4963, 4965, 4967, 4969, 4971, 4973, 4975, 4977, |
| | | 4979, 4981, 4983, 4985, 4987, 4989, 4991, 4993, 4995, 4997, |
| | | 4999, 5001, 5003, 5005, 5007, 5009, 5011, 5013, 5015, 5017, |
| | | 5019, 5021, 5023, 5025, 5027, 5029, 5031, 5033, 5035, 5037, |
| | | 5039, 5041, 5043, 5045, 5047, 5049, 5051, 5053, 5055, 5057, |
| | | 5059, 5061, 5063, 5065, 5067, 5069, 5071, 5073, 5075, 5077, |
| | | 5079, 5081, 5083, 5085, 5087, 5089, 5091, 5093, 5095, 5097, |
| | | 5099, 5101, 5103, 5105, 5107, 5109, 5111, 5113, 5115, 5117, |
| | | 5119, 5121, 5123, 5125, 5127, 5129, 5131, 5133, 5135, 5137, |
| | | 5139, 5141, 5143, 5145, 5147, 5149, 5151, 5153, 5155 |
| 1 | cytoplasmic | 3771, 3773, 3775, 3777, 3779, 3781, 3783, 3785, 3787, 3789, |
| | | 3791, 3793, 3795, 3797, 3799, 3801, 3803, 3805, 3807, 3809, |
| | | 3811, 3813, 3815, 3817, 3819, 3821, 3823, 3825, 3827, 3829, |
| | | 3831, 3833, 3835, 3837, 3839, 3841, 3843, 3845, 3847, 3849, |
| | | 3851, 3853, 3855, 3857, 3859, 3861, 3863, 3865, 3867, 3869, |
| | | 3871, 3873, 3875, 3877, 3879, 3881, 3883, 3885, 3887, 3889, |
| | | 3891, 3893, 3895, 3897, 3899, 3901, 3903, 3905, 3907, 3909, |
| | | 3911, 3913, 3915, 3917, 3919, 3921, 3923, 3925, 3927, 3929, |
| | | 3931, 3933, 3935, 3937, 3939, 3941, 3943, 3945, 3947, 3949, |
| | | 3951, 3953 |
| 1 | cytoplasmic | 4011, 4013, 4015, 4017, 4019, 4021, 4023, 4025, 4027, 4029, |
| | | 4031, 4033, 4035, 4037, 4039, 4041, 4043, 4045, 4047, 4049, |
| | | 4051, 4053, 4055, 4057, 4059 |
| 1 | cytoplasmic | 4079, 4081, 4083, 4085, 4087, 4089, 4091, 4093, 4095, 4097, |
| | | 4099, 4101, 4103, 4105, 4107, 4109, 4111, 4113, 4115, 4117, |
| | | 4119, 4121, 4123, 4125, 4127, 4129, 4131, 4133, 4135, 4137, |
| | | 4139, 4141, 4143, 4145, 4147, 4149, 4151, 4153, 4155, 4157, |
| | | 4159, 4161, 4163, 4165, 4167, 4169, 4171, 4173, 4175, 4177, |
| | | 4179, 4181, 4183, 4185, 4187, 4189, 4191, 4193, 4195, 4197, |
| | | 4199, 4201, 4203, 4205, 4207, 4209, 4211, 4213, 4215, 4217, |
| | | 4219, 4221, 4223, 4225, 4227, 4229, 4231, 4233, 4235, 4237, |
| | | 4239, 4241, 4243, 4245, 4247, 4249, 4251, 4253, 4255, 4257, |
| | | 4259, 4261, 4263, 4265, 4267, 4269, 4271, 4273, 4275, 4277, |
| | | 4279, 4281, 4283, 4285, 4287, 4289, 4291, 4293, 4295, 4297, |
| | | 4299, 4301, 4303, 4305, 4307, 4309, 4311, 4313, 4315 |
| 1 | cytoplasmic | 4339, 4341, 4343, 4345, 4347, 4349, 4351, 4353, 4355, 4357, |
| | | 4359, 4361, 4363, 4365, 4367, 4369, 4371, 4373, 4375, 4377, |
| | | 4379, 4381, 4383, 4385, 4387, 4389, 4391, 4393, 4395, 4397, |
| | | 4399, 4401, 4403, 4405, 4407, 4409, 4411, 4413, 4415, 4417, |
| | | 4419, 4421, 4423, 4425, 4427, 4429, 4431, 4433, 4435, 4437, |
| | | 4439, 4441, 4443, 4445, 4447, 4449, 4451, 4453, 4455, 4457, |
| | | 4459, 4461, 4463, 4465, 4467, 4469, 4471, 4473, 4475, 4477, |
| | | 4479, 4481, 4483, 4485, 4487, 4489, 4491, 4493, 4495, 4497, |
| | | 4499, 4501, 4503, 4505, 4507, 4509, 4511, 4513, 4515, 4517, |
| | | 4519, 4521, 4523, 4525, 4527 |
| 1 | cytoplasmic | 4621, 4623, 4625, 4627, 4629, 4631, 4633, 4635, 4637, 4639, |
| | | 4641, 4643, 4645, 4647, 4649, 4651, 4653, 4655, 4657, 4659, |
| | | 4661, 4663, 4665, 4667, 4669 |
| 1 | cytoplasmic | 6312, 6314, 6316, 6318, 6320, 6322 |
| 1 | cytoplasmic | 5809, 5811, 5813, 5815, 5817, 5819, 5821, 5823, 5825, 5827, |
| | | 5829, 5831, 5833, 5835, 5837, 5839, 5841, 5843, 5845, 5847, |
| | | 5849, 5851, 5853, 5855, 5857, 5859, 5861, 5863, 5865, 5867, |
| | | 5869, 5871, 5873, 5875, 5877, 5879, 5881, 5883, 5885, 5887, |
| | | 5889, 5891, 5893, 5895, 5897, 5899, 5901, 5903, 5905, 5907, |
| | | 5909, 5911, 5913, 5915, 5917, 5919, 5921, 5923, 5925, 5927, |
| | | 5929, 5931, 5933, 5935, 5937, 5939, 5941, 5943, 5945, 5947, |
| | | 5949, 5951, 5953, 5955, 5957, 5959, 5961, 5963, 5965, 5967, |
| | | 5969, 5971, 5973, 5975, 5977, 5979, 5981, 5983, 5985, 5987, |
| | | 5989, 5991, 5993, 5995, 5997, 5999, 6001, 6003, 6005, 6007, |
| | | 6009, 6011, 6013, 6015, 6017, 6019, 6021, 6023, 6025, 6027, |
| | | 6029, 6031, 6033, 6035, 6037, 6039, 6041, 6043, 6045, 6047, |
| | | 6049, 6051, 6053, 6055, 6057, 6059, 6061, 6063, 6065, 6067, |
| | | 6069, 6071, 6073, 6075, 6077, 6079, 6081, 6083, 6085, 6087, |
| | | 6089, 6091, 6093, 6095, 6097, 6099, 6101, 6103, 6105, 6107, |
| | | 6109, 6111, 6113, 6115, 6117, 6119, 6121, 6123, 6125, 6127, |
| | | 6129, 6131, 6133, 6135, 6137, 6139, 6141, 6143, 6145, 6147, |
| | | 6149, 6151, 6153, 6155, 6157, 6159, 6161, 6163, 6165, 6167, |
| | | 6169, 6171, 6173, 6175, 6177, 6179, 6181, 6183, 6185, 6187, |
| | | 6189, 6191, 6193, 6195, 6197, 6199, 6201, 6203, 6205, 6207, |
| | | 6209, 6211, 6213, 6215, 6217, 6219, 6221, 6223, 6225, 6227, |
| | | 6229, 6231, 6233, 6235, 6237, 6239, 6241, 6243, 6245, 6247, |
| | | 6249, 6251, 6253, 6255, 6257, 6259, 6261, 6263, 6265, 6267, |
| | | 6269, 6271, 6273, 6275, 6277, 6279, 6281, 6283, 6285, 6287, |
| | | 6289, 6291, 6293, 6295, 6297, 6299 |
| 1 | cytoplasmic | 7542, 7544, 7546, 7548, 7550, 7552, 7554, 7556, 7558, 7560, |
| | | 7562, 7564, 7566, 7568, 7570, 7572, 7574, 7576, 7578, 7580, |
| | | 7582, 7584, 7586 |
| 1 | cytoplasmic | 7976, 7978, 7980, 7982, 7984, 7986, 7988, 7990, 7992, 7994, |
| | | 7996, 7998, 8000, 8002, 8004, 8006, 8008, 8010, 8012, 8014, |
| | | 8016, 8018, 8020, 8022, 8024, 8026, 8028, 8030, 8032, 8034, |
| | | 8036, 8038, 8040, 8042, 8044, 8046, 8048, 8050, 8052 |
| 1 | plastidic | 7536 |
| 1 | cytoplasmic | 5259, 5261, 5263, 5265, 5267, 5269, 5271, 5273, 5275, 5277, |
| | | 5279, 5281, 5283, 5285, 5287, 5289, 5291, 5293, 5295, 5297, |
| | | 5299, 5301, 5303, 5305, 5307, 5309, 5311, 5313, 5315, 5317, |
| | | 5319, 5321, 5323, 5325, 5327, 5329, 5331, 5333, 5335, 5337, |
| | | 5339, 5341, 5343, 5345, 5347, 5349, 5351, 5353, 5355, 5357, |
| | | 5359, 5361, 5363, 5365, 5367, 5369, 5371, 5373, 5375, 5377, |
| | | 5379, 5381, 5383, 5385, 5387, 5389, 5391, 5393, 5395, 5397, |
| | | 5399, 5401, 5403, 5405, 5407, 5409, 5411, 5413, 5415, 5417, |
| | | 5419, 5421, 5423, 5425, 5427, 5429, 5431, 5433, 5435, 5437, |
| | | 5439, 5441, 5443, 5445, 5447, 5449, 5451, 5453, 5455, 5457, |
| | | 5459, 5461, 5463, 5465, 5467, 5469, 5471, 5473, 5475, 5477, |
| | | 5479, 5481, 5483, 5485, 5487, 5489, 5491, 5493, 5495, 5497, |
| | | 5499, 5501, 5503, 5505, 5507, 5509, 5511, 5513, 5515, 5517, |
| | | 5519, 5521, 5523, 5525, 5527, 5529, 5531, 5533, 5535, 5537, |
| | | 5539, 5541, 5543, 5545, 5547, 5549, 5551, 5553, 5555, 5557, |
| | | 5559, 5561, 5563, 5565, 5567, 5569, 5571, 5573, 5575, 5577, |
| | | 5579, 5581, 5583, 5585, 5587, 5589, 5591, 5593, 5595, 5597, |
| | | 5599, 5601, 5603, 5605, 5607, 5609, 5611, 5613, 5615, 5617, |
| | | 5619, 5621, 5623, 5625, 5627, 5629, 5631, 5633, 5635, 5637, |
| | | 5639, 5641, 5643, 5645, 5647, 5649, 5651, 5653, 5655, 5657, |
| | | 5659, 5661, 5663, 5665, 5667, 5669, 5671, 5673, 5675, 5677, |
| | | 5679, 5681, 5683, 5685, 5687, 5689, 5691, 5693, 5695, 5697, |
| | | 5699, 5701, 5703, 5705, 5707, 5709, 5711, 5713, 5715, 5717, |
| | | 5719, 5721, 5723, 5725, 5727, 5729, 5731, 5733, 5735, 5737, |
| | | 5739, 5741, 5743, 5745, 5747, 5749, 5751, 5753, 5755, 5757, |
| | | 5759, 5761, 5763, 5765, 5767, 5769, 5771, 5773, 5775, 5777, |
| | | 5779, 5781, 5783 |
| 1 | cytoplasmic | 6334, 6336, 6338, 6340, 6342, 6344, 6346, 6348, 6350, 6352, |
| | | 6354, 6356, 6358, 6360, 6362, 6364, 6366, 6368, 6370, 6372, |
| | | 6374, 6376, 6378, 6380, 6382, 6384, 6386, 6388, 6390, 6392, |
| | | 6394, 6396, 6398, 6400, 6402, 6404, 6406, 6408, 6410, 6412, |
| | | 6414, 6416, 6418, 6420, 6422, 6424 |
| 1 | cytoplasmic | 7594, 7596, 7598, 7600, 7602, 7604, 7606, 7608, 7610, 7612, |
| | | 7614, 7616, 7618, 7620, 7622, 7624, 7626, 7628, 7630, 7632, |
| | | 7634, 7636, 7638, 7640, 7642, 7644, 7646, 7648, 7650, 7652, |
| | | 7654, 7656, 7658, 7660, 7662, 7664, 7666, 7668, 7670, 7672, |
| | | 7674, 7676, 7678, 7680, 7682, 7684, 7686, 7688, 7690, 7692, |
| | | 7694, 7696, 7698, 7700, 7702, 7704, 7706, 7708, 7710, 7712, |
| | | 7714, 7716, 7718, 7720, 7722, 7724, 7726, 7728, 7730, 7732, |
| | | 7734, 7736, 7738, 7740, 7742, 7744, 7746, 7748, 7750, 7752, |
| | | 7754, 7756, 7758, 7760, 7762, 7764, 7766, 7768, 7770, 7772, |
| | | 7774, 7776, 7778, 7780, 7782, 7784, 7786, 7788, 7790, 7792, |
| | | 7794, 7796, 7798, 7800, 7802, 7804, 7806, 7808, 7810, 7812, |
| | | 7814, 7816, 7818, 7820, 7822, 7824, 7826, 7828, 7830, 7832, |
| | | 7834, 7836, 7838, 7840, 7842, 7844, 7846, 7848, 7850, 7852, |
| | | 7854, 7856, 7858, 7860, 7862, 7864, 7866, 7868, 7870, 7872, |
| | | 7874, 7876, 7878, 7880, 7882, 7884, 7886, 7888, 7890, 7892, |
| | | 7894, 7896, 7898, 7900, 7902, 7904, 7906, 7908, 7910, 7912, |
| | | 7914, 7916, 7918, 7920, 7922, 7924, 7926, 7928, 7930, 7932, |
| | | 7934, 7936, 7938, 7940, 7942, 7944, 7946, 7948, 7950, 7952, |
| | | 7954, 7956, 7958, 7960 |
| 1 | plastidic | 6438, 6440, 6442, 6444, 6446, 6448, 6450, 6452, 6454, 6456, |
| | | 6458, 6460, 6462, 6464, 6466, 6468, 6470, 6472, 6474, 6476, |
| | | 6478, 6480, 6482, 6484, 6486, 6488, 6490, 6492, 6494, 6496, |
| | | 6498, 6500, 6502, 6504, 6506, 6508, 6510, 6512, 6514, 6516, |
| | | 6518, 6520, 6522, 6524, 6526, 6528, 6530, 6532, 6534, 6536, |
| | | 6538, 6540, 6542, 6544, 6546, 6548, 6550, 6552, 6554, 6556, |
| | | 6558, 6560, 6562, 6564, 6566, 6568, 6570, 6572, 6574, 6576, |
| | | 6578, 6580, 6582, 6584, 6586, 6588, 6590, 6592, 6594, 6596, |
| | | 6598, 6600, 6602, 6604, 6606, 6608, 6610, 6612, 6614, 6616, |
| | | 6618, 6620, 6622, 6624, 6626, 6628, 6630, 6632, 6634, 6636, |
| | | 6638, 6640, 6642, 6644, 6646, 6648, 6650, 6652, 6654, 6656, |
| | | 6658, 6660, 6662, 6664, 6666, 6668, 6670, 6672, 6674, 6676, |
| | | 6678, 6680, 6682, 6684, 6686, 6688, 6690, 6692, 6694, 6696, |
| | | 6698, 6700, 6702, 6704, 6706, 6708, 6710, 6712 |
| 1 | plastidic | 6725, 6727, 6729, 6731, 6733, 6735, 6737, 6739, 6741, 6743, |
| | | 6745, 6747, 6749, 6751, 6753, 6755, 6757, 6759, 6761, 6763, |
| | | 6765, 6767, 6769, 6771, 6773, 6775, 6777, 6779, 6781, 6783, |
| | | 6785, 6787, 6789, 6791, 6793, 6795, 6797, 6799, 6801, 6803, |
| | | 6805, 6807, 6809, 6811, 6813, 6815, 6817, 6819, 6821, 6823, |
| | | 6825, 6827, 6829, 6831, 6833, 6835, 6837, 6839, 6841, 6843, |
| | | 6845, 6847, 6849, 6851, 6853, 6855, 6857, 6859, 6861, 6863, |
| | | 6865, 6867, 6869, 6871, 6873, 6875, 6877, 6879, 6881, 6883, |
| | | 6885, 6887, 6889, 6891, 6893, 6895, 6897, 6899, 6901, 6903, |
| | | 6905, 6907, 6909, 6911, 6913, 6915, 6917, 6919, 6921, 6923, |
| | | 6925, 6927, 6929, 6931, 6933, 6935, 6937, 6939, 6941, 6943, |
| | | 6945, 6947, 6949, 6951, 6953, 6955, 6957, 6959, 6961, 6963, |
| | | 6965, 6967, 6969, 6971, 6973, 6975, 6977, 6979, 6981, 6983, |
| | | 6985, 6987, 6989, 6991, 6993, 6995, 6997, 6999, 7001, 7003, |
| | | 7005, 7007, 7009, 7011, 7013, 7015, 7017, 7019, 7021, 7023, |
| | | 7025, 7027, 7029, 7031, 7033, 7035, 7037, 7039, 7041, 7043, |
| | | 7045, 7047, 7049, 7051, 7053, 7055, 7057, 7059, 7061, 7063, |
| | | 7065, 7067, 7069, 7071, 7073, 7075, 7077, 7079, 7081, 7083, |
| | | 7085, 7087, 7089, 7091, 7093, 7095, 7097, 7099, 7101, 7103, |
| | | 7105, 7107, 7109, 7111, 7113, 7115, 7117, 7119, 7121, 7123, |
| | | 7125, 7127, 7129, 7131, 7133, 7135, 7137, 7139, 7141, 7143, |
| | | 7145, 7147, 7149, 7151, 7153, 7155, 7157, 7159, 7161, 7163, |
| | | 7165, 7167, 7169, 7171, 7173, 7175, 7177, 7179, 7181, 7183, |
| | | 7185, 7187, 7189, 7191, 7193, 7195, 7197, 7199, 7201, 7203, |
| | | 7205, 7207, 7209, 7211, 7213, 7215, 7217, 7219, 7221, 7223, |
| | | 7225, 7227, 7229, 7231, 7233, 7235, 7237, 7239, 7241, 7243, |
| | | 7245, 7247, 7249, 7251, 7253, 7255, 7257, 7259, 7261, 7263, |
| | | 7265, 7267, 7269, 7271, 7273, 7275, 7277, 7279, 7281, 7283, |
| | | 7285, 7287, 7289, 7291, 7293, 7295, 7297, 7299, 7301, 7303, |
| | | 7305, 7307, 7309, 7311, 7313, 7315, 7317, 7319, 7321, 7323, |
| | | 7325, 7327, 7329, 7331, 7333, 7335, 7337, 7339, 7341, 7343, |
| | | 7345, 7347, 7349, 7351, 7353, 7355, 7357, 7359, 7361, 7363, |
| | | 7365, 7367, 7369, 7371, 7373, 7375, 7377, 7379, 7381, 7383, |
| | | 7385, 7387, 7389, 7391, 7393, 7395, 7397, 7399, 7401, 7403, |
| | | 7405, 7407, 7409, 7411, 7413, 7415, 7417, 7419, 7421, 7423, |
| | | 7425, 7427, 7429, 7431, 7433, 7435, 7437, 7439, 7441, 7443, |
| | | 7445, 7447, 7449, 7451, 7453, 7455, 7457, 7459, 7461, 7463, |
| | | 7465, 7467, 7469, 7471, 7473, 7475, 7477, 7479, 7481, 7483, |
| | | 7485, 7487, 7489, 7491, 7493, 7495 |
| 1 | cytoplasmic | 8092, 8094, 8096, 8098, 8100, 8102, 8104, 8106, 8108, 8110, |
| | | 8112, 8114, 8116, 8118, 8120, 8122, 8124, 8126, 8128, 8130, |
| | | 8132, 8134, 8136, 8138, 8140, 8142, 8144, 8146, 8148, 8150, |
| | | 8152, 8154, 8156, 8158, 8160, 8162, 8164, 8166, 8168, 8170, |
| | | 8172, 8174, 8176, 8178, 8180, 8182, 8184, 8186, 8188, 8190, |
| | | 8192, 8194, 8196, 8198, 8200, 8202, 8204, 8206, 8208, 8210, |
| | | 8212, 8214, 8216, 8218, 8220, 8222, 8224, 8226, 8228, 8230, |
| | | 8232, 8234, 8236, 8238, 8240, 8242, 8244, 8246, 8248, 8250, |
| | | 8252, 8254, 8256, 8258, 8260, 8262, 8264, 8266, 8268, 8270, |
| | | 8272, 8274, 8276, 8278, 8280, 8282, 8284, 8286, 8288, 8290, |
| | | 8292, 8294, 8296, 8298, 8300, 8302, 8304, 8306, 8308, 8310, |
| | | 8312, 8314, 8316, 8318, 8320, 8322, 8324, 8326, 8328, 8330, |
| | | 8332, 8334, 8336, 8338, 8340, 8342, 8344, 8346, 8348, 8350, |
| | | 8352, 8354, 8356, 8358, 8360, 8362, 8364, 8366, 8368, 8370, |
| | | 8372, 8374, 8376, 8378, 8380, 8382, 8384, 8386, 8388, 8390, |
| | | 8392, 8394, 8396, 8398, 8400, 8402, 8404, 8406, 8408, 8410, |
| | | 8412, 8414, 8416, 8418, 8420, 8422, 8424, 8426, 8428, 8430, |
| | | 8432, 8434, 8436, 8438, 8440, 8442, 8444, 8446, 8448, 8450, |
| | | 8452, 8454, 8456, 8458, 8460, 8462, 8464, 8466, 8468, 8470, |
| | | 8472, 8474, 8476, 8478, 8480, 8482, 8484, 8486, 8488, 8490, |
| | | 8492, 8494, 8496, 8498, 8500, 8502, 8504, 8506, 8508, 8510, |
| | | 8512, 8514, 8516, 8518, 8520, 8522, 8524, 8526, 8528, 8530, |
| | | 8532, 8534, 8536, 8538, 8540, 8542, 8544, 8546, 8548 |
| 1 | cytoplasmic | 8675, 8677, 8679, 8681, 8683, 8685, 8687, 8689, 8691, 8693, |
| | | 8695, 8697, 8699, 8701, 8703, 8705, 8707 |
| 1 | cytoplasmic | 8723, 8725, 8727, 8729, 8731, 8733, 8735, 8737, 8739, 8741, |
| | | 8743, 8745, 8747, 8749, 8751, 8753, 8755, 8757, 8759, 8761, |
| | | 8763, 8765, 8767, 8769, 8771, 8773, 8775, 8777, 8779, 8781, |
| | | 8783, 8785, 8787, 8789, 8791, 8793, 8795, 8797, 8799, 8801, |
| | | 8803, 8805, 8807, 8809, 8811, 8813, 8815, 8817, 8819, 8821, |
| | | 8823, 8825, 8827, 8829, 8831, 8833, 8835, 8837, 8839, 8841, |
| | | 8843, 8845, 8847, 8849, 8851 |
| 1 | cytoplasmic | 8914, 8916, 8918, 8920, 8922, 8924, 8926, 8928, 8930, 8932, |
| | | 8934, 8936, 8938, 8940, 8942, 8944, 8946, 8948, 8950, 8952, |
| | | 8954, 8956, 8958, 8960, 8962, 8964, 8966, 8968, 8970, 8972, |
| | | 8974, 8976, 8978, 8980, 8982, 8984, 8986, 8988, 8990, 8992, |
| | | 8994, 8996, 8998, 9000, 9002, 9004, 9006, 9008, 9010, 9012, |
| | | 9014, 9016, 9018, 9020, 9022, 9024, 9026, 9028, 9030, 9032, |
| | | 9034, 9036, 9038, 9040, 9042, 9044, 9046, 9048, 9050 |
| 1 | cytoplasmic | 9111, 9113, 9115, 9117, 9119, 9121, 9123, 9125, 9127, 9129, |
| | | 9131, 9133, 9135, 9137, 9139, 9141, 9143, 9145, 9147, 9149, |
| | | 9151, 9153, 9155, 9157, 9159, 9161, 9163, 9165, 9167, 9169, |
| | | 9171, 9173, 9175, 9177, 9179, 9181, 9183, 9185, 9187, 9189, |
| | | 9191, 9193, 9195, 9197, 9199, 9201, 9203, 9205, 9207, 9209, |
| | | 9211, 9213, 9215, 9217, 9219, 9221, 9223, 9225, 9227, 9229, |
| | | 9231, 9233, 9235, 9237, 9239, 9241, 9243, 9245, 9247, 9249, |
| | | 9251, 9253, 9255, 9257, 9259, 9261, 9263, 9265, 9267, 9269, |
| | | 9271, 9273, 9275, 9277, 9279, 9281, 9283, 9285, 9287, 9289, |
| | | 9291, 9293, 9295, 9297, 9299, 9301, 9303, 9305, 9307, 9309, |
| | | 9311, 9313, 9315, 9317, 9319, 9321, 9323, 9325, 9327, 9329, |
| | | 9331, 9333, 9335, 9337, 9339, 9341, 9343, 9345, 9347, 9349, |
| | | 9351, 9353, 9355, 9357, 9359, 9361, 9363, 9365, 9367, 9369, |
| | | 9371, 9373, 9375, 9377, 9379, 9381, 9383, 9385, 9387, 9389, |
| | | 9391, 9393, 9395, 9397, 9399, 9401, 9403, 9405, 9407, 9409, |
| | | 9411, 9413, 9415, 9417, 9419, 9421, 9423, 9425, 9427, 9429, |
| | | 9431, 9433, 9435, 9437, 9439, 9441, 9443, 9445, 9447, 9449, |
| | | 9451, 9453, 9455, 9457, 9459, 9461, 9463, 9465, 9467, 9469, |
| | | 9471, 9473, 9475, 9477, 9479, 9481, 9483, 9485, 9487, 9489, |
| | | 9491, 9493, 9495, 9497, 9499, 9501, 9503, 9505, 9507, 9509, |
| | | 9511, 9513, 9515, 9517, 9519, 9521, 9523, 9525, 9527, 9529, |
| | | 9531, 9533, 9535, 9537, 9539, 9541, 9543, 9545, 9547, 9549, |
| | | 9551, 9553, 9555, 9557, 9559, 9561, 9563, 9565, 9567, 9569, |
| | | 9571, 9573, 9575, 9577, 9579, 9581, 9583, 9585, 9587, 9589, |
| | | 9591, 9593, 9595, 9597, 9599, 9601, 9603, 9605, 9607 |
| 1 | cytoplasmic | 9729, 9731, 9733, 9735, 9737, 9739, 9741, 9743, 9745, 9747, |
| | | 9749, 9751, 9753, 9755, 9757, 9759, 9761, 9763, 9765, 9767, |
| | | 9769, 9771, 9773, 9775, 9777, 9779, 9781, 9783, 9785, 9787, |
| | | 9789, 9791, 9793, 9795, 9797, 9799, 9801, 9803, 9805, 9807, |
| | | 9809, 9811, 9813, 9815, 9817, 9819, 9821, 9823, 9825, 9827, |
| | | 9829, 9831, 9833, 9835, 9837, 9839, 9841, 9843, 9845, 9847, |
| | | 9849, 9851, 9853, 9855, 9857, 9859, 9861, 9863, 9865, 9867, |
| | | 9869, 9871, 9873, 9875, 9877, 9879, 9881, 9883, 9885, 9887, |
| | | 9889, 9891, 9893, 9895, 9897, 9899, 9901, 9903, 9905, 9907, |
| | | 9909, 9911, 9913, 9915, 9917, 9919, 9921, 9923, 9925, 9927, |
| | | 9929, 9931, 9933, 9935, 9937, 9939, 9941, 9943, 9945, 9947, |
| | | 9949, 9951, 9953, 9955, 9957, 9959, 9961, 9963, 9965, 9967, |
| | | 9969, 9971, 9973, 9975, 9977, 9979, 9981, 9983, 9985, 9987, |
| | | 9989, 9991, 9993, 9995, 9997, 9999, 10001, 10003, 10005, |
| | | 10007, 10009, 10011, 10013, 10015, 10017, 10019, 10021, |
| | | 10023, 10025, 10027, 10029, 10031, 10033, 10035, 10037, |
| | | 10039, 10041, 10043, 10045, 10047, 10049, 10051, 10053, |
| | | 10055, 10057, 10059, 10061, 10063, 10065, 10067, 10069, |
| | | 10071, 10073, 10075, 10077, 10079, 10081, 10083, 10085, |
| | | 10087, 10089, 10091, 10093, 10095, 10097, 10099, 10101, |
| | | 10103, 10105, 10107, 10109, 10111, 10113, 10115, 10117, |
| | | 10119, 10121, 10123, 10125, 10127, 10129, 10131, 10133, |
| | | 10135, 10137, 10139, 10141, 10143, 10145, 10147, 10149, |
| | | 10151, 10153, 10155, 10157, 10159, 10161, 10163, 10165, |
| | | 10167, 10169, 10171, 10173, 10175, 10177, 10179, 10181, |
| | | 10183, 10185, 10187, 10189, 10191, 10193, 10195, 10197, |
| | | 10199, 10201, 10203, 10205, 10207, 10209, 10211, 10213, |
| | | 10215, 10217, 10219, 10221, 10223, 10225, 10227, 10229, |
| | | 10231, 10233, 10235, 10237, 10239, 10241, 10243, 10245, |
| | | 10247, 10249, 10251, 10253, 10255, 10257, 10259, 10261, |
| | | 10263, 10265, 10267, 10269, 10271, 10273, 10275, 10277, |
| | | 10279, 10281, 10283, 10285, 10287, 10289, 10291, 10293, |
| | | 10295, 10297, 10299, 10301, 10303, 10305, 10307, 10309, |
| | | 10311, 10313, 10315, 10317, 10319, 10321, 10323, 10325, |
| | | 10327, 10329, 10331, 10333, 10335, 10337, 10339, 10341, |
| | | 10343, 10345, 10347, 10349, 10351, 10353, 10355, 10357, |
| | | 10359, 10361, 10363, 10365, 10367, 10369, 10371, 10373, |
| | | 10375, 10377, 10379, 10381, 10383, 10385, 10387, 10389, |
| | | 10391, 10393, 10395, 10397, 10399, 10401, 10403, 10405, |
| | | 10407, 10409, 10411, 10413, 10415, 10417, 10419, 10421, |
| | | 10423, 10425, 10427, 10429, 10431, 10433, 10435, 10437, |
| | | 10439, 10441, 10443, 10445, 10447, 10449, 10451, 10453, |
| | | 10455, 10457, 10459, 10461, 10463, 10465, 10467, 10469, |
| | | 10471, 10473, 10475, 10477, 10479, 10481, 10483, 10485, |
| | | 10487, 10489, 10491, 10493, 10495, 10497, 10499, 10501, |
| | | 10503, 10505, 10507, 10509, 10511, 10513, 10515, 10517, |
| | | 10519, 10521, 10523, 10525, 10527, 10529, 10531, 10533, |
| | | 10535, 10537, 10539, 10541, 10543, 10545, 10547, 10549, |
| | | 10551, 10553, 10555, 10557, 10559, 10561, 10563, 10565, |
| | | 10567, 10569, 10571, 10573, 10575, 10577, 10579, 10581, |
| | | 10583, 10585, 10587, 10589, 10591, 10593, 10595, 10597, |
| | | 10599, 10601, 10603, 10605, 10607, 10609, 10611, 10613, |
| | | 10615, 10617, 10619, 10621, 10623, 10625, 10627, 10629, |
| | | 10631, 10633, 10635, 10637, 10639, 10641, 10643, 10645, |
| | | 10647, 10649, 10651, 10653, 10655, 10657, 10659, 10661, |
| | | 10663, 10665, 10667, 10669, 10671, 10673, 10675, 10677, |
| | | 10679, 10681, 10683, 10685 |
| 1 | cytoplasmic | 10739, 10741, 10743, 10745, 10747, 10749, 10751, 10753, |
| | | 10755, 10757, 10759, 10761, 10763, 10765, 10767, 10769, |
| | | 10771, 10773, 10775, 10777, 10779, 10781, 10783, 10785, |
| | | 10787, 10789, 10791, 10793, 10795, 10797, 10799, 10801, |
| | | 10803, 10805, 10807, 10809, 10811, 10813, 10815, 10817, |
| | | 10819, 10821, 10823, 10825, 10827, 10829, 10831, 10833, |
| | | 10835, 10837, 10839, 10841, 10843, 10845, 10847, 10849, |
| | | 10851, 10853, 10855, 10857, 10859, 10861, 10863, 10865, |
| | | 10867, 10869, 10871, 10873, 10875, 10877, 10879, 10881, |
| | | 10883, 10885, 10887, 10889, 10891, 10893, 10895, 10897, |
| | | 10899, 10901, 10903, 10905, 10907, 10909, 10911, 10913, |
| | | 10915, 10917, 10919, 10921, 10923, 10925, 10927, 10929, |
| | | 10931, 10933, 10935, 10937, 10939, 10941, 10943, 10945, |
| | | 10947, 10949, 10951, 10953, 10955, 10957, 10959, 10961, |
| | | 10963, 10965, 10967, 10969, 10971, 10973, 10975, 10977, |
| | | 10979, 10981, 10983, 10985, 10987, 10989, 10991, 10993, |
| | | 10995, 10997, 10999, 11001, 11003, 11005, 11007, 11009, |
| | | 11011, 11013, 11015, 11017, 11019, 11021, 11023, 11025, |
| | | 11027, 11029, 11031, 11033, 11035, 11037, 11039, 11041 |
| 1 | cytoplasmic | 11063, 11065, 11067, 11069, 11071, 11073, 11075, 11077, |
| | | 11079, 11081, 11083, 11085, 11087, 11089, 11091, 11093, |
| | | 11095, 11097, 11099, 11101, 11103, 11105, 11107, 11109, |
| | | 11111, 11113, 11115, 11117, 11119, 11121 |
| 1 | cytoplasmic | 11140, 11142, 11144, 11146, 11148, 11150, 11152, 11154, |
| | | 11156, 11158, 11160, 11162, 11164, 11166, 11168, 11170, |
| | | 11172, 11174, 11176, 11178, 11180, 11182, 11184, 11186, |
| | | 11188, 11190, 11192, 11194, 11196, 11198, 11200, 11202, |
| | | 11204, 11206, 11208, 11210, 11212, 11214, 11216, 11218, |
| | | 11220, 11222, 11224, 11226, 11228, 11230, 11232, 11234, |
| | | 11236, 11238, 11240, 11242, 11244, 11246, 11248, 11250, |
| | | 11252, 11254, 11256, 11258, 11260, 11262, 11264, 11266, |
| | | 11268, 11270, 11272, 11274, 11276, 11278, 11280, 11282, |
| | | 11284, 11286, 11288, 11290, 11292, 11294 |
| 1 | cytoplasmic | 11307, 11309, 11311, 11313, 11315, 11317, 11319, 11321, |
| | | 11323, 11325, 11327, 11329, 11331, 11333, 11335, 11337, |
| | | 11339, 11341, 11343, 11345, 11347, 11349, 11351, 11353, |
| | | 11355, 11357, 11359, 11361, 11363, 11365, 11367, 11369, |
| | | 11371, 11373, 11375, 11377, 11379, 11381, 11383, 11385, |
| | | 11387, 11389, 11391, 11393, 11395, 11397, 11399, 11401, |
| | | 11403, 11405, 11407, 11409, 11411, 11413, 11415, 11417, |
| | | 11419, 11421, 11423, 11425, 11427, 11429, 11431, 11433, |
| | | 11435, 11437, 11439, 11441, 11443, 11445, 11447, 11449, |
| | | 11451, 11453 |
| 1 | cytoplasmic | 11498, 11500, 11502 |
| 1 | cytoplasmic | 11515, 11517, 11519, 11521, 11523, 11525 |

B: Nucleic acid sequence ID numbers

| | | |
|---|---|---|
| 1 | cytoplasmic | — |
| 1 | plastidic | — |
| 1 | cytoplasmic | — |
| 1 | cytoplasmic | — |
| 1 | cytoplasmic | 755, 757, 759, 761, 763, 765, 767, 769, 771, 773, 775, 777, 779, |
| | | 781, 783, 785, 787, 789, 791, 793, 795, 797, 799, 801, 803, 805, |
| | | 807, 809, 811, 813 |
| 1 | plastidic | 1284, 1286 |
| 1 | plastidic | — |
| 1 | cytoplasmic | — |
| 1 | plastidic | — |
| 1 | plastidic | — |
| 1 | cytoplasmic | 1968, 1970, 1972, 1974, 1976, 1978, 1980, 1982, 1984, 1986, |
| | | 1988, 1990, 1992, 1994, 1996, 1998, 2000, 2002, 2004, 2006, |
| | | 2008, 2010, 2012, 2014, 2016, 2018, 2020, 2022, 2024, 2026, |
| | | 2028, 2030, 2032, 2034, 2036, 2038, 2040, 2042, 2044, 2046, |
| | | 2048, 2050, 2052, 2054, 2056, 2058, 2060, 2062, 2064, 2066, |
| | | 2068, 2070, 2072, 2074, 2076, 2078, 2080, 2082, 2084, 2086, |
| | | 2088, 2090, 2092, 2094, 2096, 2098, 2100, 2102, 2104, 2106, |
| | | 2108, 2110, 2112, 2114, 2116, 2118, 2120, 2122, 2124, 2126, |
| | | 2128, 2130, 2132, 2134, 2136, 2138, 2140, 11547 |
| 1 | cytoplasmic | — |
| 1 | cytoplasmic | — |
| 1 | cytoplasmic | — |
| 1 | cytoplasmic | — |
| 1 | cytoplasmic | — |
| 1 | cytoplasmic | — |
| 1 | cytoplasmic | — |
| 1 | cytoplasmic | — |
| 1 | cytoplasmic | 2657, 2659, 2661, 2663, 2665, 2667, 2669 |
| 1 | cytoplasmic | — |
| 1 | cytoplasmic | 3289, 3291, 3293, 3295, 3297, 3299, 3301 |
| 1 | cytoplasmic | 3618, 3620, 3622, 3624, 3626, 3628, 3630, 3632, 3634, 3636, |
| | | 3638, 3640, 3642, 3644, 3646, 3648, 3650, 3652, 3654, 3656, |
| | | 3658 |
| 1 | cytoplasmic | — |
| 1 | cytoplasmic | 3758 |
| 1 | cytoplasmic | — |
| 1 | cytoplasmic | 5157, 5159, 5161, 5163, 5165, 5167, 5169, 5171, 5173, 5175, |
| | | 5177, 5179, 5181, 5183, 5185, 5187, 5189, 5191, 5193, 5195, |
| | | 5197, 5199, 5201, 5203, 5205, 5207, 5209, 5211, 5213, 5215, |
| | | 5217, 5219, 5221, 5223, 5225, 5227, 5229, 5231, 5233, 5235, |
| | | 5237, 5239, 5241, 5243, 5245, 5247, 5249 |
| 1 | cytoplasmic | 3955, 3957, 3959, 3961, 3963, 3965, 3967, 3969, 3971, 3973, |
| | | 3975, 3977, 3979, 3981, 3983, 3985, 3987, 3989, 3991, 3993, |
| | | 3995, 3997, 3999, 4001 |
| 1 | cytoplasmic | 4061 |
| 1 | cytoplasmic | 4317, 4319, 4321, 4323 |
| 1 | cytoplasmic | 4529, 4531, 4533, 4535, 4537, 4539, 4541, 4543, 4545, 4547, |
| | | 4549, 4551, 4553, 4555, 4557, 4559, 4561, 4563, 4565, 4567, |
| | | 4569, 4571, 4573, 4575, 4577, 4579, 4581, 4583, 4585, 4587, |
| | | 4589, 4591, 4593, 4595, 4597, 4599, 4601, 4603, 4605, 4607, |
| | | 4609 |
| 1 | cytoplasmic | 4671, 4673, 4675, 4677, 4679, 4681, 4683, 4685, 4687, 4689, |
| | | 4691, 4693, 4695 |
| 1 | cytoplasmic | — |
| 1 | cytoplasmic | — |
| 1 | cytoplasmic | — |
| 1 | cytoplasmic | 8054, 8056, 8058, 8060, 8062, 8064, 8066, 8068, 8070, 8072, |
| | | 8074, 8076, 8078 |
| 1 | plastidic | — |
| 1 | cytoplasmic | 5785, 5787, 5789, 5791, 5793, 5795, 5797 |
| 1 | cytoplasmic | — |
| 1 | cytoplasmic | 7962, 7964, 7966, 7968 |
| 1 | plastidic | 6714 |
| 1 | plastidic | 7497, 7499, 7501, 7503, 7505, 7507, 7509, 7511, 7513, 7515, |
| | | 7517 |
| 1 | cytoplasmic | 8550, 8552, 8554, 8556, 8558, 8560, 8562, 8564, 8566, 8568, |
| | | 8570, 8572, 8574, 8576, 8578, 8580, 8582, 8584, 8586, 8588, |
| | | 8590, 8592, 8594, 8596, 8598, 8600, 8602, 8604, 8606, 8608, |
| | | 8610, 8612, 8614, 8616, 8618, 8620, 8622, 8624, 8626, 8628, |
| | | 8630, 8632, 8634, 8636, 8638, 8640, 8642, 8644, 8646, 8648, |
| | | 8650, 8652, 8654, 8656, 8658, 8660, 8662, 8664 |
| 1 | cytoplasmic | 8709, 8711, 8713 |
| 1 | cytoplasmic | 8853, 8855, 8857, 8859, 8861, 8863, 8865, 8867, 8869, 8871, |
| | | 8873, 8875, 8877, 8879, 8881, 8883, 8885, 8887, 8889, 8891, |
| | | 8893, 8895 |
| 1 | cytoplasmic | 9052, 9054, 9056, 9058, 9060, 9062, 9064, 9066, 9068, 9070, |
| | | 9072, 9074, 9076, 9078, 9080, 9082, 9084, 9086, 9088, 9090, |
| | | 9092 |
| 1 | cytoplasmic | 9609, 9611, 9613, 9615, 9617, 9619, 9621, 9623, 9625, 9627, |
| | | 9629, 9631, 9633, 9635, 9637, 9639, 9641, 9643, 9645, 9647, |
| | | 9649, 9651, 9653, 9655, 9657, 9659, 9661, 9663, 9665, 9667, |
| | | 9669, 9671, 9673, 9675, 9677, 9679, 9681, 9683, 9685, 9687, |
| | | 9689, 9691, 9693, 9695, 9697, 9699, 9701, 9703, 9705, 9707, |
| | | 9709, 9711, 9713, 9715, 9717, 9719 |
| 1 | cytoplasmic | 10687, 10689, 10691, 10693, 10695, 10697, 10699, 10701, |
| | | 10703, 10705, 10707, 10709, 10711, 10713, 10715, 10717, |
| | | 10719, 10721, 10723, 10725 |
| 1 | cytoplasmic | 11043, 11045, 11047, 11049, 11051, 11053 |
| 1 | cytoplasmic | 11123, 11125, 11127, 11129, 11131 |
| 1 | cytoplasmic | 11296, 11298 |
| 1 | cytoplasmic | 11455, 11457, 11459, 11461, 11463, 11465, 11467, 11469, |
| | | 11471, 11473, 11475, 11477, 11479, 11481, 11483, 11551 |
| 1 | cytoplasmic | 11504 |
| 1 | cytoplasmic | — |

TABLE II

| | | | | | | |
|---|---|---|---|---|---|---|
| | | | | | 5. | |
| | 1. | 2. | 3. | 4. | Lead | 6. |
| Application | Hit | Project | Locus | Organism | SEQ ID | Target |

A: Amino acid sequence ID numbers

| | | | | | | |
|---|---|---|---|---|---|---|
| 1 | 1 | NUE_OEX2_1 | B0567 | E. coli | 64 | cytoplasmic |
| 1 | 2 | NUE_OEX2_1 | B0953 | E. coli | 82 | plastidic |
| 1 | 3 | NUE_OEX2_1 | B1088 | E. coli | 139 | cytoplasmic |
| 1 | 4 | NUE_OEX2_1 | B1289 | E. coli | 201 | cytoplasmic |
| 1 | 5 | NUE_OEX2_1 | B2904 | E. coli | 290 | cytoplasmic |
| 1 | 6 | NUE_OEX2_1 | B3389 | E. coli | 821 | plastidic |
| 1 | 7 | NUE_OEX2_1 | B3526 | E. coli | 1296 | plastidic |
| 1 | 8 | NUE_OEX2_1 | B3611 | E. coli | 1366 | cytoplasmic |
| 1 | 9 | NUE_OEX2_1 | B3744 | E. coli | 1454 | plastidic |
| 1 | 10 | NUE_OEX2_1 | B3869 | E. coli | 1558 | plastidic |
| 1 | 11 | NUE_OEX2_1 | B4266 | E. coli | 1749 | cytoplasmic |
| 1 | 12 | NUE_OEX2_1 | SLL0892 | Synechocystis | 2147 | cytoplasmic |
| | | | | sp. | | |
| 1 | 13 | NUE_OEX2_1 | YJL087C | S. cerevisiae | 2417 | cytoplasmic |
| 1 | 14 | NUE_OEX2_1 | YJR053W | S. cerevisiae | 2451 | cytoplasmic |
| 1 | 15 | NUE_OEX2_1 | YLR357W | S. cerevisiae | 2470 | cytoplasmic |
| 1 | 16 | NUE_OEX2_1 | YLR361C | S. cerevisiae | 2502 | cytoplasmic |
| 1 | 17 | NUE_OEX2_1 | YML086C | S. cerevisiae | 2524 | cytoplasmic |
| 1 | 18 | NUE_OEX2_1 | YML091C | S. cerevisiae | 2568 | cytoplasmic |
| 1 | 19 | NUE_OEX2_1 | YML096W | S. cerevisiae | 2594 | cytoplasmic |
| 1 | 20 | NUE_OEX2_1 | YMR236W | S. cerevisiae | 2620 | cytoplasmic |
| 1 | 21 | NUE_OEX2_1 | YNL137C | S. cerevisiae | 2679 | cytoplasmic |
| 1 | 22 | NUE_OEX2_1 | YOR196C | S. cerevisiae | 2702 | cytoplasmic |
| 1 | 23 | NUE_OEX2_1 | YPL119C | S. cerevisiae | 3311 | cytoplasmic |
| 1 | 24 | NUE_OEX2_1 | B2617 | E. coli | 3669 | cytoplasmic |
| 1 | 25 | NUE_OEX2_1 | SII1280 | Synechocystis | 3691 | cytoplasmic |
| | | | | sp. | | |
| 1 | 26 | NUE_OEX2_1 | YLR443W | S. cerevisiae | 4706 | cytoplasmic |
| 1 | 27 | NUE_OEX2_1 | YOR259C | S. cerevisiae | 4718 | cytoplasmic |
| 1 | 28 | NUE_OEX2_1 | AT2G19580.1 | A. th. | 3770 | cytoplasmic |
| 1 | 29 | NUE_OEX2_1 | AT2G20370.1 | A. th. | 4010 | cytoplasmic |
| 1 | 30 | NUE_OEX2_1 | AT4G33070.1 | A. th. | 4078 | cytoplasmic |
| 1 | 31 | NUE_OEX2_1 | AT5G07340.1 | A. th. | 4338 | cytoplasmic |
| 1 | 32 | NUE_OEX2_1 | AT5G62460.1 | A. th. | 4620 | cytoplasmic |
| 1 | 33 | NUE_OEX2_1 | AVINDRAFT_2950 | A. vinelandii | 6311 | cytoplasmic |
| 1 | 34 | NUE_OEX2_1 | AVINDRAFT_0943 | A. vinelandii | 5808 | cytoplasmic |
| 1 | 35 | NUE_OEX2_1 | SLL1797 | Synechocystis | 7541 | cytoplasmic |
| | | | | sp. | | |
| 1 | 36 | NUE_OEX2_1 | YIL043C | S. cerevisiae | 7975 | cytoplasmic |
| 1 | 37 | NUE_OEX2_1 | B2940 | E. coli | 7535 | plastidic |
| 1 | 38 | NUE_OEX2_1 | AT2G19490 | A. th. | 5258 | cytoplasmic |
| 1 | 39 | NUE_OEX2_1 | B0951 | E. coli | 6333 | cytoplasmic |
| 1 | 40 | NUE_OEX2_1 | YER023W | S. cerevisiae | 7593 | cytoplasmic |
| 1 | 41 | NUE_OEX2_1 | B1189 | E. coli | 6437 | plastidic |
| 1 | 42 | NUE_OEX2_1 | B2592 | E. coli | 6724 | plastidic |
| 1 | 43 | NUE_OEX2_1 | AT1G07400.1 | A. th. | 8091 | cytoplasmic |
| 1 | 44 | NUE_OEX2_1 | AT1G52560.1 | A. th. | 8674 | cytoplasmic |
| 1 | 45 | NUE_OEX2_1 | AT1G63940.1 | A. th. | 8722 | cytoplasmic |
| 1 | 46 | NUE_OEX2_1 | AT1G63940.2 | A. th. | 8913 | cytoplasmic |
| 1 | 47 | NUE_OEX2_1 | AT3G46230.1 | A. th. | 9110 | cytoplasmic |
| 1 | 48 | NUE_OEX2_1 | AT4G37930.1 | A. th. | 9728 | cytoplasmic |
| 1 | 49 | NUE_OEX2_1 | AT5G06290.1 | A. th. | 10738 | cytoplasmic |
| 1 | 50 | NUE_OEX2_1 | CDS5399 | P. trichocarpa | 11062 | cytoplasmic |
| 1 | 51 | NUE_OEX2_1 | CDS5402 | P. trichocarpa | 11139 | cytoplasmic |
| 1 | 52 | NUE_OEX2_1 | CDS5423 | P. trichocarpa | 11306 | cytoplasmic |
| 1 | 53 | NUE_OEX2_1 | YKL130C | S. cerevisiae | 11497 | cytoplasmic |
| 1 | 54 | NUE_OEX2_1 | YLR357W_2 | S. cerevisiae | 11514 | cytoplasmic |

B: Amino acid sequence ID numbers

| | | | | | | |
|---|---|---|---|---|---|---|
| 1 | 1 | NUE_OEX2_1 | B0567 | E. coli | 64 | cytoplasmic |
| 1 | 2 | NUE_OEX2_1 | B0953 | E. coli | 82 | plastidic |
| 1 | 3 | NUE_OEX2_1 | B1088 | E. coli | 139 | cytoplasmic |
| 1 | 4 | NUE_OEX2_1 | B1289 | E. coli | 201 | cytoplasmic |
| 1 | 5 | NUE_OEX2_1 | B2904 | E. coli | 290 | cytoplasmic |
| 1 | 6 | NUE_OEX2_1 | B3389 | E. coli | 821 | plastidic |
| 1 | 7 | NUE_OEX2_1 | B3526 | E. coli | 1296 | plastidic |
| 1 | 8 | NUE_OEX2_1 | B3611 | E. coli | 1366 | cytoplasmic |
| 1 | 9 | NUE_OEX2_1 | B3744 | E. coli | 1454 | plastidic |
| 1 | 10 | NUE_OEX2_1 | B3869 | E. coli | 1558 | plastidic |
| 1 | 11 | NUE_OEX2_1 | B4266 | E. coli | 1749 | cytoplasmic |
| 1 | 12 | NUE_OEX2_1 | SLL0892 | Synechocystis | 2147 | cytoplasmic |
| | | | | sp. | | |
| 1 | 13 | NUE_OEX2_1 | YJL087C | S. cerevisiae | 2417 | cytoplasmic |
| 1 | 14 | NUE_OEX2_1 | YJR053W | S. cerevisiae | 2451 | cytoplasmic |
| 1 | 15 | NUE_OEX2_1 | YLR357W | S. cerevisiae | 2470 | cytoplasmic |
| 1 | 16 | NUE_OEX2_1 | YLR361C | S. cerevisiae | 2502 | cytoplasmic |
| 1 | 17 | NUE_OEX2_1 | YML086C | S. cerevisiae | 2524 | cytoplasmic |
| 1 | 18 | NUE_OEX2_1 | YML091C | S. cerevisiae | 2568 | cytoplasmic |
| 1 | 19 | NUE_OEX2_1 | YML096W | S. cerevisiae | 2594 | cytoplasmic |
| 1 | 20 | NUE_OEX2_1 | YMR236W | S. cerevisiae | 2620 | cytoplasmic |
| 1 | 21 | NUE_OEX2_1 | YNL137C | S. cerevisiae | 2679 | cytoplasmic |
| 1 | 22 | NUE_OEX2_1 | YOR196C | S. cerevisiae | 2702 | cytoplasmic |
| 1 | 23 | NUE_OEX2_1 | YPL119C | S. cerevisiae | 3311 | cytoplasmic |
| 1 | 24 | NUE_OEX2_1 | B2617 | E. coli | 3669 | cytoplasmic |
| 1 | 25 | NUE_OEX2_1 | SII1280 | Synechocystis | 3691 | cytoplasmic |
| | | | | sp. | | |
| 1 | 26 | NUE_OEX2_1 | YLR443W | S. cerevisiae | 4706 | cytoplasmic |
| 1 | 27 | NUE_OEX2_1 | YOR259C | S. cerevisiae | 4718 | cytoplasmic |
| 1 | 28 | NUE_OEX2_1 | AT2G19580.1 | A. th. | 3770 | cytoplasmic |
| 1 | 29 | NUE_OEX2_1 | AT2G20370.1 | A. th. | 4010 | cytoplasmic |
| 1 | 30 | NUE_OEX2_1 | AT4G33070.1 | A. th. | 4078 | cytoplasmic |
| 1 | 31 | NUE_OEX2_1 | AT5G07340.1 | A. th. | 4338 | cytoplasmic |
| 1 | 32 | NUE_OEX2_1 | AT5G62460.1 | A. th. | 4620 | cytoplasmic |
| 1 | 33 | NUE_OEX2_1 | AVINDRAFT_2950 | A. vinelandii | 6311 | cytoplasmic |
| 1 | 34 | NUE_OEX2_1 | AVINDRAFT_0943 | A. vinelandii | 5808 | cytoplasmic |
| 1 | 35 | NUE_OEX2_1 | SLL1797 | Synechocystis | 7541 | cytoplasmic |
| | | | | sp. | | |
| 1 | 36 | NUE_OEX2_1 | YIL043C | S. cerevisiae | 7975 | cytoplasmic |
| 1 | 37 | NUE_OEX2_1 | B2940 | E. coli | 7535 | plastidic |
| 1 | 38 | NUE_OEX2_1 | AT2G19490 | A. th. | 5258 | cytoplasmic |
| 1 | 39 | NUE_OEX2_1 | B0951 | E. coli | 6333 | cytoplasmic |
| 1 | 40 | NUE_OEX2_1 | YER023W | S. cerevisiae | 7593 | cytoplasmic |
| 1 | 41 | NUE_OEX2_1 | B1189 | E. coli | 6437 | plastidic |
| 1 | 42 | NUE_OEX2_1 | B2592 | E. coli | 6724 | plastidic |
| 1 | 43 | NUE_OEX2_1 | AT1G07400.1 | A. th. | 8091 | cytoplasmic |
| 1 | 44 | NUE_OEX2_1 | AT1G52560.1 | A. th. | 8674 | cytoplasmic |
| 1 | 45 | NUE_OEX2_1 | AT1G63940.1 | A. th. | 8722 | cytoplasmic |
| 1 | 46 | NUE_OEX2_1 | AT1G63940.2 | A. th. | 8913 | cytoplasmic |
| 1 | 47 | NUE_OEX2_1 | AT3G46230.1 | A. th. | 9110 | cytoplasmic |
| 1 | 48 | NUE_OEX2_1 | AT4G37930.1 | A. th. | 9728 | cytoplasmic |
| 1 | 49 | NUE_OEX2_1 | AT5G06290.1 | A. th. | 10738 | cytoplasmic |
| 1 | 50 | NUE_OEX2_1 | CDS5399 | P. trichocarpa | 11062 | cytoplasmic |
| 1 | 51 | NUE_OEX2_1 | CDS5402 | P. trichocarpa | 11139 | cytoplasmic |
| 1 | 52 | NUE_OEX2_1 | CDS5423 | P. trichocarpa | 11306 | cytoplasmic |
| 1 | 53 | NUE_OEX2_1 | YKL130C | S. cerevisiae | 11497 | cytoplasmic |
| 1 | 54 | NUE_OEX2_1 | YLR357W_2 | S. cerevisiae | 11514 | cytoplasmic |

| | 7. |
|---|---|
| Application | SEQ IDs of Polypeptide Homologs |
| A: Amino acid sequence ID numbers | |
| 1 | 66, 68, 70, 72 |
| 1 | 84, 86, 88, 90, 92, 94, 96, 98, 100, 102, 104, 106, 108, 110, 112, |
| | 114, 116, 118, 120, 122, 124, 126, 128, 130, 132 |
| 1 | 141, 143, 145, 147, 149, 151, 153, 155, 157, 159, 161, 163, 165, |
| | 167, 169, 171, 173, 175, 177, 179, 181, 183, 185, 187, 189, 191, |
| | 193 |
| 1 | 203, 205, 207, 209, 211, 213, 215, 217, 219, 221, 223, 225, 227, |
| | 229, 231, 233, 235, 237, 239, 241, 243, 245, 247, 249, 251, 253, |
| | 255, 257, 259, 261, 263, 265, 267, 269, 271, 273, 275, 277, 279, |
| | 281, 283 |
| 1 | 292, 294, 296, 298, 300, 302, 304, 306, 308, 310, 312, 314, 316, |
| | 318, 320, 322, 324, 326, 328, 330, 332, 334, 336, 338, 340, 342, |
| | 344, 346, 348, 350, 352, 354, 356, 358, 360, 362, 364, 366, 368, |
| | 370, 372, 374, 376, 378, 380, 382, 384, 386, 388, 390, 392, 394, |
| | 396, 398, 400, 402, 404, 406, 408, 410, 412, 414, 416, 418, 420, |
| | 422, 424, 426, 428, 430, 432, 434, 436, 438, 440, 442, 444, 446, |
| | 448, 450, 452, 454, 456, 458, 460, 462, 464, 466, 468, 470, 472, |
| | 474, 476, 478, 480, 482, 484, 486, 488, 490, 492, 494, 496, 498, |
| | 500, 502, 504, 506, 508, 510, 512, 514, 516, 518, 520, 522, 524, |
| | 526, 528, 530, 532, 534, 536, 538, 540, 542, 544, 546, 548, 550, |
| | 552, 554, 556, 558, 560, 562, 564, 566, 568, 570, 572, 574, 576, |
| | 578, 580, 582, 584, 586, 588, 590, 592, 594, 596, 598, 600, 602, |
| | 604, 606, 608, 610, 612, 614, 616, 618, 620, 622, 624, 626, 628, |
| | 630, 632, 634, 636, 638, 640, 642, 644, 646, 648, 650, 652, 654, |
| | 656, 658, 660, 662, 664, 666, 668, 670, 672, 674, 676, 678, 680, |
| | 682, 684, 686, 688, 690, 692, 694, 696, 698, 700, 702, 704, 706, |
| | 708, 710, 712, 714, 716, 718, 720, 722, 724, 726, 728, 730, 732, |
| | 734, 736, 738, 740, 742, 744, 746, 748, 750, 752, 754 |
| 1 | 823, 825, 827, 829, 831, 833, 835, 837, 839, 841, 843, 845, 847, |
| | 849, 851, 853, 855, 857, 859, 861, 863, 865, 867, 869, 871, 873, |
| | 875, 877, 879, 881, 883, 885, 887, 889, 891, 893, 895, 897, 899, |
| | 901, 903, 905, 907, 909, 911, 913, 915, 917, 919, 921, 923, 925, |
| | 927, 929, 931, 933, 935, 937, 939, 941, 943, 945, 947, 949, 951, |
| | 953, 955, 957, 959, 961, 963, 965, 967, 969, 971, 973, 975, 977, |
| | 979, 981, 983, 985, 987, 989, 991, 993, 995, 997, 999, 1001, |
| | 1003, 1005, 1007, 1009, 1011, 1013, 1015, 1017, 1019, 1021, |
| | 1023, 1025, 1027, 1029, 1031, 1033, 1035, 1037, 1039, 1041, |
| | 1043, 1045, 1047, 1049, 1051, 1053, 1055, 1057, 1059, 1061, |
| | 1063, 1065, 1067, 1069, 1071, 1073, 1075, 1077, 1079, 1081, |
| | 1083, 1085, 1087, 1089, 1091, 1093, 1095, 1097, 1099, 1101, |
| | 1103, 1105, 1107, 1109, 1111, 1113, 1115, 1117, 1119, 1121, |
| | 1123, 1125, 1127, 1129, 1131, 1133, 1135, 1137, 1139, 1141, |
| | 1143, 1145, 1147, 1149, 1151, 1153, 1155, 1157, 1159, 1161, |
| | 1163, 1165, 1167, 1169, 1171, 1173, 1175, 1177, 1179, 1181, |
| | 1183, 1185, 1187, 1189, 1191, 1193, 1195, 1197, 1199, 1201, |
| | 1203, 1205, 1207, 1209, 1211, 1213, 1215, 1217, 1219, 1221, |
| | 1223, 1225, 1227, 1229, 1231, 1233, 1235, 1237, 1239, 1241, |
| | 1243, 1245, 1247, 1249, 1251, 1253, 1255, 1257, 1259, 1261, |
| | 1263, 1265, 1267, 1269, 1271, 1273, 1275, 1277, 1279, 1281, |
| | 1283 |
| 1 | 1298, 1300, 1302, 1304, 1306, 1308, 1310, 1312, 1314, 1316, |
| | 1318, 1320, 1322, 1324, 1326, 1328, 1330, 1332, 1334, 1336, |
| | 1338, 1340, 1342, 1344, 1346, 1348, 1350, 1352 |
| 1 | 1368, 1370, 1372, 1374, 1376, 1378, 1380, 1382, 1384, 1386, |
| | 1388, 1390, 1392, 1394, 1396, 1398, 1400, 1402, 1404, 1406, |
| | 1408, 1410, 1412, 1414, 1416, 1418, 1420, 1422, 1424, 1426, |
| | 1428, 1430, 1432, 1434, 1436, 1438, 1440, 1442, 1444, 1446, |
| | 1448 |
| 1 | 1456, 1458, 1460, 1462, 1464, 1466, 1468, 1470, 1472, 1474, |
| | 1476, 1478, 1480, 1482, 1484, 1486, 1488, 1490, 1492, 1494, |
| | 1496, 1498, 1500, 1502, 1504, 1506, 1508, 1510, 1512, 1514, |
| | 1516, 1518, 1520, 1522, 1524, 1526, 1528, 1530, 1532, 1534, |
| | 1536, 1538, 1540, 1542, 1544, 1546 |
| 1 | 1560, 1562, 1564, 1566, 1568, 1570, 1572, 1574, 1576, 1578, |
| | 1580, 1582, 1584, 1586, 1588, 1590, 1592, 1594, 1596, 1598, |
| | 1600, 1602, 1604, 1606, 1608, 1610, 1612, 1614, 1616, 1618, |
| | 1620, 1622, 1624, 1626, 1628, 1630, 1632, 1634, 1636, 1638, |
| | 1640, 1642, 1644, 1646, 1648, 1650, 1652, 1654, 1656, 1658, |
| | 1660, 1662, 1664, 1666, 1668, 1670, 1672, 1674, 1676, 1678, |
| | 1680, 1682, 1684, 1686, 1688, 1690, 1692, 1694, 1696, 1698, |
| | 1700, 1702, 1704, 1706, 1708, 1710, 1712, 1714, 1716, 1718, |
| | 1720, 1722, 1724, 1726, 1728, 1730, 1732, 1734, 1736, 1738, |
| | 1740 |
| 1 | 1751, 1753, 1755, 1757, 1759, 1761, 1763, 1765, 1767, 1769, |
| | 1771, 1773, 1775, 1777, 1779, 1781, 1783, 1785, 1787, 1789, |
| | 1791, 1793, 1795, 1797, 1799, 1801, 1803, 1805, 1807, 1809, |
| | 1811, 1813, 1815, 1817, 1819, 1821, 1823, 1825, 1827, 1829, |
| | 1831, 1833, 1835, 1837, 1839, 1841, 1843, 1845, 1847, 1849, |
| | 1851, 1853, 1855, 1857, 1859, 1861, 1863, 1865, 1867, 1869, |
| | 1871, 1873, 1875, 1877, 1879, 1881, 1883, 1885, 1887, 1889, |
| | 1891, 1893, 1895, 1897, 1899, 1901, 1903, 1905, 1907, 1909, |
| | 1911, 1913, 1915, 1917, 1919, 1921, 1923, 1925, 1927, 1929, |
| | 1931, 1933, 1935, 1937, 1939, 1941, 1943, 1945, 1947, 1949, |
| | 1951, 1953, 1955, 1957, 1959, 1961, 1963, 1965, 1967 |
| 1 | 2149, 2151, 2153, 2155, 2157, 2159, 2161, 2163, 2165, 2167, |
| | 2169, 2171, 2173, 2175, 2177, 2179, 2181, 2183, 2185, 2187, |
| | 2189, 2191, 2193, 2195, 2197, 2199, 2201, 2203, 2205, 2207, |
| | 2209, 2211, 2213, 2215, 2217, 2219, 2221, 2223, 2225, 2227, |
| | 2229, 2231, 2233, 2235, 2237, 2239, 2241, 2243, 2245, 2247, |
| | 2249, 2251, 2253, 2255, 2257, 2259, 2261, 2263, 2265, 2267, |
| | 2269, 2271, 2273, 2275, 2277, 2279, 2281, 2283, 2285, 2287, |
| | 2289, 2291, 2293, 2295, 2297, 2299, 2301, 2303, 2305, 2307, |
| | 2309, 2311, 2313, 2315, 2317, 2319, 2321, 2323, 2325, 2327, |
| | 2329, 2331, 2333, 2335, 2337, 2339, 2341, 2343, 2345, 2347, |
| | 2349, 2351, 2353, 2355, 2357, 2359, 2361, 2363, 2365, 2367, |
| | 2369, 2371, 2373, 2375, 2377, 2379, 2381, 2383, 2385, 2387, |
| | 2389, 2391, 2393, 2395, 2397, 2399, 2401, 2403, 2405, 2407, |
| | 2409, 2411 |
| 1 | 2419, 2421, 2423, 2425, 2427, 2429, 2431, 2433, 2435 |
| 1 | 2453, 2455, 2457 |
| 1 | 2472, 2474, 2476, 2478, 2480, 2482 |
| 1 | 2504, 2506, 2508 |
| 1 | 2526, 2528, 2530, 2532, 2534, 2536, 2538, 2540, 2542, 2544, |
| | 2546, 2548, 2550, 2552 |
| 1 | 2570, 2572, 2574 |
| 1 | 2596, 2598, 2600, 2602, 2604, 2606, 2608 |
| 1 | 2622, 2624, 2626, 2628, 2630, 2632, 2634, 2636, 2638, 2640, |
| | 2642, 2644, 2646, 2648, 2650, 2652, 2654, 2656 |
| 1 | 2681, 2683, 2685, 2687, 2689, 2691, 2693 |
| 1 | 2704, 2706, 2708, 2710, 2712, 2714, 2716, 2718, 2720, 2722, |
| | 2724, 2726, 2728, 2730, 2732, 2734, 2736, 2738, 2740, 2742, |
| | 2744, 2746, 2748, 2750, 2752, 2754, 2756, 2758, 2760, 2762, |
| | 2764, 2766, 2768, 2770, 2772, 2774, 2776, 2778, 2780, 2782, |
| | 2784, 2786, 2788, 2790, 2792, 2794, 2796, 2798, 2800, 2802, |
| | 2804, 2806, 2808, 2810, 2812, 2814, 2816, 2818, 2820, 2822, |
| | 2824, 2826, 2828, 2830, 2832, 2834, 2836, 2838, 2840, 2842, |
| | 2844, 2846, 2848, 2850, 2852, 2854, 2856, 2858, 2860, 2862, |
| | 2864, 2866, 2868, 2870, 2872, 2874, 2876, 2878, 2880, 2882, |
| | 2884, 2886, 2888, 2890, 2892, 2894, 2896, 2898, 2900, 2902, |
| | 2904, 2906, 2908, 2910, 2912, 2914, 2916, 2918, 2920, 2922, |
| | 2924, 2926, 2928, 2930, 2932, 2934, 2936, 2938, 2940, 2942, |
| | 2944, 2946, 2948, 2950, 2952, 2954, 2956, 2958, 2960, 2962, |
| | 2964, 2966, 2968, 2970, 2972, 2974, 2976, 2978, 2980, 2982, |
| | 2984, 2986, 2988, 2990, 2992, 2994, 2996, 2998, 3000, 3002, |
| | 3004, 3006, 3008, 3010, 3012, 3014, 3016, 3018, 3020, 3022, |
| | 3024, 3026, 3028, 3030, 3032, 3034, 3036, 3038, 3040, 3042, |
| | 3044, 3046, 3048, 3050, 3052, 3054, 3056, 3058, 3060, 3062, |
| | 3064, 3066, 3068, 3070, 3072, 3074, 3076, 3078, 3080, 3082, |
| | 3084, 3086, 3088, 3090, 3092, 3094, 3096, 3098, 3100, 3102, |
| | 3104, 3106, 3108, 3110, 3112, 3114, 3116, 3118, 3120, 3122, |
| | 3124, 3126, 3128, 3130, 3132, 3134, 3136, 3138, 3140, 3142, |
| | 3144, 3146, 3148, 3150, 3152, 3154, 3156, 3158, 3160, 3162, |
| | 3164, 3166, 3168, 3170, 3172, 3174, 3176, 3178, 3180, 3182, |
| | 3184, 3186, 3188, 3190, 3192, 3194, 3196, 3198, 3200, 3202, |
| | 3204, 3206, 3208, 3210, 3212, 3214, 3216, 3218, 3220, 3222, |
| | 3224, 3226, 3228, 3230, 3232, 3234, 3236, 3238, 3240, 3242, |
| | 3244, 3246, 3248, 3250, 3252, 3254, 3256, 3258, 3260, 3262, |
| | 3264, 3266, 3268, 3270, 3272, 3274, 3276, 3278, 3280, 3282, |
| | 3284, 3286, 3288 |
| 1 | 3313, 3315, 3317, 3319, 3321, 3323, 3325, 3327, 3329, 3331, |
| | 3333, 3335, 3337, 3339, 3341, 3343, 3345, 3347, 3349, 3351, |
| | 3353, 3355, 3357, 3359, 3361, 3363, 3365, 3367, 3369, 3371, |
| | 3373, 3375, 3377, 3379, 3381, 3383, 3385, 3387, 3389, 3391, |
| | 3393, 3395, 3397, 3399, 3401, 3403, 3405, 3407, 3409, 3411, |
| | 3413, 3415, 3417, 3419, 3421, 3423, 3425, 3427, 3429, 3431, |
| | 3433, 3435, 3437, 3439, 3441, 3443, 3445, 3447, 3449, 3451, |
| | 3453, 3455, 3457, 3459, 3461, 3463, 3465, 3467, 3469, 3471, |
| | 3473, 3475, 3477, 3479, 3481, 3483, 3485, 3487, 3489, 3491, |
| | 3493, 3495, 3497, 3499, 3501, 3503, 3505, 3507, 3509, 3511, |
| | 3513, 3515, 3517, 3519, 3521, 3523, 3525, 3527, 3529, 3531, |
| | 3533, 3535, 3537, 3539, 3541, 3543, 3545, 3547, 3549, 3551, |
| | 3553, 3555, 3557, 3559, 3561, 3563, 3565, 3567, 3569, 3571, |
| | 3573, 3575, 3577, 3579, 3581, 3583, 3585, 3587, 3589, 3591, |
| | 3593, 3595, 3597, 3599, 3601, 3603, 3605, 3607, 3609, 3611, |
| | 3613, 3615, 3617 |
| 1 | 3671, 3673, 3675, 3677, 3679, 3681, 3683, 3685 |
| 1 | 3693, 3695, 3697, 3699, 3701, 3703, 3705, 3707, 3709, 3711, |
| | 3713, 3715, 3717, 3719, 3721, 3723, 3725, 3727, 3729, 3731, |
| | 3733, 3735, 3737, 3739, 3741, 3743, 3745, 3747, 3749, 3751, |
| | 3753, 3755, 3757 |
| 1 | 4708, 4710 |
| 1 | 4720, 4722, 4724, 4726, 4728, 4730, 4732, 4734, 4736, 4738, |
| | 4740, 4742, 4744, 4746, 4748, 4750, 4752, 4754, 4756, 4758, |
| | 4760, 4762, 4764, 4766, 4768, 4770, 4772, 4774, 4776, 4778, |
| | 4780, 4782, 4784, 4786, 4788, 4790, 4792, 4794, 4796, 4798, |
| | 4800, 4802, 4804, 4806, 4808, 4810, 4812, 4814, 4816, 4818, |
| | 4820, 4822, 4824, 4826, 4828, 4830, 4832, 4834, 4836, 4838, |
| | 4840, 4842, 4844, 4846, 4848, 4850, 4852, 4854, 4856, 4858, |
| | 4860, 4862, 4864, 4866, 4868, 4870, 4872, 4874, 4876, 4878, |
| | 4880, 4882, 4884, 4886, 4888, 4890, 4892, 4894, 4896, 4898, |
| | 4900, 4902, 4904, 4906, 4908, 4910, 4912, 4914, 4916, 4918, |
| | 4920, 4922, 4924, 4926, 4928, 4930, 4932, 4934, 4936, 4938, |
| | 4940, 4942, 4944, 4946, 4948, 4950, 4952, 4954, 4956, 4958, |
| | 4960, 4962, 4964, 4966, 4968, 4970, 4972, 4974, 4976, 4978, |
| | 4980, 4982, 4984, 4986, 4988, 4990, 4992, 4994, 4996, 4998, |
| | 5000, 5002, 5004, 5006, 5008, 5010, 5012, 5014, 5016, 5018, |
| | 5020, 5022, 5024, 5026, 5028, 5030, 5032, 5034, 5036, 5038, |
| | 5040, 5042, 5044, 5046, 5048, 5050, 5052, 5054, 5056, 5058, |
| | 5060, 5062, 5064, 5066, 5068, 5070, 5072, 5074, 5076, 5078, |
| | 5080, 5082, 5084, 5086, 5088, 5090, 5092, 5094, 5096, 5098, |
| | 5100, 5102, 5104, 5106, 5108, 5110, 5112, 5114, 5116, 5118, |
| | 5120, 5122, 5124, 5126, 5128, 5130, 5132, 5134, 5136, 5138, |
| | 5140, 5142, 5144, 5146, 5148, 5150, 5152, 5154, 5156 |
| 1 | 3772, 3774, 3776, 3778, 3780, 3782, 3784, 3786, 3788, 3790, |
| | 3792, 3794, 3796, 3798, 3800, 3802, 3804, 3806, 3808, 3810, |
| | 3812, 3814, 3816, 3818, 3820, 3822, 3824, 3826, 3828, 3830, |
| | 3832, 3834, 3836, 3838, 3840, 3842, 3844, 3846, 3848, 3850, |
| | 3852, 3854, 3856, 3858, 3860, 3862, 3864, 3866, 3868, 3870, |
| | 3872, 3874, 3876, 3878, 3880, 3882, 3884, 3886, 3888, 3890, |
| | 3892, 3894, 3896, 3898, 3900, 3902, 3904, 3906, 3908, 3910, |
| | 3912, 3914, 3916, 3918, 3920, 3922, 3924, 3926, 3928, 3930, |
| | 3932, 3934, 3936, 3938, 3940, 3942, 3944, 3946, 3948, 3950, |
| | 3952, 3954 |
| 1 | 4012, 4014, 4016, 4018, 4020, 4022, 4024, 4026, 4028, 4030, |
| | 4032, 4034, 4036, 4038, 4040, 4042, 4044, 4046, 4048, 4050, |
| | 4052, 4054, 4056, 4058, 4060 |
| 1 | 4080, 4082, 4084, 4086, 4088, 4090, 4092, 4094, 4096, 4098, |
| | 4100, 4102, 4104, 4106, 4108, 4110, 4112, 4114, 4116, 4118, |
| | 4120, 4122, 4124, 4126, 4128, 4130, 4132, 4134, 4136, 4138, |
| | 4140, 4142, 4144, 4146, 4148, 4150, 4152, 4154, 4156, 4158, |
| | 4160, 4162, 4164, 4166, 4168, 4170, 4172, 4174, 4176, 4178, |
| | 4180, 4182, 4184, 4186, 4188, 4190, 4192, 4194, 4196, 4198, |
| | 4200, 4202, 4204, 4206, 4208, 4210, 4212, 4214, 4216, 4218, |
| | 4220, 4222, 4224, 4226, 4228, 4230, 4232, 4234, 4236, 4238, |
| | 4240, 4242, 4244, 4246, 4248, 4250, 4252, 4254, 4256, 4258, |
| | 4260, 4262, 4264, 4266, 4268, 4270, 4272, 4274, 4276, 4278, |
| | 4280, 4282, 4284, 4286, 4288, 4290, 4292, 4294, 4296, 4298, |
| | 4300, 4302, 4304, 4306, 4308, 4310, 4312, 4314, 4316 |
| 1 | 4340, 4342, 4344, 4346, 4348, 4350, 4352, 4354, 4356, 4358, |
| | 4360, 4362, 4364, 4366, 4368, 4370, 4372, 4374, 4376, 4378, |
| | 4380, 4382, 4384, 4386, 4388, 4390, 4392, 4394, 4396, 4398, |
| | 4400, 4402, 4404, 4406, 4408, 4410, 4412, 4414, 4416, 4418, |
| | 4420, 4422, 4424, 4426, 4428, 4430, 4432, 4434, 4436, 4438, |
| | 4440, 4442, 4444, 4446, 4448, 4450, 4452, 4454, 4456, 4458, |
| | 4460, 4462, 4464, 4466, 4468, 4470, 4472, 4474, 4476, 4478, |
| | 4480, 4482, 4484, 4486, 4488, 4490, 4492, 4494, 4496, 4498, |
| | 4500, 4502, 4504, 4506, 4508, 4510, 4512, 4514, 4516, 4518, |
| | 4520, 4522, 4524, 4526, 4528 |
| 1 | 4622, 4624, 4626, 4628, 4630, 4632, 4634, 4636, 4638, 4640, |
| | 4642, 4644, 4646, 4648, 4650, 4652, 4654, 4656, 4658, 4660, |
| | 4662, 4664, 4666, 4668, 4670 |
| 1 | 6313, 6315, 6317, 6319, 6321, 6323 |
| 1 | 5810, 5812, 5814, 5816, 5818, 5820, 5822, 5824, 5826, 5828, |
| | 5830, 5832, 5834, 5836, 5838, 5840, 5842, 5844, 5846, 5848, |
| | 5850, 5852, 5854, 5856, 5858, 5860, 5862, 5864, 5866, 5868, |
| | 5870, 5872, 5874, 5876, 5878, 5880, 5882, 5884, 5886, 5888, |
| | 5890, 5892, 5894, 5896, 5898, 5900, 5902, 5904, 5906, 5908, |
| | 5910, 5912, 5914, 5916, 5918, 5920, 5922, 5924, 5926, 5928, |
| | 5930, 5932, 5934, 5936, 5938, 5940, 5942, 5944, 5946, 5948, |
| | 5950, 5952, 5954, 5956, 5958, 5960, 5962, 5964, 5966, 5968, |
| | 5970, 5972, 5974, 5976, 5978, 5980, 5982, 5984, 5986, 5988, |
| | 5990, 5992, 5994, 5996, 5998, 6000, 6002, 6004, 6006, 6008, |
| | 6010, 6012, 6014, 6016, 6018, 6020, 6022, 6024, 6026, 6028, |
| | 6030, 6032, 6034, 6036, 6038, 6040, 6042, 6044, 6046, 6048, |
| | 6050, 6052, 6054, 6056, 6058, 6060, 6062, 6064, 6066, 6068, |
| | 6070, 6072, 6074, 6076, 6078, 6080, 6082, 6084, 6086, 6088, |
| | 6090, 6092, 6094, 6096, 6098, 6100, 6102, 6104, 6106, 6108, |
| | 6110, 6112, 6114, 6116, 6118, 6120, 6122, 6124, 6126, 6128, |
| | 6130, 6132, 6134, 6136, 6138, 6140, 6142, 6144, 6146, 6148, |
| | 6150, 6152, 6154, 6156, 6158, 6160, 6162, 6164, 6166, 6168, |
| | 6170, 6172, 6174, 6176, 6178, 6180, 6182, 6184, 6186, 6188, |
| | 6190, 6192, 6194, 6196, 6198, 6200, 6202, 6204, 6206, 6208, |
| | 6210, 6212, 6214, 6216, 6218, 6220, 6222, 6224, 6226, 6228, |
| | 6230, 6232, 6234, 6236, 6238, 6240, 6242, 6244, 6246, 6248, |
| | 6250, 6252, 6254, 6256, 6258, 6260, 6262, 6264, 6266, 6268, |
| | 6270, 6272, 6274, 6276, 6278, 6280, 6282, 6284, 6286, 6288, |
| | 6290, 6292, 6294, 6296, 6298, 6300 |
| 1 | 7543, 7545, 7547, 7549, 7551, 7553, 7555, 7557, 7559, 7561, |
| | 7563, 7565, 7567, 7569, 7571, 7573, 7575, 7577, 7579, 7581, |
| | 7583, 7585, 7587 |
| 1 | 7977, 7979, 7981, 7983, 7985, 7987, 7989, 7991, 7993, 7995, |
| | 7997, 7999, 8001, 8003, 8005, 8007, 8009, 8011, 8013, 8015, |
| | 8017, 8019, 8021, 8023, 8025, 8027, 8029, 8031, 8033, 8035, |
| | 8037, 8039, 8041, 8043, 8045, 8047, 8049, 8051, 8053 |
| 1 | 7537 |
| 1 | 5260, 5262, 5264, 5266, 5268, 5270, 5272, 5274, 5276, 5278, |
| | 5280, 5282, 5284, 5286, 5288, 5290, 5292, 5294, 5296, 5298, |
| | 5300, 5302, 5304, 5306, 5308, 5310, 5312, 5314, 5316, 5318, |
| | 5320, 5322, 5324, 5326, 5328, 5330, 5332, 5334, 5336, 5338, |
| | 5340, 5342, 5344, 5346, 5348, 5350, 5352, 5354, 5356, 5358, |
| | 5360, 5362, 5364, 5366, 5368, 5370, 5372, 5374, 5376, 5378, |
| | 5380, 5382, 5384, 5386, 5388, 5390, 5392, 5394, 5396, 5398, |
| | 5400, 5402, 5404, 5406, 5408, 5410, 5412, 5414, 5416, 5418, |
| | 5420, 5422, 5424, 5426, 5428, 5430, 5432, 5434, 5436, 5438, |
| | 5440, 5442, 5444, 5446, 5448, 5450, 5452, 5454, 5456, 5458, |
| | 5460, 5462, 5464, 5466, 5468, 5470, 5472, 5474, 5476, 5478, |
| | 5480, 5482, 5484, 5486, 5488, 5490, 5492, 5494, 5496, 5498, |
| | 5500, 5502, 5504, 5506, 5508, 5510, 5512, 5514, 5516, 5518, |
| | 5520, 5522, 5524, 5526, 5528, 5530, 5532, 5534, 5536, 5538, |
| | 5540, 5542, 5544, 5546, 5548, 5550, 5552, 5554, 5556, 5558, |
| | 5560, 5562, 5564, 5566, 5568, 5570, 5572, 5574, 5576, 5578, |
| | 5580, 5582, 5584, 5586, 5588, 5590, 5592, 5594, 5596, 5598, |
| | 5600, 5602, 5604, 5606, 5608, 5610, 5612, 5614, 5616, 5618, |
| | 5620, 5622, 5624, 5626, 5628, 5630, 5632, 5634, 5636, 5638, |
| | 5640, 5642, 5644, 5646, 5648, 5650, 5652, 5654, 5656, 5658, |
| | 5660, 5662, 5664, 5666, 5668, 5670, 5672, 5674, 5676, 5678, |
| | 5680, 5682, 5684, 5686, 5688, 5690, 5692, 5694, 5696, 5698, |
| | 5700, 5702, 5704, 5706, 5708, 5710, 5712, 5714, 5716, 5718, |
| | 5720, 5722, 5724, 5726, 5728, 5730, 5732, 5734, 5736, 5738, |
| | 5740, 5742, 5744, 5746, 5748, 5750, 5752, 5754, 5756, 5758, |
| | 5760, 5762, 5764, 5766, 5768, 5770, 5772, 5774, 5776, 5778, |
| | 5780, 5782, 5784 |
| 1 | 6335, 6337, 6339, 6341, 6343, 6345, 6347, 6349, 6351, 6353, |
| | 6355, 6357, 6359, 6361, 6363, 6365, 6367, 6369, 6371, 6373, |
| | 6375, 6377, 6379, 6381, 6383, 6385, 6387, 6389, 6391, 6393, |
| | 6395, 6397, 6399, 6401, 6403, 6405, 6407, 6409, 6411, 6413, |
| | 6415, 6417, 6419, 6421, 6423, 6425 |
| 1 | 7595, 7597, 7599, 7601, 7603, 7605, 7607, 7609, 7611, 7613, |
| | 7615, 7617, 7619, 7621, 7623, 7625, 7627, 7629, 7631, 7633, |
| | 7635, 7637, 7639, 7641, 7643, 7645, 7647, 7649, 7651, 7653, |
| | 7655, 7657, 7659, 7661, 7663, 7665, 7667, 7669, 7671, 7673, |
| | 7675, 7677, 7679, 7681, 7683, 7685, 7687, 7689, 7691, 7693, |
| | 7695, 7697, 7699, 7701, 7703, 7705, 7707, 7709, 7711, 7713, |
| | 7715, 7717, 7719, 7721, 7723, 7725, 7727, 7729, 7731, 7733, |
| | 7735, 7737, 7739, 7741, 7743, 7745, 7747, 7749, 7751, 7753, |
| | 7755, 7757, 7759, 7761, 7763, 7765, 7767, 7769, 7771, 7773, |
| | 7775, 7777, 7779, 7781, 7783, 7785, 7787, 7789, 7791, 7793, |
| | 7795, 7797, 7799, 7801, 7803, 7805, 7807, 7809, 7811, 7813, |
| | 7815, 7817, 7819, 7821, 7823, 7825, 7827, 7829, 7831, 7833, |
| | 7835, 7837, 7839, 7841, 7843, 7845, 7847, 7849, 7851, 7853, |
| | 7855, 7857, 7859, 7861, 7863, 7865, 7867, 7869, 7871, 7873, |
| | 7875, 7877, 7879, 7881, 7883, 7885, 7887, 7889, 7891, 7893, |
| | 7895, 7897, 7899, 7901, 7903, 7905, 7907, 7909, 7911, 7913, |
| | 7915, 7917, 7919, 7921, 7923, 7925, 7927, 7929, 7931, 7933, |
| | 7935, 7937, 7939, 7941, 7943, 7945, 7947, 7949, 7951, 7953, |
| | 7955, 7957, 7959, 7961 |
| 1 | 6439, 6441, 6443, 6445, 6447, 6449, 6451, 6453, 6455, 6457, |
| | 6459, 6461, 6463, 6465, 6467, 6469, 6471, 6473, 6475, 6477, |
| | 6479, 6481, 6483, 6485, 6487, 6489, 6491, 6493, 6495, 6497, |
| | 6499, 6501, 6503, 6505, 6507, 6509, 6511, 6513, 6515, 6517, |
| | 6519, 6521, 6523, 6525, 6527, 6529, 6531, 6533, 6535, 6537, |
| | 6539, 6541, 6543, 6545, 6547, 6549, 6551, 6553, 6555, 6557, |
| | 6559, 6561, 6563, 6565, 6567, 6569, 6571, 6573, 6575, 6577, |
| | 6579, 6581, 6583, 6585, 6587, 6589, 6591, 6593, 6595, 6597, |
| | 6599, 6601, 6603, 6605, 6607, 6609, 6611, 6613, 6615, 6617, |
| | 6619, 6621, 6623, 6625, 6627, 6629, 6631, 6633, 6635, 6637, |
| | 6639, 6641, 6643, 6645, 6647, 6649, 6651, 6653, 6655, 6657, |
| | 6659, 6661, 6663, 6665, 6667, 6669, 6671, 6673, 6675, 6677, |
| | 6679, 6681, 6683, 6685, 6687, 6689, 6691, 6693, 6695, 6697, |
| | 6699, 6701, 6703, 6705, 6707, 6709, 6711, 6713 |
| 1 | 6726, 6728, 6730, 6732, 6734, 6736, 6738, 6740, 6742, 6744, |
| | 6746, 6748, 6750, 6752, 6754, 6756, 6758, 6760, 6762, 6764, |
| | 6766, 6768, 6770, 6772, 6774, 6776, 6778, 6780, 6782, 6784, |
| | 6786, 6788, 6790, 6792, 6794, 6796, 6798, 6800, 6802, 6804, |
| | 6806, 6808, 6810, 6812, 6814, 6816, 6818, 6820, 6822, 6824, |
| | 6826, 6828, 6830, 6832, 6834, 6836, 6838, 6840, 6842, 6844, |
| | 6846, 6848, 6850, 6852, 6854, 6856, 6858, 6860, 6862, 6864, |
| | 6866, 6868, 6870, 6872, 6874, 6876, 6878, 6880, 6882, 6884, |
| | 6886, 6888, 6890, 6892, 6894, 6896, 6898, 6900, 6902, 6904, |
| | 6906, 6908, 6910, 6912, 6914, 6916, 6918, 6920, 6922, 6924, |
| | 6926, 6928, 6930, 6932, 6934, 6936, 6938, 6940, 6942, 6944, |
| | 6946, 6948, 6950, 6952, 6954, 6956, 6958, 6960, 6962, 6964, |
| | 6966, 6968, 6970, 6972, 6974, 6976, 6978, 6980, 6982, 6984, |
| | 6986, 6988, 6990, 6992, 6994, 6996, 6998, 7000, 7002, 7004, |
| | 7006, 7008, 7010, 7012, 7014, 7016, 7018, 7020, 7022, 7024, |
| | 7026, 7028, 7030, 7032, 7034, 7036, 7038, 7040, 7042, 7044, |
| | 7046, 7048, 7050, 7052, 7054, 7056, 7058, 7060, 7062, 7064, |
| | 7066, 7068, 7070, 7072, 7074, 7076, 7078, 7080, 7082, 7084, |
| | 7086, 7088, 7090, 7092, 7094, 7096, 7098, 7100, 7102, 7104, |
| | 7106, 7108, 7110, 7112, 7114, 7116, 7118, 7120, 7122, 7124, |
| | 7126, 7128, 7130, 7132, 7134, 7136, 7138, 7140, 7142, 7144, |
| | 7146, 7148, 7150, 7152, 7154, 7156, 7158, 7160, 7162, 7164, |
| | 7166, 7168, 7170, 7172, 7174, 7176, 7178, 7180, 7182, 7184, |
| | 7186, 7188, 7190, 7192, 7194, 7196, 7198, 7200, 7202, 7204, |
| | 7206, 7208, 7210, 7212, 7214, 7216, 7218, 7220, 7222, 7224, |
| | 7226, 7228, 7230, 7232, 7234, 7236, 7238, 7240, 7242, 7244, |
| | 7246, 7248, 7250, 7252, 7254, 7256, 7258, 7260, 7262, 7264, |
| | 7266, 7268, 7270, 7272, 7274, 7276, 7278, 7280, 7282, 7284, |
| | 7286, 7288, 7290, 7292, 7294, 7296, 7298, 7300, 7302, 7304, |
| | 7306, 7308, 7310, 7312, 7314, 7316, 7318, 7320, 7322, 7324, |
| | 7326, 7328, 7330, 7332, 7334, 7336, 7338, 7340, 7342, 7344, |
| | 7346, 7348, 7350, 7352, 7354, 7356, 7358, 7360, 7362, 7364, |
| | 7366, 7368, 7370, 7372, 7374, 7376, 7378, 7380, 7382, 7384, |
| | 7386, 7388, 7390, 7392, 7394, 7396, 7398, 7400, 7402, 7404, |
| | 7406, 7408, 7410, 7412, 7414, 7416, 7418, 7420, 7422, 7424, |
| | 7426, 7428, 7430, 7432, 7434, 7436, 7438, 7440, 7442, 7444, |
| | 7446, 7448, 7450, 7452, 7454, 7456, 7458, 7460, 7462, 7464, |
| | 7466, 7468, 7470, 7472, 7474, 7476, 7478, 7480, 7482, 7484, |
| | 7486, 7488, 7490, 7492, 7494, 7496 |
| 1 | 8093, 8095, 8097, 8099, 8101, 8103, 8105, 8107, 8109, 8111, |
| | 8113, 8115, 8117, 8119, 8121, 8123, 8125, 8127, 8129, 8131, |
| | 8133, 8135, 8137, 8139, 8141, 8143, 8145, 8147, 8149, 8151, |
| | 8153, 8155, 8157, 8159, 8161, 8163, 8165, 8167, 8169, 8171, |
| | 8173, 8175, 8177, 8179, 8181, 8183, 8185, 8187, 8189, 8191, |
| | 8193, 8195, 8197, 8199, 8201, 8203, 8205, 8207, 8209, 8211, |
| | 8213, 8215, 8217, 8219, 8221, 8223, 8225, 8227, 8229, 8231, |
| | 8233, 8235, 8237, 8239, 8241, 8243, 8245, 8247, 8249, 8251, |
| | 8253, 8255, 8257, 8259, 8261, 8263, 8265, 8267, 8269, 8271, |
| | 8273, 8275, 8277, 8279, 8281, 8283, 8285, 8287, 8289, 8291, |
| | 8293, 8295, 8297, 8299, 8301, 8303, 8305, 8307, 8309, 8311, |
| | 8313, 8315, 8317, 8319, 8321, 8323, 8325, 8327, 8329, 8331, |
| | 8333, 8335, 8337, 8339, 8341, 8343, 8345, 8347, 8349, 8351, |
| | 8353, 8355, 8357, 8359, 8361, 8363, 8365, 8367, 8369, 8371, |
| | 8373, 8375, 8377, 8379, 8381, 8383, 8385, 8387, 8389, 8391, |
| | 8393, 8395, 8397, 8399, 8401, 8403, 8405, 8407, 8409, 8411, |
| | 8413, 8415, 8417, 8419, 8421, 8423, 8425, 8427, 8429, 8431, |
| | 8433, 8435, 8437, 8439, 8441, 8443, 8445, 8447, 8449, 8451, |
| | 8453, 8455, 8457, 8459, 8461, 8463, 8465, 8467, 8469, 8471, |
| | 8473, 8475, 8477, 8479, 8481, 8483, 8485, 8487, 8489, 8491, |
| | 8493, 8495, 8497, 8499, 8501, 8503, 8505, 8507, 8509, 8511, |
| | 8513, 8515, 8517, 8519, 8521, 8523, 8525, 8527, 8529, 8531, |
| | 8533, 8535, 8537, 8539, 8541, 8543, 8545, 8547, 8549 |
| 1 | 8676, 8678, 8680, 8682, 8684, 8686, 8688, 8690, 8692, 8694, |
| | 8696, 8698, 8700, 8702, 8704, 8706, 8708 |
| 1 | 8724, 8726, 8728, 8730, 8732, 8734, 8736, 8738, 8740, 8742, |
| | 8744, 8746, 8748, 8750, 8752, 8754, 8756, 8758, 8760, 8762, |
| | 8764, 8766, 8768, 8770, 8772, 8774, 8776, 8778, 8780, 8782, |
| | 8784, 8786, 8788, 8790, 8792, 8794, 8796, 8798, 8800, 8802, |
| | 8804, 8806, 8808, 8810, 8812, 8814, 8816, 8818, 8820, 8822, |
| | 8824, 8826, 8828, 8830, 8832, 8834, 8836, 8838, 8840, 8842, |
| | 8844, 8846, 8848, 8850, 8852 |
| 1 | 8915, 8917, 8919, 8921, 8923, 8925, 8927, 8929, 8931, 8933, |
| | 8935, 8937, 8939, 8941, 8943, 8945, 8947, 8949, 8951, 8953, |
| | 8955, 8957, 8959, 8961, 8963, 8965, 8967, 8969, 8971, 8973, |
| | 8975, 8977, 8979, 8981, 8983, 8985, 8987, 8989, 8991, 8993, |
| | 8995, 8997, 8999, 9001, 9003, 9005, 9007, 9009, 9011, 9013, |
| | 9015, 9017, 9019, 9021, 9023, 9025, 9027, 9029, 9031, 9033, |
| | 9035, 9037, 9039, 9041, 9043, 9045, 9047, 9049, 9051 |
| 1 | 9112, 9114, 9116, 9118, 9120, 9122, 9124, 9126, 9128, 9130, |
| | 9132, 9134, 9136, 9138, 9140, 9142, 9144, 9146, 9148, 9150, |
| | 9152, 9154, 9156, 9158, 9160, 9162, 9164, 9166, 9168, 9170, |
| | 9172, 9174, 9176, 9178, 9180, 9182, 9184, 9186, 9188, 9190, |
| | 9192, 9194, 9196, 9198, 9200, 9202, 9204, 9206, 9208, 9210, |
| | 9212, 9214, 9216, 9218, 9220, 9222, 9224, 9226, 9228, 9230, |
| | 9232, 9234, 9236, 9238, 9240, 9242, 9244, 9246, 9248, 9250, |
| | 9252, 9254, 9256, 9258, 9260, 9262, 9264, 9266, 9268, 9270, |
| | 9272, 9274, 9276, 9278, 9280, 9282, 9284, 9286, 9288, 9290, |
| | 9292, 9294, 9296, 9298, 9300, 9302, 9304, 9306, 9308, 9310, |
| | 9312, 9314, 9316, 9318, 9320, 9322, 9324, 9326, 9328, 9330, |
| | 9332, 9334, 9336, 9338, 9340, 9342, 9344, 9346, 9348, 9350, |
| | 9352, 9354, 9356, 9358, 9360, 9362, 9364, 9366, 9368, 9370, |
| | 9372, 9374, 9376, 9378, 9380, 9382, 9384, 9386, 9388, 9390, |
| | 9392, 9394, 9396, 9398, 9400, 9402, 9404, 9406, 9408, 9410, |
| | 9412, 9414, 9416, 9418, 9420, 9422, 9424, 9426, 9428, 9430, |
| | 9432, 9434, 9436, 9438, 9440, 9442, 9444, 9446, 9448, 9450, |
| | 9452, 9454, 9456, 9458, 9460, 9462, 9464, 9466, 9468, 9470, |
| | 9472, 9474, 9476, 9478, 9480, 9482, 9484, 9486, 9488, 9490, |
| | 9492, 9494, 9496, 9498, 9500, 9502, 9504, 9506, 9508, 9510, |
| | 9512, 9514, 9516, 9518, 9520, 9522, 9524, 9526, 9528, 9530, |
| | 9532, 9534, 9536, 9538, 9540, 9542, 9544, 9546, 9548, 9550, |
| | 9552, 9554, 9556, 9558, 9560, 9562, 9564, 9566, 9568, 9570, |
| | 9572, 9574, 9576, 9578, 9580, 9582, 9584, 9586, 9588, 9590, |
| | 9592, 9594, 9596, 9598, 9600, 9602, 9604, 9606, 9608 |
| 1 | 9730, 9732, 9734, 9736, 9738, 9740, 9742, 9744, 9746, 9748, |
| | 9750, 9752, 9754, 9756, 9758, 9760, 9762, 9764, 9766, 9768, |
| | 9770, 9772, 9774, 9776, 9778, 9780, 9782, 9784, 9786, 9788, |
| | 9790, 9792, 9794, 9796, 9798, 9800, 9802, 9804, 9806, 9808, |
| | 9810, 9812, 9814, 9816, 9818, 9820, 9822, 9824, 9826, 9828, |
| | 9830, 9832, 9834, 9836, 9838, 9840, 9842, 9844, 9846, 9848, |
| | 9850, 9852, 9854, 9856, 9858, 9860, 9862, 9864, 9866, 9868, |
| | 9870, 9872, 9874, 9876, 9878, 9880, 9882, 9884, 9886, 9888, |
| | 9890, 9892, 9894, 9896, 9898, 9900, 9902, 9904, 9906, 9908, |
| | 9910, 9912, 9914, 9916, 9918, 9920, 9922, 9924, 9926, 9928, |
| | 9930, 9932, 9934, 9936, 9938, 9940, 9942, 9944, 9946, 9948, |
| | 9950, 9952, 9954, 9956, 9958, 9960, 9962, 9964, 9966, 9968, |
| | 9970, 9972, 9974, 9976, 9978, 9980, 9982, 9984, 9986, 9988, |
| | 9990, 9992, 9994, 9996, 9998, 10000, 10002, 10004, 10006, |
| | 10008, 10010, 10012, 10014, 10016, 10018, 10020, 10022, |
| | 10024, 10026, 10028, 10030, 10032, 10034, 10036, 10038, |
| | 10040, 10042, 10044, 10046, 10048, 10050, 10052, 10054, |
| | 10056, 10058, 10060, 10062, 10064, 10066, 10068, 10070, |
| | 10072, 10074, 10076, 10078, 10080, 10082, 10084, 10086, |
| | 10088, 10090, 10092, 10094, 10096, 10098, 10100, 10102, |
| | 10104, 10106, 10108, 10110, 10112, 10114, 10116, 10118, |
| | 10120, 10122, 10124, 10126, 10128, 10130, 10132, 10134, |
| | 10136, 10138, 10140, 10142, 10144, 10146, 10148, 10150, |
| | 10152, 10154, 10156, 10158, 10160, 10162, 10164, 10166, |
| | 10168, 10170, 10172, 10174, 10176, 10178, 10180, 10182, |
| | 10184, 10186, 10188, 10190, 10192, 10194, 10196, 10198, |
| | 10200, 10202, 10204, 10206, 10208, 10210, 10212, 10214, |
| | 10216, 10218, 10220, 10222, 10224, 10226, 10228, 10230, |
| | 10232, 10234, 10236, 10238, 10240, 10242, 10244, 10246, |
| | 10248, 10250, 10252, 10254, 10256, 10258, 10260, 10262, |
| | 10264, 10266, 10268, 10270, 10272, 10274, 10276, 10278, |
| | 10280, 10282, 10284, 10286, 10288, 10290, 10292, 10294, |
| | 10296, 10298, 10300, 10302, 10304, 10306, 10308, 10310, |
| | 10312, 10314, 10316, 10318, 10320, 10322, 10324, 10326, |
| | 10328, 10330, 10332, 10334, 10336, 10338, 10340, 10342, |
| | 10344, 10346, 10348, 10350, 10352, 10354, 10356, 10358, |
| | 10360, 10362, 10364, 10366, 10368, 10370, 10372, 10374, |
| | 10376, 10378, 10380, 10382, 10384, 10386, 10388, 10390, |
| | 10392, 10394, 10396, 10398, 10400, 10402, 10404, 10406, |
| | 10408, 10410, 10412, 10414, 10416, 10418, 10420, 10422, |
| | 10424, 10426, 10428, 10430, 10432, 10434, 10436, 10438, |
| | 10440, 10442, 10444, 10446, 10448, 10450, 10452, 10454, |
| | 10456, 10458, 10460, 10462, 10464, 10466, 10468, 10470, |
| | 10472, 10474, 10476, 10478, 10480, 10482, 10484, 10486, |
| | 10488, 10490, 10492, 10494, 10496, 10498, 10500, 10502, |
| | 10504, 10506, 10508, 10510, 10512, 10514, 10516, 10518, |
| | 10520, 10522, 10524, 10526, 10528, 10530, 10532, 10534, |
| | 10536, 10538, 10540, 10542, 10544, 10546, 10548, 10550, |
| | 10552, 10554, 10556, 10558, 10560, 10562, 10564, 10566, |
| | 10568, 10570, 10572, 10574, 10576, 10578, 10580, 10582, |
| | 10584, 10586, 10588, 10590, 10592, 10594, 10596, 10598, |
| | 10600, 10602, 10604, 10606, 10608, 10610, 10612, 10614, |
| | 10616, 10618, 10620, 10622, 10624, 10626, 10628, 10630, |
| | 10632, 10634, 10636, 10638, 10640, 10642, 10644, 10646, |
| | 10648, 10650, 10652, 10654, 10656, 10658, 10660, 10662, |
| | 10664, 10666, 10668, 10670, 10672, 10674, 10676, 10678, |
| | 10680, 10682, 10684, 10686 |
| 1 | 10740, 10742, 10744, 10746, 10748, 10750, 10752, 10754, |
| | 10756, 10758, 10760, 10762, 10764, 10766, 10768, 10770, |
| | 10772, 10774, 10776, 10778, 10780, 10782, 10784, 10786, |
| | 10788, 10790, 10792, 10794, 10796, 10798, 10800, 10802, |
| | 10804, 10806, 10808, 10810, 10812, 10814, 10816, 10818, |
| | 10820, 10822, 10824, 10826, 10828, 10830, 10832, 10834, |
| | 10836, 10838, 10840, 10842, 10844, 10846, 10848, 10850, |
| | 10852, 10854, 10856, 10858, 10860, 10862, 10864, 10866, |
| | 10868, 10870, 10872, 10874, 10876, 10878, 10880, 10882, |
| | 10884, 10886, 10888, 10890, 10892, 10894, 10896, 10898, |
| | 10900, 10902, 10904, 10906, 10908, 10910, 10912, 10914, |
| | 10916, 10918, 10920, 10922, 10924, 10926, 10928, 10930, |
| | 10932, 10934, 10936, 10938, 10940, 10942, 10944, 10946, |
| | 10948, 10950, 10952, 10954, 10956, 10958, 10960, 10962, |
| | 10964, 10966, 10968, 10970, 10972, 10974, 10976, 10978, |
| | 10980, 10982, 10984, 10986, 10988, 10990, 10992, 10994, |
| | 10996, 10998, 11000, 11002, 11004, 11006, 11008, 11010, |
| | 11012, 11014, 11016, 11018, 11020, 11022, 11024, 11026, |
| | 11028, 11030, 11032, 11034, 11036, 11038, 11040, 11042 |
| 1 | 11064, 11066, 11068, 11070, 11072, 11074, 11076, 11078, |
| | 11080, 11082, 11084, 11086, 11088, 11090, 11092, 11094, |
| | 11096, 11098, 11100, 11102, 11104, 11106, 11108, 11110, |
| | 11112, 11114, 11116, 11118, 11120, 11122 |
| 1 | 11141, 11143, 11145, 11147, 11149, 11151, 11153, 11155, |
| | 11157, 11159, 11161, 11163, 11165, 11167, 11169, 11171, |
| | 11173, 11175, 11177, 11179, 11181, 11183, 11185, 11187, |
| | 11189, 11191, 11193, 11195, 11197, 11199, 11201, 11203, |
| | 11205, 11207, 11209, 11211, 11213, 11215, 11217, 11219, |
| | 11221, 11223, 11225, 11227, 11229, 11231, 11233, 11235, |
| | 11237, 11239, 11241, 11243, 11245, 11247, 11249, 11251, |
| | 11253, 11255, 11257, 11259, 11261, 11263, 11265, 11267, |
| | 11269, 11271, 11273, 11275, 11277, 11279, 11281, 11283, |
| | 11285, 11287, 11289, 11291, 11293, 11295 |
| 1 | 11308, 11310, 11312, 11314, 11316, 11318, 11320, 11322, |
| | 11324, 11326, 11328, 11330, 11332, 11334, 11336, 11338, |
| | 11340, 11342, 11344, 11346, 11348, 11350, 11352, 11354, |
| | 11356, 11358, 11360, 11362, 11364, 11366, 11368, 11370, |
| | 11372, 11374, 11376, 11378, 11380, 11382, 11384, 11386, |
| | 11388, 11390, 11392, 11394, 11396, 11398, 11400, 11402, |
| | 11404, 11406, 11408, 11410, 11412, 11414, 11416, 11418, |
| | 11420, 11422, 11424, 11426, 11428, 11430, 11432, 11434, |
| | 11436, 11438, 11440, 11442, 11444, 11446, 11448, 11450, |
| | 11452, 11454 |
| 1 | 11499, 11501, 11503 |
| 1 | 11516, 11518, 11520, 11522, 11524, 11526 |
| B: Amino acid sequence ID numbers | |
| 1 | — |
| 1 | — |
| 1 | — |
| 1 | — |
| 1 | 756, 758, 760, 762, 764, 766, 768, 770, 772, 774, 776, 778, 780, |
| | 782, 784, 786, 788, 790, 792, 794, 796, 798, 800, 802, 804, 806, |
| | 808, 810, 812, 814 |
| 1 | 1285, 1287 |
| 1 | — |
| 1 | — |
| 1 | — |
| 1 | — |
| 1 | 1969, 1971, 1973, 1975, 1977, 1979, 1981, 1983, 1985, 1987, |
| | 1989, 1991, 1993, 1995, 1997, 1999, 2001, 2003, 2005, 2007, |
| | 2009, 2011, 2013, 2015, 2017, 2019, 2021, 2023, 2025, 2027, |
| | 2029, 2031, 2033, 2035, 2037, 2039, 2041, 2043, 2045, 2047, |
| | 2049, 2051, 2053, 2055, 2057, 2059, 2061, 2063, 2065, 2067, |
| | 2069, 2071, 2073, 2075, 2077, 2079, 2081, 2083, 2085, 2087, |
| | 2089, 2091, 2093, 2095, 2097, 2099, 2101, 2103, 2105, 2107, |
| | 2109, 2111, 2113, 2115, 2117, 2119, 2121, 2123, 2125, 2127, |
| | 2129, 2131, 2133, 2135, 2137, 2139, 2141, 11548 |
| 1 | — |
| 1 | — |
| 1 | — |
| 1 | — |
| 1 | — |
| 1 | — |
| 1 | — |
| 1 | — |
| 1 | 2658, 2660, 2662, 2664, 2666, 2668, 2670 |
| 1 | — |
| 1 | 3290, 3292, 3294, 3296, 3298, 3300, 3302 |
| 1 | 3619, 3621, 3623, 3625, 3627, 3629, 3631, 3633, 3635, 3637, |
| | 3639, 3641, 3643, 3645, 3647, 3649, 3651, 3653, 3655, 3657, |
| | 3659 |
| 1 | — |
| 1 | 3759 |
| 1 | — |
| 1 | 5158, 5160, 5162, 5164, 5166, 5168, 5170, 5172, 5174, 5176, |
| | 5178, 5180, 5182, 5184, 5186, 5188, 5190, 5192, 5194, 5196, |
| | 5198, 5200, 5202, 5204, 5206, 5208, 5210, 5212, 5214, 5216, |
| | 5218, 5220, 5222, 5224, 5226, 5228, 5230, 5232, 5234, 5236, |
| | 5238, 5240, 5242, 5244, 5246, 5248, 5250 |
| 1 | 3956, 3958, 3960, 3962, 3964, 3966, 3968, 3970, 3972, 3974, |
| | 3976, 3978, 3980, 3982, 3984, 3986, 3988, 3990, 3992, 3994, |
| | 3996, 3998, 4000, 4002 |
| 1 | 4062 |
| 1 | 4318, 4320, 4322, 4324 |
| 1 | 4530, 4532, 4534, 4536, 4538, 4540, 4542, 4544, 4546, 4548, |
| | 4550, 4552, 4554, 4556, 4558, 4560, 4562, 4564, 4566, 4568, |
| | 4570, 4572, 4574, 4576, 4578, 4580, 4582, 4584, 4586, 4588, |
| | 4590, 4592, 4594, 4596, 4598, 4600, 4602, 4604, 4606, 4608, |
| | 4610 |
| 1 | 4672, 4674, 4676, 4678, 4680, 4682, 4684, 4686, 4688, 4690, |
| | 4692, 4694, 4696 |
| 1 | — |
| 1 | — |
| 1 | — |
| 1 | 8055, 8057, 8059, 8061, 8063, 8065, 8067, 8069, 8071, 8073, |
| | 8075, 8077, 8079 |
| 1 | — |
| 1 | 5786, 5788, 5790, 5792, 5794, 5796, 5798 |
| 1 | — |
| 1 | 7963, 7965, 7967, 7969 |
| 1 | 6715 |
| 1 | 7498, 7500, 7502, 7504, 7506, 7508, 7510, 7512, 7514, 7516, |
| | 7518 |
| 1 | 8551, 8553, 8555, 8557, 8559, 8561, 8563, 8565, 8567, 8569, |
| | 8571, 8573, 8575, 8577, 8579, 8581, 8583, 8585, 8587, 8589, |
| | 8591, 8593, 8595, 8597, 8599, 8601, 8603, 8605, 8607, 8609, |
| | 8611, 8613, 8615, 8617, 8619, 8621, 8623, 8625, 8627, 8629, |
| | 8631, 8633, 8635, 8637, 8639, 8641, 8643, 8645, 8647, 8649, |
| | 8651, 8653, 8655, 8657, 8659, 8661, 8663, 8665 |
| 1 | 8710, 8712, 8714 |
| 1 | 8854, 8856, 8858, 8860, 8862, 8864, 8866, 8868, 8870, 8872, |
| | 8874, 8876, 8878, 8880, 8882, 8884, 8886, 8888, 8890, 8892, |
| | 8894, 8896 |
| 1 | 9053, 9055, 9057, 9059, 9061, 9063, 9065, 9067, 9069, 9071, |
| | 9073, 9075, 9077, 9079, 9081, 9083, 9085, 9087, 9089, 9091, |
| | 9093 |
| 1 | 9610, 9612, 9614, 9616, 9618, 9620, 9622, 9624, 9626, 9628, |
| | 9630, 9632, 9634, 9636, 9638, 9640, 9642, 9644, 9646, 9648, |
| | 9650, 9652, 9654, 9656, 9658, 9660, 9662, 9664, 9666, 9668, |
| | 9670, 9672, 9674, 9676, 9678, 9680, 9682, 9684, 9686, 9688, |
| | 9690, 9692, 9694, 9696, 9698, 9700, 9702, 9704, 9706, 9708, |
| | 9710, 9712, 9714, 9716, 9718, 9720 |
| 1 | 10688, 10690, 10692, 10694, 10696, 10698, 10700, 10702, |
| | 10704, 10706, 10708, 10710, 10712, 10714, 10716, 10718, |
| | 10720, 10722, 10724, 10726 |
| 1 | 11044, 11046, 11048, 11050, 11052, 11054 |
| 1 | 11124, 11126, 11128, 11130, 11132 |
| 1 | 11297, 11299 |
| 1 | 11456, 11458, 11460, 11462, 11464, 11466, 11468, 11470, |
| | 11472, 11474, 11476, 11478, 11480, 11482, 11484, 11552 |
| 1 | 11505 |
| 1 | — |

TABLE III
Primer nucleic acid sequence ID numbers

| | | | | | 5. | | |
|---|---|---|---|---|---|---|---|
| | 1. | 2. | 3. | 4. | Lead | 6. | 7. |
| Application | Hit | Project | Locus | Organism | SEQ ID | Target | SEQ IDs of Primers |
| 1 | 1 | NUE_OEX2_1 | B0567 | E. coli | 63 | cytoplasmic | 73, 74 |
| 1 | 2 | NUE_OEX2_1 | B0953 | E. coli | 81 | plastidic | 133, 134 |
| 1 | 3 | NUE_OEX2_1 | B1088 | E. coli | 138 | cytoplasmic | 194, 195 |
| 1 | 4 | NUE_OEX2_1 | B1289 | E. coli | 200 | cytoplasmic | 284, 285 |
| 1 | 5 | NUE_OEX2_1 | B2904 | E. coli | 289 | cytoplasmic | 815, 816 |
| 1 | 6 | NUE_OEX2_1 | B3389 | E. coli | 820 | plastidic | 1288, 1289 |
| 1 | 7 | NUE_OEX2_1 | B3526 | E. coli | 1295 | plastidic | 1353, 1354 |
| 1 | 8 | NUE_OEX2_1 | B3611 | E. coli | 1365 | cytoplasmic | 1449, 1450 |
| 1 | 9 | NUE_OEX2_1 | B3744 | E. coli | 1453 | plastidic | 1547, 1548 |
| 1 | 10 | NUE_OEX2_1 | B3869 | E. coli | 1557 | plastidic | 1741, 1742 |
| 1 | 11 | NUE_OEX2_1 | B4266 | E. coli | 1748 | cytoplasmic | 2142, 2143 |
| 1 | 12 | NUE_OEX2_1 | SLL0892 | Synechocystis | 2146 | cytoplasmic | 2412, 2413 |
| | | | | sp. | | | |
| 1 | 13 | NUE_OEX2_1 | YJL087C | S. cerevisiae | 2416 | cytoplasmic | 2436, 2437 |
| 1 | 14 | NUE_OEX2_1 | YJR053W | S. cerevisiae | 2450 | cytoplasmic | 2458, 2459 |
| 1 | 15 | NUE_OEX2_1 | YLR357W | S. cerevisiae | 2469 | cytoplasmic | 2483, 2484 |
| 1 | 16 | NUE_OEX2_1 | YLR361C | S. cerevisiae | 2501 | cytoplasmic | 2509, 2510 |
| 1 | 17 | NUE_OEX2_1 | YML086C | S. cerevisiae | 2523 | cytoplasmic | 2553, 2554 |
| 1 | 18 | NUE_OEX2_1 | YML091C | S. cerevisiae | 2567 | cytoplasmic | 2575, 2576 |
| 1 | 19 | NUE_OEX2_1 | YML096W | S. cerevisiae | 2593 | cytoplasmic | 2609, 2610 |
| 1 | 20 | NUE_OEX2_1 | YMR236W | S. cerevisiae | 2619 | cytoplasmic | 2671, 2672 |
| 1 | 21 | NUE_OEX2_1 | YNL137C | S. cerevisiae | 2678 | cytoplasmic | 2694, 2695 |
| 1 | 22 | NUE_OEX2_1 | YOR196C | S. cerevisiae | 2701 | cytoplasmic | 3303, 3304 |
| 1 | 23 | NUE_OEX2_1 | YPL119C | S. cerevisiae | 3310 | cytoplasmic | 3660, 3661 |
| 1 | 24 | NUE_OEX2_1 | B2617 | E. coli | 3668 | cytoplasmic | 3686, 3687 |
| 1 | 25 | NUE_OEX2_1 | SII1280 | Synechocystis | 3690 | cytoplasmic | 3760, 3761 |
| | | | | sp. | | | |
| 1 | 26 | NUE_OEX2_1 | YLR443W | S. cerevisiae | 4705 | cytoplasmic | 4711, 4712 |
| 1 | 27 | NUE_OEX2_1 | YOR259C | S. cerevisiae | 4717 | cytoplasmic | 5251, 5252 |
| 1 | 28 | NUE_OEX2_1 | AT2G19580.1 | A. th. | 3769 | cytoplasmic | 4003, 4004 |
| 1 | 29 | NUE_OEX2_1 | AT2G20370.1 | A. th. | 4009 | cytoplasmic | 4063, 4064 |
| 1 | 30 | NUE_OEX2_1 | AT4G33070.1 | A. th. | 4077 | cytoplasmic | 4325, 4326 |
| 1 | 31 | NUE_OEX2_1 | AT5G07340.1 | A. th. | 4337 | cytoplasmic | 4611, 4612 |
| 1 | 32 | NUE_OEX2_1 | AT5G62460.1 | A. th. | 4619 | cytoplasmic | 4697, 4698 |
| 1 | 33 | NUE_OEX2_1 | AVINDRAFT_2950 | A. vinelandii | 6310 | cytoplasmic | 6324, 6325 |
| 1 | 34 | NUE_OEX2_1 | AVINDRAFT_0943 | A. vinelandii | 5807 | cytoplasmic | 6301, 6302 |
| 1 | 35 | NUE_OEX2_1 | SLL1797 | Synechocystis | 7540 | cytoplasmic | 7588, 7589 |
| | | | | sp. | | | |
| 1 | 36 | NUE_OEX2_1 | YIL043C | S. cerevisiae | 7974 | cytoplasmic | 8080, 8081 |
| 1 | 37 | NUE_OEX2_1 | B2940 | E. coli | 7534 | plastidic | 7538, 7539 |
| 1 | 38 | NUE_OEX2_1 | AT2G19490 | A. th. | 5257 | cytoplasmic | 5799, 5800 |
| 1 | 39 | NUE_OEX2_1 | B0951 | E. coli | 6332 | cytoplasmic | 6426, 6427 |
| 1 | 40 | NUE_OEX2_1 | YER023W | S. cerevisiae | 7592 | cytoplasmic | 7970, 7971 |
| 1 | 41 | NUE_OEX2_1 | B1189 | E. coli | 6436 | plastidic | 6716, 6717 |
| 1 | 42 | NUE_OEX2_1 | B2592 | E. coli | 6723 | plastidic | 7519, 7520 |
| 1 | 43 | NUE_OEX2_1 | AT1G07400.1 | A. th. | 8090 | cytoplasmic | 8666, 8667 |
| 1 | 44 | NUE_OEX2_1 | AT1G52560.1 | A. th. | 8673 | cytoplasmic | 8715, 8716 |
| 1 | 45 | NUE_OEX2_1 | AT1G63940.1 | A. th. | 8721 | cytoplasmic | 8897, 8898 |
| 1 | 46 | NUE_OEX2_1 | AT1G63940.2 | A. th. | 8912 | cytoplasmic | 9094, 9095 |
| 1 | 47 | NUE_OEX2_1 | AT3G46230.1 | A. th. | 9109 | cytoplasmic | 9721, 9722 |
| 1 | 48 | NUE_OEX2_1 | AT4G37930.1 | A. th. | 9727 | cytoplasmic | 10727, 10728 |
| 1 | 49 | NUE_OEX2_1 | AT5G06290.1 | A. th. | 10737 | cytoplasmic | 11055, 11056 |
| 1 | 50 | NUE_OEX2_1 | CDS5399 | P. trichocarpa | 11061 | cytoplasmic | 11133, 11134 |
| 1 | 51 | NUE_OEX2_1 | CDS5402 | P. trichocarpa | 11138 | cytoplasmic | 11300, 11301 |
| 1 | 52 | NUE_OEX2_1 | CDS5423 | P. trichocarpa | 11305 | cytoplasmic | 11485, 11486 |
| 1 | 53 | NUE_OEX2_1 | YKL130C | S. cerevisiae | 11496 | cytoplasmic | 11506, 11507 |
| 1 | 54 | NUE_OEX2_1 | YLR357W_2 | S. cerevisiae | 11513 | cytoplasmic | 11527, 11528 |

TABLE IV
Consensus amino acid sequence ID numbers

| | | | | | 5. | | |
|---|---|---|---|---|---|---|---|
| | 1. | 2. | 3. | 4. | Lead | 6. | 7. |
| Application | Hit | Project | Locus | Organism | SEQ ID | Target | SEQ IDs of Consensus/Pattern Sequences |
| 1 | 1 | NUE_OEX2_1 | B0567 | E. coli | 64 | cytoplasmic | 75, 76, 77, 78, 79, 80 |
| 1 | 2 | NUE_OEX2_1 | B0953 | E. coli | 82 | plastidic | 135, 136, 137 |
| 1 | 3 | NUE_OEX2_1 | B1088 | E. coli | 139 | cytoplasmic | 196, 197, 198, 199 |
| 1 | 4 | NUE_OEX2_1 | B1289 | E. coli | 201 | cytoplasmic | 286, 287, 288 |
| 1 | 5 | NUE_OEX2_1 | B2904 | E. coli | 290 | cytoplasmic | 817, 818, 819 |
| 1 | 6 | NUE_OEX2_1 | B3389 | E. coli | 821 | plastidic | 1290, 1291, 1292, 1293, 1294 |
| 1 | 7 | NUE_OEX2_1 | B3526 | E. coli | 1296 | plastidic | 1355, 1356, 1357, 1358, 1359, 1360, |
| | | | | | | | 1361, 1362, 1363, 1364 |
| 1 | 8 | NUE_OEX2_1 | B3611 | E. coli | 1366 | cytoplasmic | 1451, 1452 |
| 1 | 9 | NUE_OEX2_1 | B3744 | E. coli | 1454 | plastidic | 1549, 1550, 1551, 1552, 1553, 1554, |
| | | | | | | | 1555, 1556 |
| 1 | 10 | NUE_OEX2_1 | B3869 | E. coli | 1558 | plastidic | 1743, 1744, 1745, 1746, 1747 |
| 1 | 11 | NUE_OEX2_1 | B4266 | E. coli | 1749 | cytoplasmic | 2144, 2145 |
| 1 | 12 | NUE_OEX2_1 | SLL0892 | Synechocystis | 2147 | cytoplasmic | 2414, 2415 |
| | | | | sp. | | | |
| 1 | 13 | NUE_OEX2_1 | YJL087C | S. cerevisiae | 2417 | cytoplasmic | 2438, 2439, 2440, 2441, 2442, 2443, |
| | | | | | | | 2444, 2445, 2446, 2447, 2448, 2449 |
| 1 | 14 | NUE_OEX2_1 | YJR053W | S. cerevisiae | 2451 | cytoplasmic | 2460, 2461, 2462, 2463, 2464, 2465, |
| | | | | | | 2466, 2467, 2468 | |
| 1 | 15 | NUE_OEX2_1 | YLR357W | S. cerevisiae | 2470 | cytoplasmic | 2485, 2486, 2487, 2488, 2489, 2490, |
| | | | | | | | 2491, 2492, 2493, 2494, 2495, 2496, |
| | | | | | | | 2497, 2498, 2499, 2500 |
| 1 | 16 | NUE_OEX2_1 | YLR361C | S. cerevisiae | 2502 | cytoplasmic | 2511, 2512, 2513, 2514, 2515, 2516, |
| | | | | | | | 2517, 2518, 2519, 2520, 2521, 2522 |
| 1 | 17 | NUE_OEX2_1 | YML086C | S. cerevisiae | 2524 | cytoplasmic | 2555, 2556, 2557, 2558, 2559, 2560, |
| | | | | | | | 2561, 2562, 2563, 2564, 2565, 2566 |
| 1 | 18 | NUE_OEX2_1 | YML091C | S. cerevisiae | 2568 | cytoplasmic | 2577, 2578, 2579, 2580, 2581, 2582, |
| | | | | | | | 2583, 2584, 2585, 2586, 2587, 2588, |
| | | | | | | | 2589, 2590, 2591, 2592 |
| 1 | 19 | NUE_OEX2_1 | YML096W | S. cerevisiae | 2594 | cytoplasmic | 2611, 2612, 2613, 2614, 2615, 2616, |
| | | | | | | | 2617, 2618 |
| 1 | 20 | NUE_OEX2_1 | YMR236W | S. cerevisiae | 2620 | cytoplasmic | 2673, 2674, 2675, 2676, 2677 |
| 1 | 21 | NUE_OEX2_1 | YNL137C | S. cerevisiae | 2679 | cytoplasmic | 2696, 2697, 2698, 2699, 2700 |
| 1 | 22 | NUE_OEX2_1 | YOR196C | S. cerevisiae | 2702 | cytoplasmic | 3305, 3306, 3307, 3308, 3309 |
| 1 | 23 | NUE_OEX2_1 | YPL119C | S. cerevisiae | 3311 | cytoplasmic | 3662, 3663, 3664, 3665, 3666, 3667 |
| 1 | 24 | NUE_OEX2_1 | B2617 | E. coli | 3669 | cytoplasmic | 3688, 3689 |
| 1 | 25 | NUE_OEX2_1 | SII1280 | Synechocystis | 3691 | cytoplasmic | 3762, 3763, 3764, 3765, 3766, 3767, 3768 |
| | | | | sp. | | | |
| 1 | 26 | NUE_OEX2_1 | YLR443W | S. cerevisiae | 4706 | cytoplasmic | 4713, 4714, 4715, 4716 |
| 1 | 27 | NUE_OEX2_1 | YOR259C | S. cerevisiae | 4718 | cytoplasmic | 5253, 5254, 5255, 5256 |
| 1 | 28 | NUE_OEX2_1 | AT2G19580.1 | A. th. | 3770 | cytoplasmic | 4005, 4006, 4007, 4008 |
| 1 | 29 | NUE_OEX2_1 | AT2G20370.1 | A. th. | 4010 | cytoplasmic | 4065, 4066, 4067, 4068, 4069, |
| | | | | | | | 4070, 4071, 4072, 4073, 4074, |
| | | | | | | | 4075, 4076 |
| 1 | 30 | NUE_OEX2_1 | AT4G33070.1 | A. th. | 4078 | cytoplasmic | 4327, 4328, 4329, 4330, 4331, 4332, |
| | | | | | | | 4333, 4334, 4335, 4336 |
| 1 | 31 | NUE_OEX2_1 | AT5G07340.1 | A. th. | 4338 | cytoplasmic | 4613, 4614, 4615, 4616, 4617, 4618 |
| 1 | 32 | NUE_OEX2_1 | AT5G62460.1 | A. th. | 4620 | cytoplasmic | 4699, 4700, 4701, 4702, 4703, 4704 |
| 1 | 33 | NUE_OEX2_1 | AVINDRAFT_2950 | A. vinelandii | 6311 | cytoplasmic | 6326, 6327, 6328, 6329, 6330, 6331 |
| 1 | 34 | NUE_OEX2_1 | AVINDRAFT_0943 | A. vinelandii | 5808 | cytoplasmic | 6303, 6304, 6305, 6306, 6307, |
| | | | | | | | 6308, 6309 |
| 1 | 35 | NUE_OEX2_1 | SLL1797 | Synechocystis | 7541 | cytoplasmic | 7590, 7591 |
| | | | | sp. | | | |
| 1 | 36 | NUE_OEX2_1 | YIL043C | S. cerevisiae | 7975 | cytoplasmic | 8082, 8083, 8084, 8085, 8086, 8087, |
| | | | | | | | 8088, 8089 |
| 1 | 37 | NUE_OEX2_1 | B2940 | E. coli | 7535 | plastidic | — |
| 1 | 38 | NUE_OEX2_1 | AT2G19490 | A. th. | 5258 | cytoplasmic | 5801, 5802, 5803, 5804, 5805, 5806 |
| 1 | 39 | NUE_OEX2_1 | B0951 | E. coli | 6333 | cytoplasmic | 6428, 6429, 6430, 6431, 6432, 6433, |
| | | | | | | | 6434, 6435 |
| 1 | 40 | NUE_OEX2_1 | YER023W | S. cerevisiae | 7593 | cytoplasmic | 7972, 7973 |
| 1 | 41 | NUE_OEX2_1 | B1189 | E. coli | 6437 | plastidic | 6718, 6719, 6720, 6721, 6722 |
| 1 | 42 | NUE_OEX2_1 | B2592 | E. coli | 6724 | plastidic | 7521, 7522, 7523, 7524, 7525, 7526, |
| | | | | | | | 7527, 7528, 7529, 7530, 7531, 7532, |
| | | | | | | | 7533 |
| 1 | 43 | NUE_OEX2_1 | AT1G07400.1 | A. th. | 8091 | cytoplasmic | 8668, 8669, 8670, 8671, 8672 |
| 1 | 44 | NUE_OEX2_1 | AT1G52560.1 | A. th. | 8674 | cytoplasmic | 8717, 8718, 8719, 8720 |
| 1 | 45 | NUE_OEX2_1 | AT1G63940.1 | A. th. | 8722 | cytoplasmic | 8899, 8900, 8901, 8902, 8903, 8904, |
| | | | | | | | 8905, 8906, 8907, 8908, 8909, |
| | | | | | | | 8910, 8911 |
| 1 | 46 | NUE_OEX2_1 | AT1G63940.2 | A. th. | 8913 | cytoplasmic | 9096, 9097, 9098, 9099, 9100, 9101, |
| | | | | | | | 9102, 9103, 9104, 9105, 9106, 9107, |
| | | | | | | | 9108 |
| 1 | 47 | NUE_OEX2_1 | AT3G46230.1 | A. th. | 9110 | cytoplasmic | 9723, 9724, 9725, 9726 |
| 1 | 48 | NUE_OEX2_1 | AT4G37930.1 | A. th. | 9728 | cytoplasmic | 10729, 10730, 10731, 10732, 10733, |
| | | | | | | | 10734, 10735, 10736 |
| 1 | 49 | NUE_OEX2_1 | AT5G06290.1 | A. th. | 10738 | cytoplasmic | 11057, 11058, 11059, 11060 |
| 1 | 50 | NUE_OEX2_1 | CDS5399 | P. trichocarpa | 11062 | cytoplasmic | 11135, 11136, 11137 |
| 1 | 51 | NUE_OEX2_1 | CDS5402 | P. trichocarpa | 11139 | cytoplasmic | 11302, 11303, 11304 |
| 1 | 52 | NUE_OEX2_1 | CDS5423 | P. trichocarpa | 11306 | cytoplasmic | 11487, 11488, 11489, 11490, |
| | | | | | | | 11491, 11492, 11493, 11494, 11495 |
| 1 | 53 | NUE_OEX2_1 | YKL130C | S. cerevisiae | 11497 | cytoplasmic | 11508, 11509, 11510, 11511, 11512 |
| 1 | 54 | NUE_OEX2_1 | YLR357W_2 | S. cerevisiae | 11514 | cytoplasmic | 11529, 11530, 11531, 11532, 11533, |
| | | | | | | | 11534, 11535, 11536, 11537, 11538, |
| | | | | | | | 11539, 11540, 11541, 11542, 11543, |
| | | | | | | | 11544 |

The application's sequence listing, which the Patent Office published only in electronic form, follows.

SEQUENCE LISTING (11552 sequences)

SEQ ID NO: 1 - DNA, 19 bp, Artificial
  adapter sequence added to gene specific primers for cloning purposes
ggaattccagctgaccacc

SEQ ID NO: 2 - DNA, 20 bp, Artificial
  adapter sequence added to gene specific primers for cloning purposes
gatccccgggaattgccatg

SEQ ID NO: 3 - DNA, 10 bp, Artificial
  adapter sequence added to gene specific primers for cloning purposes
ttgctcttcc

SEQ ID NO: 4 - DNA, 10 bp, Artificial
  adapter sequence added to gene specific primers for cloning purposes
ttgctcttcg

SEQ ID NO: 5 - DNA, 34 bp, Artificial
  Amplification of the targeting sequence of the gene FNR from Spinacia oleracea to generate the S.cerevisiae plastidic targeting vector VC-MME354-1
atagaattcgcataaacttatcttcatagttgcc

SEQ ID NO: 6 - DNA, 27 bp, Artificial
  Amplification of the targeting sequence of the gene FNR from Spinacia oleracea to generate the S.cerevisiae plastidic targeting vector VC-MME354-1
atagaattcagaggcgatctgggccct

SEQ ID NO: 7 - DNA, 36 bp, Artificial
  Amplification of the targeting sequence of the gene FNR from Spinacia oleracea to generate the E.coli plastidic targeting vector VC-MME432-1
atagtttaaacgcataaacttatcttcatagttgcc

SEQ ID NO: 8 - DNA, 34 bp, Artificial
  Amplification of the targeting sequence of the gene FNR from Spinacia oleracea to generate the E.coli plastidic targeting vector VC-MME432-1
ataccatggaagagcaagaggcgatctgggccct

SEQ ID NO: 9 - DNA, 9041 bp, Artificial
  pMTX0270p
gctttgggcggatccggacaatcagtaaattgaacggagaatattattcataaaaatacgatagtaacgggtgatatattcattagaatgaaccgaaaccggcggtaaggatctgagctacacatgctcaggttttttacaacgtgcacaacagaattgaaagcaaatatcatgcgatcataggcgtctcgcatatctcattaaagcagggcatgccggtcgagtcaaatctcggtgacgggcaggaccggacggggcggtaccggcaggctgaagtccagctgccagaaacccacgtcatgccagttcccgtgcttgaagccggccgcccgcagcatgccgcggggggcatatccgagcgcctcgtgcatgcgcacgctcgggtcgttgggcagcccgatgacagcgaccacgctcttgaagccctgtgcctccagggacttcagcaggtgggtgtagagcgtggagcccagtcccgtccgctggtggcggggggagacgtacacggtcgactcggccgtccagtcgtaggcgttgcgtgccttccaggggcccgcgtaggcgatgccggcgacctcgccgtccacctcggcgacgagccagggatagcgctcccgcagacggacgaggtcgtccgtccactcctgcggttcctgcggctcggtacggaagttgaccgtgcttgtctcgatgtagtggttgacgatggtgcagaccgccggcatgtccgcctcggtggcacggcggatgtcggccgggcgtcgttctgggctcatggtagactcgacggatccacgtgtggaagatatgaatttttttgagaaactagataagattaatgaatatcggtgttttggttttttcttgtggccgtctttgtttatattgagatttttcaaatcagtgcgcaagacgtgacgtaagtatccgagtcagtttttatttttctactaatttggtcgaatctagattcgacggtatcgataagctcgcggatccctgaaagcgacgttggatgttaacatctacaaattgccttttcttatcgaccatgtacgtaagcgcttacgtttttggtggacccttgaggaaactggtagctgttgtgggcctgtggtctcaagatggatcattaatttccaccttcacctacgatggggggcatcgcaccggtgagtaatattgtacggctaagagcgaatttggcctgtaggatccctgaaagcgacgttggatgttaacatctacaaattgccttttcttatcgaccatgtacgtaagcgcttacgtttttggtggacccttgaggaaactggtagctgttgtgggcctgtggtctcaagatggatcattaatttccaccttcacctacgatggggggcatcgcaccggtgagtaatattgtacggctaagagcgaatttggcctgtaggatccctgaaagcgacgttggatgttaacatctacaaattgccttttcttatcgaccatgtacgtaagcgcttacgtttttggtggacccttgaggaaactggtagctgttgtgggcctgtggtctcaagatggatcattaatttccaccttcacctacgatggggggcatcgcaccggtgagtaatattgtacggctaagagcgaatttggcctgtaggatccgcgagctggtcaatcccattgcttttgaagcagctcaacattgatctctttctcgatcgagggagatttttcaaatcagtgcgcaagacgtgacgtaagtatccgagtcagtttttatttttctactaatttggtcgtttatttcggcgtgtaggacatggcaaccgggcctgaatttcgcgggtattctgtttctattccaactttttcttgatccgcagccattaacgacttttgaatagatacgctgacacgccaagcctcgctagtcaaaagtgtaccaaacaacgctttacagcaagaacggaatgcgcgtgacgctcgcggtgacgccatttcgccttttcagaaatggataaatagccttgcttcctattatatcttcccaaattaccaatacattacactagcatctgaatttcataaccaatctcgatacaccaaatcgaagatctcccgggttgctcttccatggcaatgattaattaacgaagagcaagagctcgaatttccccgatcgttcaaacatttggcaataaagtttcttaagattgaatcctgttgccggtcttgcgatgattatcatataatttctgttgaattacgttaagcatgtaataattaacatgtaatgcatgacgttatttatgagatgggtttttatgattagagtcccgcaattatacatttaatacgcgatagaaaacaaaatatagcgcgcaaactaggataaattatcgcgcgcggtgtcatctatgttactagatcgggaattggcatgcaagcttggcactggccgtcgttttacaacgtcgtgactgggaaaaccctggcgttacccaacttaatcgccttgcagcacatccccctttcgccagctggcgtaatagcgaagaggcccgcaccgatcgcccttcccaacagttgcgcagcctgaatggcgaatgctagagcagcttgagcttggatcagattgtcgtttcccgccttcagtttaaactatcagtgtttgacaggatatattggcgggtaaacctaagagaaaagagcgtttattagaataatcggatatttaaaagggcgtgaaaaggtttatccgttcgtccatttgtatgtgcatgccaaccacagggttcccctcgggatcaaagtactttgatccaacccctccgctgctatagtgcagtcggcttctgacgttcagtgcagccgtcttctgaaaacgacatgtcgcacaagtcctaagttacgcgacaggctgccgccctgcccttttcctggcgttttcttgtcgcgtgttttagtcgcataaagtagaatacttgcgactagaaccggagacattacgccatgaacaagagcgccgccgctggcctgctgggctatgcccgcgtcagcaccgacgaccaggacttgaccaaccaacgggccgaactgcacgcggccggctgcaccaagctgttttccgagaagatcaccggcaccaggcgcgaccgcccggagctggccaggatgcttgaccacctacgccctggcgacgttgtgacagtgaccaggctagaccgcctggcccgcagcacccgcgacctactggacattgccgagcgcatccaggaggccggcgcgggcctgcgtagcctggcagagccgtgggccgacaccaccacgccggccggccgcatggtgttgaccgtgttcgccggcattgccgagttcgagcgttccctaatcatcgaccgcacccggagcgggcgcgaggccgccaaggcccgaggcgtgaagtttggcccccgccctaccctcaccccggcacagatcgcgcacgcccgcgagctgatcgaccaggaaggccgcaccgtgaaagaggcggctgcactgcttggcgtgcatcgctcgaccctgtaccgcgcacttgagcgcagcgaggaagtgacgcccaccgaggccaggcggcgcggtgccttccgtgaggacgcattgaccgaggccgacgccctggcggccgccgagaatgaacgccaagaggaacaagcatgaaaccgcaccaggacggccaggacgaaccgtttttcattaccgaagagatcgaggcggagatgatcgcggccgggtacgtgttcgagccgcccgcgcacgtctcaaccgtgcggctgcatgaaatcctggccggtttgtctgatgccaagctggcggcctggccggccagcttggccgctgaagaaaccgagcgccgccgtctaaaaaggtgatgtgtatttgagtaaaacagcttgcgtcatgcggtcgctgcgtatatgatgcgatgagtaaataaacaaatacgcaaggggaacgcatgaaggttatcgctgtacttaaccagaaaggcgggtcaggcaagacgaccatcgcaacccatctagcccgcgccctgcaactcgccggggccgatgttctgttagtcgattccgatccccagggcagtgcccgcgattgggcggccgtgcgggaagatcaaccgctaaccgttgtcggcatcgaccgcccgacgattgaccgcgacgtgaaggccatcggccggcgcgacttcgtagtgatcgacggagcgccccaggcggcggacttggctgtgtccgcgatcaaggcagccgacttcgtgctgattccggtgcagccaagcccttacgacatatgggccaccgccgacctggtggagctggttaagcagcgcattgaggtcacggatggaaggctacaagcggcctttgtcgtgtcgcgggcgatcaaaggcacgcgcatcggcggtgaggttgccgaggcgctggccgggtacgagctgcccattcttgagtcccgtatcacgcagcgcgtgagctacccaggcactgccgccgccggcacaaccgttcttgaatcagaacccgagggcgacgctgcccgcgaggtccaggcgctggccgctgaaattaaatcaaaactcatttgagttaatgaggtaaagagaaaatgagcaaaagcacaaacacgctaagtgccggccgtccgagcgcacgcagcagcaaggctgcaacgttggccagcctggcagacacgccagccatgaagcgggtcaactttcagttgccggcggaggatcacaccaagctgaagatgtacgcggtacgccaaggcaagaccattaccgagctgctatctgaatacatcgcgcagctaccagagtaaatgagcaaatgaataaatgagtagatgaattttagcggctaaaggaggcggcatggaaaatcaagaacaaccaggcaccgacgccgtggaatgccccatgtgtggaggaacgggcggttggccaggcgtaagcggctgggttgcctgccggccctgcaatggcactggaacccccaagcccgaggaatcggcgtgagcggtcgcaaaccatccggcccggtacaaatcggcgcggcgctgggtgatgacctggtggagaagttgaaggccgcgcaggccgcccagcggcaacgcatcgaggcagaagcacgccccggtgaatcgtggcaagcggccgctgatcgaatccgcaaagaatcccggcaaccgccggcagccggtgcgccgtcgattaggaagccgcccaagggcgacgagcaaccagattttttcgttccgatgctctatgacgtgggcacccgcgatagtcgcagcatcatggacgtggccgttttccgtctgtcgaagcgtgaccgacgagctggcgaggtgatccgctacgagcttccagacgggcacgtagaggtttccgcagggccggccggcatggccagtgtgtgggattacgacctggtactgatggcggtttcccatctaaccgaatccatgaaccgataccgggaagggaagggagacaagcccggccgcgtgttccgtccacacgttgcggacgtactcaagttctgccggcgagccgatggcggaaagcagaaagacgacctggtagaaacctgcattcggttaaacaccacgcacgttgccatgcagcgtacgaagaaggccaagaacggccgcctggtgacggtatccgagggtgaagccttgattagccgctacaagatcgtaaagagcgaaaccgggcggccggagtacatcgagatcgagctagctgattggatgtaccgcgagatcacagaaggcaagaacccggacgtgctgacggttcaccccgattactttttgatcgatcccggcatcggccgttttctctaccgcctggcacgccgcgccgcaggcaaggcagaagccagatggttgttcaagacgatctacgaacgcagtggcagcgccggagagttcaagaagttctgtttcaccgtgcgcaagctgatcgggtcaaatgacctgccggagtacgatttgaaggaggaggcggggcaggctggcccgatcctagtcatgcgctaccgcaacctgatcgagggcgaagcatccgccggttcctaatgtacggagcagatgctagggcaaattgccctagcaggggaaaaaggtcgaaaaggtctctttcctgtggatagcacgtacattgggaacccaaagccgtacattgggaaccggaacccgtacattgggaacccaaagccgtacattgggaaccggtcacacatgtaagtgactgatataaaagagaaaaaaggcgatttttccgcctaaaactctttaaaacttattaaaactcttaaaacccgcctggcctgtgcataactgtctggccagcgcacagccgaagagctgcaaaaagcgcctacccttcggtcgctgcgctccctacgccccgccgcttcgcgtcggcctatcgcggccgctggccgctcaaaaatggctggcctacggccaggcaatctaccagggcgcggacaagccgcgccgtcgccactcgaccgccggcgcccacatcaaggcaccctgcctcgcgcgtttcggtgatgacggtgaaaacctctgacacatgcagctcccggagacggtcacagcttgtctgtaagcggatgccgggagcagacaagcccgtcagggcgcgtcagcgggtgttggcgggtgtcggggcgcagccatgacccagtcacgtagcgatagcggagtgtatactggcttaactatgcggcatcagagcagattgtactgagagtgcaccatatgcggtgtgaaataccgcacagatgcgtaaggagaaaataccgcatcaggcgctcttccgcttcctcgctcactgactcgctgcgctcggtcgttcggctgcggcgagcggtatcagctcactcaaaggcggtaatacggttatccacagaatcaggggataacgcaggaaagaacatgtgagcaaaaggccagcaaaaggccaggaaccgtaaaaaggccgcgttgctggcgtttttccataggctccgcccccctgacgagcatcacaaaaatcgacgctcaagtcagaggtggcgaaacccgacaggactataaagataccaggcgtttccccctggaagctccctcgtgcgctctcctgttccgaccctgccgcttaccggatacctgtccgcctttctcccttcgggaagcgtggcgctttctcatagctcacgctgtaggtatctcagttcggtgtaggtcgttcgctccaagctgggctgtgtgcacgaaccccccgttcagcccgaccgctgcgccttatccggtaactatcgtcttgagtccaacccggtaagacacgacttatcgccactggcagcagccactggtaacaggattagcagagcgaggtatgtaggcggtgctacagagttcttgaagtggtggcctaactacggctacactagaaggacagtatttggtatctgcgctctgctgaagccagttaccttcggaaaaagagttggtagctcttgatccggcaaacaaaccaccgctggtagcggtggtttttttgtttgcaagcagcagattacgcgcagaaaaaaaggatctcaagaagatcctttgatcttttctacggggtctgacgctcagtggaacgaaaactcacgttaagggattttggtcatgcattctaggtactaaaacaattcatccagtaaaatataatattttattttctcccaatcaggcttgatccccagtaagtcaaaaaatagctcgacatactgttcttccccgatatcctccctgatcgaccggacgcagaaggcaatgtcataccacttgtccgccctgccgcttctcccaagatcaataaagccacttactttgccatctttcacaaagatgttgctgtctcccaggtcgccgtgggaaaagacaagttcctcttcgggcttttccgtctttaaaaaatcatacagctcgcgcggatctttaaatggagtgtcttcttcccagttttcgcaatccacatcggccagatcgttattcagtaagtaatccaattcggctaagcggctgtctaagctattcgtatagggacaatccgatatgtcgatggagtgaaagagcctgatgcactccgcatacagctcgataatcttttcagggctttgttcatcttcatactcttccgagcaaaggacgccatcggcctcactcatgagcagattgctccagccatcatgccgttcaaagtgcaggacctttggaacaggcagctttccttccagccatagcatcatgtccttttcccgttccacatcataggtggtccctttataccggctgtccgtcatttttaaatataggttttcattttctcccaccagcttatataccttagcaggagacattccttccgtatcttttacgcagcggtatttttcgatcagttttttcaattccggtgatattctcattttagccatttattatttccttcctcttttctacagtatttaaagataccccaagaagctaattataacaagacgaactccaattcactgttccttgcattctaaaaccttaaataccagaaaacagctttttcaaagttgttttcaaagttggcgtataacatagtatcgacggagccgattttgaaaccgcggtgatcacaggcagcaacgctctgtcatcgttacaatcaacatgctaccctccgcgagatcatccgtgtttcaaacccggcagcttagttgccgttcttccgaatagcatcggtaacatgagcaaagtctgccgccttacaacggctctcccgctgacgccgtcccggactgatgggctgcctgtatcgagtggtgattttgtgccgagctgccggtcggggagctgttggctggctggtggcaggatatattgtggtgtaaacaaattgacgcttagacaacttaataacacattgcggacgtttttaatgtactgaattaacgccgaattaa

SEQ ID NO: 10 - protein, 62 aa, Acetabularia mediterranea
MASIMMNKSVVLSKECAKPLATPKVTLNKRGFATTIATKNREMMVWQPFNNKMFETFSFLPP

SEQ ID NO: 11 - protein, 90 aa, Arabidopsis thaliana
MAASLQSTATFLQSAKIATAPSRGSSHLRSTQAVGKSFGLETSSARLTCSFQSDFKDFTGKCSDAVKIAGFALATSALVVSGASAEGAPK

SEQ ID NO: 12 - protein, 96 aa, Arabidopsis thaliana
MAQVSRICNGVQNPSLICNLSKSSQRKSPLSVSLKTQQHPRAYPISSSWGLKKSGMTLIGSELRPLKVMSSVSTAEKASEIVLQPIREISGLIKLP

SEQ ID NO: 13 - protein, 100 aa, Arabidopsis thaliana
MAAATTTTTTSSSISFSTKPSPSSSKSPLPISRFSLPFSLNPNKSSSSSRRRGIKSSSPSSISAVLNTTTNVTTTPSPTKPTKPETFISRFAPDQPRKGA

SEQ ID NO: 14 - protein, 46 aa, Arabidopsis thaliana
MITSSLTCSLQALKLSSPFAHGSTPLSSLSKPNSFPNHRMPALVPV

SEQ ID NO: 15 - protein, 93 aa, Arabidopsis thaliana
MASLLGTSSSAIWASPSLSSPSSKPSSSPICFRPGKLFGSKLNAGIQIRPKKNRSRYHVSVMNVATEINSTEQVVGKFDSKKSARPVYPFAAI

SEQ ID NO: 16 - protein, 52 aa, Arabidopsis thaliana
MASTALSSAIVGTSFIRRSPAPISLRSLPSANTQSLFGLKSGTARGGRVVAM

SEQ ID NO: 17 - protein, 39 aa, Arabidopsis thaliana
MAASTMALSSPAFAGKAVNLSPAASEVLGSGRVTNRKTV

SEQ ID NO: 18 - protein, 92 aa, Arabidopsis thaliana
MAAITSATVTIPSFTGLKLAVSSKPKTLSTISRSSSATRAPPKLALKSSLKDFGVIAVATAASIVLAGNAMAMEVLLGSDDGSLAFVPSEFT

SEQ ID NO: 19 - protein, 85 aa, Arabidopsis thaliana
MAAAVSTVGAINRAPLSLNGSGSGAVSAPASTFLGKKVVTVSRFAQSNKKSNGSFKVLAVKEDKQTDGDRWRGLAYDTSDDQIDI

SEQ ID NO: 20 - protein, 54 aa, Arabidopsis thaliana
MKSSMLSSTAWTSPAQATMVAPFTGLKSSASFPVTRKANNDITSITSNGGRVSC

SEQ ID NO: 21 - protein, 91 aa, Arabidopsis thaliana
MAASGTSATFRASVSSAPSSSSQLTHLKSPFKAVKYTPLPSSRSKSSSFSVSCTIAKDPPVLMAAGSDPALWQRPDSFGRFGKFGGKYVPE

SEQ ID NO: 22 - protein, 80 aa, Brassica campestris
MSTTFCSSVCMQATSLAATTRISFQKPALVSTTNLSFNLRRSIPTRFSISCAAKPETVEKVSKIVKKQLSLKDDQKVVAE

SEQ ID NO: 23 - protein, 51 aa, Brassica napus
MATTFSASVSMQATSLATTTRISFQKPVLVSNHGRTNLSFNLSRTRLSISC

SEQ ID NO: 24 - protein, 44 aa, Chlamydomonas reinhardtii
MQALSSRVNIAAKPQRAQRLVVRAEEVKAAPKKEVGPKRGSLVK

SEQ ID NO: 25 - protein, 51 aa, Cucurbita moschata
MAELIQDKESAQSAATAAAASSGYERRNEPAHSRKFLEVRSEEELLSCIKK

SEQ ID NO: 26 - protein, 62 aa, Spinacea oleracea
MSTINGCLTSISPSRTQLKNTSTLRPTFIANSRVNPSSSVPPSLIRNQPVFAAPAPIITPTL

SEQ ID NO: 27 - protein, 75 aa, Spinacea oleracea
MTTAVTAAVSFPSTKTTSLSARCSSVISPDKISYKKVPLYYRNVSATGKMGPIRAQIASDVEAPPPAPAKVEKMS

SEQ ID NO: 28 - protein, 55 aa, Spinacea oleracea
MTTAVTAAVSFPSTKTTSLSARSSSVISPDKISYKKVPLYYRNVSATGKMGPIRA

SEQ ID NO: 29 - DNA, 419 bp, Spinacia oleracea
  5'UTR (1)..(168)
  CDS (166)..(273)
  CDS (351)..(419)
gcataaacttatcttcatagttgccactccaatttgctccttgaatctcctccacccaatacataatccactcctccatcacccacttcactactaaatcaaacttaactctgtttttctctctcctcctttcatttcttattcttccaatcatcgtactccgccatgaccaccgctgtcaccgccgctgtttctttcccctctaccaaaaccacctctctctccgcccgaagctcctccgtcatttcccctgacaaaatcagctacaaaaaggtgattcccaatttcactgtgttttttattaataatttgttattttgatgatgagatgattaatttgggtgctgcaggttcctttgtactacaggaatgtatctgcaactgggaaaatgggacccatcagggcccagatcgcctct

SEQ ID NO: 30 - protein, 59 aa, Spinacia oleracea
MTTAVTAAVSFPSTKTTSLSARSSSVISPDKISYKKVPLYYRNVSATGKMGPIRAQIAS

SEQ ID NO: 31 - DNA, 8659 bp, Artificial
  plasmid pMTX155
agcttggacaatcagtaaattgaacggagaatattattcataaaaatacgatagtaacgggtgatatattcattagaatgaaccgaaaccggcggtaaggatctgagctacacatgctcaggttttttacaacgtgcacaacagaattgaaagcaaatatcatgcgatcataggcgtctcgcatatctcattaaagcagggcatgccggtcgagtcaaatctcggtgacgggcaggaccggacggggcggtaccggcaggctgaagtccagctgccagaaacccacgtcatgccagttcccgtgcttgaagccggccgcccgcagcatgccgcggggggcatatccgagcgcctcgtgcatgcgcacgctcgggtcgttgggcagcccgatgacagcgaccacgctcttgaagccctgtgcctccagggacttcagcaggtgggtgtagagcgtggagcccagtcccgtccgctggtggcggggggagacgtacacggtcgactcggccgtccagtcgtaggcgttgcgtgccttccaggggcccgcgtaggcgatgccggcgacctcgccgtccacctcggcgacgagccagggatagcgctcccgcagacggacgaggtcgtccgtccactcctgcggttcctgcggctcggtacggaagttgaccgtgcttgtctcgatgtagtggttgacgatggtgcagaccgccggcatgtccgcctcggtggcacggcggatgtcggccgggcgtcgttctgggctcatggtagactcgacggatccacgtgtggaagatatgaatttttttgagaaactagataagattaatgaatatcggtgttttggttttttcttgtggccgtctttgtttatattgagatttttcaaatcagtgcgcaagacgtgacgtaagtatccgagtcagtttttatttttctactaatttggtcgaagctttgggcggatcctctagagcagcttgccaacatggtggagcacgacactctcgtctactccaagaatatcaaagatacagtctcagaagaccaaagggctattgagacttttcaacaaagggtaatatcgggaaacctcctcggattccattgcccagctatctgtcacttcatcaaaaggacagtagaaaaggaaggtggcacctacaaatgccatcattgcgataaaggaaaggctatcgttcaagatgcctctgccgacagtggtcccaaagatggacccccacccacgaggagcatcgtggaaaaagaagacgttccaaccacgtcttcaaagcaagtggattgatgtgaacatggtggagcacgacactctcgtctactccaagaatatcaaagatacagtctcagaagaccaaagggctattgagacttttcaacaaagggtaatatcgggaaacctcctcggattccattgcccagctatctgtcacttcatcaaaaggacagtagaaaaggaaggtggcacctacaaatgccatcattgcgataaaggaaaggctatcgttcaagatgcctctgccgacagtggtcccaaagatggacccccacccacgaggagcatcgtggaaaaagaagacgttccaaccacgtcttcaaagcaagtggattgatgtgatatctccactgacgtaagggatgacgcacaatcccactatccttcgcaagacccttcctctatataaggaagttcatttcatttggagaggacagggtaccctggaattccagctgaccaccatggcaattcccggggatcagctcgaatttccccgatcgttcaaacatttggcaataaagtttcttaagattgaatcctgttgccggtcttgcgatgattatcatataatttctgttgaattacgttaagcatgtaataattaacatgtaatgcatgacgttatttatgagatgggtttttatgattagagtcccgcaattatacatttaatacgcgatagaaaacaaaatatagcgcgcaaactaggataaattatcgcgcgcggtgtcatctatgttactagatcgggaattggcatgcaagcttggcactggccgtcgttttacaacgtcgtgactgggaaaaccctggcgttacccaacttaatcgccttgcagcacatccccctttcgccagctggcgtaatagcgaagaggcccgcaccgatcgcccttcccaacagttgcgcagcctgaatggcgaatgctagagcagcttgagcttggatcagattgtcgtttcccgccttcagtttaaactatcagtgtttgacaggatatattggcgggtaaacctaagagaaaagagcgtttattagaataacggatatttaaaagggcgtgaaaaggtttatccgttcgtccatttgtatgtgcatgccaaccacagggttcccctcgggatcaaagtactttgatccaacccctccgctgctatagtgcagtcggcttctgacgttcagtgcagccgtcttctgaaaacgacatgtcgcacaagtcctaagttacgcgacaggctgccgccctgcccttttcctggcgttttcttgtcgcgtgttttagtcgcataaagtagaatacttgcgactagaaccggagacattacgccatgaacaagagcgccgccgctggcctgctgggctatgcccgcgtcagcaccgacgaccaggacttgaccaaccaacgggccgaactgcacgcggccggctgcaccaagctgttttccgagaagatcaccggcaccaggcgcgaccgcccggagctggccaggatgcttgaccacctacgccctggcgacgttgtgacagtgaccaggctagaccgcctggcccgcagcacccgcgacctactggacattgccgagcgcatccaggaggccggcgcgggcctgcgtagcctggcagagccgtgggccgacaccaccacgccggccggccgcatggtgttgaccgtgttcgccggcattgccgagttcgagcgttccctaatcatcgaccgcacccggagcgggcgcgaggccgccaaggcccgaggcgtgaagtttggcccccgccctaccctcaccccggcacagatcgcgcacgcccgcgagctgatcgaccaggaaggccgcaccgtgaaagaggcggctgcactgcttggcgtgcatcgctcgaccctgtaccgcgcacttgagcgcagcgaggaagtgacgcccaccgaggccaggcggcgcggtgccttccgtgaggacgcattgaccgaggccgacgccctggcggccgccgagaatgaacgccaagaggaacaagcatgaaaccgcaccaggacggccaggacgaaccgtttttcattaccgaagagatcgaggcggagatgatcgcggccgggtacgtgttcgagccgcccgcgcacgtctcaaccgtgcggctgcatgaaatcctggccggtttgtctgatgccaagctggcggcctggccggccagcttggccgctgaagaaaccgagcgccgccgtctaaaaaggtgatgtgtatttgagtaaaacagcttgcgtcatgcggtcgctgcgtatatgatgcgatgagtaaataaacaaatacgcaaggggaacgcatgaaggttatcgctgtacttaaccagaaaggcgggtcaggcaagacgaccatcgcaacccatctagcccgcgccctgcaactcgccggggccgatgttctgttagtcgattccgatccccagggcagtgcccgcgattgggcggccgtgcgggaagatcaaccgctaaccgttgtcggcatcgaccgcccgacgattgaccgcgacgtgaaggccatcggccggcgcgacttcgtagtgatcgacggagcgccccaggcggcggacttggctgtgtccgcgatcaaggcagccgacttcgtgctgattccggtgcagccaagcccttacgacatatgggccaccgccgacctggtggagctggttaagcagcgcattgaggtcacggatggaaggctacaagcggcctttgtcgtgtcgcgggcgatcaaaggcacgcgcatcggcggtgaggttgccgaggcgctggccgggtacgagctgcccattcttgagtcccgtatcacgcagcgcgtgagctacccaggcactgccgccgccggcacaaccgttcttgaatcagaacccgagggcgacgctgcccgcgaggtccaggcgctggccgctgaaattaaatcaaaactcatttgagttaatgaggtaaagagaaaatgagcaaaagcacaaacacgctaagtgccggccgtccgagcgcacgcagcagcaaggctgcaacgttggccagcctggcagacacgccagccatgaagcgggtcaactttcagttgccggcggaggatcacaccaagctgaagatgtacgcggtacgccaaggcaagaccattaccgagctgctatctgaatacatcgcgcagctaccagagtaaatgagcaaatgaataaatgagtagatgaattttagcggctaaaggaggcggcatggaaaatcaagaacaaccaggcaccgacgccgtggaatgccccatgtgtggaggaacgggcggttggccaggcgtaagcggctgggttgtctgccggccctgcaatggcactggaacccccaagcccgaggaatcggcgtgacggtcgcaaaccatccggcccggtacaaatcggcgcggcgctgggtgatgacctggtggagaagttgaaggccgcgcaggccgcccagcggcaacgcatcgaggcagaagcacgccccggtgaatcgtggcaagcggccgctgatcgaatccgcaaagaatcccggcaaccgccggcagccggtgcgccgtcgattaggaagccgcccaagggcgacgagcaaccagattttttcgttccgatgctctatgacgtgggcacccgcgatagtcgcagcatcatggacgtggccgttttccgtctgtcgaagcgtgaccgacgagctggcgaggtgatccgctacgagcttccagacgggcacgtagaggtttccgcagggccggccggcatggccagtgtgtgggattacgacctggtactgatggcggtttcccatctaaccgaatccatgaaccgataccgggaagggaagggagacaagcccggccgcgtgttccgtccacacgttgcggacgtactcaagttctgccggcgagccgatggcggaaagcagaaagacgacctggtagaaacctgcattcggttaaacaccacgcacgttgccatgcagcgtacgaagaaggccaagaacggccgcctggtgacggtatccgagggtgaagccttgattagccgctacaagatcgtaaagagcgaaaccgggcggccggagtacatcgagatcgagctagctgattggatgtaccgcgagatcacagaaggcaagaacccggacgtgctgacggttcaccccgattactttttgatcgatcccggcatcggccgttttctctaccgcctggcacgccgcgccgcaggcaaggcagaagccagatggttgttcaagacgatctacgaacgcagtggcagcgccggagagttcaagaagttctgtttcaccgtgcgcaagctgatcgggtcaaatgacctgccggagtacgatttgaaggaggaggcggggcaggctggcccgatcctagtcatgcgctaccgcaacctgatcgagggcgaagcatccgccggttcctaatgtacggagcagatgctagggcaaattgccctagcaggggaaaaaggtcgaaaaggtctctttcctgtggatagcacgtacattgggaacccaaagccgtacattgggaaccggaacccgtacattgggaacccaaagccgtacattgggaaccggtcacacatgtaagtgactgatataaaagagaaaaaaggcgatttttccgcctaaaactctttaaaacttattaaaactcttaaaacccgcctggcctgtgcataactgtctggccagcgcacagccgaagagctgcaaaaagcgcctacccttcggtcgctgcgctccctacgccccgccgcttcgcgtcggcctatcgcggccgctggccgctcaaaaatggctggcctacggccaggcaatctaccagggcgcggacaagccgcgccgtcgccactcgaccgccggcgcccacatcaaggcaccctgcctcgcgcgtttcggtgatgacggtgaaaacctctgacacatgcagctcccggagacggtcacagcttgtctgtaagcggatgccgggagcagacaagcccgtcagggcgcgtcagcgggtgttggcgggtgtcggggcgcagccatgacccagtcacgtagcgatagcggagtgtatactggcttaactatgcggcatcagagcagattgtactgagagtgcaccatatgcggtgtgaaataccgcacagatgcgtaaggagaaaataccgcatcaggcgctcttccgcttcctcgctcactgactcgctgcgctcggtcgttcggctgcggcgagcggtatcagctcactcaaaggcggtaatacggttatccacagaatcaggggataacgcaggaaagaacatgtgagcaaaaggccagcaaaaggccaggaaccgtaaaaaggccgcgttgctggcgtttttccataggctccgcccccctgacgagcatcacaaaaatcgacgctcaagtcagaggtggcgaaacccgacaggactataaagataccaggcgtttccccctggaagctccctcgtgcgctctcctgttccgaccctgccgcttaccggatacctgtccgcctttctcccttcgggaagcgtggcgctttctcatagctcacgctgtaggtatctcagttcggtgtaggtcgttcgctccaagctgggctgtgtgcacgaaccccccgttcagcccgaccgctgcgccttatccggtaactatcgtcttgagtccaacccggtaagacacgacttatcgccactggcagcagccactggtaacaggattagcagagcgaggtatgtaggcggtgctacagagttcttgaagtggtggcctaactacggctacactagaaggacagtatttggtatctgcgctctgctgaagccagttaccttcggaaaaagagttggtagctcttgatccggcaaacaaaccaccgctggtagcggtggtttttttgtttgcaagcagcagattacgcgcagaaaaaaaggatctcaagaagatcctttgatcttttctacggggtctgacgctcagtggaacgaaaactcacgttaagggattttggtcatgcattctaggtactaaaacaattcatccagtaaaatataatattttattttctcccaatcaggcttgatccccagtaagtcaaaaaatagctcgacatactgttcttccccgatatcctccctgatcgaccggacgcagaaggcaatgtcataccacttgtccgccctgccgcttctcccaagatcaataaagccacttactttgccatctttcacaaagatgttgctgtctcccaggtcgccgtgggaaaagacaagttcctcttcgggcttttccgtctttaaaaaatcatacagctcgcgcggatctttaaatggagtgtcttcttcccagttttcgcaatccacatcggccagatcgttattcagtaagtaatccaattcggctaagcggctgtctaagctattcgtatagggacaatccgatatgtcgatggagtgaaagagcctgatgcactccgcatacagctcgataatcttttcagggctttgttcatcttcatactcttccgagcaaaggacgccatcggcctcactcatgagcagattgctccagccatcatgccgttcaaagtgcaggacctttggaacaggcagctttccttccagccatagcatcatgtccttttcccgttccacatcataggtggtccctttataccggctgtccgtcatttttaaatataggttttcattttctcccaccagcttatataccttagcaggagacattccttccgtatcttttacgcagcggtatttttcgatcagttttttcaattccggtgatattctcattttagccatttattatttccttcctcttttctacagtatttaaagataccccaagaagctaattataacaagacgaactccaattcactgttccttgcattctaaaaccttaaataccagaaaacagctttttcaaagttgttttcaaagttggcgtataacatagtatcgacggagccgattttgaaaccgcggtgatcacaggcagcaacgctctgtcatcgttacaatcaacatgctaccctccgcgagatcatccgtgtttcaaacccggcagcttagttgccgttcttccgaatagcatcggtaacatgagcaaagtctgccgccttacaacggctctcccgctgacgccgtcccggactgatgggctgcctgtatcgagtggtgattttgtgccgagctgccggtcggggagctgttggctggctggtggcaggatatattgtggtgtaaacaaattgacgcttagacaacttaataacacattgcggacgtttttaatgtactgaattaacgccgaatta

SEQ ID NO: 32 - DNA, 9469 bp, Artificial
  plasmid VC-MME354-1QCZ
  5'UTR (2130)..(2294)
  transit_peptide (2295)..(2402)
  CDS (2295)..(2402)
  transit_peptide (2480)..(2548)
  CDS (2480)..(2548)
  CDS (2549)..(2566): adapter
agctttgggcggatcctctagaggacaatcagtaaattgaacggagaatattattcataaaaatacgatagtaacgggtgatatattcattagaatgaaccgaaaccggcggtaaggatctgagctacacatgctcaggttttttacaacgtgcacaacagaattgaaagcaaatatcatgcgatcataggcgtctcgcatatctcattaaagcagggcatgccggtcgagtcaaatctcggtgacgggcaggaccggacggggcggtaccggcaggctgaagtccagctgccagaaacccacgtcatgccagttcccgtgcttgaagccggccgcccgcagcatgccgcggggggcatatccgagcgcctcgtgcatgcgcacgctcgggtcgttgggcagcccgatgacagcgaccacgctcttgaagccctgtgcctccagggacttcagcaggtgggtgtagagcgtggagcccagtcccgtccgctggtggcggggggagacgtacacggtcgactcggccgtccagtcgtaggcgttgcgtgccttccaggggcccgcgtaggcgatgccggcgacctcgccgtccacctcggcgacgagccagggatagcgctcccgcagacggacgaggtcgtccgtccactcctgcggttcctgcggctcggtacggaagttgaccgtgcttgtctcgatgtagtggttgacgatggtgcagaccgccggcatgtccgcctcggtggcacggcggatgtcggccgggcgtcgttctgggctcatggtagactcgacggatccacgtgtggaagatatgaatttttttgagaaactagataagattaatgaatatcggtgttttggttttttcttgtggccgtctttgtttatattgagatttttcaaatcagtgcgcaagacgtgacgtaagtatccgagtcagtttttatttttctactaatttggtcgaatctagattcgacggtatcgataagctcgcggatccctgaaagcgacgttggatgttaacatctacaaattgccttttcttatcgaccatgtacgtaagcgcttacgtttttggtggacccttgaggaaactggtagctgttgtgggcctgtggtctcaagatggatcattaatttccaccttcacctacgatggggggcatcgcaccggtgagtaatattgtacggctaagagcgaatttggcctgtaggatccctgaaagcgacgttggatgttaacatctacaaattgccttttcttatcgaccatgtacgtaagcgcttacgtttttggtggacccttgaggaaactggtagctgttgtgggcctgtggtctcaagatggatcattaatttccaccttcacctacgatggggggcatcgcaccggtgagtaatattgtacggctaagagcgaatttggcctgtaggatccctgaaagcgacgttggatgttaacatctacaaattgccttttcttatcgaccatgtacgtaagcgcttacgtttttggtggacccttgaggaaactggtagctgttgtgggcctgtggtctcaagatggatcattaatttccaccttcacctacgatggggggcatcgcaccggtgagtaatattgtacggctaagagcgaatttggcctgtaggatccgcgagctggtcaatcccattgcttttgaagcagctcaacattgatctctttctcgatcgagggagatttttcaaatcagtgcgcaagacgtgacgtaagtatccgagtcagtttttatttttctactaatttggtcgtttatttcggcgtgtaggacatggcaaccgggcctgaatttcgcgggtattctgtttctattccaactttttcttgatccgcagccattaacgacttttgaatagatacgctgacacgccaagcctcgctagtcaaaagtgtaccaaacaacgctttacagcaagaacggaatgcgcgtgacgctcgcggtgacgccatttcgccttttcagaaatggataaatagccttgcttcctattatatcttcccaaattaccaatacattacactagcatctgaatttcataaccaatctcgatacaccaaatcgaagatctccctggaattcgcataaacttatcttcatagttgccactccaatttgctccttgaatctcctccacccaatacataatccactcctccatcacccacttcactactaaatcaaacttaactctgtttttctctctcctcctttcatttcttattcttccaatcatcgtactccgccatgaccaccgctgtcaccgccgctgtttctttcccctctaccaaaaccacctctctctccgcccgaagctcctccgtcatttcccctgacaaaatcagctacaaaaaggtgattcccaatttcactgtgttttttattaataatttgttattttgatgatgagatgattaatttgggtgctgcaggttcctttgtactacaggaatgtatctgcaactgggaaaatgggacccatcagggcccagatcgcctctgaattccagctgaccaccatggcaattcccggggatcagctcgaatttccccgatcgttcaaacatttggcaataaagtttcttaagattgaatcctgttgccggtcttgcgatgattatcatataatttctgttgaattacgttaagcatgtaataattaacatgtaatgcatgacgttatttatgagatgggtttttatgattagagtcccgcaattatacatttaatacgcgatagaaaacaaaatatagcgcgcaaactaggataaattatcgcgcgcggtgtcatctatgttactagatcgggaattggcatgcaagcttggcactggccgtcgttttacaacgtcgtgactgggaaaaccctggcgttacccaacttaatcgccttgcagcacatccccctttcgccagctggcgtaatagcgaagaggcccgcaccgatcgcccttcccaacagttgcgcagcctgaatggcgaatgctagagcagcttgagcttggatcagattgtcgtttcccgccttcagtttaaactatcagtgtttgacaggatatattggcgggtaaacctaagagaaaagagcgtttattagaataatcggatatttaaaagggcgtgaaaaggtttatccgttcgtccatttgtatgtgcatgccaaccacagggttcccctcgggatcaaagtactttgatccaacccctccgctgctatagtgcagtcggcttctgacgttcagtgcagccgtcttctgaaaacgacatgtcgcacaagtcctaagttacgcgacaggctgccgccctgcccttttcctggcgttttcttgtcgcgtgttttagtcgcataaagtagaatacttgcgactagaaccggagacattacgccatgaacaagagcgccgccgctggcctgctgggctatgcccgcgtcagcaccgacgaccaggacttgaccaaccaacgggccgaactgcacgcggccggctgcaccaagctgttttccgagaagatcaccggcaccaggcgcgaccgcccggagctggccaggatgcttgaccacctacgccctggcgacgttgtgacagtgaccaggctagaccgcctggcccgcagcacccgcgacctactggacattgccgagcgcatccaggaggccggcgcgggcctgcgtagcctggcagagccgtgggccgacaccaccacgccggccggccgcatggtgttgaccgtgttcgccggcattgccgagttcgagcgttccctaatcatcgaccgcacccggagcgggcgcgaggccgccaaggcccgaggcgtgaagtttggcccccgccctaccctcaccccggcacagatcgcgcacgcccgcgagctgatcgaccaggaaggccgcaccgtgaaagaggcggctgcactgcttggcgtgcatcgctcgaccctgtaccgcgcacttgagcgcagcgaggaagtgacgcccaccgaggccaggcggcgcggtgccttccgtgaggacgcattgaccgaggccgacgccctggcggccgccgagaatgaacgccaagaggaacaagcatgaaaccgcaccaggacggccaggacgaaccgtttttcattaccgaagagatcgaggcggagatgatcgcggccgggtacgtgttcgagccgcccgcgcacgtctcaaccgtgcggctgcatgaaatcctggccggtttgtctgatgccaagctggcggcctggccggccagcttggccgctgaagaaaccgagcgccgccgtctaaaaaggtgatgtgtatttgagtaaaacagcttgcgtcatgcggtcgctgcgtatatgatgcgatgagtaaataaacaaatacgcaaggggaacgcatgaaggttatcgctgtacttaaccagaaaggcgggtcaggcaagacgaccatcgcaacccatctagcccgcgccctgcaactcgccggggccgatgttctgttagtcgattccgatccccagggcagtgcccgcgattgggcggccgtgcgggaagatcaaccgctaaccgttgtcggcatcgaccgcccgacgattgaccgcgacgtgaaggccatcggccggcgcgacttcgtagtgatcgacggagcgccccaggcggcggacttggctgtgtccgcgatcaaggcagccgacttcgtgctgattccggtgcagccaagcccttacgacatatgggccaccgccgacctggtggagctggttaagcagcgcattgaggtcacggatggaaggctacaagcggcctttgtcgtgtcgcgggcgatcaaaggcacgcgcatcggcggtgaggttgccgaggcgctggccgggtacgagctgcccattcttgagtcccgtatcacgcagcgcgtgagctacccaggcactgccgccgccggcacaaccgttcttgaatcagaacccgagggcgacgctgcccgcgaggtccaggcgctggccgctgaaattaaatcaaaactcatttgagttaatgaggtaaagagaaaatgagcaaaagcacaaacacgctaagtgccggccgtccgagcgcacgcagcagcaaggctgcaacgttggccagcctggcagacacgccagccatgaagcgggtcaactttcagttgccggcggaggatcacaccaagctgaagatgtacgcggtacgccaaggcaagaccattaccgagctgctatctgaatacatcgcgcagctaccagagtaaatgagcaaatgaataaatgagtagatgaattttagcggctaaaggaggcggcatggaaaatcaagaacaaccaggcaccgacgccgtggaatgccccatgtgtggaggaacgggcggttggccaggcgtaagcggctgggttgcctgccggccctgcaatggcactggaacccccaagcccgaggaatcggcgtgagcggtcgcaaaccatccggcccggtacaaatcggcgcggcgctgggtgatgacctggtggagaagttgaaggccgcgcaggccgcccagcggcaacgcatcgaggcagaagcacgccccggtgaatcgtggcaagcggccgctgatcgaatccgcaaagaatcccggcaaccgccggcagccggtgcgccgtcgattaggaagccgcccaagggcgacgagcaaccagattttttcgttccgatgctctatgacgtgggcacccgcgatagtcgcagcatcatggacgtggccgttttccgtctgtcgaagcgtgaccgacgagctggcgaggtgatccgctacgagcttccagacgggcacgtagaggtttccgcagggccggccggcatggccagtgtgtgggattacgacctggtactgatggcggtttcccatctaaccgaatccatgaaccgataccgggaagggaagggagacaagcccggccgcgtgttccgtccacacgttgcggacgtactcaagttctgccggcgagccgatggcggaaagcagaaagacgacctggtagaaacctgcattcggttaaacaccacgcacgttgccatgcagcgtacgaagaaggccaagaacggccgcctggtgacggtatccgagggtgaagccttgattagccgctacaagatcgtaaagagcgaaaccgggcggccggagtacatcgagatcgagctagctgattggatgtaccgcgagatcacagaaggcaagaacccggacgtgctgacggttcaccccgattactttttgatcgatcccggcatcggccgttttctctaccgcctggcacgccgcgccgcaggcaaggcagaagccagatggttgttcaagacgatctacgaacgcagtggcagcgccggagagttcaagaagttctgtttcaccgtgcgcaagctgatcgggtcaaatgacctgccggagtacgatttgaaggaggaggcggggcaggctggcccgatcctagtcatgcgctaccgcaacctgatcgagggcgaagcatccgccggttcctaatgtacggagcagatgctagggcaaattgccctagcaggggaaaaaggtcgaaaaggtctctttcctgtggatagcacgtacattgggaacccaaagccgtacattgggaaccggaacccgtacattgggaacccaaagccgtacattgggaaccggtcacacatgtaagtgactgatataaaagagaaaaaaggcgatttttccgcctaaaactctttaaaacttattaaaactcttaaaacccgcctggcctgtgcataactgtctggccagcgcacagccgaagagctgcaaaaagcgcctacccttcggtcgctgcgctccctacgccccgccgcttcgcgtcggcctatcgcggccgctggccgctcaaaaatggctggcctacggccaggcaatctaccagggcgcggacaagccgcgccgtcgccactcgaccgccggcgcccacatcaaggcaccctgcctcgcgcgtttcggtgatgacggtgaaaacctctgacacatgcagctcccggagacggtcacagcttgtctgtaagcggatgccgggagcagacaagcccgtcagggcgcgtcagcgggtgttggcgggtgtcggggcgcagccatgacccagtcacgtagcgatagcggagtgtatactggcttaactatgcggcatcagagcagattgtactgagagtgcaccatatgcggtgtgaaataccgcacagatgcgtaaggagaaaataccgcatcaggcgctcttccgcttcctcgctcactgactcgctgcgctcggtcgttcggctgcggcgagcggtatcagctcactcaaaggcggtaatacggttatccacagaatcaggggataacgcaggaaagaacatgtgagcaaaaggccagcaaaaggccaggaaccgtaaaaaggccgcgttgctggcgtttttccataggctccgcccccctgacgagcatcacaaaaatcgacgctcaagtcagaggtggcgaaacccgacaggactataaagataccaggcgtttccccctggaagctccctcgtgcgctctcctgttccgaccctgccgcttaccggatacctgtccgcctttctcccttcgggaagcgtggcgctttctcatagctcacgctgtaggtatctcagttcggtgtaggtcgttcgctccaagctgggctgtgtgcacgaaccccccgttcagcccgaccgctgcgccttatccggtaactatcgtcttgagtccaacccggtaagacacgacttatcgccactggcagcagccactggtaacaggattagcagagcgaggtatgtaggcggtgctacagagttcttgaagtggtggcctaactacggctacactagaaggacagtatttggtatctgcgctctgctgaagccagttaccttcggaaaaagagttggtagctcttgatccggcaaacaaaccaccgctggtagcggtggtttttttgtttgcaagcagcagattacgcgcagaaaaaaaggatctcaagaagatcctttgatcttttctacggggtctgacgctcagtggaacgaaaactcacgttaagggattttggtcatgcattctaggtactaaaacaattcatccagtaaaatataatattttattttctcccaatcaggcttgatccccagtaagtcaaaaaatagctcgacatactgttcttccccgatatcctccctgatcgaccggacgcagaaggcaatgtcataccacttgtccgccctgccgcttctcccaagatcaataaagccacttactttgccatctttcacaaagatgttgctgtctcccaggtcgccgtgggaaaagacaagttcctcttcgggcttttccgtctttaaaaaatcatacagctcgcgcggatctttaaatggagtgtcttcttcccagttttcgcaatccacatcggccagatcgttattcagtaagtaatccaattcggctaagcggctgtctaagctattcgtatagggacaatccgatatgtcgatggagtgaaagagcctgatgcactccgcatacagctcgataatcttttcagggctttgttcatcttcatactcttccgagcaaaggacgccatcggcctcactcatgagcagattgctccagccatcatgccgttcaaagtgcaggacctttggaacaggcagctttccttccagccatagcatcatgtccttttcccgttccacatcataggtggtccctttataccggctgtccgtcatttttaaatataggttttcattttctcccaccagcttatataccttagcaggagacattccttccgtatcttttacgcagcggtatttttcgatcagttttttcaattccggtgatattctcattttagccatttattatttccttcctcttttctacagtatttaaagataccccaagaagctaattataacaagacgaactccaattcactgttccttgcattctaaaaccttaaataccagaaaacagctttttcaaagttgttttcaaagttggcgtataacatagtatcgacggagccgattttgaaaccgcggtgatcacaggcagcaacgctctgtcatcgttacaatcaacatgctaccctccgcgagatcatccgtgtttcaaacccggcagcttagttgccgttcttccgaatagcatcggtaacatgagcaaagtctgccgccttacaacggctctcccgctgacgccgtcccggactgatgggctgcctgtatcgagtggtgattttgtgccgagctgccggtcggggagctgttggctggctggtggcaggatatattgtggtgtaaacaaattgacgcttagacaacttaataacacattgcggacgtttttaatgtactgaattaacgccgaatta

SEQ ID NO: 33 - protein, 65 aa, Artificial
  Synthetic Construct
MTTAVTAAVSFPSTKTTSLSARSSSVISPDKISYKKVPLYYRNVSATGKMGPIRAQIASEFQLTT

SEQ ID NO: 34 - DNA, 9129 bp, Artificial
  plasmid VC-MME356-1QCZ
  transit_peptide (2128)..(2208)
  CDS (2128)..(2208)
  CDS (2209)..(2226): adapter
agcttggacaatcagtaaattgaacggagaatattattcataaaaatacgatagtaacgggtgatatattcattagaatgaaccgaaaccggcggtaaggatctgagctacacatgctcaggttttttacaacgtgcacaacagaattgaaagcaaatatcatgcgatcataggcgtctcgcatatctcattaaagcagggcatgccggtcgagtcaaatctcggtgacgggcaggaccggacggggcggtaccggcaggctgaagtccagctgccagaaacccacgtcatgccagttcccgtgcttgaagccggccgcccgcagcatgccgcggggggcatatccgagcgcctcgtgcatgcgcacgctcgggtcgttgggcagcccgatgacagcgaccacgctcttgaagccctgtgcctccagggacttcagcaggtgggtgtagagcgtggagcccagtcccgtccgctggtggcggggggagacgtacacggtcgactcggccgtccagtcgtaggcgttgcgtgccttccaggggcccgcgtaggcgatgccggcgacctcgccgtccacctcggcgacgagccagggatagcgctcccgcagacggacgaggtcgtccgtccactcctgcggttcctgcggctcggtacggaagttgaccgtgcttgtctcgatgtagtggttgacgatggtgcagaccgccggcatgtccgcctcggtggcacggcggatgtcggccgggcgtcgttctgggctcatggtagactcgacggatccacgtgtggaagatatgaatttttttgagaaactagataagattaatgaatatcggtgttttggttttttcttgtggccgtctttgtttatattgagatttttcaaatcagtgcgcaagacgtgacgtaagtatccgagtcagtttttatttttctactaatttggtcgaagctttgggcggatcctctagattcgacggtatcgataagctcgcggatccctgaaagcgacgttggatgttaacatctacaaattgccttttcttatcgaccatgtacgtaagcgcttacgtttttggtggacccttgaggaaactggtagctgttgtgggcctgtggtctcaagatggatcattaatttccaccttcacctacgatggggggcatcgcaccggtgagtaatattgtacggctaagagcgaatttggcctgtaggatccctgaaagcgacgttggatgttaacatctacaaattgccttttcttatcgaccatgtacgtaagcgcttacgtttttggtggacccttgaggaaactggtagctgttgtgggcctgtggtctcaagatggatcattaatttccaccttcacctacgatggggggcatcgcaccggtgagtaatattgtacggctaagagcgaatttggcctgtaggatccctgaaagcgacgttggatgttaacatctacaaattgccttttcttatcgaccatgtacgtaagcgcttacgtttttggtggacccttgaggaaactggtagctgttgtgggcctgtggtctcaagatggatcattaatttccaccttcacctacgatggggggcatcgcaccggtgagtaatattgtacggctaagagcgaatttggcctgtaggatccgcgagctggtcaatcccattgcttttgaagcagctcaacattgatctctttctcgatcgagggagatttttcaaatcagtgcgcaagacgtgacgtaagtatccgagtcagtttttatttttctactaatttggtcgtttatttcggcgtgtaggacatggcaaccgggcctgaatttcgcgggtattctgtttctattccaactttttcttgatccgcagccattaacgacttttgaatagatacgctgacacgccaagcctcgctagtcaaaagtgtaccaaacaacgctttacagcaagaacggaatgcgcgtgacgctcgcggtgacgccatttcgccttttcagaaatggataaatagccttgcttcctattatatcttcccaaattaccaatacattacactagcatctgaatttcataaccaatctcgatacaccaaatcgaagatctccctggaattcatgcagaggtttttctccgccagatcgattctcggttacgccgtcaagacgcggaggaggtctttctcttctcgttcttcggaattccagctgaccaccatggcaattcccggggatcagctcgaatttccccgatcgttcaaacatttggcaataaagtttcttaagattgaatcctgttgccggtcttgcgatgattatcatataatttctgttgaattacgttaagcatgtaataattaacatgtaatgcatgacgttatttatgagatgggtttttatgattagagtcccgcaattatacatttaatacgcgatagaaaacaaaatatagcgcgcaaactaggataaattatcgcgcgcggtgtcatctatgttactagatcgggaattggcatgcaagcttggcactggccgtcgttttacaacgtcgtgactgggaaaaccctggcgttacccaacttaatcgccttgcagcacatccccctttcgccagctggcgtaatagcgaagaggcccgcaccgatcgcccttcccaacagttgcgcagcctgaatggcgaatgctagagcagcttgagcttggatcagattgtcgtttcccgccttcagtttaaactatcagtgtttgacaggatatattggcgggtaaacctaagagaaaagagcgtttattagaataatcggatatttaaaagggcgtgaaaaggtttatccgttcgtccatttgtatgtgcatgccaaccacagggttcccctcgggatcaaagtactttgatccaacccctccgctgctatagtgcagtcggcttctgacgttcagtgcagccgtcttctgaaaacgacatgtcgcacaagtcctaagttacgcgacaggctgccgccctgcccttttcctggcgttttcttgtcgcgtgttttagtcgcataaagtagaatacttgcgactagaaccggagacattacgccatgaacaagagcgccgccgctggcctgctgggctatgcccgcgtcagcaccgacgaccaggacttgaccaaccaacgggccgaactgcacgcggccggctgcaccaagctgttttccgagaagatcaccggcaccaggcgcgaccgcccggagctggccaggatgcttgaccacctacgccctggcgacgttgtgacagtgaccaggctagaccgcctggcccgcagcacccgcgacctactggacattgccgagcgcatccaggaggccggcgcgggcctgcgtagcctggcagagccgtgggccgacaccaccacgccggccggccgcatggtgttgaccgtgttcgccggcattgccgagttcgagcgttccctaatcatcgaccgcacccggagcgggcgcgaggccgccaaggcccgaggcgtgaagtttggcccccgccctaccctcaccccggcacagatcgcgcacgcccgcgagctgatcgaccaggaaggccgcaccgtgaaagaggcggctgcactgcttggcgtgcatcgctcgaccctgtaccgcgcacttgagcgcagcgaggaagtgacgcccaccgaggccaggcggcgcggtgccttccgtgaggacgcattgaccgaggccgacgccctggcggccgccgagaatgaacgccaagaggaacaagcatgaaaccgcaccaggacggccaggacgaaccgtttttcattaccgaagagatcgaggcggagatgatcgcggccgggtacgtgttcgagccgcccgcgcacgtctcaaccgtgcggctgcatgaaatcctggccggtttgtctgatgccaagctggcggcctggccggccagcttggccgctgaagaaaccgagcgccgccgtctaaaaaggtgatgtgtatttgagtaaaacagcttgcgtcatgcggtcgctgcgtatatgatgcgatgagtaaataaacaaatacgcaaggggaacgcatgaaggttatcgctgtacttaaccagaaaggcgggtcaggcaagacgaccatcgcaacccatctagcccgcgccctgcaactcgccggggccgatgttctgttagtcgattccgatccccagggcagtgcccgcgattgggcggccgtgcgggaagatcaaccgctaaccgttgtcggcatcgaccgcccgacgattgaccgcgacgtgaaggccatcggccggcgcgacttcgtagtgatcgacggagcgccccaggcggcggacttggctgtgtccgcgatcaaggcagccgacttcgtgctgattccggtgcagccaagcccttacgacatatgggccaccgccgacctggtggagctggttaagcagcgcattgaggtcacggatggaaggctacaagcggcctttgtcgtgtcgcgggcgatcaaaggcacgcgcatcggcggtgaggttgccgaggcgctggccgggtacgagctgcccattcttgagtcccgtatcacgcagcgcgtgagctacccaggcactgccgccgccggcacaaccgttcttgaatcagaacccgagggcgacgctgcccgcgaggtccaggcgctggccgctgaaattaaatcaaaactcatttgagttaatgaggtaaagagaaaatgagcaaaagcacaaacacgctaagtgccggccgtccgagcgcacgcagcagcaaggctgcaacgttggccagcctggcagacacgccagccatgaagcgggtcaactttcagttgccggcggaggatcacaccaagctgaagatgtacgcggtacgccaaggcaagaccattaccgagctgctatctgaatacatcgcgcagctaccagagtaaatgagcaaatgaataaatgagtagatgaattttagcggctaaaggaggcggcatggaaaatcaagaacaaccaggcaccgacgccgtggaatgccccatgtgtggaggaacgggcggttggccaggcgtaagcggctgggttgcctgccggccctgcaatggcactggaacccccaagcccgaggaatcggcgtgagcggtcgcaaaccatccggcccggtacaaatcggcgcggcgctgggtgatgacctggtggagaagttgaaggccgcgcaggccgcccagcggcaacgcatcgaggcagaagcacgccccggtgaatcgtggcaagcggccgctgatcgaatccgcaaagaatcccggcaaccgccggcagccggtgcgccgtcgattaggaagccgcccaagggcgacgagcaaccagattttttcgttccgatgctctatgacgtgggcacccgcgatagtcgcagcatcatggacgtggccgttttccgtctgtcgaagcgtgaccgacgagctggcgaggtgatccgctacgagcttccagacgggcacgtagaggtttccgcagggccggccggcatggccagtgtgtgggattacgacctggtactgatggcggtttcccatctaaccgaatccatgaaccgataccgggaagggaagggagacaagcccggccgcgtgttccgtccacacgttgcggacgtactcaagttctgccggcgagccgatggcggaaagcagaaagacgacctggtagaaacctgcattcggttaaacaccacgcacgttgccatgcagcgtacgaagaaggccaagaacggccgcctggtgacggtatccgagggtgaagccttgattagccgctacaagatcgtaaagagcgaaaccgggcggccggagtacatcgagatcgagctagctgattggatgtaccgcgagatcacagaaggcaagaacccggacgtgctgacggttcaccccgattactttttgatcgatcccggcatcggccgttttctctaccgcctggcacgccgcgccgcaggcaaggcagaagccagatggttgttcaagacgatctacgaacgcagtggcagcgccggagagttcaagaagttctgtttcaccgtgcgcaagctgatcgggtcaaatgacctgccggagtacgatttgaaggaggaggcggggcaggctggcccgatcctagtcatgcgctaccgcaacctgatcgagggcgaagcatccgccggttcctaatgtacggagcagatgctagggcaaattgccctagcaggggaaaaaggtcgaaaaggtctctttcctgtggatagcacgtacattgggaacccaaagccgtacattgggaaccggaacccgtacattgggaacccaaagccgtacattgggaaccggtcacacatgtaagtgactgatataaaagagaaaaaaggcgatttttccgcctaaaactctttaaaacttattaaaactcttaaaacccgcctggcctgtgcataactgtctggccagcgcacagccgaagagctgcaaaaagcgcctacccttcggtcgctgcgctccctacgccccgccgcttcgcgtcggcctatcgcggccgctggccgctcaaaaatggctggcctacggccaggcaatctaccagggcgcggacaagccgcgccgtcgccactcgaccgccggcgcccacatcaaggcaccctgcctcgcgcgtttcggtgatgacggtgaaaacctctgacacatgcagctcccggagacggtcacagcttgtctgtaagcggatgccgggagcagacaagcccgtcagggcgcgtcagcgggtgttggcgggtgtcggggcgcagccatgacccagtcacgtagcgatagcggagtgtatactggcttaactatgcggcatcagagcagattgtactgagagtgcaccatatgcggtgtgaaataccgcacagatgcgtaaggagaaaataccgcatcaggcgctcttccgcttcctcgctcactgactcgctgcgctcggtcgttcggctgcggcgagcggtatcagctcactcaaaggcggtaatacggttatccacagaatcaggggataacgcaggaaagaacatgtgagcaaaaggccagcaaaaggccaggaaccgtaaaaaggccgcgttgctggcgtttttccataggctccgcccccctgacgagcatcacaaaaatcgacgctcaagtcagaggtggcgaaacccgacaggactataaagataccaggcgtttccccctggaagctccctcgtgcgctctcctgttccgaccctgccgcttaccggatacctgtccgcctttctcccttcgggaagcgtggcgctttctcatagctcacgctgtaggtatctcagttcggtgtaggtcgttcgctccaagctgggctgtgtgcacgaaccccccgttcagcccgaccgctgcgccttatccggtaactatcgtcttgagtccaacccggtaagacacgacttatcgccactggcagcagccactggtaacaggattagcagagcgaggtatgtaggcggtgctacagagttcttgaagtggtggcctaactacggctacactagaaggacagtatttggtatctgcgctctgctgaagccagttaccttcggaaaaagagttggtagctcttgatccggcaaacaaaccaccgctggtagcggtggtttttttgtttgcaagcagcagattacgcgcagaaaaaaaggatctcaagaagatcctttgatcttttctacggggtctgacgctcagtggaacgaaaactcacgttaagggattttggtcatgcattctaggtactaaaacaattcatccagtaaaatataatattttattttctcccaatcaggcttgatccccagtaagtcaaaaaatagctcgacatactgttcttccccgatatcctccctgatcgaccggacgcagaaggcaatgtcataccacttgtccgccctgccgcttctcccaagatcaataaagccacttactttgccatctttcacaaagatgttgctgtctcccaggtcgccgtgggaaaagacaagttcctcttcgggcttttccgtctttaaaaaatcatacagctcgcgcggatctttaaatggagtgtcttcttcccagttttcgcaatccacatcggccagatcgttattcagtaagtaatccaattcggctaagcggctgtctaagctattcgtatagggacaatccgatatgtcgatggagtgaaagagcctgatgcactccgcatacagctcgataatcttttcagggctttgttcatcttcatactcttccgagcaaaggacgccatcggcctcactcatgagcagattgctccagccatcatgccgttcaaagtgcaggacctttggaacaggcagctttccttccagccatagcatcatgtccttttcccgttccacatcataggtggtccctttataccggctgtccgtcatttttaaatataggttttcattttctcccaccagcttatataccttagcaggagacattccttccgtatcttttacgcagcggtatttttcgatcagttttttcaattccggtgatattctcattttagccatttattatttccttcctcttttctacagtatttaaagataccccaagaagctaattataacaagacgaactccaattcactgttccttgcattctaaaaccttaaataccagaaaacagctttttcaaagttgttttcaaagttggcgtataacatagtatcgacggagccgattttgaaaccgcggtgatcacaggcagcaacgctctgtcatcgttacaatcaacatgctaccctccgcgagatcatccgtgtttcaaacccggcagcttagttgccgttcttccgaatagcatcggtaacatgagcaaagtctgccgccttacaacggctctcccgctgacgccgtcccggactgatgggctgcctgtatcgagtggtgattttgtgccgagctgccggtcggggagctgttggctggctggtggcaggatatattgtggtgtaaacaaattgacgcttagacaacttaataacacattgcggacgtttttaatgtactgaattaacgccgaatta

SEQ ID NO: 35 - protein, 33 aa, Artificial
  Synthetic Construct
MQRFFSARSILGYAVKTRRRSFSSRSSEFQLTT

SEQ ID NO: 36 - DNA, 8585 bp, Artificial
  plasmid VC-MME301-1QCZ
agcttggacaatcagtaaattgaacggagaatattattcataaaaatacgatagtaacgggtgatatattcattagaatgaaccgaaaccggcggtaaggatctgagctacacatgctcaggttttttacaacgtgcacaacagaattgaaagcaaatatcatgcgatcataggcgtctcgcatatctcattaaagcagggcatgccggtcgagtcaaatctcggtgacgggcaggaccggacggggcggtaccggcaggctgaagtccagctgccagaaacccacgtcatgccagttcccgtgcttgaagccggccgcccgcagcatgccgcggggggcatatccgagcgcctcgtgcatgcgcacgctcgggtcgttgggcagcccgatgacagcgaccacgctcttgaagccctgtgcctccagggacttcagcaggtgggtgtagagcgtggagcccagtcccgtccgctggtggcggggggagacgtacacggtcgactcggccgtccagtcgtaggcgttgcgtgccttccaggggcccgcgtaggcgatgccggcgacctcgccgtccacctcggcgacgagccagggatagcgctcccgcagacggacgaggtcgtccgtccactcctgcggttcctgcggctcggtacggaagttgaccgtgcttgtctcgatgtagtggttgacgatggtgcagaccgccggcatgtccgcctcggtggcacggcggatgtcggccgggcgtcgttctgggctcatggtagactcgacggatccacgtgtggaagatatgaatttttttgagaaactagataagattaatgaatatcggtgttttggttttttcttgtggccgtctttgtttatattgagatttttcaaatcagtgcgcaagacgtgacgtaagtatccgagtcagtttttatttttctactaatttggtcgaagctttgggcggatcctctagactgcagcaaatttacacattgccactaaacgtctaaacccttgtaatttgtttttgttttactatgtgtgttatgtatttgatttgcgataaatttttatatttggtactaaatttataacaccttttatgctaacgtttgccaacacttagcaatttgcaagttgattaattgattctaaattatttttgtcttctaaatacatatactaatcaactggaaatgtaaatatttgctaatatttctactataggagaattaaagtgagtgaatatggtaccacaaggtttggagatttaattgttgcaatgctgcatggatggcatatacaccaaacattcaataattcttgaggataataatggtaccacacaagatttgaggtgcatgaacgtcacgtggacaaaaggtttagtaatttttcaagacaacaatgttaccacacacaagttttgaggtgcatgcatggatgccctgtggaaagtttaaaaatattttggaaatgatttgcatggaagccatgtgtaaaaccatgacatccacttggaggatgcaataatgaagaaaactacaaatttacatgcaactagttatgcatgtagtctatataatgaggattttgcaatactttcattcatacacactcactaagttttacacgattataatttcttcataccattaattaagaattccagctgaccaccatggcaattcccggggatcagctcgaatttccccgatcgttcaaacatttggcaataaagtttcttaagattgaatcctgttgccggtcttgcgatgattatcatataatttctgttgaattacgttaagcatgtaataattaacatgtaatgcatgacgttatttatgagatgggtttttatgattagagtcccgcaattatacatttaatacgcgatagaaaacaaaatatagcgcgcaaactaggataaattatcgcgcgcggtgtcatctatgttactagatcgggaattggcatgcaagcttggcactggccgtcgttttacaacgtcgtgactgggaaaaccctggcgttacccaacttaatcgccttgcagcacatccccctttcgccagctggcgtaatagcgaagaggcccgcaccgatcgcccttcccaacagttgcgcagcctgaatggcgaatgctagagcagcttgagcttggatcagattgtcgtttcccgccttcagtttaaactatcagtgtttgacaggatatattggcgggtaaacctaagagaaaagagcgtttattagaataatcggatatttaaaagggcgtgaaaaggtttatccgttcgtccatttgtatgtgcatgccaaccacagggttcccctcgggatcaaagtactttgatccaacccctccgctgctatagtgcagtcggcttctgacgttcagtgcagccgtcttctgaaaacgacatgtcgcacaagtcctaagttacgcgacaggctgccgccctgcccttttcctggcgttttcttgtcgcgtgttttagtcgcataaagtagaatacttgcgactagaaccggagacattacgccatgaacaagagcgccgccgctggcctgctgggctatgcccgcgtcagcaccgacgaccaggacttgaccaaccaacgggccgaactgcacgcggccggctgcaccaagctgttttccgagaagatcaccggcaccaggcgcgaccgcccggagctggccaggatgcttgaccacctacgccctggcgacgttgtgacagtgaccaggctagaccgcctggcccgcagcacccgcgacctactggacattgccgagcgcatccaggaggccggcgcgggcctgcgtagcctggcagagccgtgggccgacaccaccacgccggccggccgcatggtgttgaccgtgttcgccggcattgccgagttcgagcgttccctaatcatcgaccgcacccggagcgggcgcgaggccgccaaggcccgaggcgtgaagtttggcccccgccctaccctcaccccggcacagatcgcgcacgcccgcgagctgatcgaccaggaaggccgcaccgtgaaagaggcggctgcactgcttggcgtgcatcgctcgaccctgtaccgcgcacttgagcgcagcgaggaagtgacgcccaccgaggccaggcggcgcggtgccttccgtgaggacgcattgaccgaggccgacgccctggcggccgccgagaatgaacgccaagaggaacaagcatgaaaccgcaccaggacggccaggacgaaccgtttttcattaccgaagagatcgaggcggagatgatcgcggccgggtacgtgttcgagccgcccgcgcacgtctcaaccgtgcggctgcatgaaatcctggccggtttgtctgatgccaagctggcggcctggccggccagcttggccgctgaagaaaccgagcgccgccgtctaaaaaggtgatgtgtatttgagtaaaacagcttgcgtcatgcggtcgctgcgtatatgatgcgatgagtaaataaacaaatacgcaaggggaacgcatgaaggttatcgctgtacttaaccagaaaggcgggtcaggcaagacgaccatcgcaacccatctagcccgcgccctgcaactcgccggggccgatgttctgttagtcgattccgatccccagggcagtgcccgcgattgggcggccgtgcgggaagatcaaccgctaaccgttgtcggcatcgaccgcccgacgattgaccgcgacgtgaaggccatcggccggcgcgacttcgtagtgatcgacggagcgccccaggcggcggacttggctgtgtccgcgatcaaggcagccgacttcgtgctgattccggtgcagccaagcccttacgacatatgggccaccgccgacctggtggagctggttaagcagcgcattgaggtcacggatggaaggctacaagcggcctttgtcgtgtcgcgggcgatcaaaggcacgcgcatcggcggtgaggttgccgaggcgctggccgggtacgagctgcccattcttgagtcccgtatcacgcagcgcgtgagctacccaggcactgccgccgccggcacaaccgttcttgaatcagaacccgagggcgacgctgcccgcgaggtccaggcgctggccgctgaaattaaatcaaaactcatttgagttaatgaggtaaagagaaaatgagcaaaagcacaaacacgctaagtgccggccgtccgagcgcacgcagcagcaaggctgcaacgttggccagcctggcagacacgccagccatgaagcgggtcaactttcagttgccggcggaggatcacaccaagctgaagatgtacgcggtacgccaaggcaagaccattaccgagctgctatctgaatacatcgcgcagctaccagagtaaatgagcaaatgaataaatgagtagatgaattttagcggctaaaggaggcggcatggaaaatcaagaacaaccaggcaccgacgccgtggaatgccccatgtgtggaggaacgggcggttggccaggcgtaagcggctgggttgcctgccggccctgcaatggcactggaacccccaagcccgaggaatcggcgtgagcggtcgcaaaccatccggcccggtacaaatcggcgcggcgctgggtgatgacctggtggagaagttgaaggccgcgcaggccgcccagcggcaacgcatcgaggcagaagcacgccccggtgaatcgtggcaagcggccgctgatcgaatccgcaaagaatcccggcaaccgccggcagccggtgcgccgtcgattaggaagccgcccaagggcgacgagcaaccagattttttcgttccgatgctctatgacgtgggcacccgcgatagtcgcagcatcatggacgtggccgttttccgtctgtcgaagcgtgaccgacgagctggcgaggtgatccgctacgagcttccagacgggcacgtagaggtttccgcagggccggccggcatggccagtgtgtgggattacgacctggtactgatggcggtttcccatctaaccgaatccatgaaccgataccgggaagggaagggagacaagcccggccgcgtgttccgtccacacgttgcggacgtactcaagttctgccggcgagccgatggcggaaagcagaaagacgacctggtagaaacctgcattcggttaaacaccacgcacgttgccatgcagcgtacgaagaaggccaagaacggccgcctggtgacggtatccgagggtgaagccttgattagccgctacaagatcgtaaagagcgaaaccgggcggccggagtacatcgagatcgagctagctgattggatgtaccgcgagatcacagaaggcaagaacccggacgtgctgacggttcaccccgattactttttgatcgatcccggcatcggccgttttctctaccgcctggcacgccgcgccgcaggcaaggcagaagccagatggttgttcaagacgatctacgaacgcagtggcagcgccggagagttcaagaagttctgtttcaccgtgcgcaagctgatcgggtcaaatgacctgccggagtacgatttgaaggaggaggcggggcaggctggcccgatcctagtcatgcgctaccgcaacctgatcgagggcgaagcatccgccggttcctaatgtacggagcagatgctagggcaaattgccctagcaggggaaaaaggtcgaaaaggtctctttcctgtggatagcacgtacattgggaacccaaagccgtacattgggaaccggaacccgtacattgggaacccaaagccgtacattgggaaccggtcacacatgtaagtgactgatataaaagagaaaaaaggcgatttttccgcctaaaactctttaaaacttattaaaactcttaaaacccgcctggcctgtgcataactgtctggccagcgcacagccgaagagctgcaaaaagcgcctacccttcggtcgctgcgctccctacgccccgccgcttcgcgtcggcctatcgcggccgctggccgctcaaaaatggctggcctacggccaggcaatctaccagggcgcggacaagccgcgccgtcgccactcgaccgccggcgcccacatcaaggcaccctgcctcgcgcgtttcggtgatgacggtgaaaacctctgacacatgcagctcccggagacggtcacagcttgtctgtaagcggatgccgggagcagacaagcccgtcagggcgcgtcagcgggtgttggcgggtgtcggggcgcagccatgacccagtcacgtagcgatagcggagtgtatactggcttaactatgcggcatcagagcagattgtactgagagtgcaccatatgcggtgtgaaataccgcacagatgcgtaaggagaaaataccgcatcaggcgctcttccgcttcctcgctcactgactcgctgcgctcggtcgttcggctgcggcgagcggtatcagctcactcaaaggcggtaatacggttatccacagaatcaggggataacgcaggaaagaacatgtgagcaaaaggccagcaaaaggccaggaaccgtaaaaaggccgcgttgctggcgtttttccataggctccgcccccctgacgagcatcacaaaaatcgacgctcaagtcagaggtggcgaaacccgacaggactataaagataccaggcgtttccccctggaagctccctcgtgcgctctcctgttccgaccctgccgcttaccggatacctgtccgcctttctcccttcgggaagcgtggcgctttctcatagctcacgctgtaggtatctcagttcggtgtaggtcgttcgctccaagctgggctgtgtgcacgaaccccccgttcagcccgaccgctgcgccttatccggtaactatcgtcttgagtccaacccggtaagacacgacttatcgccactggcagcagccactggtaacaggattagcagagcgaggtatgtaggcggtgctacagagttcttgaagtggtggcctaactacggctacactagaaggacagtatttggtatctgcgctctgctgaagccagttaccttcggaaaaagagttggtagctcttgatccggcaaacaaaccaccgctggtagcggtggtttttttgtttgcaagcagcagattacgcgcagaaaaaaaggatctcaagaagatcctttgatcttttctacggggtctgacgctcagtggaacgaaaactcacgttaagggattttggtcatgcattctaggtactaaaacaattcatccagtaaaatataatattttattttctcccaatcaggcttgatccccagtaagtcaaaaaatagctcgacatactgttcttccccgatatcctccctgatcgaccggacgcagaaggcaatgtcataccacttgtccgccctgccgcttctcccaagatcaataaagccacttactttgccatctttcacaaagatgttgctgtctcccaggtcgccgtgggaaaagacaagttcctcttcgggcttttccgtctttaaaaaatcatacagctcgcgcggatctttaaatggagtgtcttcttcccagttttcgcaatccacatcggccagatcgttattcagtaagtaatccaattcggctaagcggctgtctaagctattcgtatagggacaatccgatatgtcgatggagtgaaagagcctgatgcactccgcatacagctcgataatcttttcagggctttgttcatcttcatactcttccgagcaaaggacgccatcggcctcactcatgagcagattgctccagccatcatgccgttcaaagtgcaggacctttggaacaggcagctttccttccagccatagcatcatgtccttttcccgttccacatcataggtggtccctttataccggctgtccgtcatttttaaatataggttttcattttctcccaccagcttatataccttagcaggagacattccttccgtatcttttacgcagcggtatttttcgatcagttttttcaattccggtgatattctcattttagccatttattatttccttcctcttttctacagtatttaaagataccccaagaagctaattataacaagacgaactccaattcactgttccttgcattctaaaaccttaaataccagaaaacagctttttcaaagttgttttcaaagttggcgtataacatagtatcgacggagccgattttgaaaccgcggtgatcacaggcagcaacgctctgtcatcgttacaatcaacatgctaccctccgcgagatcatccgtgtttcaaacccggcagcttagttgccgttcttccgaatagcatcggtaacatgagcaaagtctgccgccttacaacggctctcccgctgacgccgtcccggactgatgggctgcctgtatcgagtggtgattttgtgccgagctgccggtcggggagctgttggctggctggtggcaggatatattgtggtgtaaacaaattgacgcttagacaacttaataacacattgcggacgtttttaatgtactgaattaacgccgaatta

SEQ ID NO: 37 - DNA, 9010 bp, Artificial
  plasmid pMTX461korrp
  5'UTR (1673)..(1837)
  transit_peptide (1838)..(1945)
  CDS (1838)..(1945)
  transit_peptide (2023)..(2091)
  CDS (2023)..(2091)
  CDS (2092)..(2109): adapter
agctttgggcggatcctctagaggacaatcagtaaattgaacggagaatattattcataaaaatacgatagtaacgggtgatatattcattagaatgaaccgaaaccggcggtaaggatctgagctacacatgctcaggttttttacaacgtgcacaacagaattgaaagcaaatatcatgcgatcataggcgtctcgcatatctcattaaagcagggcatgccggtcgagtcaaatctcggtgacgggcaggaccggacggggcggtaccggcaggctgaagtccagctgccagaaacccacgtcatgccagttcccgtgcttgaagccggccgcccgcagcatgccgcggggggcatatccgagcgcctcgtgcatgcgcacgctcgggtcgttgggcagcccgatgacagcgaccacgctcttgaagccctgtgcctccagggacttcagcaggtgggtgtagagcgtggagcccagtcccgtccgctggtggcggggggagacgtacacggtcgactcggccgtccagtcgtaggcgttgcgtgccttccaggggcccgcgtaggcgatgccggcgacctcgccgtccacctcggcgacgagccagggatagcgctcccgcagacggacgaggtcgtccgtccactcctgcggttcctgcggctcggtacggaagttgaccgtgcttgtctcgatgtagtggttgacgatggtgcagaccgccggcatgtccgcctcggtggcacggcggatgtcggccgggcgtcgttctgggctcatggtagactcgacggatccacgtgtggaagatatgaatttttttgagaaactagataagattaatgaatatcggtgttttggttttttcttgtggccgtctttgtttatattgagatttttcaaatcagtgcgcaagacgtgacgtaagtatccgagtcagtttttatttttctactaatttggtcgaatctagactgcagcaaatttacacattgccactaaacgtctaaacccttgtaatttgtttttgttttactatgtgtgttatgtatttgatttgcgataaatttttatatttggtactaaatttataacaccttttatgctaacgtttgccaacacttagcaatttgcaagttgattaattgattctaaattatttttgtcttctaaatacatatactaatcaactggaaatgtaaatatttgctaatatttctactataggagaattaaagtgagtgaatatggtaccacaaggtttggagatttaattgttgcaatgctgcatggatggcatatacaccaaacattcaataattcttgaggataataatggtaccacacaagatttgaggtgcatgaacgtcacgtggacaaaaggtttagtaatttttcaagacaacaatgttaccacacacaagttttgaggtgcatgcatggatgccctgtggaaagtttaaaaatattttggaaatgatttgcatggaagccatgtgtaaaaccatgacatccacttggaggatgcaataatgaagaaaactacaaatttacatgcaactagttatgcatgtagtctatataatgaggattttgcaatactttcattcatacacactcactaagttttacacgattataatttcttcataccattaattaagaattcgcataaacttatcttcatagttgccactccaatttgctccttgaatctcctccacccaatacataatccactcctccatcacccacttcactactaaatcaaacttaactctgtttttctctctcctcctttcatttcttattcttccaatcatcgtactccgccatgaccaccgctgtcaccgccgctgtttctttcccctctaccaaaaccacctctctctccgcccgaagctcctccgtcatttcccctgacaaaatcagctacaaaaaggtgattcccaatttcactgtgttttttattaataatttgttattttgatgatgagatgattaatttgggtgctgcaggttcctttgtactacaggaatgtatctgcaactgggaaaatgggacccatcagggcccagatcgcctctgaattccagctgaccaccatggcaattcccggggatcagctcgaatttccccgatcgttcaaacatttggcaataaagtttcttaagattgaatcctgttgccggtcttgcgatgattatcatataatttctgttgaattacgttaagcatgtaataattaacatgtaatgcatgacgttatttatgagatgggtttttatgattagagtcccgcaattatacatttaatacgcgatagaaaacaaaatatagcgcgcaaactaggataaattatcgcgcgcggtgtcatctatgttactagatcgggaattggcatgcaagcttggcactggccgtcgttttacaacgtcgtgactgggaaaaccctggcgttacccaacttaatcgccttgcagcacatccccctttcgccagctggcgtaatagcgaagaggcccgcaccgatcgcccttcccaacagttgcgcagcctgaatggcgaatgctagagcagcttgagcttggatcagattgtcgtttcccgccttcagtttaaactatcagtgtttgacaggatatattggcgggtaaacctaagagaaaagagcgtttattagaataacggatatttaaaagggcgtgaaaaggtttatccgttcgtccatttgtatgtgcatgccaaccacagggttcccctcgggatcaaagtactttgatccaacccctccgctgctatagtgcagtcggcttctgacgttcagtgcagccgtcttctgaaaacgacatgtcgcacaagtcctaagttacgcgacaggctgccgccctgcccttttcctggcgttttcttgtcgcgtgttttagtcgcataaagtagaatacttgcgactagaaccggagacattacgccatgaacaagagcgccgccgctggcctgctgggctatgcccgcgtcagcaccgacgaccaggacttgaccaaccaacgggccgaactgcacgcggccggctgcaccaagctgttttccgagaagatcaccggcaccaggcgcgaccgcccggagctggccaggatgcttgaccacctacgccctggcgacgttgtgacagtgaccaggctagaccgcctggcccgcagcacccgcgacctactggacattgccgagcgcatccaggaggccggcgcgggcctgcgtagcctggcagagccgtgggccgacaccaccacgccggccggccgcatggtgttgaccgtgttcgccggcattgccgagttcgagcgttccctaatcatcgaccgcacccggagcgggcgcgaggccgccaaggcccgaggcgtgaagtttggcccccgccctaccctcaccccggcacagatcgcgcacgcccgcgagctgatcgaccaggaaggccgcaccgtgaaagaggcggctgcactgcttggcgtgcatcgctcgaccctgtaccgcgcacttgagcgcagcgaggaagtgacgcccaccgaggccaggcggcgcggtgccttccgtgaggacgcattgaccgaggccgacgccctggcggccgccgagaatgaacgccaagaggaacaagcatgaaaccgcaccaggacggccaggacgaaccgtttttcattaccgaagagatcgaggcggagatgatcgcggccgggtacgtgttcgagccgcccgcgcacgtctcaaccgtgcggctgcatgaaatcctggccggtttgtctgatgccaagctggcggcctggccggccagcttggccgctgaagaaaccgagcgccgccgtctaaaaaggtgatgtgtatttgagtaaaacagcttgcgtcatgcggtcgctgcgtatatgatgcgatgagtaaataaacaaatacgcaaggggaacgcatgaaggttatcgctgtacttaaccagaaaggcgggtcaggcaagacgaccatcgcaacccatctagcccgcgccctgcaactcgccggggccgatgttctgttagtcgattccgatccccagggcagtgcccgcgattgggcggccgtgcgggaagatcaaccgctaaccgttgtcggcatcgaccgcccgacgattgaccgcgacgtgaaggccatcggccggcgcgacttcgtagtgatcgacggagcgccccaggcggcggacttggctgtgtccgcgatcaaggcagccgacttcgtgctgattccggtgcagccaagcccttacgacatatgggccaccgccgacctggtggagctggttaagcagcgcattgaggtcacggatggaaggctacaagcggcctttgtcgtgtcgcgggcgatcaaaggcacgcgcatcggcggtgaggttgccgaggcgctggccgggtacgagctgcccattcttgagtcccgtatcacgcagcgcgtgagctacccaggcactgccgccgccggcacaaccgttcttgaatcagaacccgagggcgacgctgcccgcgaggtccaggcgctggccgctgaaattaaatcaaaactcatttgagttaatgaggtaaagagaaaatgagcaaaagcacaaacacgctaagtgccggccgtccgagcgcacgcagcagcaaggctgcaacgttggccagcctggcagacacgccagccatgaagcgggtcaactttcagttgccggcggaggatcacaccaagctgaagatgtacgcggtacgccaaggcaagaccattaccgagctgctatctgaatacatcgcgcagctaccagagtaaatgagcaaatgaataaatgagtagatgaattttagcggctaaaggaggcggcatggaaaatcaagaacaaccaggcaccgacgccgtggaatgccccatgtgtggaggaacgggcggttggccaggcgtaagcggctgggttgtctgccggccctgcaatggcactggaacccccaagcccgaggaatcggcgtgacggtcgcaaaccatccggcccggtacaaatcggcgcggcgctgggtgatgacctggtggagaagttgaaggccgcgcaggccgcccagcggcaacgcatcgaggcagaagcacgccccggtgaatcgtggcaagcggccgctgatcgaatccgcaaagaatcccggcaaccgccggcagccggtgcgccgtcgattaggaagccgcccaagggcgacgagcaaccagattttttcgttccgatgctctatgacgtgggcacccgcgatagtcgcagcatcatggacgtggccgttttccgtctgtcgaagcgtgaccgacgagctggcgaggtgatccgctacgagcttccagacgggcacgtagaggtttccgcagggccggccggcatggccagtgtgtgggattacgacctggtactgatggcggtttcccatctaaccgaatccatgaaccgataccgggaagggaagggagacaagcccggccgcgtgttccgtccacacgttgcggacgtactcaagttctgccggcgagccgatggcggaaagcagaaagacgacctggtagaaacctgcattcggttaaacaccacgcacgttgccatgcagcgtacgaagaaggccaagaacggccgcctggtgacggtatccgagggtgaagccttgattagccgctacaagatcgtaaagagcgaaaccgggcggccggagtacatcgagatcgagctagctgattggatgtaccgcgagatcacagaaggcaagaacccggacgtgctgacggttcaccccgattactttttgatcgatcccggcatcggccgttttctctaccgcctggcacgccgcgccgcaggcaaggcagaagccagatggttgttcaagacgatctacgaacgcagtggcagcgccggagagttcaagaagttctgtttcaccgtgcgcaagctgatcgggtcaaatgacctgccggagtacgatttgaaggaggaggcggggcaggctggcccgatcctagtcatgcgctaccgcaacctgatcgagggcgaagcatccgccggttcctaatgtacggagcagatgctagggcaaattgccctagcaggggaaaaaggtcgaaaaggtctctttcctgtggatagcacgtacattgggaacccaaagccgtacattgggaaccggaacccgtacattgggaacccaaagccgtacattgggaaccggtcacacatgtaagtgactgatataaaagagaaaaaaggcgatttttccgcctaaaactctttaaaacttattaaaactcttaaaacccgcctggcctgtgcataactgtctggccagcgcacagccgaagagctgcaaaaagcgcctacccttcggtcgctgcgctccctacgccccgccgcttcgcgtcggcctatcgcggccgctggccgctcaaaaatggctggcctacggccaggcaatctaccagggcgcggacaagccgcgccgtcgccactcgaccgccggcgcccacatcaaggcaccctgcctcgcgcgtttcggtgatgacggtgaaaacctctgacacatgcagctcccggagacggtcacagcttgtctgtaagcggatgccgggagcagacaagcccgtcagggcgcgtcagcgggtgttggcgggtgtcggggcgcagccatgacccagtcacgtagcgatagcggagtgtatactggcttaactatgcggcatcagagcagattgtactgagagtgcaccatatgcggtgtgaaataccgcacagatgcgtaaggagaaaataccgcatcaggcgctcttccgcttcctcgctcactgactcgctgcgctcggtcgttcggctgcggcgagcggtatcagctcactcaaaggcggtaatacggttatccacagaatcaggggataacgcaggaaagaacatgtgagcaaaaggccagcaaaaggccaggaaccgtaaaaaggccgcgttgctggcgtttttccataggctccgcccccctgacgagcatcacaaaaatcgacgctcaagtcagaggtggcgaaacccgacaggactataaagataccaggcgtttccccctggaagctccctcgtgcgctctcctgttccgaccctgccgcttaccggatacctgtccgcctttctcccttcgggaagcgtggcgctttctcatagctcacgctgtaggtatctcagttcggtgtaggtcgttcgctccaagctgggctgtgtgcacgaaccccccgttcagcccgaccgctgcgccttatccggtaactatcgtcttgagtccaacccggtaagacacgacttatcgccactggcagcagccactggtaacaggattagcagagcgaggtatgtaggcggtgctacagagttcttgaagtggtggcctaactacggctacactagaaggacagtatttggtatctgcgctctgctgaagccagttaccttcggaaaaagagttggtagctcttgatccggcaaacaaaccaccgctggtagcggtggtttttttgtttgcaagcagcagattacgcgcagaaaaaaaggatctcaagaagatcctttgatcttttctacggggtctgacgctcagtggaacgaaaactcacgttaagggattttggtcatgcattctaggtactaaaacaattcatccagtaaaatataatattttattttctcccaatcaggcttgatccccagtaagtcaaaaaatagctcgacatactgttcttccccgatatcctccctgatcgaccggacgcagaaggcaatgtcataccacttgtccgccctgccgcttctcccaagatcaataaagccacttactttgccatctttcacaaagatgttgctgtctcccaggtcgccgtgggaaaagacaagttcctcttcgggcttttccgtctttaaaaaatcatacagctcgcgcggatctttaaatggagtgtcttcttcccagttttcgcaatccacatcggccagatcgttattcagtaagtaatccaattcggctaagcggctgtctaagctattcgtatagggacaatccgatatgtcgatggagtgaaagagcctgatgcactccgcatacagctcgataatcttttcagggctttgttcatcttcatactcttccgagcaaaggacgccatcggcctcactcatgagcagattgctccagccatcatgccgttcaaagtgcaggacctttggaacaggcagctttccttccagccatagcatcatgtccttttcccgttccacatcataggtggtccctttataccggctgtccgtcatttttaaatataggttttcattttctcccaccagcttatataccttagcaggagacattccttccgtatcttttacgcagcggtatttttcgatcagttttttcaattccggtgatattctcattttagccatttattatttccttcctcttttctacagtatttaaagataccccaagaagctaattataacaagacgaactccaattcactgttccttgcattctaaaaccttaaataccagaaaacagctttttcaaagttgttttcaaagttggcgtataacatagtatcgacggagccgattttgaaaccgcggtgatcacaggcagcaacgctctgtcatcgttacaatcaacatgctaccctccgcgagatcatccgtgtttcaaacccggcagcttagttgccgttcttccgaatagcatcggtaacatgagcaaagtctgccgccttacaacggctctcccgctgacgccgtcccggactgatgggctgcctgtatcgagtggtgattttgtgccgagctgccggtcggggagctgttggctggctggtggcaggatatattgtggtgtaaacaaattgacgcttagacaacttaataacacattgcggacgtttttaatgtactgaattaacgccgaatta

SEQ ID NO: 38 - protein, 65 aa, Artificial; identical to SEQ ID NO: 33
  Synthetic Construct

SEQ ID NO: 39 - DNA, 8674 bp, Artificial
  plasmid VC-MME462-1QCZ
  transit_peptide (1673)..(1753)
  CDS (1673)..(1753)
  CDS (1754)..(1771): adapter
agctttgggcggatcctctagaggacaatcagtaaattgaacggagaatattattcataaaaatacgatagtaacgggtgatatattcattagaatgaaccgaaaccggcggtaaggatctgagctacacatgctcaggttttttacaacgtgcacaacagaattgaaagcaaatatcatgcgatcataggcgtctcgcatatctcattaaagcagggcatgccggtcgagtcaaatctcggtgacgggcaggaccggacggggcggtaccggcaggctgaagtccagctgccagaaacccacgtcatgccagttcccgtgcttgaagccggccgcccgcagcatgccgcggggggcatatccgagcgcctcgtgcatgcgcacgctcgggtcgttgggcagcccgatgacagcgaccacgctcttgaagccctgtgcctccagggacttcagcaggtgggtgtagagcgtggagcccagtcccgtccgctggtggcggggggagacgtacacggtcgactcggccgtccagtcgtaggcgttgcgtgccttccaggggcccgcgtaggcgatgccggcgacctcgccgtccacctcggcgacgagccagggatagcgctcccgcagacggacgaggtcgtccgtccactcctgcggttcctgcggctcggtacggaagttgaccgtgcttgtctcgatgtagtggttgacgatggtgcagaccgccggcatgtccgcctcggtggcacggcggatgtcggccgggcgtcgttctgggctcatggtagactcgacggatccacgtgtggaagatatgaatttttttgagaaactagataagattaatgaatatcggtgttttggttttttcttgtggccgtctttgtttatattgagatttttcaaatcagtgcgcaagacgtgacgtaagtatccgagtcagtttttatttttctactaatttggtcgaatctagactgcagcaaatttacacattgccactaaacgtctaaacccttgtaatttgtttttgttttactatgtgtgttatgtatttgatttgcgataaatttttatatttggtactaaatttataacaccttttatgctaacgtttgccaacacttagcaatttgcaagttgattaattgattctaaattatttttgtcttctaaatacatatactaatcaactggaaatgtaaatatttgctaatatttctactataggagaattaaagtgagtgaatatggtaccacaaggtttggagatttaattgttgcaatgctgcatggatggcatatacaccaaacattcaataattcttgaggataataatggtaccacacaagatttgaggtgcatgaacgtcacgtggacaaaaggtttagtaatttttcaagacaacaatgttaccacacacaagttttgaggtgcatgcatggatgccctgtggaaagtttaaaaatattttggaaatgatttgcatggaagccatgtgtaaaaccatgacatccacttggaggatgcaataatgaagaaaactacaaatttacatgcaactagttatgcatgtagtctatataatgaggattttgcaatactttcattcatacacactcactaagttttacacgattataatttcttcataccattaattaagaattcatgcagaggtttttctccgccagatcgattctcggttacgccgtcaagacgcggaggaggtctttctcttctcgttcttcggaattccagctgaccaccatggcaattcccggggatcagctcgaatttccccgatcgttcaaacatttggcaataaagtttcttaagattgaatcctgttgccggtcttgcgatgattatcatataatttctgttgaattacgttaagcatgtaataattaacatgtaatgcatgacgttatttatgagatgggtttttatgattagagtcccgcaattatacatttaatacgcgatagaaaacaaaatatagcgcgcaaactaggataaattatcgcgcgcggtgtcatctatgttactagatcgggaattggcatgcaagcttggcactggccgtcgttttacaacgtcgtgactgggaaaaccctggcgttacccaacttaatcgccttgcagcacatccccctttcgccagctggcgtaatagcgaagaggcccgcaccgatcgcccttcccaacagttgcgcagcctgaatggcgaatgctagagcagcttgagcttggatcagattgtcgtttcccgccttcagtttaaactatcagtgtttgacaggatatattggcgggtaaacctaagagaaaagagcgtttattagaataatcggatatttaaaagggcgtgaaaaggtttatccgttcgtccatttgtatgtgcatgccaaccacagggttcccctcgggatcaaagtactttgatccaacccctccgctgctatagtgcagtcggcttctgacgttcagtgcagccgtcttctgaaaacgacatgtcgcacaagtcctaagttacgcgacaggctgccgccctgcccttttcctggcgttttcttgtcgcgtgttttagtcgcataaagtagaatacttgcgactagaaccggagacattacgccatgaacaagagcgccgccgctggcctgctgggctatgcccgcgtcagcaccgacgaccaggacttgaccaaccaacgggccgaactgcacgcggccggctgcaccaagctgttttccgagaagatcaccggcaccaggcgcgaccgcccggagctggccaggatgcttgaccacctacgccctggcgacgttgtgacagtgaccaggctagaccgcctggcccgcagcacccgcgacctactggacattgccgagcgcatccaggaggccggcgcgggcctgcgtagcctggcagagccgtgggccgacaccaccacgccggccggccgcatggtgttgaccgtgttcgccggcattgccgagttcgagcgttccctaatcatcgaccgcacccggagcgggcgcgaggccgccaaggcccgaggcgtgaagtttggcccccgccctaccctcaccccggcacagatcgcgcacgcccgcgagctgatcgaccaggaaggccgcaccgtgaaagaggcggctgcactgcttggcgtgcatcgctcgaccctgtaccgcgcacttgagcgcagcgaggaagtgacgcccaccgaggccaggcggcgcggtgccttccgtgaggacgcattgaccgaggccgacgccctggcggccgccgagaatgaacgccaagaggaacaagcatgaaaccgcaccaggacggccaggacgaaccgtttttcattaccgaagagatcgaggcggagatgatcgcggccgggtacgtgttcgagccgcccgcgcacgtctcaaccgtgcggctgcatgaaatcctggccggtttgtctgatgccaagctggcggcctggccggccagcttggccgctgaagaaaccgagcgccgccgtctaaaaaggtgatgtgtatttgagtaaaacagcttgcgtcatgcggtcgctgcgtatatgatgcgatgagtaaataaacaaatacgcaaggggaacgcatgaaggttatcgctgtacttaaccagaaaggcgggtcaggcaagacgaccatcgcaacccatctagcccgcgccctgcaactcgccggggccgatgttctgttagtcgattccgatccccagggcagtgcccgcgattgggcggccgtgcgggaagatcaaccgctaaccgttgtcggcatcgaccgcccgacgattgaccgcgacgtgaaggccatcggccggcgcgacttcgtagtgatcgacggagcgccccaggcggcggacttggctgtgtccgcgatcaaggcagccgacttcgtgctgattccggtgcagccaagcccttacgacatatgggccaccgccgacctggtggagctggttaagcagcgcattgaggtcacggatggaaggctacaagcggcctttgtcgtgtcgcgggcgatcaaaggcacgcgcatcggcggtgaggttgccgaggcgctggccgggtacgagctgcccattcttgagtcccgtatcacgcagcgcgtgagctacccaggcactgccgccgccggcacaaccgttcttgaatcagaacccgagggcgacgctgcccgcgaggtccaggcgctggccgctgaaattaaatcaaaactcatttgagttaatgaggtaaagagaaaatgagcaaaagcacaaacacgctaagtgccggccgtccgagcgcacgcagcagcaaggctgcaacgttggccagcctggcagacacgccagccatgaagcgggtcaactttcagttgccggcggaggatcacaccaagctgaagatgtacgcggtacgccaaggcaagaccattaccgagctgctatctgaatacatcgcgcagctaccagagtaaatgagcaaatgaataaatgagtagatgaattttagcggctaaaggaggcggcatggaaaatcaagaacaaccaggcaccgacgccgtggaatgccccatgtgtggaggaacgggcggttggccaggcgtaagcggctgggttgcctgccggccctgcaatggcactggaacccccaagcccgaggaatcggcgtgagcggtcgcaaaccatccggcccggtacaaatcggcgcggcgctgggtgatgacctggtggagaagttgaaggccgcgcaggccgcccagcggcaacgcatcgaggcagaagcacgccccggtgaatcgtggcaagcggccgctgatcgaatccgcaaagaatcccggcaaccgccggcagccggtgcgccgtcgattaggaagccgcccaagggcgacgagcaaccagattttttcgttccgatgctctatgacgtgggcacccgcgatagtcgcagcatcatggacgtggccgttttccgtctgtcgaagcgtgaccgacgagctggcgaggtgatccgctacgagcttccagacgggcacgtagaggtttccgcagggccggccggcatggccagtgtgtgggattacgacctggtactgatggcggtttcccatctaaccgaatccatgaaccgataccgggaagggaagggagacaagcccggccgcgtgttccgtccacacgttgcggacgtactcaagttctgccggcgagccgatggcggaaagcagaaagacgacctggtagaaacctgcattcggttaaacaccacgcacgttgccatgcagcgtacgaagaaggccaagaacggccgcctggtgacggtatccgagggtgaagccttgattagccgctacaagatcgtaaagagcgaaaccgggcggccggagtacatcgagatcgagctagctgattggatgtaccgcgagatcacagaaggcaagaacccggacgtgctgacggttcaccccgattactttttgatcgatcccggcatcggccgttttctctaccgcctggcacgccgcgccgcaggcaaggcagaagccagatggttgttcaagacgatctacgaacgcagtggcagcgccggagagttcaagaagttctgtttcaccgtgcgcaagctgatcgggtcaaatgacctgccggagtacgatttgaaggaggaggcggggcaggctggcccgatcctagtcatgcgctaccgcaacctgatcgagggcgaagcatccgccggttcctaatgtacggagcagatgctagggcaaattgccctagcaggggaaaaaggtcgaaaaggtctctttcctgtggatagcacgtacattgggaacccaaagccgtacattgggaaccggaacccgtacattgggaacccaaagccgtacattgggaaccggtcacacatgtaagtgactgatataaaagagaaaaaaggcgatttttccgcctaaaactctttaaaacttattaaaactcttaaaacccgcctggcctgtgcataactgtctggccagcgcacagccgaagagctgcaaaaagcgcctacccttcggtcgctgcgctccctacgccccgccgcttcgcgtcggcctatcgcggccgctggccgctcaaaaatggctggcctacggccaggcaatctaccagggcgcggacaagccgcgccgtcgccactcgaccgccggcgcccacatcaaggcaccctgcctcgcgcgtttcggtgatgacggtgaaaacctctgacacatgcagctcccggagacggtcacagcttgtctgtaagcggatgccgggagcagacaagcccgtcagggcgcgtcagcgggtgttggcgggtgtcggggcgcagccatgacccagtcacgtagcgatagcggagtgtatactggcttaactatgcggcatcagagcagattgtactgagagtgcaccatatgcggtgtgaaataccgcacagatgcgtaaggagaaaataccgcatcaggcgctcttccgcttcctcgctcactgactcgctgcgctcggtcgttcggctgcggcgagcggtatcagctcactcaaaggcggtaatacggttatccacagaatcaggggataacgcaggaaagaacatgtgagcaaaaggccagcaaaaggccaggaaccgtaaaaaggccgcgttgctggcgtttttccataggctccgcccccctgacgagcatcacaaaaatcgacgctcaagtcagaggtggcgaaacccgacaggactataaagataccaggcgtttccccctggaagctccctcgtgcgctctcctgttccgaccctgccgcttaccggatacctgtccgcctttctcccttcgggaagcgtggcgctttctcatagctcacgctgtaggtatctcagttcggtgtaggtcgttcgctccaagctgggctgtgtgcacgaaccccccgttcagcccgaccgctgcgccttatccggtaactatcgtcttgagtccaacccggtaagacacgacttatcgccactggcagcagccactggtaacaggattagcagagcgaggtatgtaggcggtgctacagagttcttgaagtggtggcctaactacggctacactagaaggacagtatttggtatctgcgctctgctgaagccagttaccttcggaaaaagagttggtagctcttgatccggcaaacaaaccaccgctggtagcggtggtttttttgtttgcaagcagcagattacgcgcagaaaaaaaggatctcaagaagatcctttgatcttttctacggggtctgacgctcagtggaacgaaaactcacgttaagggattttggtcatgcattctaggtactaaaacaattcatccagtaaaatataatattttattttctcccaatcaggcttgatccccagtaagtcaaaaaatagctcgacatactgttcttccccgatatcctccctgatcgaccggacgcagaaggcaatgtcataccacttgtccgccctgccgcttctcccaagatcaataaagccacttactttgccatctttcacaaagatgttgctgtctcccaggtcgccgtgggaaaagacaagttcctcttcgggcttttccgtctttaaaaaatcatacagctcgcgcggatctttaaatggagtgtcttcttcccagttttcgcaatccacatcggccagatcgttattcagtaagtaatccaattcggctaagcggctgtctaagctattcgtatagggacaatccgatatgtcgatggagtgaaagagcctgatgcactccgcatacagctcgataatcttttcagggctttgttcatcttcatactcttccgagcaaaggacgccatcggcctcactcatgagcagattgctccagccatcatgccgttcaaagtgcaggacctttggaacaggcagctttccttccagccatagcatcatgtccttttcccgttccacatcataggtggtccctttataccggctgtccgtcatttttaaatataggttttcattttctcccaccagcttatataccttagcaggagacattccttccgtatcttttacgcagcggtatttttcgatcagttttttcaattccggtgatattctcattttagccatttattatttccttcctcttttctacagtatttaaagataccccaagaagctaattataacaagacgaactccaattcactgttccttgcattctaaaaccttaaataccagaaaacagctttttcaaagttgttttcaaagttggcgtataacatagtatcgacggagccgattttgaaaccgcggtgatcacaggcagcaacgctctgtcatcgttacaatcaacatgctaccctccgcgagatcatccgtgtttcaaacccggcagcttagttgccgttcttccgaatagcatcggtaacatgagcaaagtctgccgccttacaacggctctcccgctgacgccgtcccggactgatgggctgcctgtatcgagtggtgattttgtgccgagctgccggtcggggagctgttggctggctggtggcaggatatattgtggtgtaaacaaattgacgcttagacaacttaataacacattgcggacgtttttaatgtactgaattaacgccgaatta

SEQ ID NO: 40 - protein, 33 aa, Artificial; identical to SEQ ID NO: 35
  Synthetic Construct

SEQ ID NO: 41 - DNA, 9045 bp, Artificial
  plasmid VC-MME220-1qcz
agcttggacaatcagtaaattgaacggagaatattattcataaaaatacgatagtaacgggtgatatattcattagaatgaaccgaaaccggcggtaaggatctgagctacacatgctcaggttttttacaacgtgcacaacagaattgaaagcaaatatcatgcgatcataggcgtctcgcatatctcattaaagcagggcatgccggtcgagtcaaatctcggtgacgggcaggaccggacggggcggtaccggcaggctgaagtccagctgccagaaacccacgtcatgccagttcccgtgcttgaagccggccgcccgcagcatgccgcggggggcatatccgagcgcctcgtgcatgcgcacgctcgggtcgttgggcagcccgatgacagcgaccacgctcttgaagccctgtgcctccagggacttcagcaggtgggtgtagagcgtggagcccagtcccgtccgctggtggcggggggagacgtacacggtcgactcggccgtccagtcgtaggcgttgcgtgccttccaggggcccgcgtaggcgatgccggcgacctcgccgtccacctcggcgacgagccagggatagcgctcccgcagacggacgaggtcgtccgtccactcctgcggttcctgcggctcggtacggaagttgaccgtgcttgtctcgatgtagtggttgacgatggtgcagaccgccggcatgtccgcctcggtggcacggcggatgtcggccgggcgtcgttctgggctcatggtagactcgacggatccacgtgtggaagatatgaatttttttgagaaactagataagattaatgaatatcggtgttttggttttttcttgtggccgtctttgtttatattgagatttttcaaatcagtgcgcaagacgtgacgtaagtatccgagtcagtttttatttttctactaatttggtcgaagctttgggcggatcctctagattcgacggtatcgataagctcgcggatccctgaaagcgacgttggatgttaacatctacaaattgccttttcttatcgaccatgtacgtaagcgcttacgtttttggtggacccttgaggaaactggtagctgttgtgggcctgtggtctcaagatggatcattaatttccaccttcacctacgatggggggcatcgcaccggtgagtaatattgtacggctaagagcgaatttggcctgtaggatccctgaaagcgacgttggatgttaacatctacaaattgccttttcttatcgaccatgtacgtaagcgcttacgtttttggtggacccttgaggaaactggtagctgttgtgggcctgtggtctcaagatggatcattaatttccaccttcacctacgatggggggcatcgcaccggtgagtaatattgtacggctaagagcgaatttggcctgtaggatccctgaaagcgacgttggatgttaacatctacaaattgccttttcttatcgaccatgtacgtaagcgcttacgtttttggtggacccttgaggaaactggtagctgttgtgggcctgtggtctcaagatggatcattaatttccaccttcacctacgatggggggcatcgcaccggtgagtaatattgtacggctaagagcgaatttggcctgtaggatccgcgagctggtcaatcccattgcttttgaagcagctcaacattgatctctttctcgatcgagggagatttttcaaatcagtgcgcaagacgtgacgtaagtatccgagtcagtttttatttttctactaatttggtcgtttatttcggcgtgtaggacatggcaaccgggcctgaatttcgcgggtattctgtttctattccaactttttcttgatccgcagccattaacgacttttgaatagatacgctgacacgccaagcctcgctagtcaaaagtgtaccaaacaacgctttacagcaagaacggaatgcgcgtgacgctcgcggtgacgccatttcgccttttcagaaatggataaatagccttgcttcctattatatcttcccaaattaccaatacattacactagcatctgaatttcataaccaatctcgatacaccaaatcgaagatctcccgggttgctcttccatggcaatgattaattaacgaagagcaagagctcgaatttccccgatcgttcaaacatttggcaataaagtttcttaagattgaatcctgttgccggtcttgcgatgattatcatataatttctgttgaattacgttaagcatgtaataattaacatgtaatgcatgacgttatttatgagatgggtttttatgattagagtcccgcaattatacatttaatacgcgatagaaaacaaaatatagcgcgcaaactaggataaattatcgcgcgcggtgtcatctatgttactagatcgggaattggcatgcaagcttggcactggccgtcgttttacaacgtcgtgactgggaaaaccctggcgttacccaacttaatcgccttgcagcacatccccctttcgccagctggcgtaatagcgaagaggcccgcaccgatcgcccttcccaacagttgcgcagcctgaatggcgaatgctagagcagcttgagcttggatcagattgtcgtttcccgccttcagtttaaactatcagtgtttgacaggatatattggcgggtaaacctaagagaaaagagcgtttattagaataatcggatatttaaaagggcgtgaaaaggtttatccgttcgtccatttgtatgtgcatgccaaccacagggttcccctcgggatcaaagtactttgatccaacccctccgctgctatagtgcagtcggcttctgacgttcagtgcagccgtcttctgaaaacgacatgtcgcacaagtcctaagttacgcgacaggctgccgccctgcccttttcctggcgttttcttgtcgcgtgttttagtcgcataaagtagaatacttgcgactagaaccggagacattacgccatgaacaagagcgccgccgctggcctgctgggctatgcccgcgtcagcaccgacgaccaggacttgaccaaccaacgggccgaactgcacgcggccggctgcaccaagctgttttccgagaagatcaccggcaccaggcgcgaccgcccggagctggccaggatgcttgaccacctacgccctggcgacgttgtgacagtgaccaggctagaccgcctggcccgcagcacccgcgacctactggacattgccgagcgcatccaggaggccggcgcgggcctgcgtagcctggcagagccgtgggccgacaccaccacgccggccggccgcatggtgttgaccgtgttcgccggcattgccgagttcgagcgttccctaatcatcgaccgcacccggagcgggcgcgaggccgccaaggcccgaggcgtgaagtttggcccccgccctaccctcaccccggcacagatcgcgcacgcccgcgagctgatcgaccaggaaggccgcaccgtgaaagaggcggctgcactgcttggcgtgcatcgctcgaccctgtaccgcgcacttgagcgcagcgaggaagtgacgcccaccgaggccaggcggcgcggtgccttccgtgaggacgcattgaccgaggccgacgccctggcggccgccgagaatgaacgccaagaggaacaagcatgaaaccgcaccaggacggccaggacgaaccgtttttcattaccgaagagatcgaggcggagatgatcgcggccgggtacgtgttcgagccgcccgcgcacgtctcaaccgtgcggctgcatgaaatcctggccggtttgtctgatgccaagctggcggcctggccggccagcttggccgctgaagaaaccgagcgccgccgtctaaaaaggtgatgtgtatttgagtaaaacagcttgcgtcatgcggtcgctgcgtatatgatgcgatgagtaaataaacaaatacgcaaggggaacgcatgaaggttatcgctgtacttaaccagaaaggcgggtcaggcaagacgaccatcgcaacccatctagcccgcgccctgcaactcgccggggccgatgttctgttagtcgattccgatccccagggcagtgcccgcgattgggcggccgtgcgggaagatcaaccgctaaccgttgtcggcatcgaccgcccgacgattgaccgcgacgtgaaggccatcggccggcgcgacttcgtagtgatcgacggagcgccccaggcggcggacttggctgtgtccgcgatcaaggcagccgacttcgtgctgattccggtgcagccaagcccttacgacatatgggccaccgccgacctggtggagctggttaagcagcgcattgaggtcacggatggaaggctacaagcggcctttgtcgtgtcgcgggcgatcaaaggcacgcgcatcggcggtgaggttgccgaggcgctggccgggtacgagctgcccattcttgagtcccgtatcacgcagcgcgtgagctacccaggcactgccgccgccggcacaaccgttcttgaatcagaacccgagggcgacgctgcccgcgaggtccaggcgctggccgctgaaattaaatcaaaactcatttgagttaatgaggtaaagagaaaatgagcaaaagcacaaacacgctaagtgccggccgtccgagcgcacgcagcagcaaggctgcaacgttggccagcctggcagacacgccagccatgaagcgggtcaactttcagttgccggcggaggatcacaccaagctgaagatgtacgcggtacgccaaggcaagaccattaccgagctgctatctgaatacatcgcgcagctaccagagtaaatgagcaaatgaataaatgagtagatgaattttagcggctaaaggaggcggcatggaaaatcaagaacaaccaggcaccgacgccgtggaatgccccatgtgtggaggaacgggcggttggccaggcgtaagcggctgggttgcctgccggccctgcaatggcactggaacccccaagcccgaggaatcggcgtgagcggtcgcaaaccatccggcccggtacaaatcggcgcggcgctgggtgatgacctggtggagaagttgaaggccgcgcaggccgcccagcggcaacgcatcgaggcagaagcacgccccggtgaatcgtggcaagcggccgctgatcgaatccgcaaagaatcccggcaaccgccggcagccggtgcgccgtcgattaggaagccgcccaagggcgacgagcaaccagattttttcgttccgatgctctatgacgtgggcacccgcgatagtcgcagcatcatggacgtggccgttttccgtctgtcgaagcgtgaccgacgagctggcgaggtgatccgctacgagcttccagacgggcacgtagaggtttccgcagggccggccggcatggccagtgtgtgggattacgacctggtactgatggcggtttcccatctaaccgaatccatgaaccgataccgggaagggaagggagacaagcccggccgcgtgttccgtccacacgttgcggacgtactcaagttctgccggcgagccgatggcggaaagcagaaagacgacctggtagaaacctgcattcggttaaacaccacgcacgttgccatgcagcgtacgaagaaggccaagaacggccgcctggtgacggtatccgagggtgaagccttgattagccgctacaagatcgtaaagagcgaaaccgggcggccggagtacatcgagatcgagctagctgattggatgtaccgcgagatcacagaaggcaagaacccggacgtgctgacggttcaccccgattactttttgatcgatcccggcatcggccgttttctctaccgcctggcacgccgcgccgcaggcaaggcagaagccagatggttgttcaagacgatctacgaacgcagtggcagcgccggagagttcaagaagttctgtttcaccgtgcgcaagctgatcgggtcaaatgacctgccggagtacgatttgaaggaggaggcggggcaggctggcccgatcctagtcatgcgctaccgcaacctgatcgagggcgaagcatccgccggttcctaatgtacggagcagatgctagggcaaattgccctagcaggggaaaaaggtcgaaaaggtctctttcctgtggatagcacgtacattgggaacccaaagccgtacattgggaaccggaacccgtacattgggaacccaaagccgtacattgggaaccggtcacacatgtaagtgactgatataaaagagaaaaaaggcgatttttccgcctaaaactctttaaaacttattaaaactcttaaaacccgcctggcctgtgcataactgtctggccagcgcacagccgaagagctgcaaaaagcgcctacccttcggtcgctgcgctccctacgccccgccgcttcgcgtcggcctatcgcggccgctggccgctcaaaaatggctggcctacggccaggcaatctaccagggcgcggacaagccgcgccgtcgccactcgaccgccggcgcccacatcaaggcaccctgcctcgcgcgtttcggtgatgacggtgaaaacctctgacacatgcagctcccggagacggtcacagcttgtctgtaagcggatgccgggagcagacaagcccgtcagggcgcgtcagcgggtgttggcgggtgtcggggcgcagccatgacccagtcacgtagcgatagcggagtgtatactggcttaactatgcggcatcagagcagattgtactgagagtgcaccatatgcggtgtgaaataccgcacagatgcgtaaggagaaaataccgcatcaggcgctcttccgcttcctcgctcactgactcgctgcgctcggtcgttcggctgcggcgagcggtatcagctcactcaaaggcggtaatacggttatccacagaatcaggggataacgcaggaaagaacatgtgagcaaaaggccagcaaaaggccaggaaccgtaaaaaggccgcgttgctggcgtttttccataggctccgcccccctgacgagcatcacaaaaatcgacgctcaagtcagaggtggcgaaacccgacaggactataaagataccaggcgtttccccctggaagctccctcgtgcgctctcctgttccgaccctgccgcttaccggatacctgtccgcctttctcccttcgggaagcgtggcgctttctcatagctcacgctgtaggtatctcagttcggtgtaggtcgttcgctccaagctgggctgtgtgcacgaaccccccgttcagcccgaccgctgcgccttatccggtaactatcgtcttgagtccaacccggtaagacacgacttatcgccactggcagcagccactggtaacaggattagcagagcgaggtatgtaggcggtgctacagagttcttgaagtggtggcctaactacggctacactagaaggacagtatttggtatctgcgctctgctgaagccagttaccttcggaaaaagagttggtagctcttgatccggcaaacaaaccaccgctggtagcggtggtttttttgtttgcaagcagcagattacgcgcagaaaaaaaggatctcaagaagatcctttgatcttttctacggggtctgacgctcagtggaacgaaaactcacgttaagggattttggtcatgcattctaggtactaaaacaattcatccagtaaaatataatattttattttctcccaatcaggcttgatccccagtaagtcaaaaaatagctcgacatactgttcttccccgatatcctccctgatcgaccggacgcagaaggcaatgtcataccacttgtccgccctgccgcttctcccaagatcaataaagccacttactttgccatctttcacaaagatgttgctgtctcccaggtcgccgtgggaaaagacaagttcctcttcgggcttttccgtctttaaaaaatcatacagctcgcgcggatctttaaatggagtgtcttcttcccagttttcgcaatccacatcggccagatcgttattcagtaagtaatccaattcggctaagcggctgtctaagctattcgtatagggacaatccgatatgtcgatggagtgaaagagcctgatgcactccgcatacagctcgataatcttttcagggctttgttcatcttcatactcttccgagcaaaggacgccatcggcctcactcatgagcagattgctccagccatcatgccgttcaaagtgcaggacctttggaacaggcagctttccttccagccatagcatcatgtccttttcccgttccacatcataggtggtccctttataccggctgtccgtcatttttaaatataggttttcattttctcccaccagcttatataccttagcaggagacattccttccgtatcttttacgcagcggtatttttcgatcagttttttcaattccggtgatattctcattttagccatttattatttccttcctcttttctacagtatttaaagataccccaagaagctaattataacaagacgaactccaattcactgttccttgcattctaaaaccttaaataccagaaaacagctttttcaaagttgttttcaaagttggcgtataacatagtatcgacggagccgattttgaaaccgcggtgatcacaggcagcaacgctctgtcatcgttacaatcaacatgctaccctccgcgagatcatccgtgtttcaaacccggcagcttagttgccgttcttccgaatagcatcggtaacatgagcaaagtctgccgccttacaacggctctcccgctgacgccgtcccggactgatgggctgcctgtatcgagtggtgattttgtgccgagctgccggtcggggagctgttggctggctggtggcaggatatattgtggtgtaaacaaattgacgcttagacaacttaataacacattgcggacgtttttaatgtactgaattaacgccgaatta

SEQ ID NO: 42 - DNA, 9466 bp, Artificial
  plasmid VC-MME432-1qcz
  5'UTR (2125)..(2289)
  transit_peptide (2290)..(2397)
  CDS (2290)..(2397)
  transit_peptide (2475)..(2543)
  CDS (2475)..(2543)
  CDS (2544)..(2552): adapter
gctttgggcggatcctctagaggacaatcagtaaattgaacggagaatattattcataaaaatacgatagtaacgggtgatatattcattagaatgaaccgaaaccggcggtaaggatctgagctacacatgctcaggttttttacaacgtgcacaacagaattgaaagcaaatatcatgcgatcataggcgtctcgcatatctcattaaagcagggcatgccggtcgagtcaaatctcggtgacgggcaggaccggacggggcggtaccggcaggctgaagtccagctgccagaaacccacgtcatgccagttcccgtgcttgaagccggccgcccgcagcatgccgcggggggcatatccgagcgcctcgtgcatgcgcacgctcgggtcgttgggcagcccgatgacagcgaccacgctcttgaagccctgtgcctccagggacttcagcaggtgggtgtagagcgtggagcccagtcccgtccgctggtggcggggggagacgtacacggtcgactcggccgtccagtcgtaggcgttgcgtgccttccaggggcccgcgtaggcgatgccggcgacctcgccgtccacctcggcgacgagccagggatagcgctcccgcagacggacgaggtcgtccgtccactcctgcggttcctgcggctcggtacggaagttgaccgtgcttgtctcgatgtagtggttgacgatggtgcagaccgccggcatgtccgcctcggtggcacggcggatgtcggccgggcgtcgttctgggctcatggtagactcgacggatccacgtgtggaagatatgaatttttttgagaaactagataagattaatgaatatcggtgttttggttttttcttgtggccgtctttgtttatattgagatttttcaaatcagtgcgcaagacgtgacgtaagtatccgagtcagtttttatttttctactaatttggtcgaatctagattcgacggtatcgataagctcgcggatccctgaaagcgacgttggatgttaacatctacaaattgccttttcttatcgaccatgtacgtaagcgcttacgtttttggtggacccttgaggaaactggtagctgttgtgggcctgtggtctcaagatggatcattaatttccaccttcacctacgatggggggcatcgcaccggtgagtaatattgtacggctaagagcgaatttggcctgtaggatccctgaaagcgacgttggatgttaacatctacaaattgccttttcttatcgaccatgtacgtaagcgcttacgtttttggtggacccttgaggaaactggtagctgttgtgggcctgtggtctcaagatggatcattaatttccaccttcacctacgatggggggcatcgcaccggtgagtaatattgtacggctaagagcgaatttggcctgtaggatccctgaaagcgacgttggatgttaacatctacaaattgccttttcttatcgaccatgtacgtaagcgcttacgtttttggtggacccttgaggaaactggtagctgttgtgggcctgtggtctcaagatggatcattaatttccaccttcacctacgatggggggcatcgcaccggtgagtaatattgtacggctaagagcgaatttggcctgtaggatccgcgagctggtcaatcccattgcttttgaagcagctcaacattgatctctttctcgatcgagggagatttttcaaatcagtgcgcaagacgtgacgtaagtatccgagtcagtttttatttttctactaatttggtcgtttatttcggcgtgtaggacatggcaaccgggcctgaatttcgcgggtattctgtttctattccaactttttcttgatccgcagccattaacgacttttgaatagatacgctgacacgccaagcctcgctagtcaaaagtgtaccaaacaacgctttacagcaagaacggaatgcgcgtgacgctcgcggtgacgccatttcgccttttcagaaatggataaatagccttgcttcctattatatcttcccaaattaccaatacattacactagcatctgaatttcataaccaatctcgatacaccaaatcgaagatctcccaaacgcataaacttatcttcatagttgccactccaatttgctccttgaatctcctccacccaatacataatccactcctccatcacccacttcactactaaatcaaacttaactctgtttttctctctcctcctttcatttcttattcttccaatcatcgtactccgccatgaccaccgctgtcaccgccgctgtttctttcccctctaccaaaaccacctctctctccgcccgaagctcctccgtcatttcccctgacaaaatcagctacaaaaaggtgattcccaatttcactgtgttttttattaataatttgttattttgatgatgagatgattaatttgggtgctgcaggttcctttgtactacaggaatgtatctgcaactgggaaaatgggacccatcagggcccagatcgcctcttgctcttccatggcaatgattaattaacgaagagcaagagctcgaatttccccgatcgttcaaacatttggcaataaagtttcttaagattgaatcctgttgccggtcttgcgatgattatcatataatttctgttgaattacgttaagcatgtaataattaacatgtaatgcatgacgttatttatgagatgggtttttatgattagagtcccgcaattatacatttaatacgcgatagaaaacaaaatatagcgcgcaaactaggataaattatcgcgcgcggtgtcatctatgttactagatcgggaattggcatgcaagcttggcactggccgtcgttttacaacgtcgtgactgggaaaaccctggcgttacccaacttaatcgccttgcagcacatccccctttcgccagctggcgtaatagcgaagaggcccgcaccgatcgcccttcccaacagttgcgcagcctgaatggcgaatgctagagcagcttgagcttggatcagattgtcgtttcccgccttcagtttaaactatcagtgtttgacaggatatattggcgggtaaacctaagagaaaagagcgtttattagaataatcggatatttaaaagggcgtgaaaaggtttatccgttcgtccatttgtatgtgcatgccaaccacagggttcccctcgggatcaaagtactttgatccaacccctccgctgctatagtgcagtcggcttctgacgttcagtgcagccgtcttctgaaaacgacatgtcgcacaagtcctaagttacgcgacaggctgccgccctgcccttttcctggcgttttcttgtcgcgtgttttagtcgcataaagtagaatacttgcgactagaaccggagacattacgccatgaacaagagcgccgccgctggcctgctgggctatgcccgcgtcagcaccgacgaccaggacttgaccaaccaacgggccgaactgcacgcggccggctgcaccaagctgttttccgagaagatcaccggcaccaggcgcgaccgcccggagctggccaggatgcttgaccacctacgccctggcgacgttgtgacagtgaccaggctagaccgcctggcccgcagcacccgcgacctactggacattgccgagcgcatccaggaggccggcgcgggcctgcgtagcctggcagagccgtgggccgacaccaccacgccggccggccgcatggtgttgaccgtgttcgccggcattgccgagttcgagcgttccctaatcatcgaccgcacccggagcgggcgcgaggccgccaaggcccgaggcgtgaagtttggcccccgccctaccctcaccccggcacagatcgcgcacgcccgcgagctgatcgaccaggaaggccgcaccgtgaaagaggcggctgcactgcttggcgtgcatcgctcgaccctgtaccgcgcacttgagcgcagcgaggaagtgacgcccaccgaggccaggcggcgcggtgccttccgtgaggacgcattgaccgaggccgacgccctggcggccgccgagaatgaacgccaagaggaacaagcatgaaaccgcaccaggacggccaggacgaaccgtttttcattaccgaagagatcgaggcggagatgatcgcggccgggtacgtgttcgagccgcccgcgcacgtctcaaccgtgcggctgcatgaaatcctggccggtttgtctgatgccaagctggcggcctggccggccagcttggccgctgaagaaaccgagcgccgccgtctaaaaaggtgatgtgtatttgagtaaaacagcttgcgtcatgcggtcgctgcgtatatgatgcgatgagtaaataaacaaatacgcaaggggaacgcatgaaggttatcgctgtacttaaccagaaaggcgggtcaggcaagacgaccatcgcaacccatctagcccgcgccctgcaactcgccggggccgatgttctgttagtcgattccgatccccagggcagtgcccgcgattgggcggccgtgcgggaagatcaaccgctaaccgttgtcggcatcgaccgcccgacgattgaccgcgacgtgaaggccatcggccggcgcgacttcgtagtgatcgacggagcgccccaggcggcggacttggctgtgtccgcgatcaaggcagccgacttcgtgctgattccggtgcagccaagcccttacgacatatgggccaccgccgacctggtggagctggttaagcagcgcattgaggtcacggatggaaggctacaagcggcctttgtcgtgtcgcgggcgatcaaaggcacgcgcatcggcggtgaggttgccgaggcgctggccgggtacgagctgcccattcttgagtcccgtatcacgcagcgcgtgagctacccaggcactgccgccgccggcacaaccgttcttgaatcagaacccgagggcgacgctgcccgcgaggtccaggcgctggccgctgaaattaaatcaaaactcatttgagttaatgaggtaaagagaaaatgagcaaaagcacaaacacgctaagtgccggccgtccgagcgcacgcagcagcaaggctgcaacgttggccagcctggcagacacgccagccatgaagcgggtcaactttcagttgccggcggaggatcacaccaagctgaagatgtacgcggtacgccaaggcaagaccattaccgagctgctatctgaatacatcgcgcagctaccagagtaaatgagcaaatgaataaatgagtagatgaattttagcggctaaaggaggcggcatggaaaatcaagaacaaccaggcaccgacgccgtggaatgccccatgtgtggaggaacgggcggttggccaggcgtaagcggctgggttgcctgccggccctgcaatggcactggaacccccaagcccgaggaatcggcgtgagcggtcgcaaaccatccggcccggtacaaatcggcgcggcgctgggtgatgacctggtggagaagttgaaggccgcgcaggccgcccagcggcaacgcatcgaggcagaagcacgccccggtgaatcgtggcaagcggccgctgatcgaatccgcaaagaatcccggcaaccgccggcagccggtgcgccgtcgattaggaagccgcccaagggcgacgagcaaccagattttttcgttccgatgctctatgacgtgggcacccgcgatagtcgcagcatcatggacgtggccgttttccgtctgtcgaagcgtgaccgacgagctggcgaggtgatccgctacgagcttccagacgggcacgtagaggtttccgcagggccggccggcatggccagtgtgtgggattacgacctggtactgatggcggtttcccatctaaccgaatccatgaaccgataccgggaagggaagggagacaagcccggccgcgtgttccgtccacacgttgcggacgtactcaagttctgccggcgagccgatggcggaaagcagaaagacgacctggtagaaacctgcattcggttaaacaccacgcacgttgccatgcagcgtacgaagaaggccaagaacggccgcctggtgacggtatccgagggtgaagccttgattagccgctacaagatcgtaaagagcgaaaccgggcggccggagtacatcgagatcgagctagctgattggatgtaccgcgagatcacagaaggcaagaacccggacgtgctgacggttcaccccgattactttttgatcgatcccggcatcggccgttttctctaccgcctggcacgccgcgccgcaggcaaggcagaagccagatggttgttcaagacgatctacgaacgcagtggcagcgccggagagttcaagaagttctgtttcaccgtgcgcaagctgatcgggtcaaatgacctgccggagtacgatttgaaggaggaggcggggcaggctggcccgatcctagtcatgcgctaccgcaacctgatcgagggcgaagcatccgccggttcctaatgtacggagcagatgctagggcaaattgccctagcaggggaaaaaggtcgaaaaggtctctttcctgtggatagcacgtacattgggaacccaaagccgtacattgggaaccggaacccgtacattgggaacccaaagccgtacattgggaaccggtcacacatgtaagtgactgatataaaagagaaaaaaggcgatttttccgcctaaaactctttaaaacttattaaaactcttaaaacccgcctggcctgtgcataactgtctggccagcgcacagccgaagagctgcaaaaagcgcctacccttcggtcgctgcgctccctacgccccgccgcttcgcgtcggcctatcgcggccgctggccgctcaaaaatggctggcctacggccaggcaatctaccagggcgcggacaagccgcgccgtcgccactcgaccgccggcgcccacatcaaggcaccctgcctcgcgcgtttcggtgatgacggtgaaaacctctgacacatgcagctcccggagacggtcacagcttgtctgtaagcggatgccgggagcagacaagcccgtcagggcgcgtcagcgggtgttggcgggtgtcggggcgcagccatgacccagtcacgtagcgatagcggagtgtatactggcttaactatgcggcatcagagcagattgtactgagagtgcaccatatgcggtgtgaaataccgcacagatgcgtaaggagaaaataccgcatcaggcgctcttccgcttcctcgctcactgactcgctgcgctcggtcgttcggctgcggcgagcggtatcagctcactcaaaggcggtaatacggttatccacagaatcaggggataacgcaggaaagaacatgtgagcaaaaggccagcaaaaggccaggaaccgtaaaaaggccgcgttgctggcgtttttccataggctccgcccccctgacgagcatcacaaaaatcgacgctcaagtcagaggtggcgaaacccgacaggactataaagataccaggcgtttccccctggaagctccctcgtgcgctctcctgttccgaccctgccgcttaccggatacctgtccgcctttctcccttcgggaagcgtggcgctttctcatagctcacgctgtaggtatctcagttcggtgtaggtcgttcgctccaagctgggctgtgtgcacgaaccccccgttcagcccgaccgctgcgccttatccggtaactatcgtcttgagtccaacccggtaagacacgacttatcgccactggcagcagccactggtaacaggattagcagagcgaggtatgtaggcggtgctacagagttcttgaagtggtggcctaactacggctacactagaaggacagtatttggtatctgcgctctgctgaagccagttaccttcggaaaaagagttggtagctcttgatccggcaaacaaaccaccgctggtagcggtggtttttttgtttgcaagcagcagattacgcgcagaaaaaaaggatctcaagaagatcctttgatcttttctacggggtctgacgctcagtggaacgaaaactcacgttaagggattttggtcatgcattctaggtactaaaacaattcatccagtaaaatataatattttattttctcccaatcaggcttgatccccagtaagtcaaaaaatagctcgacatactgttcttccccgatatcctccctgatcgaccggacgcagaaggcaatgtcataccacttgtccgccctgccgcttctcccaagatcaataaagccacttactttgccatctttcacaaagatgttgctgtctcccaggtcgccgtgggaaaagacaagttcctcttcgggcttttccgtctttaaaaaatcatacagctcgcgcggatctttaaatggagtgtcttcttcccagttttcgcaatccacatcggccagatcgttattcagtaagtaatccaattcggctaagcggctgtctaagctattcgtatagggacaatccgatatgtcgatggagtgaaagagcctgatgcactccgcatacagctcgataatcttttcagggctttgttcatcttcatactcttccgagcaaaggacgccatcggcctcactcatgagcagattgctccagccatcatgccgttcaaagtgcaggacctttggaacaggcagctttccttccagccatagcatcatgtccttttcccgttccacatcataggtggtccctttataccggctgtccgtcatttttaaatataggttttcattttctcccaccagcttatataccttagcaggagacattccttccgtatcttttacgcagcggtatttttcgatcagttttttcaattccggtgatattctcattttagccatttattatttccttcctcttttctacagtatttaaagataccccaagaagctaattataacaagacgaactccaattcactgttccttgcattctaaaaccttaaataccagaaaacagctttttcaaagttgttttcaaagttggcgtataacatagtatcgacggagccgattttgaaaccgcggtgatcacaggcagcaacgctctgtcatcgttacaatcaacatgctaccctccgcgagatcatccgtgtttcaaacccggcagcttagttgccgttcttccgaatagcatcggtaacatgagcaaagtctgccgccttacaacggctctcccgctgacgccgtcccggactgatgggctgcctgtatcgagtggtgattttgtgccgagctgccggtcggggagctgttggctggctggtggcaggatatattgtggtgtaaacaaattgacgcttagacaacttaataacacattgcggacgtttttaatgtactgaattaacgccgaattaa

SEQ ID NO: 43 - protein, 62 aa, Artificial
  Synthetic Construct
MTTAVTAAVSFPSTKTTSLSARSSSVISPDKISYKKVPLYYRNVSATGKMGPIRAQIASCSS

SEQ ID NO: 44 - DNA, 9137 bp, Artificial
  plasmid VC-MME431-1qcz
  transit_peptide (2125)..(2214)
  CDS (2125)..(2214)
  CDS (2215)..(2223): adapter
gctttgggcggatcctctagaggacaatcagtaaattgaacggagaatattattcataaaaatacgatagtaacgggtgatatattcattagaatgaaccgaaaccggcggtaaggatctgagctacacatgctcaggttttttacaacgtgcacaacagaattgaaagcaaatatcatgcgatcataggcgtctcgcatatctcattaaagcagggcatgccggtcgagtcaaatctcggtgacgggcaggaccggacggggcggtaccggcaggctgaagtccagctgccagaaacccacgtcatgccagttcccgtgcttgaagccggccgcccgcagcatgccgcggggggcatatccgagcgcctcgtgcatgcgcacgctcgggtcgttgggcagcccgatgacagcgaccacgctcttgaagccctgtgcctccagggacttcagcaggtgggtgtagagcgtggagcccagtcccgtccgctggtggcggggggagacgtacacggtcgactcggccgtccagtcgtaggcgttgcgtgccttccaggggcccgcgtaggcgatgccggcgacctcgccgtccacctcggcgacgagccagggatagcgctcccgcagacggacgaggtcgtccgtccactcctgcggttcctgcggctcggtacggaagttgaccgtgcttgtctcgatgtagtggttgacgatggtgcagaccgccggcatgtccgcctcggtggcacggcggatgtcggccgggcgtcgttctgggctcatggtagactcgacggatccacgtgtggaagatatgaatttttttgagaaactagataagattaatgaatatcggtgttttggttttttcttgtggccgtctttgtttatattgagatttttcaaatcagtgcgcaagacgtgacgtaagtatccgagtcagtttttatttttctactaatttggtcgaatctagattcgacggtatcgataagctcgcggatccctgaaagcgacgttggatgttaacatctacaaattgccttttcttatcgaccatgtacgtaagcgcttacgtttttggtggacccttgaggaaactggtagctgttgtgggcctgtggtctcaagatggatcattaatttccaccttcacctacgatggggggcatcgcaccggtgagtaatattgtacggctaagagcgaatttggcctgtaggatccctgaaagcgacgttggatgttaacatctacaaattgccttttcttatcgaccatgtacgtaagcgcttacgtttttggtggacccttgaggaaactggtagctgttgtgggcctgtggtctcaagatggatcattaatttccaccttcacctacgatggggggcatcgcaccggtgagtaatattgtacggctaagagcgaatttggcctgtaggatccctgaaagcgacgttggatgttaacatctacaaattgccttttcttatcgaccatgtacgtaagcgcttacgtttttggtggacccttgaggaaactggtagctgttgtgggcctgtggtctcaagatggatcattaatttccaccttcacctacgatggggggcatcgcaccggtgagtaatattgtacggctaagagcgaatttggcctgtaggatccgcgagctggtcaatcccattgcttttgaagcagctcaacattgatctctttctcgatcgagggagatttttcaaatcagtgcgcaagacgtgacgtaagtatccgagtcagtttttatttttctactaatttggtcgtttatttcggcgtgtaggacatggcaaccgggcctgaatttcgcgggtattctgtttctattccaactttttcttgatccgcagccattaacgacttttgaatagatacgctgacacgccaagcctcgctagtcaaaagtgtaccaaacaacgctttacagcaagaacggaatgcgcgtgacgctcgcggtgacgccatttcgccttttcagaaatggataaatagccttgcttcctattatatcttcccaaattaccaatacattacactagcatctgaatttcataaccaatctcgatacaccaaatcgaagatctcccaaacatgcagaggtttttctccgccagatcgattctcggttacgccgtcaagacgcggaggaggtctttctcttctcgttcttcgtctctcctttgctcttccatggcaatgattaattaacgaagagcaagagctcgaatttccccgatcgttcaaacatttggcaataaagtttcttaagattgaatcctgttgccggtcttgcgatgattatcatataatttctgttgaattacgttaagcatgtaataattaacatgtaatgcatgacgttatttatgagatgggtttttatgattagagtcccgcaattatacatttaatacgcgatagaaaacaaaatatagcgcgcaaactaggataaattatcgcgcgcggtgtcatctatgttactagatcgggaattggcatgcaagcttggcactggccgtcgttttacaacgtcgtgactgggaaaaccctggcgttacccaacttaatcgccttgcagcacatccccctttcgccagctggcgtaatagcgaagaggcccgcaccgatcgcccttcccaacagttgcgcagcctgaatggcgaatgctagagcagcttgagcttggatcagattgtcgtttcccgccttcagtttaaactatcagtgtttgacaggatatattggcgggtaaacctaagagaaaagagcgtttattagaataatcggatatttaaaagggcgtgaaaaggtttatccgttcgtccatttgtatgtgcatgccaaccacagggttcccctcgggatcaaagtactttgatccaacccctccgctgctatagtgcagtcggcttctgacgttcagtgcagccgtcttctgaaaacgacatgtcgcacaagtcctaagttacgcgacaggctgccgccctgcccttttcctggcgttttcttgtcgcgtgttttagtcgcataaagtagaatacttgcgactagaaccggagacattacgccatgaacaagagcgccgccgctggcctgctgggctatgcccgcgtcagcaccgacgaccaggacttgaccaaccaacgggccgaactgcacgcggccggctgcaccaagctgttttccgagaagatcaccggcaccaggcgcgaccgcccggagctggccaggatgcttgaccacctacgccctggcgacgttgtgacagtgaccaggctagaccgcctggcccgcagcacccgcgacctactggacattgccgagcgcatccaggaggccggcgcgggcctgcgtagcctggcagagccgtgggccgacaccaccacgccggccggccgcatggtgttgaccgtgttcgccggcattgccgagttcgagcgttccctaatcatcgaccgcacccggagcgggcgcgaggccgccaaggcccgaggcgtgaagtttggcccccgccctaccctcaccccggcacagatcgcgcacgcccgcgagctgatcgaccaggaaggccgcaccgtgaaagaggcggctgcactgcttggcgtgcatcgctcgaccctgtaccgcgcacttgagcgcagcgaggaagtgacgcccaccgaggccaggcggcgcggtgccttccgtgaggacgcattgaccgaggccgacgccctggcggccgccgagaatgaacgccaagaggaacaagcatgaaaccgcaccaggacggccaggacgaaccgtttttcattaccgaagagatcgaggcggagatgatcgcggccgggtacgtgttcgagccgcccgcgcacgtctcaaccgtgcggctgcatgaaatcctggccggtttgtctgatgccaagctggcggcctggccggccagcttggccgctgaagaaaccgagcgccgccgtctaaaaaggtgatgtgtatttgagtaaaacagcttgcgtcatgcggtcgctgcgtatatgatgcgatgagtaaataaacaaatacgcaaggggaacgcatgaaggttatcgctgtacttaaccagaaaggcgggtcaggcaagacgaccatcgcaacccatctagcccgcgccctgcaactcgccggggccgatgttctgttagtcgattccgatccccagggcagtgcccgcgattgggcggccgtgcgggaagatcaaccgctaaccgttgtcggcatcgaccgcccgacgattgaccgcgacgtgaaggccatcggccggcgcgacttcgtagtgatcgacggagcgccccaggcggcggacttggctgtgtccgcgatcaaggcagccgacttcgtgctgattccggtgcagccaagcccttacgacatatgggccaccgccgacctggtggagctggttaagcagcgcattgaggtcacggatggaaggctacaagcggcctttgtcgtgtcgcgggcgatcaaaggcacgcgcatcggcggtgaggttgccgaggcgctggccgggtacgagctgcccattcttgagtcccgtatcacgcagcgcgtgagctacccaggcactgccgccgccggcacaaccgttcttgaatcagaacccgagggcgacgctgcccgcgaggtccaggcgctggccgctgaaattaaatcaaaactcatttgagttaatgaggtaaagagaaaatgagcaaaagcacaaacacgctaagtgccggccgtccgagcgcacgcagcagcaaggctgcaacgttggccagcctggcagacacgccagccatgaagcgggtcaactttcagttgccggcggaggatcacaccaagctgaagatgtacgcggtacgccaaggcaagaccattaccgagctgctatctgaatacatcgcgcagctaccagagtaaatgagcaaatgaataaatgagtagatgaattttagcggctaaaggaggcggcatggaaaatcaagaacaaccaggcaccgacgccgtggaatgccccatgtgtggaggaacgggcggttggccaggcgtaagcggctgggttgcctgccggccctgcaatggcactggaacccccaagcccgaggaatcggcgtgagcggtcgcaaaccatccggcccggtacaaatcggcgcggcgctgggtgatgacctggtggagaagttgaaggccgcgcaggccgcccagcggcaacgcatcgaggcagaagcacgccccggtgaatcgtggcaagcggccgctgatcgaatccgcaaagaatcccggcaaccgccggcagccggtgcgccgtcgattaggaagccgcccaagggcgacgagcaaccagattttttcgttccgatgctctatgacgtgggcacccgcgatagtcgcagcatcatggacgtggccgttttccgtctgtcgaagcgtgaccgacgagctggcgaggtgatccgctacgagcttccagacgggcacgtagaggtttccgcagggccggccggcatggccagtgtgtgggattacgacctggtactgatggcggtttcccatctaaccgaatccatgaaccgataccgggaagggaagggagacaagcccggccgcgtgttccgtccacacgttgcggacgtactcaagttctgccggcgagccgatggcggaaagcagaaagacgacctggtagaaacctgcattcggttaaacaccacgcacgttgccatgcagcgtacgaagaaggccaagaacggccgcctggtgacggtatccgagggtgaagccttgattagccgctacaagatcgtaaagagcgaaaccgggcggccggagtacatcgagatcgagctagctgattggatgtaccgcgagatcacagaaggcaagaacccggacgtgctgacggttcaccccgattactttttgatcgatcccggcatcggccgttttctctaccgcctggcacgccgcgccgcaggcaaggcagaagccagatggttgttcaagacgatctacgaacgcagtggcagcgccggagagttcaagaagttctgtttcaccgtgcgcaagctgatcgggtcaaatgacctgccggagtacgatttgaaggaggaggcggggcaggctggcccgatcctagtcatgcgctaccgcaacctgatcgagggcgaagcatccgccggttcctaatgtacggagcagatgctagggcaaattgccctagcaggggaaaaaggtcgaaaaggtctctttcctgtggatagcacgtacattgggaacccaaagccgtacattgggaaccggaacccgtacattgggaacccaaagccgtacattgggaaccggtcacacatgtaagtgactgatataaaagagaaaaaaggcgatttttccgcctaaaactctttaaaacttattaaaactcttaaaacccgcctggcctgtgcataactgtctggccagcgcacagccgaagagctgcaaaaagcgcctacccttcggtcgctgcgctccctacgccccgccgcttcgcgtcggcctatcgcggccgctggccgctcaaaaatggctggcctacggccaggcaatctaccagggcgcggacaagccgcgccgtcgccactcgaccgccggcgcccacatcaaggcaccctgcctcgcgcgtttcggtgatgacggtgaaaacctctgacacatgcagctcccggagacggtcacagcttgtctgtaagcggatgccgggagcagacaagcccgtcagggcgcgtcagcgggtgttggcgggtgtcggggcgcagccatgacccagtcacgtagcgatagcggagtgtatactggcttaactatgcggcatcagagcagattgtactgagagtgcaccatatgcggtgtgaaataccgcacagatgcgtaaggagaaaataccgcatcaggcgctcttccgcttcctcgctcactgactcgctgcgctcggtcgttcggctgcggcgagcggtatcagctcactcaaaggcggtaatacggttatccacagaatcaggggataacgcaggaaagaacatgtgagcaaaaggccagcaaaaggccaggaaccgtaaaaaggccgcgttgctggcgtttttccataggctccgcccccctgacgagcatcacaaaaatcgacgctcaagtcagaggtggcgaaacccgacaggactataaagataccaggcgtttccccctggaagctccctcgtgcgctctcctgttccgaccctgccgcttaccggatacctgtccgcctttctcccttcgggaagcgtggcgctttctcatagctcacgctgtaggtatctcagttcggtgtaggtcgttcgctccaagctgggctgtgtgcacgaaccccccgttcagcccgaccgctgcgccttatccggtaactatcgtcttgagtccaacccggtaagacacgacttatcgccactggcagcagccactggtaacaggattagcagagcgaggtatgtaggcggtgctacagagttcttgaagtggtggcctaactacggctacactagaaggacagtatttggtatctgcgctctgctgaagccagttaccttcggaaaaagagttggtagctcttgatccggcaaacaaaccaccgctggtagcggtggtttttttgtttgcaagcagcagattacgcgcagaaaaaaaggatctcaagaagatcctttgatcttttctacggggtctgacgctcagtggaacgaaaactcacgttaagggattttggtcatgcattctaggtactaaaacaattcatccagtaaaatataatattttattttctcccaatcaggcttgatccccagtaagtcaaaaaatagctcgacatactgttcttccccgatatcctccctgatcgaccggacgcagaaggcaatgtcataccacttgtccgccctgccgcttctcccaagatcaataaagccacttactttgccatctttcacaaagatgttgctgtctcccaggtcgccgtgggaaaagacaagttcctcttcgggcttttccgtctttaaaaaatcatacagctcgcgcggatctttaaatggagtgtcttcttcccagttttcgcaatccacatcggccagatcgttattcagtaagtaatccaattcggctaagcggctgtctaagctattcgtatagggacaatccgatatgtcgatggagtgaaagagcctgatgcactccgcatacagctcgataatcttttcagggctttgttcatcttcatactcttccgagcaaaggacgccatcggcctcactcatgagcagattgctccagccatcatgccgttcaaagtgcaggacctttggaacaggcagctttccttccagccatagcatcatgtccttttcccgttccacatcataggtggtccctttataccggctgtccgtcatttttaaatataggttttcattttctcccaccagcttatataccttagcaggagacattccttccgtatcttttacgcagcggtatttttcgatcagttttttcaattccggtgatattctcattttagccatttattatttccttcctcttttctacagtatttaaagataccccaagaagctaattataacaagacgaactccaattcactgttccttgcattctaaaaccttaaataccagaaaacagctttttcaaagttgttttcaaagttggcgtataacatagtatcgacggagccgattttgaaaccgcggtgatcacaggcagcaacgctctgtcatcgttacaatcaacatgctaccctccgcgagatcatccgtgtttcaaacccggcagcttagttgccgttcttccgaatagcatcggtaacatgagcaaagtctgccgccttacaacggctctcccgctgacgccgtcccggactgatgggctgcctgtatcgagtggtgattttgtgccgagctgccggtcggggagctgttggctggctggtggcaggatatattgtggtgtaaacaaattgacgcttagacaacttaataacacattgcggacgtttttaatgtactgaattaacgccgaattaa

SEQ ID NO: 45 - protein, 33 aa, Artificial
  Synthetic Construct
MQRFFSARSILGYAVKTRRRSFSSRSSSLLCSS

SEQ ID NO: 46 - DNA, 8885 bp, Artificial
  plasmid VC-MME221-1qcz
agcttggacaatcagtaaattgaacggagaatattattcataaaaatacgatagtaacgggtgatatattcattagaatgaaccgaaaccggcggtaaggatctgagctacacatgctcaggttttttacaacgtgcacaacagaattgaaagcaaatatcatgcgatcataggcgtctcgcatatctcattaaagcagggcatgccggtcgagtcaaatctcggtgacgggcaggaccggacggggcggtaccggcaggctgaagtccagctgccagaaacccacgtcatgccagttcccgtgcttgaagccggccgcccgcagcatgccgcggggggcatatccgagcgcctcgtgcatgcgcacgctcgggtcgttgggcagcccgatgacagcgaccacgctcttgaagccctgtgcctccagggacttcagcaggtgggtgtagagcgtggagcccagtcccgtccgctggtggcggggggagacgtacacggtcgactcggccgtccagtcgtaggcgttgcgtgccttccaggggcccgcgtaggcgatgccggcgacctcgccgtccacctcggcgacgagccagggatagcgctcccgcagacggacgaggtcgtccgtccactcctgcggttcctgcggctcggtacggaagttgaccgtgcttgtctcgatgtagtggttgacgatggtgcagaccgccggcatgtccgcctcggtggcacggcggatgtcggccgggcgtcgttctgggctcatggtagactcgacggatccacgtgtggaagatatgaatttttttgagaaactagataagattaatgaatatcggtgttttggttttttcttgtggccgtctttgtttatattgagatttttcaaatcagtgcgcaagacgtgacgtaagtatccgagtcagtttttatttttctactaatttggtcgaagctttgggcggatcctctagaattcgaatccaaaaattacggatatgaatataggcatatccgtatccgaattatccgtttgacagctagcaacgattgtacaattgcttctttaaaaaaggaagaaagaaagaaagaaaagaatcaacatcagcgttaacaaacggccccgttacggcccaaacggtcatatagagtaacggcgttaagcgttgaaagactcctatcgaaatacgtaaccgcaaacgtgtcatagtcagatcccctcttccttcaccgcctcaaacacaaaaataatcttctacagcctatatatacaacccccccttctatctctcctttctcacaattcatcatctttctttctctacccccaattttaagaaatcctctcttctcctcttcattttcaaggtaaatctctctctctctctctctctctgttattccttgttttaattaggtatgtattattgctagtttgttaatctgcttatcttatgtatgccttatgtgaatatctttatcttgttcatctcatccgtttagaagctataaatttgttgatttgactgtgtatctacacgtggttatgtttatatctaatcagatatgaatttcttcatattgttgcgtttgtgtgtaccaatccgaaatcgttgatttttttcatttaatcgtgtagctaattgtacgtatacatatggatctacgtatcaattgttcatctgtttgtgtttgtatgtatacagatctgaaaacatcacttctctcatctgattgtgttgttacatacatagatatagatctgttatatcattttttttattaattgtgtatatatatatgtgcatagatctggattacatgattgtgattatttacatgattttgttatttacgtatgtatatatgtagatctggactttttggagttgttgacttgattgtatttgtgtgtgtatatgtgtgttctgatcttgatatgttatgtatgtgcagcccgggttgctcttccatggcaatgattaattaacgaagagcaagagctcgaatttccccgatcgttcaaacatttggcaataaagtttcttaagattgaatcctgttgccggtcttgcgatgattatcatataatttctgttgaattacgttaagcatgtaataattaacatgtaatgcatgacgttatttatgagatgggtttttatgattagagtcccgcaattatacatttaatacgcgatagaaaacaaaatatagcgcgcaaactaggataaattatcgcgcgcggtgtcatctatgttactagatcgggaattggcatgcaagcttggcactggccgtcgttttacaacgtcgtgactgggaaaaccctggcgttacccaacttaatcgccttgcagcacatccccctttcgccagctggcgtaatagcgaagaggcccgcaccgatcgcccttcccaacagttgcgcagcctgaatggcgaatgctagagcagcttgagcttggatcagattgtcgtttcccgccttcagtttaaactatcagtgtttgacaggatatattggcgggtaaacctaagagaaaagagcgtttattagaataatcggatatttaaaagggcgtgaaaaggtttatccgttcgtccatttgtatgtgcatgccaaccacagggttcccctcgggatcaaagtactttgatccaacccctccgctgctatagtgcagtcggcttctgacgttcagtgcagccgtcttctgaaaacgacatgtcgcacaagtcctaagttacgcgacaggctgccgccctgcccttttcctggcgttttcttgtcgcgtgttttagtcgcataaagtagaatacttgcgactagaaccggagacattacgccatgaacaagagcgccgccgctggcctgctgggctatgcccgcgtcagcaccgacgaccaggacttgaccaaccaacgggccgaactgcacgcggccggctgcaccaagctgttttccgagaagatcaccggcaccaggcgcgaccgcccggagctggccaggatgcttgaccacctacgccctggcgacgttgtgacagtgaccaggctagaccgcctggcccgcagcacccgcgacctactggacattgccgagcgcatccaggaggccggcgcgggcctgcgtagcctggcagagccgtgggccgacaccaccacgccggccggccgcatggtgttgaccgtgttcgccggcattgccgagttcgagcgttccctaatcatcgaccgcacccggagcgggcgcgaggccgccaaggcccgaggcgtgaagtttggcccccgccctaccctcaccccggcacagatcgcgcacgcccgcgagctgatcgaccaggaaggccgcaccgtgaaagaggcggctgcactgcttggcgtgcatcgctcgaccctgtaccgcgcacttgagcgcagcgaggaagtgacgcccaccgaggccaggcggcgcggtgccttccgtgaggacgcattgaccgaggccgacgccctggcggccgccgagaatgaacgccaagaggaacaagcatgaaaccgcaccaggacggccaggacgaaccgtttttcattaccgaagagatcgaggcggagatgatcgcggccgggtacgtgttcgagccgcccgcgcacgtctcaaccgtgcggctgcatgaaatcctggccggtttgtctgatgccaagctggcggcctggccggccagcttggccgctgaagaaaccgagcgccgccgtctaaaaaggtgatgtgtatttgagtaaaacagcttgcgtcatgcggtcgctgcgtatatgatgcgatgagtaaataaacaaatacgcaaggggaacgcatgaaggttatcgctgtacttaaccagaaaggcgggtcaggcaagacgaccatcgcaacccatctagcccgcgccctgcaactcgccggggccgatgttctgttagtcgattccgatccccagggcagtgcccgcgattgggcggccgtgcgggaagatcaaccgctaaccgttgtcggcatcgaccgcccgacgattgaccgcgacgtgaaggccatcggccggcgcgacttcgtagtgatcgacggagcgccccaggcggcggacttggctgtgtccgcgatcaaggcagccgacttcgtgctgattccggtgcagccaagcccttacgacatatgggccaccgccgacctggtggagctggttaagcagcgcattgaggtcacggatggaaggctacaagcggcctttgtcgtgtcgcgggcgatcaaaggcacgcgcatcggcggtgaggttgccgaggcgctggccgggtacgagctgcccattcttgagtcccgtatcacgcagcgcgtgagctacccaggcactgccgccgccggcacaaccgttcttgaatcagaacccgagggcgacgctgcccgcgaggtccaggcgctggccgctgaaattaaatcaaaactcatttgagttaatgaggtaaagagaaaatgagcaaaagcacaaacacgctaagtgccggccgtccgagcgcacgcagcagcaaggctgcaacgttggccagcctggcagacacgccagccatgaagcgggtcaactttcagttgccggcggaggatcacaccaagctgaagatgtacgcggtacgccaaggcaagaccattaccgagctgctatctgaatacatcgcgcagctaccagagtaaatgagcaaatgaataaatgagtagatgaattttagcggctaaaggaggcggcatggaaaatcaagaacaaccaggcaccgacgccgtggaatgccccatgtgtggaggaacgggcggttggccaggcgtaagcggctgggttgcctgccggccctgcaatggcactggaacccccaagcccgaggaatcggcgtgagcggtcgcaaaccatccggcccggtacaaatcggcgcggcgctgggtgatgacctggtggagaagttgaaggccgcgcaggccgcccagcggcaacgcatcgaggcagaagcacgccccggtgaatcgtggcaagcggccgctgatcgaatccgcaaagaatcccggcaaccgccggcagccggtgcgccgtcgattaggaagccgcccaagggcgacgagcaaccagattttttcgttccgatgctctatgacgtgggcacccgcgatagtcgcagcatcatggacgtggccgttttccgtctgtcgaagcgtgaccgacgagctggcgaggtgatccgctacgagcttccagacgggcacgtagaggtttccgcagggccggccggcatggccagtgtgtgggattacgacctggtactgatggcggtttcccatctaaccgaatccatgaaccgataccgggaagggaagggagacaagcccggccgcgtgttccgtccacacgttgcggacgtactcaagttctgccggcgagccgatggcggaaagcagaaagacgacctggtagaaacctgcattcggttaaacaccacgcacgttgccatgcagcgtacgaagaaggccaagaacggccgcctggtgacggtatccgagggtgaagccttgattagccgctacaagatcgtaaagagcgaaaccgggcggccggagtacatcgagatcgagctagctgattggatgtaccgcgagatcacagaaggcaagaacccggacgtgctgacggttcaccccgattactttttgatcgatcccggcatcggccgttttctctaccgcctggcacgccgcgccgcaggcaaggcagaagccagatggttgttcaagacgatctacgaacgcagtggcagcgccggagagttcaagaagttctgtttcaccgtgcgcaagctgatcgggtcaaatgacctgccggagtacgatttgaaggaggaggcggggcaggctggcccgatcctagtcatgcgctaccgcaacctgatcgagggcgaagcatccgccggttcctaatgtacggagcagatgctagggcaaattgccctagcaggggaaaaaggtcgaaaaggtctctttcctgtggatagcacgtacattgggaacccaaagccgtacattgggaaccggaacccgtacattgggaacccaaagccgtacattgggaaccggtcacacatgtaagtgactgatataaaagagaaaaaaggcgatttttccgcctaaaactctttaaaacttattaaaactcttaaaacccgcctggcctgtgcataactgtctggccagcgcacagccgaagagctgcaaaaagcgcctacccttcggtcgctgcgctccctacgccccgccgcttcgcgtcggcctatcgcggccgctggccgctcaaaaatggctggcctacggccaggcaatctaccagggcgcggacaagccgcgccgtcgccactcgaccgccggcgcccacatcaaggcaccctgcctcgcgcgtttcggtgatgacggtgaaaacctctgacacatgcagctcccggagacggtcacagcttgtctgtaagcggatgccgggagcagacaagcccgtcagggcgcgtcagcgggtgttggcgggtgtcggggcgcagccatgacccagtcacgtagcgatagcggagtgtatactggcttaactatgcggcatcagagcagattgtactgagagtgcaccatatgcggtgtgaaataccgcacagatgcgtaaggagaaaataccgcatcaggcgctcttccgcttcctcgctcactgactcgctgcgctcggtcgttcggctgcggcgagcggtatcagctcactcaaaggcggtaatacggttatccacagaatcaggggataacgcaggaaagaacatgtgagcaaaaggccagcaaaaggccaggaaccgtaaaaaggccgcgttgctggcgtttttccataggctccgcccccctgacgagcatcacaaaaatcgacgctcaagtcagaggtggcgaaacccgacaggactataaagataccaggcgtttccccctggaagctccctcgtgcgctctcctgttccgaccctgccgcttaccggatacctgtccgcctttctcccttcgggaagcgtggcgctttctcatagctcacgctgtaggtatctcagttcggtgtaggtcgttcgctccaagctgggctgtgtgcacgaaccccccgttcagcccgaccgctgcgccttatccggtaactatcgtcttgagtccaacccggtaagacacgacttatcgccactggcagcagccactggtaacaggattagcagagcgaggtatgtaggcggtgctacagagttcttgaagtggtggcctaactacggctacactagaaggacagtatttggtatctgcgctctgctgaagccagttaccttcggaaaaagagttggtagctcttgatccggcaaacaaaccaccgctggtagcggtggtttttttgtttgcaagcagcagattacgcgcagaaaaaaaggatctcaagaagatcctttgatcttttctacggggtctgacgctcagtggaacgaaaactcacgttaagggattttggtcatgcattctaggtactaaaacaattcatccagtaaaatataatattttattttctcccaatcaggcttgatccccagtaagtcaaaaaatagctcgacatactgttcttccccgatatcctccctgatcgaccggacgcagaaggcaatgtcataccacttgtccgccctgccgcttctcccaagatcaataaagccacttactttgccatctttcacaaagatgttgctgtctcccaggtcgccgtgggaaaagacaagttcctcttcgggcttttccgtctttaaaaaatcatacagctcgcgcggatctttaaatggagtgtcttcttcccagttttcgcaatccacatcggccagatcgttattcagtaagtaatccaattcggctaagcggctgtctaagctattcgtatagggacaatccgatatgtcgatggagtgaaagagcctgatgcactccgcatacagctcgataatcttttcagggctttgttcatcttcatactcttccgagcaaaggacgccatcggcctcactcatgagcagattgctccagccatcatgccgttcaaagtgcaggacctttggaacaggcagctttccttccagccatagcatcatgtccttttcccgttccacatcataggtggtccctttataccggctgtccgtcatttttaaatataggttttcattttctcccaccagcttatataccttagcaggagacattccttccgtatcttttacgcagcggtatttttcgatcagttttttcaattccggtgatattctcattttagccatttattatttccttcctcttttctacagtatttaaagataccccaagaagctaattataacaagacgaactccaattcactgttccttgcattctaaaaccttaaataccagaaaacagctttttcaaagttgttttcaaagttggcgtataacatagtatcgacggagccgattttgaaaccgcggtgatcacaggcagcaacgctctgtcatcgttacaatcaacatgctaccctccgcgagatcatccgtgtttcaaacccggcagcttagttgccgttcttccgaatagcatcggtaacatgagcaaagtctgccgccttacaacggctctcccgctgacgccgtcccggactgatgggctgcctgtatcgagtggtgattttgtgccgagctgccggtcggggagctgttggctggctggtggcaggatatattgtggtgtaaacaaattgacgcttagacaacttaataacacattgcggacgtttttaatgtactgaattaacgccgaatta

SEQ ID NO: 47 - DNA, 9303 bp, Artificial
  plasmid pMTX447korr
  5'UTR (1964)..(2128)
  transit_peptide (2129)..(2236)
  CDS (2129)..(2236)
  transit_peptide (2314)..(2382)
  CDS (2314)..(2382)
  CDS (2383)..(2391): adapter
agcttggacaatcagtaaattgaacggagaatattattcataaaaatacgatagtaacgggtgatatattcattagaatgaaccgaaaccggcggtaaggatctgagctacacatgctcaggttttttacaacgtgcacaacagaattgaaagcaaatatcatgcgatcataggcgtctcgcatatctcattaaagcagggcatgccggtcgagtcaaatctcggtgacgggcaggaccggacggggcggtaccggcaggctgaagtccagctgccagaaacccacgtcatgccagttcccgtgcttgaagccggccgcccgcagcatgccgcggggggcatatccgagcgcctcgtgcatgcgcacgctcgggtcgttgggcagcccgatgacagcgaccacgctcttgaagccctgtgcctccagggacttcagcaggtgggtgtagagcgtggagcccagtcccgtccgctggtggcggggggagacgtacacggtcgactcggccgtccagtcgtaggcgttgcgtgccttccaggggcccgcgtaggcgatgccggcgacctcgccgtccacctcggcgacgagccagggatagcgctcccgcagacggacgaggtcgtccgtccactcctgcggttcctgcggctcggtacggaagttgaccgtgcttgtctcgatgtagtggttgacgatggtgcagaccgccggcatgtccgcctcggtggcacggcggatgtcggccgggcgtcgttctgggctcatggtagactcgacggatccacgtgtggaagatatgaatttttttgagaaactagataagattaatgaatatcggtgttttggttttttcttgtggccgtctttgtttatattgagatttttcaaatcagtgcgcaagacgtgacgtaagtatccgagtcagtttttatttttctactaatttggtcgaagctttgggcggatcctctagaattcgaatccaaaaattacggatatgaatataggcatatccgtatccgaattatccgtttgacagctagcaacgattgtacaattgcttctttaaaaaaggaagaaagaaagaaagaaaagaatcaacatcagcgttaacaaacggccccgttacggcccaaacggtcatatagagtaacggcgttaagcgttgaaagactcctatcgaaatacgtaaccgcaaacgtgtcatagtcagatcccctcttccttcaccgcctcaaacacaaaaataatcttctacagcctatatatacaacccccccttctatctctcctttctcacaattcatcatctttctttctctacccccaattttaagaaatcctctcttctcctcttcattttcaaggtaaatctctctctctctctctctctctgttattccttgttttaattaggtatgtattattgctagtttgttaatctgcttatcttatgtatgccttatgtgaatatctttatcttgttcatctcatccgtttagaagctataaatttgttgatttgactgtgtatctacacgtggttatgtttatatctaatcagatatgaatttcttcatattgttgcgtttgtgtgtaccaatccgaaatcgttgatttttttcatttaatcgtgtagctaattgtacgtatacatatggatctacgtatcaattgttcatctgtttgtgtttgtatgtatacagatctgaaaacatcacttctctcatctgattgtgttgttacatacatagatatagatctgttatatcattttttttattaattgtgtatatatatatgtgcatagatctggattacatgattgtgattatttacatgattttgttatttacgtatgtatatatgtagatctggactttttggagttgttgacttgattgtatttgtgtgtgtatatgtgtgttctgatcttgatatgttatgtatgtgcagcccaaacgcataaacttatcttcatagttgccactccaatttgctccttgaatctcctccacccaatacataatccactcctccatcacccacttcactactaaatcaaacttaactctgtttttctctctcctcctttcatttcttattcttccaatcatcgtactccgccatgaccaccgctgtcaccgccgctgtttctttcccctctaccaaaaccacctctctctccgcccgaagctcctccgtcatttcccctgacaaaatcagctacaaaaaggtgattcccaatttcactgtgttttttattaataatttgttattttgatgatgagatgattaatttgggtgctgcaggttcctttgtactacaggaatgtatctgcaactgggaaaatgggacccatcagggcccagatcgcctcttgctcttccatggcaatgattaattaacgaagagcaagagctcgaatttccccgatcgttcaaacatttggcaataaagtttcttaagattgaatcctgttgccggtcttgcgatgattatcatataatttctgttgaattacgttaagcatgtaataattaacatgtaatgcatgacgttatttatgagatgggtttttatgattagagtcccgcaattatacatttaatacgcgatagaaaacaaaatatagcgcgcaaactaggataaattatcgcgcgcggtgtcatctatgttactagatcgggaattggcatgcaagcttggcactggccgtcgttttacaacgtcgtgactgggaaaaccctggcgttacccaacttaatcgccttgcagcacatccccctttcgccagctggcgtaatagcgaagaggcccgcaccgatcgcccttcccaacagttgcgcagcctgaatggcgaatgctagagcagcttgagcttggatcagattgtcgtttcccgccttcagtttaaactatcagtgtttgacaggatatattggcgggtaaacctaagagaaaagagcgtttattagaataatcggatatttaaaagggcgtgaaaaggtttatccgttcgtccatttgtatgtgcatgccaaccacagggttcccctcgggatcaaagtactttgatccaacccctccgctgctatagtgcagtcggcttctgacgttcagtgcagccgtcttctgaaaacgacatgtcgcacaagtcctaagttacgcgacaggctgccgccctgcccttttcctggcgttttcttgtcgcgtgttttagtcgcataaagtagaatacttgcgactagaaccggagacattacgccatgaacaagagcgccgccgctggcctgctgggctatgcccgcgtcagcaccgacgaccaggacttgaccaaccaacgggccgaactgcacgcggccggctgcaccaagctgttttccgagaagatcaccggcaccaggcgcgaccgcccggagctggccaggatgcttgaccacctacgccctggcgacgttgtgacagtgaccaggctagaccgcctggcccgcagcacccgcgacctactggacattgccgagcgcatccaggaggccggcgcgggcctgcgtagcctggcagagccgtgggccgacaccaccacgccggccggccgcatggtgttgaccgtgttcgccggcattgccgagttcgagcgttccctaatcatcgaccgcacccggagcgggcgcgaggccgccaaggcccgaggcgtgaagtttggcccccgccctaccctcaccccggcacagatcgcgcacgcccgcgagctgatcgaccaggaaggccgcaccgtgaaagaggcggctgcactgcttggcgtgcatcgctcgaccctgtaccgcgcacttgagcgcagcgaggaagtgacgcccaccgaggccaggcggcgcggtgccttccgtgaggacgcattgaccgaggccgacgccctggcggccgccgagaatgaacgccaagaggaacaagcatgaaaccgcaccaggacggccaggacgaaccgtttttcattaccgaagagatcgaggcggagatgatcgcggccgggtacgtgttcgagccgcccgcgcacgtctcaaccgtgcggctgcatgaaatcctggccggtttgtctgatgccaagctggcggcctggccggccagcttggccgctgaagaaaccgagcgccgccgtctaaaaaggtgatgtgtatttgagtaaaacagcttgcgtcatgcggtcgctgcgtatatgatgcgatgagtaaataaacaaatacgcaaggggaacgcatgaaggttatcgctgtacttaaccagaaaggcgggtcaggcaagacgaccatcgcaacccatctagcccgcgccctgcaactcgccggggccgatgttctgttagtcgattccgatccccagggcagtgcccgcgattgggcggccgtgcgggaagatcaaccgctaaccgttgtcggcatcgaccgcccgacgattgaccgcgacgtgaaggccatcggccggcgcgacttcgtagtgatcgacggagcgccccaggcggcggacttggctgtgtccgcgatcaaggcagccgacttcgtgctgattccggtgcagccaagcccttacgacatatgggccaccgccgacctggtggagctggttaagcagcgcattgaggtcacggatggaaggctacaagcggcctttgtcgtgtcgcgggcgatcaaaggcacgcgcatcggcggtgaggttgccgaggcgctggccgggtacgagctgcccattcttgagtcccgtatcacgcagcgcgtgagctacccaggcactgccgccgccggcacaaccgttcttgaatcagaacccgagggcgacgctgcccgcgaggtccaggcgctggccgctgaaattaaatcaaaactcatttgagttaatgaggtaaagagaaaatgagcaaaagcacaaacacgctaagtgccggccgtccgagcgcacgcagcagcaaggctgcaacgttggccagcctggcagacacgccagccatgaagcgggtcaactttcagttgccggcggaggatcacaccaagctgaagatgtacgcggtacgccaaggcaagaccattaccgagctgctatctgaatacatcgcgcagctaccagagtaaatgagcaaatgaataaatgagtagatgaattttagcggctaaaggaggcggcatggaaaatcaagaacaaccaggcaccgacgccgtggaatgccccatgtgtggaggaacgggcggttggccaggcgtaagcggctgggttgtctgccggccctgcaatggcactggaacccccaagcccgaggaatcggcgtgacggtcgcaaaccatccggcccggtacaaatcggcgcggcgctgggtgatgacctggtggagaagttgaaggccgcgcaggccgcccagcggcaacgcatcgaggcagaagcacgccccggtgaatcgtggcaagcggccgctgatcgaatccgcaaagaatcccggcaaccgccggcagccggtgcgccgtcgattaggaagccgcccaagggcgacgagcaaccagattttttcgttccgatgctctatgacgtgggcacccgcgatagtcgcagcatcatggacgtggccgttttccgtctgtcgaagcgtgaccgacgagctggcgaggtgatccgctacgagcttccagacgggcacgtagaggtttccgcagggccggccggcatggccagtgtgtgggattacgacctggtactgatggcggtttcccatctaaccgaatccatgaaccgataccgggaagggaagggagacaagcccggccgcgtgttccgtccacacgttgcggacgtactcaagttctgccggcgagccgatggcggaaagcagaaagacgacctggtagaaacctgcattcggttaaacaccacgcacgttgccatgcagcgtacgaagaaggccaagaacggccgcctggtgacggtatccgagggtgaagccttgattagccgctacaagatcgtaaagagcgaaaccgggcggccggagtacatcgagatcgagctagctgattggatgtaccgcgagatcacagaaggcaagaacccggacgtgctgacggttcaccccgattactttttgatcgatcccggcatcggccgttttctctaccgcctggcacgccgcgccgcaggcaaggcagaagccagatggttgttcaagacgatctacgaacgcagtggcagcgccggagagttcaagaagttctgtttcaccgtgcgcaagctgatcgggtcaaatgacctgccggagtacgatttgaaggaggaggcggggcaggctggcccgatcctagtcatgcgctaccgcaacctgatcgagggcgaagcatccgccggttcctaatgtacggagcagatgctagggcaaattgccctagcaggggaaaaaggtcgaaaaggtctctttcctgtggatagcacgtacattgggaacccaaagccgtacattgggaaccggaacccgtacattgggaacccaaagccgtacattgggaaccggtcacacatgtaagtgactgatataaaagagaaaaaaggcgatttttccgcctaaaactctttaaaacttattaaaactcttaaaacccgcctggcctgtgcataactgtctggccagcgcacagccgaagagctgcaaaaagcgcctacccttcggtcgctgcgctccctacgccccgccgcttcgcgtcggcctatcgcggccgctggccgctcaaaaatggctggcctacggccaggcaatctaccagggcgcggacaagccgcgccgtcgccactcgaccgccggcgcccacatcaaggcaccctgcctcgcgcgtttcggtgatgacggtgaaaacctctgacacatgcagctcccggagacggtcacagcttgtctgtaagcggatgccgggagcagacaagcccgtcagggcgcgtcagcgggtgttggcgggtgtcggggcgcagccatgacccagtcacgtagcgatagcggagtgtatactggcttaactatgcggcatcagagcagattgtactgagagtgcaccatatgcggtgtgaaataccgcacagatgcgtaaggagaaaataccgcatcaggcgctcttccgcttcctcgctcactgactcgctgcgctcggtcgttcggctgcggcgagcggtatcagctcactcaaaggcggtaatacggttatccacagaatcaggggataacgcaggaaagaacatgtgagcaaaaggccagcaaaaggccaggaaccgtaaaaaggccgcgttgctggcgtttttccataggctccgcccccctgacgagcatcacaaaaatcgacgctcaagtcagaggtggcgaaacccgacaggactataaagataccaggcgtttccccctggaagctccctcgtgcgctctcctgttccgaccctgccgcttaccggatacctgtccgcctttctcccttcgggaagcgtggcgctttctcatagctcacgctgtaggtatctcagttcggtgtaggtcgttcgctccaagctgggctgtgtgcacgaaccccccgttcagcccgaccgctgcgccttatccggtaactatcgtcttgagtccaacccggtaagacacgacttatcgccactggcagcagccactggtaacaggattagcagagcgaggtatgtaggcggtgctacagagttcttgaagtggtggcctaactacggctacactagaaggacagtatttggtatctgcgctctgctgaagccagttaccttcggaaaaagagttggtagctcttgatccggcaaacaaaccaccgctggtagcggtggtttttttgtttgcaagcagcagattacgcgcagaaaaaaaggatctcaagaagatcctttgatcttttctacggggtctgacgctcagtggaacgaaaactcacgttaagggattttggtcatgcattctaggtactaaaacaattcatccagtaaaatataatattttattttctcccaatcaggcttgatccccagtaagtcaaaaaatagctcgacatactgttcttccccgatatcctccctgatcgaccggacgcagaaggcaatgtcataccacttgtccgccctgccgcttctcccaagatcaataaagccacttactttgccatctttcacaaagatgttgctgtctcccaggtcgccgtgggaaaagacaagttcctcttcgggcttttccgtctttaaaaaatcatacagctcgcgcggatctttaaatggagtgtcttcttcccagttttcgcaatccacatcggccagatcgttattcagtaagtaatccaattcggctaagcggctgtctaagctattcgtatagggacaatccgatatgtcgatggagtgaaagagcctgatgcactccgcatacagctcgataatcttttcagggctttgttcatcttcatactcttccgagcaaaggacgccatcggcctcactcatgagcagattgctccagccatcatgccgttcaaagtgcaggacctttggaacaggcagctttccttccagccatagcatcatgtccttttcccgttccacatcataggtggtccctttataccggctgtccgtcatttttaaatataggttttcattttctcccaccagcttatataccttagcaggagacattccttccgtatcttttacgcagcggtatttttcgatcagttttttcaattccggtgatattctcattttagccatttattatttccttcctcttttctacagtatttaaagataccccaagaagctaattataacaagacgaactccaattcactgttccttgcattctaaaaccttaaataccagaaaacagctttttcaaagttgttttcaaagttggcgtataacatagtatcgacggagccgattttgaaaccgcggtgatcacaggcagcaacgctctgtcatcgttacaatcaacatgctaccctccgcgagatcatccgtgtttcaaacccggcagcttagttgccgttcttccgaatagcatcggtaacatgagcaaagtctgccgccttacaacggctctcccgctgacgccgtcccggactgatgggctgcctgtatcgagtggtgattttgtgccgagctgccggtcggggagctgttggctggctggtggcaggatatattgtggtgtaaacaaattgacgcttagacaacttaataacacattgcggacgtttttaatgtactgaattaacgccgaatta

SEQ ID NO: 48 - protein, 62 aa, Artificial; identical to SEQ ID NO: 43
  Synthetic Construct

SEQ ID NO: 49 - DNA, 8975 bp, Artificial
  plasmid VC-MME445-1qcz
  transit_peptide (1964)..(2053)
  CDS (1964)..(2053)
  CDS (2054)..(2062): adapter
agcttggacaatcagtaaattgaacggagaatattattcataaaaatacgatagtaacgggtgatatattcattagaatgaaccgaaaccggcggtaaggatctgagctacacatgctcaggttttttacaacgtgcacaacagaattgaaagcaaatatcatgcgatcataggcgtctcgcatatctcattaaagcagggcatgccggtcgagtcaaatctcggtgacgggcaggaccggacggggcggtaccggcaggctgaagtccagctgccagaaacccacgtcatgccagttcccgtgcttgaagccggccgcccgcagcatgccgcggggggcatatccgagcgcctcgtgcatgcgcacgctcgggtcgttgggcagcccgatgacagcgaccacgctcttgaagccctgtgcctccagggacttcagcaggtgggtgtagagcgtggagcccagtcccgtccgctggtggcggggggagacgtacacggtcgactcggccgtccagtcgtaggcgttgcgtgccttccaggggcccgcgtaggcgatgccggcgacctcgccgtccacctcggcgacgagccagggatagcgctcccgcagacggacgaggtcgtccgtccactcctgcggttcctgcggctcggtacggaagttgaccgtgcttgtctcgatgtagtggttgacgatggtgcagaccgccggcatgtccgcctcggtggcacggcggatgtcggccgggcgtcgttctgggctcatggtagactcgacggatccacgtgtggaagatatgaatttttttgagaaactagataagattaatgaatatcggtgttttggttttttcttgtggccgtctttgtttatattgagatttttcaaatcagtgcgcaagacgtgacgtaagtatccgagtcagtttttatttttctactaatttggtcgaagctttgggcggatcctctagaattcgaatccaaaaattacggatatgaatataggcatatccgtatccgaattatccgtttgacagctagcaacgattgtacaattgcttctttaaaaaaggaagaaagaaagaaagaaaagaatcaacatcagcgttaacaaacggccccgttacggcccaaacggtcatatagagtaacggcgttaagcgttgaaagactcctatcgaaatacgtaaccgcaaacgtgtcatagtcagatcccctcttccttcaccgcctcaaacacaaaaataatcttctacagcctatatatacaacccccccttctatctctcctttctcacaattcatcatctttctttctctacccccaattttaagaaatcctctcttctcctcttcattttcaaggtaaatctctctctctctctctctctctgttattccttgttttaattaggtatgtattattgctagtttgttaatctgcttatcttatgtatgccttatgtgaatatctttatcttgttcatctcatccgtttagaagctataaatttgttgatttgactgtgtatctacacgtggttatgtttatatctaatcagatatgaatttcttcatattgttgcgtttgtgtgtaccaatccgaaatcgttgatttttttcatttaatcgtgtagctaattgtacgtatacatatggatctacgtatcaattgttcatctgtttgtgtttgtatgtatacagatctgaaaacatcacttctctcatctgattgtgttgttacatacatagatatagatctgttatatcattttttttattaattgtgtatatatatatgtgcatagatctggattacatgattgtgattatttacatgattttgttatttacgtatgtatatatgtagatctggactttttggagttgttgacttgattgtatttgtgtgtgtatatgtgtgttctgatcttgatatgttatgtatgtgcagcccaaacatgcagaggtttttctccgccagatcgattctcggttacgccgtcaagacgcggaggaggtctttctcttctcgttcttcgtctctcctttgctcttccatggcaatgattaattaacgaagagcaagagctcgaatttccccgatcgttcaaacatttggcaataaagtttcttaagattgaatcctgttgccggtcttgcgatgattatcatataatttctgttgaattacgttaagcatgtaataattaacatgtaatgcatgacgttatttatgagatgggtttttatgattagagtcccgcaattatacatttaatacgcgatagaaaacaaaatatagcgcgcaaactaggataaattatcgcgcgcggtgtcatctatgttactagatcgggaattggcatgcaagcttggcactggccgtcgttttacaacgtcgtgactgggaaaaccctggcgttacccaacttaatcgccttgcagcacatccccctttcgccagctggcgtaatagcgaagaggcccgcaccgatcgcccttcccaacagttgcgcagcctgaatggcgaatgctagagcagcttgagcttggatcagattgtcgtttcccgccttcagtttaaactatcagtgtttgacaggatatattggcgggtaaacctaagagaaaagagcgtttattagaataatcggatatttaaaagggcgtgaaaaggtttatccgttcgtccatttgtatgtgcatgccaaccacagggttcccctcgggatcaaagtactttgatccaacccctccgctgctatagtgcagtcggcttctgacgttcagtgcagccgtcttctgaaaacgacatgtcgcacaagtcctaagttacgcgacaggctgccgccctgcccttttcctggcgttttcttgtcgcgtgttttagtcgcataaagtagaatacttgcgactagaaccggagacattacgccatgaacaagagcgccgccgctggcctgctgggctatgcccgcgtcagcaccgacgaccaggacttgaccaaccaacgggccgaactgcacgcggccggctgcaccaagctgttttccgagaagatcaccggcaccaggcgcgaccgcccggagctggccaggatgcttgaccacctacgccctggcgacgttgtgacagtgaccaggctagaccgcctggcccgcagcacccgcgacctactggacattgccgagcgcatccaggaggccggcgcgggcctgcgtagcctggcagagccgtgggccgacaccaccacgccggccggccgcatggtgttgaccgtgttcgccggcattgccgagttcgagcgttccctaatcatcgaccgcacccggagcgggcgcgaggccgccaaggcccgaggcgtgaagtttggcccccgccctaccctcaccccggcacagatcgcgcacgcccgcgagctgatcgaccaggaaggccgcaccgtgaaagaggcggctgcactgcttggcgtgcatcgctcgaccctgtaccgcgcacttgagcgcagcgaggaagtgacgcccaccgaggccaggcggcgcggtgccttccgtgaggacgcattgaccgaggccgacgccctggcggccgccgagaatgaacgccaagaggaacaagcatgaaaccgcaccaggacggccaggacgaaccgtttttcattaccgaagagatcgaggcggagatgatcgcggccgggtacgtgttcgagccgcccgcgcacgtctcaaccgtgcggctgcatgaaatcctggccggtttgtctgatgccaagctggcggcctggccggccagcttggccgctgaagaaaccgagcgccgccgtctaaaaaggtgatgtgtatttgagtaaaacagcttgcgtcatgcggtcgctgcgtatatgatgcgatgagtaaataaacaaatacgcaaggggaacgcatgaaggttatcgctgtacttaaccagaaaggcgggtcaggcaagacgaccatcgcaacccatctagcccgcgccctgcaactcgccggggccgatgttctgttagtcgattccgatccccagggcagtgcccgcgattgggcggccgtgcgggaagatcaaccgctaaccgttgtcggcatcgaccgcccgacgattgaccgcgacgtgaaggccatcggccggcgcgacttcgtagtgatcgacggagcgccccaggcggcggacttggctgtgtccgcgatcaaggcagccgacttcgtgctgattccggtgcagccaagcccttacgacatatgggccaccgccgacctggtggagctggttaagcagcgcattgaggtcacggatggaaggctacaagcggcctttgtcgtgtcgcgggcgatcaaaggcacgcgcatcggcggtgaggttgccgaggcgctggccgggtacgagctgcccattcttgagtcccgtatcacgcagcgcgtgagctacccaggcactgccgccgccggcacaaccgttcttgaatcagaacccgagggcgacgctgcccgcgaggtccaggcgctggccgctgaaattaaatcaaaactcatttgagttaatgaggtaaagagaaaatgagcaaaagcacaaacacgctaagtgccggccgtccgagcgcacgcagcagcaaggctgcaacgttggccagcctggcagacacgccagccatgaagcgggtcaactttcagttgccggcggaggatcacaccaagctgaagatgtacgcggtacgccaaggcaagaccattaccgagctgctatctgaatacatcgcgcagctaccagagtaaatgagcaaatgaataaatgagtagatgaattttagcggctaaaggaggcggcatggaaaatcaagaacaaccaggcaccgacgccgtggaatgccccatgtgtggaggaacgggcggttggccaggcgtaagcggctgggttgcctgccggccctgcaatggcactggaacccccaagcccgaggaatcggcgtgagcggtcgcaaaccatccggcccggtacaaatcggcgcggcgctgggtgatgacctggtggagaagttgaaggccgcgcaggccgcccagcggcaacgcatcgaggcagaagcacgccccggtgaatcgtggcaagcggccgctgatcgaatccgcaaagaatcccggcaaccgccggcagccggtgcgccgtcgattaggaagccgcccaagggcgacgagcaaccagattttttcgttccgatgctctatgacgtgggcacccgcgatagtcgcagcatcatggacgtggccgttttccgtctgtcgaagcgtgaccgacgagctggcgaggtgatccgctacgagcttccagacgggcacgtagaggtttccgcagggccggccggcatggccagtgtgtgggattacgacctggtactgatggcggtttcccatctaaccgaatccatgaaccgataccgggaagggaagggagacaagcccggccgcgtgttccgtccacacgttgcggacgtactcaagttctgccggcgagccgatggcggaaagcagaaagacgacctggtagaaacctgcattcggttaaacaccacgcacgttgccatgcagcgtacgaagaaggccaagaacggccgcctggtgacggtatccgagggtgaagccttgattagccgctacaagatcgtaaagagcgaaaccgggcggccggagtacatcgagatcgagctagctgattggatgtaccgcgagatcacagaaggcaagaacccggacgtgctgacggttcaccccgattactttttgatcgatcccggcatcggccgttttctctaccgcctggcacgccgcgccgcaggcaaggcagaagccagatggttgttcaagacgatctacgaacgcagtggcagcgccggagagttcaagaagttctgtttcaccgtgcgcaagctgatcgggtcaaatgacctgccggagtacgatttgaaggaggaggcggggcaggctggcccgatcctagtcatgcgctaccgcaacctgatcgagggcgaagcatccgccggttcctaatgtacggagcagatgctagggcaaattgccctagcaggggaaaaaggtcgaaaaggtctctttcctgtggatagcacgtacattgggaacccaaagccgtacattgggaaccggaacccgtacattgggaacccaaagccgtacattgggaaccggtcacacatgtaagtgactgatataaaagagaaaaaaggcgatttttccgcctaaaactctttaaaacttattaaaactcttaaaacccgcctggcctgtgcataactgtctggccagcgcacagccgaagagctgcaaaaagcgcctacccttcggtcgctgcgctccctacgccccgccgcttcgcgtcggcctatcgcggccgctggccgctcaaaaatggctggcctacggccaggcaatctaccagggcgcggacaagccgcgccgtcgccactcgaccgccggcgcccacatcaaggcaccctgcctcgcgcgtttcggtgatgacggtgaaaacctctgacacatgcagctcccggagacggtcacagcttgtctgtaagcggatgccgggagcagacaagcccgtcagggcgcgtcagcgggtgttggcgggtgtcggggcgcagccatgacccagtcacgtagcgatagcggagtgtatactggcttaactatgcggcatcagagcagattgtactgagagtgcaccatatgcggtgtgaaataccgcacagatgcgtaaggagaaaataccgcatcaggcgctcttccgcttcctcgctcactgactcgctgcgctcggtcgttcggctgcggcgagcggtatcagctcactcaaaggcggtaatacggttatccacagaatcaggggataacgcaggaaagaacatgtgagcaaaaggccagcaaaaggccaggaaccgtaaaaaggccgcgttgctggcgtttttccataggctccgcccccctgacgagcatcacaaaaatcgacgctcaagtcagaggtggcgaaacccgacaggactataaagataccaggcgtttccccctggaagctccctcgtgcgctctcctgttccgaccctgccgcttaccggatacctgtccgcctttctcccttcgggaagcgtggcgctttctcatagctcacgctgtaggtatctcagttcggtgtaggtcgttcgctccaagctgggctgtgtgcacgaaccccccgttcagcccgaccgctgcgccttatccggtaactatcgtcttgagtccaacccggtaagacacgacttatcgccactggcagcagccactggtaacaggattagcagagcgaggtatgtaggcggtgctacagagttcttgaagtggtggcctaactacggctacactagaaggacagtatttggtatctgcgctctgctgaagccagttaccttcggaaaaagagttggtagctcttgatccggcaaacaaaccaccgctggtagcggtggtttttttgtttgcaagcagcagattacgcgcagaaaaaaaggatctcaagaagatcctttgatcttttctacggggtctgacgctcagtggaacgaaaactcacgttaagggattttggtcatgcattctaggtactaaaacaattcatccagtaaaatataatattttattttctcccaatcaggcttgatccccagtaagtcaaaaaatagctcgacatactgttcttccccgatatcctccctgatcgaccggacgcagaaggcaatgtcataccacttgtccgccctgccgcttctcccaagatcaataaagccacttactttgccatctttcacaaagatgttgctgtctcccaggtcgccgtgggaaaagacaagttcctcttcgggcttttccgtctttaaaaaatcatacagctcgcgcggatctttaaatggagtgtcttcttcccagttttcgcaatccacatcggccagatcgttattcagtaagtaatccaattcggctaagcggctgtctaagctattcgtatagggacaatccgatatgtcgatggagtgaaagagcctgatgcactccgcatacagctcgataatcttttcagggctttgttcatcttcatactcttccgagcaaaggacgccatcggcctcactcatgagcagattgctccagccatcatgccgttcaaagtgcaggacctttggaacaggcagctttccttccagccatagcatcatgtccttttcccgttccacatcataggtggtccctttataccggctgtccgtcatttttaaatataggttttcattttctcccaccagcttatataccttagcaggagacattccttccgtatcttttacgcagcggtatttttcgatcagttttttcaattccggtgatattctcattttagccatttattatttccttcctcttttctacagtatttaaagataccccaagaagctaattataacaagacgaactccaattcactgttccttgcattctaaaaccttaaataccagaaaacagctttttcaaagttgttttcaaagttggcgtataacatagtatcgacggagccgattttgaaaccgcggtgatcacaggcagcaacgctctgtcatcgttacaatcaacatgctaccctccgcgagatcatccgtgtttcaaacccggcagcttagttgccgttcttccgaatagcatcggtaacatgagcaaagtctgccgccttacaacggctctcccgctgacgccgtcccggactgatgggctgcctgtatcgagtggtgattttgtgccgagctgccggtcggggagctgttggctggctggtggcaggatatattgtggtgtaaacaaattgacgcttagacaacttaataacacattgcggacgtttttaatgtactgaattaacgccgaatta

SEQ ID NO: 50 - protein, 33 aa, Artificial; identical to SEQ ID NO: 45
  Synthetic Construct

SEQ ID NO: 51 - DNA, 8588 bp, Artificial
  plasmid VC-MME289-1qcz
gctttgggcggatcctctagaggacaatcagtaaattgaacggagaatattattcataaaaatacgatagtaacgggtgatatattcattagaatgaaccgaaaccggcggtaaggatctgagctacacatgctcaggttttttacaacgtgcacaacagaattgaaagcaaatatcatgcgatcataggcgtctcgcatatctcattaaagcagggcatgccggtcgagtcaaatctcggtgacgggcaggaccggacggggcggtaccggcaggctgaagtccagctgccagaaacccacgtcatgccagttcccgtgcttgaagccggccgcccgcagcatgccgcggggggcatatccgagcgcctcgtgcatgcgcacgctcgggtcgttgggcagcccgatgacagcgaccacgctcttgaagccctgtgcctccagggacttcagcaggtgggtgtagagcgtggagcccagtcccgtccgctggtggcggggggagacgtacacggtcgactcggccgtccagtcgtaggcgttgcgtgccttccaggggcccgcgtaggcgatgccggcgacctcgccgtccacctcggcgacgagccagggatagcgctcccgcagacggacgaggtcgtccgtccactcctgcggttcctgcggctcggtacggaagttgaccgtgcttgtctcgatgtagtggttgacgatggtgcagaccgccggcatgtccgcctcggtggcacggcggatgtcggccgggcgtcgttctgggctcatggtagactcgacggatccacgtgtggaagatatgaatttttttgagaaactagataagattaatgaatatcggtgttttggttttttcttgtggccgtctttgtttatattgagatttttcaaatcagtgcgcaagacgtgacgtaagtatccgagtcagtttttatttttctactaatttggtcgaatctagactgcagcaaatttacacattgccactaaacgtctaaacccttgtaatttgtttttgttttactatgtgtgttatgtatttgatttgcgataaatttttatatttggtactaaatttataacaccttttatgctaacgtttgccaacacttagcaatttgcaagttgattaattgattctaaattatttttgtcttctaaatacatatactaatcaactggaaatgtaaatatttgctaatatttctactataggagaattaaagtgagtgaatatggtaccacaaggtttggagatttaattgttgcaatgctgcatggatggcatatacaccaaacattcaataattcttgaggataataatggtaccacacaagatttgaggtgcatgaacgtcacgtggacaaaaggtttagtaatttttcaagacaacaatgttaccacacacaagttttgaggtgcatgcatggatgccctgtggaaagtttaaaaatattttggaaatgatttgcatggaagccatgtgtaaaaccatgacatccacttggaggatgcaataatgaagaaaactacaaatttacatgcaactagttatgcatgtagtctatataatgaggattttgcaatactttcattcatacacactcactaagttttacacgattataatttcttcatagccacccgggttgctcttccatggcaatgattaattaacgaagagcaagagctcgaatttccccgatcgttcaaacatttggcaataaagtttcttaagattgaatcctgttgccggtcttgcgatgattatcatataatttctgttgaattacgttaagcatgtaataattaacatgtaatgcatgacgttatttatgagatgggtttttatgattagagtcccgcaattatacatttaatacgcgatagaaaacaaaatatagcgcgcaaactaggataaattatcgcgcgcggtgtcatctatgttactagatcgggaattggcatgcaagcttggcactggccgtcgttttacaacgtcgtgactgggaaaaccctggcgttacccaacttaatcgccttgcagcacatccccctttcgccagctggcgtaatagcgaagaggcccgcaccgatcgcccttcccaacagttgcgcagcctgaatggcgaatgctagagcagcttgagcttggatcagattgtcgtttcccgccttcagtttaaactatcagtgtttgacaggatatattggcgggtaaacctaagagaaaagagcgtttattagaataatcggatatttaaaagggcgtgaaaaggtttatccgttcgtccatttgtatgtgcatgccaaccacagggttcccctcgggatcaaagtactttgatccaacccctccgctgctatagtgcagtcggcttctgacgttcagtgcagccgtcttctgaaaacgacatgtcgcacaagtcctaagttacgcgacaggctgccgccctgcccttttcctggcgttttcttgtcgcgtgttttagtcgcataaagtagaatacttgcgactagaaccggagacattacgccatgaacaagagcgccgccgctggcctgctgggctatgcccgcgtcagcaccgacgaccaggacttgaccaaccaacgggccgaactgcacgcggccggctgcaccaagctgttttccgagaagatcaccggcaccaggcgcgaccgcccggagctggccaggatgcttgaccacctacgccctggcgacgttgtgacagtgaccaggctagaccgcctggcccgcagcacccgcgacctactggacattgccgagcgcatccaggaggccggcgcgggcctgcgtagcctggcagagccgtgggccgacaccaccacgccggccggccgcatggtgttgaccgtgttcgccggcattgccgagttcgagcgttccctaatcatcgaccgcacccggagcgggcgcgaggccgccaaggcccgaggcgtgaagtttggcccccgccctaccctcaccccggcacagatcgcgcacgcccgcgagctgatcgaccaggaaggccgcaccgtgaaagaggcggctgcactgcttggcgtgcatcgctcgaccctgtaccgcgcacttgagcgcagcgaggaagtgacgcccaccgaggccaggcggcgcggtgccttccgtgaggacgcattgaccgaggccgacgccctggcggccgccgagaatgaacgccaagaggaacaagcatgaaaccgcaccaggacggccaggacgaaccgtttttcattaccgaagagatcgaggcggagatgatcgcggccgggtacgtgttcgagccgcccgcgcacgtctcaaccgtgcggctgcatgaaatcctggccggtttgtctgatgccaagctggcggcctggccggccagcttggccgctgaagaaaccgagcgccgccgtctaaaaaggtgatgtgtatttgagtaaaacagcttgcgtcatgcggtcgctgcgtatatgatgcgatgagtaaataaacaaatacgcaaggggaacgcatgaaggttatcgctgtacttaaccagaaaggcgggtcaggcaagacgaccatcgcaacccatctagcccgcgccctgcaactcgccggggccgatgttctgttagtcgattccgatccccagggcagtgcccgcgattgggcggccgtgcgggaagatcaaccgctaaccgttgtcggcatcgaccgcccgacgattgaccgcgacgtgaaggccatcggccggcgcgacttcgtagtgatcgacggagcgccccaggcggcggacttggctgtgtccgcgatcaaggcagccgacttcgtgctgattccggtgcagccaagcccttacgacatatgggccaccgccgacctggtggagctggttaagcagcgcattgaggtcacggatggaaggctacaagcggcctttgtcgtgtcgcgggcgatcaaaggcacgcgcatcggcggtgaggttgccgaggcgctggccgggtacgagctgcccattcttgagtcccgtatcacgcagcgcgtgagctacccaggcactgccgccgccggcacaaccgttcttgaatcagaacccgagggcgacgctgcccgcgaggtccaggcgctggccgctgaaattaaatcaaaactcatttgagttaatgaggtaaagagaaaatgagcaaaagcacaaacacgctaagtgccggccgtccgagcgcacgcagcagcaaggctgcaacgttggccagcctggcagacacgccagccatgaagcgggtcaactttcagttgccggcggaggatcacaccaagctgaagatgtacgcggtacgccaaggcaagaccattaccgagctgctatctgaatacatcgcgcagctaccagagtaaatgagcaaatgaataaatgagtagatgaattttagcggctaaaggaggcggcatggaaaatcaagaacaaccaggcaccgacgccgtggaatgccccatgtgtggaggaacgggcggttggccaggcgtaagcggctgggttgcctgccggccctgcaatggcactggaacccccaagcccgaggaatcggcgtgagcggtcgcaaaccatccggcccggtacaaatcggcgcggcgctgggtgatgacctggtggagaagttgaaggccgcgcaggccgcccagcggcaacgcatcgaggcagaagcacgccccggtgaatcgtggcaagcggccgctgatcgaatccgcaaagaatcccggcaaccgccggcagccggtgcgccgtcgattaggaagccgcccaagggcgacgagcaaccagattttttcgttccgatgctctatgacgtgggcacccgcgatagtcgcagcatcatggacgtggccgttttccgtctgtcgaagcgtgaccgacgagctggcgaggtgatccgctacgagcttccagacgggcacgtagaggtttccgcagggccggccggcatggccagtgtgtgggattacgacctggtactgatggcggtttcccatctaaccgaatccatgaaccgataccgggaagggaagggagacaagcccggccgcgtgttccgtccacacgttgcggacgtactcaagttctgccggcgagccgatggcggaaagcagaaagacgacctggtagaaacctgcattcggttaaacaccacgcacgttgccatgcagcgtacgaagaaggccaagaacggccgcctggtgacggtatccgagggtgaagccttgattagccgctacaagatcgtaaagagcgaaaccgggcggccggagtacatcgagatcgagctagctgattggatgtaccgcgagatcacagaaggcaagaacccggacgtgctgacggttcaccccgattactttttgatcgatcccggcatcggccgttttctctaccgcctggcacgccgcgccgcaggcaaggcagaagccagatggttgttcaagacgatctacgaacgcagtggcagcgccggagagttcaagaagttctgtttcaccgtgcgcaagctgatcgggtcaaatgacctgccggagtacgatttgaaggaggaggcggggcaggctggcccgatcctagtcatgcgctaccgcaacctgatcgagggcgaagcatccgccggttcctaatgtacggagcagatgctagggcaaattgccctagcaggggaaaaaggtcgaaaaggtctctttcctgtggatagcacgtacattgggaacccaaagccgtacattgggaaccggaacccgtacattgggaacccaaagccgtacattgggaaccggtcacacatgtaagtgactgatataaaagagaaaaaaggcgatttttccgcctaaaactctttaaaacttattaaaactcttaaaacccgcctggcctgtgcataactgtctggccagcgcacagccgaagagctgcaaaaagcgcctacccttcggtcgctgcgctccctacgccccgccgcttcgcgtcggcctatcgcggccgctggccgctcaaaaatggctggcctacggccaggcaatctaccagggcgcggacaagccgcgccgtcgccactcgaccgccggcgcccacatcaaggcaccctgcctcgcgcgtttcggtgatgacggtgaaaacctctgacacatgcagctcccggagacggtcacagcttgtctgtaagcggatgccgggagcagacaagcccgtcagggcgcgtcagcgggtgttggcgggtgtcggggcgcagccatgacccagtcacgtagcgatagcggagtgtatactggcttaactatgcggcatcagagcagattgtactgagagtgcaccatatgcggtgtgaaataccgcacagatgcgtaaggagaaaataccgcatcaggcgctcttccgcttcctcgctcactgactcgctgcgctcggtcgttcggctgcggcgagcggtatcagctcactcaaaggcggtaatacggttatccacagaatcaggggataacgcaggaaagaacatgtgagcaaaaggccagcaaaaggccaggaaccgtaaaaaggccgcgttgctggcgtttttccataggctccgcccccctgacgagcatcacaaaaatcgacgctcaagtcagaggtggcgaaacccgacaggactataaagataccaggcgtttccccctggaagctccctcgtgcgctctcctgttccgaccctgccgcttaccggatacctgtccgcctttctcccttcgggaagcgtggcgctttctcatagctcacgctgtaggtatctcagttcggtgtaggtcgttcgctccaagctgggctgtgtgcacgaaccccccgttcagcccgaccgctgcgccttatccggtaactatcgtcttgagtccaacccggtaagacacgacttatcgccactggcagcagccactggtaacaggattagcagagcgaggtatgtaggcggtgctacagagttcttgaagtggtggcctaactacggctacactagaaggacagtatttggtatctgcgctctgctgaagccagttaccttcggaaaaagagttggtagctcttgatccggcaaacaaaccaccgctggtagcggtggtttttttgtttgcaagcagcagattacgcgcagaaaaaaaggatctcaagaagatcctttgatcttttctacggggtctgacgctcagtggaacgaaaactcacgttaagggattttggtcatgcattctaggtactaaaacaattcatccagtaaaatataatattttattttctcccaatcaggcttgatccccagtaagtcaaaaaatagctcgacatactgttcttccccgatatcctccctgatcgaccggacgcagaaggcaatgtcataccacttgtccgccctgccgcttctcccaagatcaataaagccacttactttgccatctttcacaaagatgttgctgtctcccaggtcgccgtgggaaaagacaagttcctcttcgggcttttccgtctttaaaaaatcatacagctcgcgcggatctttaaatggagtgtcttcttcccagttttcgcaatccacatcggccagatcgttattcagtaagtaatccaattcggctaagcggctgtctaagctattcgtatagggacaatccgatatgtcgatggagtgaaagagcctgatgcactccgcatacagctcgataatcttttcagggctttgttcatcttcatactcttccgagcaaaggacgccatcggcctcactcatgagcagattgctccagccatcatgccgttcaaagtgcaggacctttggaacaggcagctttccttccagccatagcatcatgtccttttcccgttccacatcataggtggtccctttataccggctgtccgtcatttttaaatataggttttcattttctcccaccagcttatataccttagcaggagacattccttccgtatcttttacgcagcggtatttttcgatcagttttttcaattccggtgatattctcattttagccatttattatttccttcctcttttctacagtatttaaagataccccaagaagctaattataacaagacgaactccaattcactgttccttgcattctaaaaccttaaataccagaaaacagctttttcaaagttgttttcaaagttggcgtataacatagtatcgacggagccgattttgaaaccgcggtgatcacaggcagcaacgctctgtcatcgttacaatcaacatgctaccctccgcgagatcatccgtgtttcaaacccggcagcttagttgccgttcttccgaatagcatcggtaacatgagcaaagtctgccgccttacaacggctctcccgctgacgccgtcccggactgatgggctgcctgtatcgagtggtgattttgtgccgagctgccggtcggggagctgttggctggctggtggcaggatatattgtggtgtaaacaaattgacgcttagacaacttaataacacattgcggacgtttttaatgtactgaattaacgccgaattaa

SEQ ID NO: 52 - DNA, 9007 bp, Artificial
  plasmid VC-MME464-1qcz
  5'UTR (1666)..(1830)
  transit_peptide (1831)..(1938)
  CDS (1831)..(1938)
  transit_peptide (2016)..(2084)
  CDS (2016)..(2084)
  CDS (2085)..(2093): adapter
gctttgggcggatcctctagaggacaatcagtaaattgaacggagaatattattcataaaaatacgatagtaacgggtgatatattcattagaatgaaccgaaaccggcggtaaggatctgagctacacatgctcaggttttttacaacgtgcacaacagaattgaaagcaaatatcatgcgatcataggcgtctcgcatatctcattaaagcagggcatgccggtcgagtcaaatctcggtgacgggcaggaccggacggggcggtaccggcaggctgaagtccagctgccagaaacccacgtcatgccagttcccgtgcttgaagccggccgcccgcagcatgccgcggggggcatatccgagcgcctcgtgcatgcgcacgctcgggtcgttgggcagcccgatgacagcgaccacgctcttgaagccctgtgcctccagggacttcagcaggtgggtgtagagcgtggagcccagtcccgtccgctggtggcggggggagacgtacacggtcgactcggccgtccagtcgtaggcgttgcgtgccttccaggggcccgcgtaggcgatgccggcgacctcgccgtccacctcggcgacgagccagggatagcgctcccgcagacggacgaggtcgtccgtccactcctgcggttcctgcggctcggtacggaagttgaccgtgcttgtctcgatgtagtggttgacgatggtgcagaccgccggcatgtccgcctcggtggcacggcggatgtcggccgggcgtcgttctgggctcatggtagactcgacggatccacgtgtggaagatatgaatttttttgagaaactagataagattaatgaatatcggtgttttggttttttcttgtggccgtctttgtttatattgagatttttcaaatcagtgcgcaagacgtgacgtaagtatccgagtcagtttttatttttctactaatttggtcgaatctagactgcagcaaatttacacattgccactaaacgtctaaacccttgtaatttgtttttgttttactatgtgtgttatgtatttgatttgcgataaatttttatatttggtactaaatttataacaccttttatgctaacgtttgccaacacttagcaatttgcaagttgattaattgattctaaattatttttgtcttctaaatacatatactaatcaactggaaatgtaaatatttgctaatatttctactataggagaattaaagtgagtgaatatggtaccacaaggtttggagatttaattgttgcaatgctgcatggatggcatatacaccaaacattcaataattcttgaggataataatggtaccacacaagatttgaggtgcatgaacgtcacgtggacaaaaggtttagtaatttttcaagacaacaatgttaccacacacaagttttgaggtgcatgcatggatgccctgtggaaagtttaaaaatattttggaaatgatttgcatggaagccatgtgtaaaaccatgacatccacttggaggatgcaataatgaagaaaactacaaatttacatgcaactagttatgcatgtagtctatataatgaggattttgcaatactttcattcatacacactcactaagttttacacgattataatttcttcatagccacccaaacgcataaacttatcttcatagttgccactccaatttgctccttgaatctcctccacccaatacataatccactcctccatcacccacttcactactaaatcaaacttaactctgtttttctctctcctcctttcatttcttattcttccaatcatcgtactccgccatgaccaccgctgtcaccgccgctgtttctttcccctctaccaaaaccacctctctctccgcccgaagctcctccgtcatttcccctgacaaaatcagctacaaaaaggtgattcccaatttcactgtgttttttattaataatttgttattttgatgatgagatgattaatttgggtgctgcaggttcctttgtactacaggaatgtatctgcaactgggaaaatgggacccatcagggcccagatcgcctcttgctcttccatggcaatgattaattaacgaagagcaagagctcgaatttccccgatcgttcaaacatttggcaataaagtttcttaagattgaatcctgttgccggtcttgcgatgattatcatataatttctgttgaattacgttaagcatgtaataattaacatgtaatgcatgacgttatttatgagatgggtttttatgattagagtcccgcaattatacatttaatacgcgatagaaaacaaaatatagcgcgcaaactaggataaattatcgcgcgcggtgtcatctatgttactagatcgggaattggcatgcaagcttggcactggccgtcgttttacaacgtcgtgactgggaaaaccctggcgttacccaacttaatcgccttgcagcacatccccctttcgccagctggcgtaatagcgaagaggcccgcaccgatcgcccttcccaacagttgcgcagcctgaatggcgaatgctagagcagcttgagcttggatcagattgtcgtttcccgccttcagtttaaactatcagtgtttgacaggatatattggcgggtaaacctaagagaaaagagcgtttattagaataatcggatatttaaaagggcgtgaaaaggtttatccgttcgtccatttgtatgtgcatgccaaccacagggttcccctcgggatcaaagtactttgatccaacccctccgctgctatagtgcagtcggcttctgacgttcagtgcagccgtcttctgaaaacgacatgtcgcacaagtcctaagttacgcgacaggctgccgccctgcccttttcctggcgttttcttgtcgcgtgttttagtcgcataaagtagaatacttgcgactagaaccggagacattacgccatgaacaagagcgccgccgctggcctgctgggctatgcccgcgtcagcaccgacgaccaggacttgaccaaccaacgggccgaactgcacgcggccggctgcaccaagctgttttccgagaagatcaccggcaccaggcgcgaccgcccggagctggccaggatgcttgaccacctacgccctggcgacgttgtgacagtgaccaggctagaccgcctggcccgcagcacccgcgacctactggacattgccgagcgcatccaggaggccggcgcgggcctgcgtagcctggcagagccgtgggccgacaccaccacgccggccggccgcatggtgttgaccgtgttcgccggcattgccgagttcgagcgttccctaatcatcgaccgcacccggagcgggcgcgaggccgccaaggcccgaggcgtgaagtttggcccccgccctaccctcaccccggcacagatcgcgcacgcccgcgagctgatcgaccaggaaggccgcaccgtgaaagaggcggctgcactgcttggcgtgcatcgctcgaccctgtaccgcgcacttgagcgcagcgaggaagtgacgcccaccgaggccaggcggcgcggtgccttccgtgaggacgcattgaccgaggccgacgccctggcggccgccgagaatgaacgccaagaggaacaagcatgaaaccgcaccaggacggccaggacgaaccgtttttcattaccgaagagatcgaggcggagatgatcgcggccgggtacgtgttcgagccgcccgcgcacgtctcaaccgtgcggctgcatgaaatcctggccggtttgtctgatgccaagctggcggcctggccggccagcttggccgctgaagaaaccgagcgccgccgtctaaaaaggtgatgtgtatttgagtaaaacagcttgcgtcatgcggtcgctgcgtatatgatgcgatgagtaaataaacaaatacgcaaggggaacgcatgaaggttatcgctgtacttaaccagaaaggcgggtcaggcaagacgaccatcgcaacccatctagcccgcgccctgcaactcgccggggccgatgttctgttagtcgattccgatccccagggcagtgcccgcgattgggcggccgtgcgggaagatcaaccgctaaccgttgtcggcatcgaccgcccgacgattgaccgcgacgtgaaggccatcggccggcgcgacttcgtagtgatcgacggagcgccccaggcggcggacttggctgtgtccgcgatcaaggcagccgacttcgtgctgattccggtgcagccaagcccttacgacatatgggccaccgccgacctggtggagctggttaagcagcgcattgaggtcacggatggaaggctacaagcggcctttgtcgtgtcgcgggcgatcaaaggcacgcgcatcggcggtgaggttgccgaggcgctggccgggtacgagctgcccattcttgagtcccgtatcacgcagcgcgtgagctacccaggcactgccgccgccggcacaaccgttcttgaatcagaacccgagggcgacgctgcccgcgaggtccaggcgctggccgctgaaattaaatcaaaactcatttgagttaatgaggtaaagagaaaatgagcaaaagcacaaacacgctaagtgccggccgtccgagcgcacgcagcagcaaggctgcaacgttggccagcctggcagacacgccagccatgaagcgggtcaactttcagttgccggcggaggatcacaccaagctgaagatgtacgcggtacgccaaggcaagaccattaccgagctgctatctgaatacatcgcgcagctaccagagtaaatgagcaaatgaataaatgagtagatgaattttagcggctaaaggaggcggcatggaaaatcaagaacaaccaggcaccgacgccgtggaatgccccatgtgtggaggaacgggcggttggccaggcgtaagcggctgggttgcctgccggccctgcaatggcactggaacccccaagcccgaggaatcggcgtgagcggtcgcaaaccatccggcccggtacaaatcggcgcggcgctgggtgatgacctggtggagaagttgaaggccgcgcaggccgcccagcggcaacgcatcgaggcagaagcacgccccggtgaatcgtggcaagcggccgctgatcgaatccgcaaagaatcccggcaaccgccggcagccggtgcgccgtcgattaggaagccgcccaagggcgacgagcaaccagattttttcgttccgatgctctatgacgtgggcacccgcgatagtcgcagcatcatggacgtggccgttttccgtctgtcgaagcgtgaccgacgagctggcgaggtgatccgctacgagcttccagacgggcacgtagaggtttccgcagggccggccggcatggccagtgtgtgggattacgacctggtactgatggcggtttcccatctaaccgaatccatgaaccgataccgggaagggaagggagacaagcccggccgcgtgttccgtccacacgttgcggacgtactcaagttctgccggcgagccgatggcggaaagcagaaagacgacctggtagaaacctgcattcggttaaacaccacgcacgttgccatgcagcgtacgaagaaggccaagaacggccgcctggtgacggtatccgagggtgaagccttgattagccgctacaagatcgtaaagagcgaaaccgggcggccggagtacatcgagatcgagctagctgattggatgtaccgcgagatcacagaaggcaagaacccggacgtgctgacggttcaccccgattactttttgatcgatcccggcatcggccgttttctctaccgcctggcacgccgcgccgcaggcaaggcagaagccagatggttgttcaagacgatctacgaacgcagtggcagcgccggagagttcaagaagttctgtttcaccgtgcgcaagctgatcgggtcaaatgacctgccggagtacgatttgaaggaggaggcggggcaggctggcccgatcctagtcatgcgctaccgcaacctgatcgagggcgaagcatccgccggttcctaatgtacggagcagatgctagggcaaattgccctagcaggggaaaaaggtcgaaaaggtctctttcctgtggatagcacgtacattgggaacccaaagccgtacattgggaaccggaacccgtacattgggaacccaaagccgtacattgggaaccggtcacacatgtaagtgactgatataaaagagaaaaaaggcgatttttccgcctaaaactctttaaaacttattaaaactcttaaaacccgcctggcctgtgcataactgtctggccagcgcacagccgaagagctgcaaaaagcgcctacccttcggtcgctgcgctccctacgccccgccgcttcgcgtcggcctatcgcggccgctggccgctcaaaaatggctggcctacggccaggcaatctaccagggcgcggacaagccgcgccgtcgccactcgaccgccggcgcccacatcaaggcaccctgcctcgcgcgtttcggtgatgacggtgaaaacctctgacacatgcagctcccggagacggtcacagcttgtctgtaagcggatgccgggagcagacaagcccgtcagggcgcgtcagcgggtgttggcgggtgtcggggcgcagccatgacccagtcacgtagcgatagcggagtgtatactggcttaactatgcggcatcagagcagattgtactgagagtgcaccatatgcggtgtgaaataccgcacagatgcgtaaggagaaaataccgcatcaggcgctcttccgcttcctcgctcactgactcgctgcgctcggtcgttcggctgcggcgagcggtatcagctcactcaaaggcggtaatacggttatccacagaatcaggggataacgcaggaaagaacatgtgagcaaaaggccagcaaaaggccaggaaccgtaaaaaggccgcgttgctggcgtttttccataggctccgcccccctgacgagcatcacaaaaatcgacgctcaagtcagaggtggcgaaacccgacaggactataaagataccaggcgtttccccctggaagctccctcgtgcgctctcctgttccgaccctgccgcttaccggatacctgtccgcctttctcccttcgggaagcgtggcgctttctcatagctcacgctgtaggtatctcagttcggtgtaggtcgttcgctccaagctgggctgtgtgcacgaaccccccgttcagcccgaccgctgcgccttatccggtaactatcgtcttgagtccaacccggtaagacacgacttatcgccactggcagcagccactggtaacaggattagcagagcgaggtatgtaggcggtgctacagagttcttgaagtggtggcctaactacggctacactagaaggacagtatttggtatctgcgctctgctgaagccagttaccttcggaaaaagagttggtagctcttgatccggcaaacaaaccaccgctggtagcggtggtttttttgtttgcaagcagcagattacgcgcagaaaaaaaggatctcaagaagatcctttgatcttttctacggggtctgacgctcagtggaacgaaaactcacgttaagggattttggtcatgcattctaggtactaaaacaattcatccagtaaaatataatattttattttctcccaatcaggcttgatccccagtaagtcaaaaaatagctcgacatactgttcttccccgatatcctccctgatcgaccggacgcagaaggcaatgtcataccacttgtccgccctgccgcttctcccaagatcaataaagccacttactttgccatctttcacaaagatgttgctgtctcccaggtcgccgtgggaaaagacaagttcctcttcgggcttttccgtctttaaaaaatcatacagctcgcgcggatctttaaatggagtgtcttcttcccagttttcgcaatccacatcggccagatcgttattcagtaagtaatccaattcggctaagcggctgtctaagctattcgtatagggacaatccgatatgtcgatggagtgaaagagcctgatgcactccgcatacagctcgataatcttttcagggctttgttcatcttcatactcttccgagcaaaggacgccatcggcctcactcatgagcagattgctccagccatcatgccgttcaaagtgcaggacctttggaacaggcagctttccttccagccatagcatcatgtccttttcccgttccacatcataggtggtccctttataccggctgtccgtcatttttaaatataggttttcattttctcccaccagcttatataccttagcaggagacattccttccgtatcttttacgcagcggtatttttcgatcagttttttcaattccggtgatattctcattttagccatttattatttccttcctcttttctacagtatttaaagataccccaagaagctaattataacaagacgaactccaattcactgttccttgcattctaaaaccttaaataccagaaaacagctttttcaaagttgttttcaaagttggcgtataacatagtatcgacggagccgattttgaaaccgcggtgatcacaggcagcaacgctctgtcatcgttacaatcaacatgctaccctccgcgagatcatccgtgtttcaaacccggcagcttagttgccgttcttccgaatagcatcggtaacatgagcaaagtctgccgccttacaacggctctcccgctgacgccgtcccggactgatgggctgcctgtatcgagtggtgattttgtgccgagctgccggtcggggagctgttggctggctggtggcaggatatattgtggtgtaaacaaattgacgcttagacaacttaataacacattgcggacgtttttaatgtactgaattaacgccgaattaa

SEQ ID NO: 53 - protein, 62 aa, Artificial; identical to SEQ ID NO: 43
  Synthetic Construct

SEQ ID NO: 54 - DNA, 8678 bp, Artificial
  plasmid VC-MME465-1qcz
  transit_peptide (1666)..(1755)
  CDS (1666)..(1755)
  CDS (1756)..(1764): adapter
gctttgggcggatcctctagaggacaatcagtaaattgaacggagaatattattcataaaaatacgatagtaacgggtgatatattcattagaatgaaccgaaaccggcggtaaggatctgagctacacatgctcaggttttttacaacgtgcacaacagaattgaaagcaaatatcatgcgatcataggcgtctcgcatatctcattaaagcagggcatgccggtcgagtcaaatctcggtgacgggcaggaccggacggggcggtaccggcaggctgaagtccagctgccagaaacccacgtcatgccagttcccgtgcttgaagccggccgcccgcagcatgccgcggggggcatatccgagcgcctcgtgcatgcgcacgctcgggtcgttgggcagcccgatgacagcgaccacgctcttgaagccctgtgcctccagggacttcagcaggtgggtgtagagcgtggagcccagtcccgtccgctggtggcggggggagacgtacacggtcgactcggccgtccagtcgtaggcgttgcgtgccttccaggggcccgcgtaggcgatgccggcgacctcgccgtccacctcggcgacgagccagggatagcgctcccgcagacggacgaggtcgtccgtccactcctgcggttcctgcggctcggtacggaagttgaccgtgcttgtctcgatgtagtggttgacgatggtgcagaccgccggcatgtccgcctcggtggcacggcggatgtcggccgggcgtcgttctgggctcatggtagactcgacggatccacgtgtggaagatatgaatttttttgagaaactagataagattaatgaatatcggtgttttggttttttcttgtggccgtctttgtttatattgagatttttcaaatcagtgcgcaagacgtgacgtaagtatccgagtcagtttttatttttctactaatttggtcgaatctagactgcagcaaatttacacattgccactaaacgtctaaacccttgtaatttgtttttgttttactatgtgtgttatgtatttgatttgcgataaatttttatatttggtactaaatttataacaccttttatgctaacgtttgccaacacttagcaatttgcaagttgattaattgattctaaattatttttgtcttctaaatacatatactaatcaactggaaatgtaaatatttgctaatatttctactataggagaattaaagtgagtgaatatggtaccacaaggtttggagatttaattgttgcaatgctgcatggatggcatatacaccaaacattcaataattcttgaggataataatggtaccacacaagatttgaggtgcatgaacgtcacgtggacaaaaggtttagtaatttttcaagacaacaatgttaccacacacaagttttgaggtgcatgcatggatgccctgtggaaagtttaaaaatattttggaaatgatttgcatggaagccatgtgtaaaaccatgacatccacttggaggatgcaataatgaagaaaactacaaatttacatgcaactagttatgcatgtagtctatataatgaggattttgcaatactttcattcatacacactcactaagttttacacgattataatttcttcatagccacccaaacatgcagaggtttttctccgccagatcgattctcggttacgccgtcaagacgcggaggaggtctttctcttctcgttcttcgtctctcctttgctcttccatggcaatgattaattaacgaagagcaagagctcgaatttccccgatcgttcaaacatttggcaataaagtttcttaagattgaatcctgttgccggtcttgcgatgattatcatataatttctgttgaattacgttaagcatgtaataattaacatgtaatgcatgacgttatttatgagatgggtttttatgattagagtcccgcaattatacatttaatacgcgatagaaaacaaaatatagcgcgcaaactaggataaattatcgcgcgcggtgtcatctatgttactagatcgggaattggcatgcaagcttggcactggccgtcgttttacaacgtcgtgactgggaaaaccctggcgttacccaacttaatcgccttgcagcacatccccctttcgccagctggcgtaatagcgaagaggcccgcaccgatcgcccttcccaacagttgcgcagcctgaatggcgaatgctagagcagcttgagcttggatcagattgtcgtttcccgccttcagtttaaactatcagtgtttgacaggatatattggcgggtaaacctaagagaaaagagcgtttattagaataatcggatatttaaaagggcgtgaaaaggtttatccgttcgtccatttgtatgtgcatgccaaccacagggttcccctcgggatcaaagtactttgatccaacccctccgctgctatagtgcagtcggcttctgacgttcagtgcagccgtcttctgaaaacgacatgtcgcacaagtcctaagttacgcgacaggctgccgccctgcccttttcctggcgttttcttgtcgcgtgttttagtcgcataaagtagaatacttgcgactagaaccggagacattacgccatgaacaagagcgccgccgctggcctgctgggctatgcccgcgtcagcaccgacgaccaggacttgaccaaccaacgggccgaactgcacgcggccggctgcaccaagctgttttccgagaagatcaccggcaccaggcgcgaccgcccggagctggccaggatgcttgaccacctacgccctggcgacgttgtgacagtgaccaggctagaccgcctggcccgcagcacccgcgacctactggacattgccgagcgcatccaggaggccggcgcgggcctgcgtagcctggcagagccgtgggccgacaccaccacgccggccggccgcatggtgttgaccgtgttcgccggcattgccgagttcgagcgttccctaatcatcgaccgcacccggagcgggcgcgaggccgccaaggcccgaggcgtgaagtttggcccccgccctaccctcaccccggcacagatcgcgcacgcccgcgagctgatcgaccaggaaggccgcaccgtgaaagaggcggctgcactgcttggcgtgcatcgctcgaccctgtaccgcgcacttgagcgcagcgaggaagtgacgcccaccgaggccaggcggcgcggtgccttccgtgaggacgcattgaccgaggccgacgccctggcggccgccgagaatgaacgccaagaggaacaagcatgaaaccgcaccaggacggccaggacgaaccgtttttcattaccgaagagatcgaggcggagatgatcgcggccgggtacgtgttcgagccgcccgcgcacgtctcaaccgtgcggctgcatgaaatcctggccggtttgtctgatgccaagctggcggcctggccggccagcttggccgctgaagaaaccgagcgccgccgtctaaaaaggtgatgtgtatttgagtaaaacagcttgcgtcatgcggtcgctgcgtatatgatgcgatgagtaaataaacaaatacgcaaggggaacgcatgaaggttatcgctgtacttaaccagaaaggcgggtcaggcaagacgaccatcgcaacccatctagcccgcgccctgcaactcgccggggccgatgttctgttagtcgattccgatccccagggcagtgcccgcgattgggcggccgtgcgggaagatcaaccgctaaccgttgtcggcatcgaccgcccgacgattgaccgcgacgtgaaggccatcggccggcgcgacttcgtagtgatcgacggagcgccccaggcggcggacttggctgtgtccgcgatcaaggcagccgacttcgtgctgattccggtgcagccaagcccttacgacatatgggccaccgccgacctggtggagctggttaagcagcgcattgaggtcacggatggaaggctacaagcggcctttgtcgtgtcgcgggcgatcaaaggcacgcgcatcggcggtgaggttgccgaggcgctggccgggtacgagctgcccattcttgagtcccgtatcacgcagcgcgtgagctacccaggcactgccgccgccggcacaaccgttcttgaatcagaacccgagggcgacgctgcccgcgaggtccaggcgctggccgctgaaattaaatcaaaactcatttgagttaatgaggtaaagagaaaatgagcaaaagcacaaacacgctaagtgccggccgtccgagcgcacgcagcagcaaggctgcaacgttggccagcctggcagacacgccagccatgaagcgggtcaactttcagttgccggcggaggatcacaccaagctgaagatgtacgcggtacgccaaggcaagaccattaccgagctgctatctgaatacatcgcgcagctaccagagtaaatgagcaaatgaataaatgagtagatgaattttagcggctaaaggaggcggcatggaaaatcaagaacaaccaggcaccgacgccgtggaatgccccatgtgtggaggaacgggcggttggccaggcgtaagcggctgggttgcctgccggccctgcaatggcactggaacccccaagcccgaggaatcggcgtgagcggtcgcaaaccatccggcccggtacaaatcggcgcggcgctgggtgatgacctggtggagaagttgaaggccgcgcaggccgcccagcggcaacgcatcgaggcagaagcacgccccggtgaatcgtggcaagcggccgctgatcgaatccgcaaagaatcccggcaaccgccggcagccggtgcgccgtcgattaggaagccgcccaagggcgacgagcaaccagattttttcgttccgatgctctatgacgtgggcacccgcgatagtcgcagcatcatggacgtggccgttttccgtctgtcgaagcgtgaccgacgagctggcgaggtgatccgctacgagcttccagacgggcacgtagaggtttccgcagggccggccggcatggccagtgtgtgggattacgacctggtactgatggcggtttcccatctaaccgaatccatgaaccgataccgggaagggaagggagacaagcccggccgcgtgttccgtccacacgttgcggacgtactcaagttctgccggcgagccgatggcggaaagcagaaagacgacctggtagaaacctgcattcggttaaacaccacgcacgttgccatgcagcgtacgaagaaggccaagaacggccgcctggtgacggtatccgagggtgaagccttgattagccgctacaagatcgtaaagagcgaaaccgggcggccggagtacatcgagatcgagctagctgattggatgtaccgcgagatcacagaaggcaagaacccggacgtgctgacggttcaccccgattactttttgatcgatcccggcatcggccgttttctctaccgcctggcacgccgcgccgcaggcaaggcagaagccagatggttgttcaagacgatctacgaacgcagtggcagcgccggagagttcaagaagttctgtttcaccgtgcgcaagctgatcgggtcaaatgacctgccggagtacgatttgaaggaggaggcggggcaggctggcccgatcctagtcatgcgctaccgcaacctgatcgagggcgaagcatccgccggttcctaatgtacggagcagatgctagggcaaattgccctagcaggggaaaaaggtcgaaaaggtctctttcctgtggatagcacgtacattgggaacccaaagccgtacattgggaaccggaacccgtacattgggaacccaaagccgtacattgggaaccggtcacacatgtaagtgactgatataaaagagaaaaaaggcgatttttccgcctaaaactctttaaaacttattaaaactcttaaaacccgcctggcctgtgcataactgtctggccagcgcacagccgaagagctgcaaaaagcgcctacccttcggtcgctgcgctccctacgccccgccgcttcgcgtcggcctatcgcggccgctggccgctcaaaaatggctggcctacggccaggcaatctaccagggcgcggacaagccgcgccgtcgccactcgaccgccggcgcccacatcaaggcaccctgcctcgcgcgtttcggtgatgacggtgaaaacctctgacacatgcagctcccggagacggtcacagcttgtctgtaagcggatgccgggagcagacaagcccgtcagggcgcgtcagcgggtgttggcgggtgtcggggcgcagccatgacccagtcacgtagcgatagcggagtgtatactggcttaactatgcggcatcagagcagattgtactgagagtgcaccatatgcggtgtgaaataccgcacagatgcgtaaggagaaaataccgcatcaggcgctcttccgcttcctcgctcactgactcgctgcgctcggtcgttcggctgcggcgagcggtatcagctcactcaaaggcggtaatacggttatccacagaatcaggggataacgcaggaaagaacatgtgagcaaaaggccagcaaaaggccaggaaccgtaaaaaggccgcgttgctggcgtttttccataggctccgcccccctgacgagcatcacaaaaatcgacgctcaagtcagaggtggcgaaacccgacaggactataaagataccaggcgtttccccctggaagctccctcgtgcgctctcctgttccgaccctgccgcttaccggatacctgtccgcctttctcccttcgggaagcgtggcgctttctcatagctcacgctgtaggtatctcagttcggtgtaggtcgttcgctccaagctgggctgtgtgcacgaaccccccgttcagcccgaccgctgcgccttatccggtaactatcgtcttgagtccaacccggtaagacacgacttatcgccactggcagcagccactggtaacaggattagcagagcgaggtatgtaggcggtgctacagagttcttgaagtggtggcctaactacggctacactagaaggacagtatttggtatctgcgctctgctgaagccagttaccttcggaaaaagagttggtagctcttgatccggcaaacaaaccaccgctggtagcggtggtttttttgtttgcaagcagcagattacgcgcagaaaaaaaggatctcaagaagatcctttgatcttttctacggggtctgacgctcagtggaacgaaaactcacgttaagggattttggtcatgcattctaggtactaaaacaattcatccagtaaaatataatattttattttctcccaatcaggcttgatccccagtaagtcaaaaaatagctcgacatactgttcttccccgatatcctccctgatcgaccggacgcagaaggcaatgtcataccacttgtccgccctgccgcttctcccaagatcaataaagccacttactttgccatctttcacaaagatgttgctgtctcccaggtcgccgtgggaaaagacaagttcctcttcgggcttttccgtctttaaaaaatcatacagctcgcgcggatctttaaatggagtgtcttcttcccagttttcgcaatccacatcggccagatcgttattcagtaagtaatccaattcggctaagcggctgtctaagctattcgtatagggacaatccgatatgtcgatggagtgaaagagcctgatgcactccgcatacagctcgataatcttttcagggctttgttcatcttcatactcttccgagcaaaggacgccatcggcctcactcatgagcagattgctccagccatcatgccgttcaaagtgcaggacctttggaacaggcagctttccttccagccatagcatcatgtccttttcccgttccacatcataggtggtccctttataccggctgtccgtcatttttaaatataggttttcattttctcccaccagcttatataccttagcaggagacattccttccgtatcttttacgcagcggtatttttcgatcagttttttcaattccggtgatattctcattttagccatttattatttccttcctcttttctacagtatttaaagataccccaagaagctaattataacaagacgaactccaattcactgttccttgcattctaaaaccttaaataccagaaaacagctttttcaaagttgttttcaaagttggcgtataacatagtatcgacggagccgattttgaaaccgcggtgatcacaggcagcaacgctctgtcatcgttacaatcaacatgctaccctccgcgagatcatccgtgtttcaaacccggcagcttagttgccgttcttccgaatagcatcggtaacatgagcaaagtctgccgccttacaacggctctcccgctgacgccgtcccggactgatgggctgcctgtatcgagtggtgattttgtgccgagctgccggtcggggagctgttggctggctggtggcaggatatattgtggtgtaaacaaattgacgcttagacaacttaataacacattgcggacgtttttaatgtactgaattaacgccgaattaa

SEQ ID NO: 55 - protein, 33 aa, Artificial; identical to SEQ ID NO: 45
  Synthetic Construct

SEQ ID NO: 56 - DNA, 9043 bp, Artificial
  plasmid VC-MME489-1QCZ
agctttgggcggatcctctagaggacaatcagtaaattgaacggagaatattattcataaaaatacgatagtaacgggtgatatattcattagaatgaaccgaaaccggcggtaaggatctgagctacacatgctcaggttttttacaacgtgcacaacagaattgaaagcaaatatcatgcgatcataggcgtctcgcatatctcattaaagcagggcatgccggtcgagtcaaatctcggtgacgggcaggaccggacggggcggtaccggcaggctgaagtccagctgccagaaacccacgtcatgccagttcccgtgcttgaagccggccgcccgcagcatgccgcggggggcatatccgagcgcctcgtgcatgcgcacgctcgggtcgttgggcagcccgatgacagcgaccacgctcttgaagccctgtgcctccagggacttcagcaggtgggtgtagagcgtggagcccagtcccgtccgctggtggcggggggagacgtacacggtcgactcggccgtccagtcgtaggcgttgcgtgccttccaggggcccgcgtaggcgatgccggcgacctcgccgtccacctcggcgacgagccagggatagcgctcccgcagacggacgaggtcgtccgtccactcctgcggttcctgcggctcggtacggaagttgaccgtgcttgtctcgatgtagtggttgacgatggtgcagaccgccggcatgtccgcctcggtggcacggcggatgtcggccgggcgtcgttctgggctcatggtagactcgacggatccacgtgtggaagatatgaatttttttgagaaactagataagattaatgaatatcggtgttttggttttttcttgtggccgtctttgtttatattgagatttttcaaatcagtgcgcaagacgtgacgtaagtatccgagtcagtttttatttttctactaatttggtcgaatctagattcgacggtatcgataagctcgcggatccctgaaagcgacgttggatgttaacatctacaaattgccttttcttatcgaccatgtacgtaagcgcttacgtttttggtggacccttgaggaaactggtagctgttgtgggcctgtggtctcaagatggatcattaatttccaccttcacctacgatggggggcatcgcaccggtgagtaatattgtacggctaagagcgaatttggcctgtaggatccctgaaagcgacgttggatgttaacatctacaaattgccttttcttatcgaccatgtacgtaagcgcttacgtttttggtggacccttgaggaaactggtagctgttgtgggcctgtggtctcaagatggatcattaatttccaccttcacctacgatggggggcatcgcaccggtgagtaatattgtacggctaagagcgaatttggcctgtaggatccctgaaagcgacgttggatgttaacatctacaaattgccttttcttatcgaccatgtacgtaagcgcttacgtttttggtggacccttgaggaaactggtagctgttgtgggcctgtggtctcaagatggatcattaatttccaccttcacctacgatggggggcatcgcaccggtgagtaatattgtacggctaagagcgaatttggcctgtaggatccgcgagctggtcaatcccattgcttttgaagcagctcaacattgatctctttctcgatcgagggagatttttcaaatcagtgcgcaagacgtgacgtaagtatccgagtcagtttttatttttctactaatttggtcgtttatttcggcgtgtaggacatggcaaccgggcctgaatttcgcgggtattctgtttctattccaactttttcttgatccgcagccattaacgacttttgaatagatacgctgacacgccaagcctcgctagtcaaaagtgtaccaaacaacgctttacagcaagaacggaatgcgcgtgacgctcgcggtgacgccatttcgccttttcagaaatggataaatagccttgcttcctattatatcttcccaaattaccaatacattacactagcatctgaatttcataaccaatctcgatacaccaaatcgaagatctccctggaattccagctgaccaccatggcaattcccggggatcagctcgaatttccccgatcgttcaaacatttggcaataaagtttcttaagattgaatcctgttgccggtcttgcgatgattatcatataatttctgttgaattacgttaagcatgtaataattaacatgtaatgcatgacgttatttatgagatgggtttttatgattagagtcccgcaattatacatttaatacgcgatagaaaacaaaatatagcgcgcaaactaggataaattatcgcgcgcggtgtcatctatgttactagatcgggaattggcatgcaagcttggcactggccgtcgttttacaacgtcgtgactgggaaaaccctggcgttacccaacttaatcgccttgcagcacatccccctttcgccagctggcgtaatagcgaagaggcccgcaccgatcgcccttcccaacagttgcgcagcctgaatggcgaatgctagagcagcttgagcttggatcagattgtcgtttcccgccttcagtttaaactatcagtgtttgacaggatatattggcgggtaaacctaagagaaaagagcgtttattagaataatcggatatttaaaagggcgtgaaaaggtttatccgttcgtccatttgtatgtgcatgccaaccacagggttcccctcgggatcaaagtactttgatccaacccctccgctgctatagtgcagtcggcttctgacgttcagtgcagccgtcttctgaaaacgacatgtcgcacaagtcctaagttacgcgacaggctgccgccctgcccttttcctggcgttttcttgtcgcgtgttttagtcgcataaagtagaatacttgcgactagaaccggagacattacgccatgaacaagagcgccgccgctggcctgctgggctatgcccgcgtcagcaccgacgaccaggacttgaccaaccaacgggccgaactgcacgcggccggctgcaccaagctgttttccgagaagatcaccggcaccaggcgcgaccgcccggagctggccaggatgcttgaccacctacgccctggcgacgttgtgacagtgaccaggctagaccgcctggcccgcagcacccgcgacctactggacattgccgagcgcatccaggaggccggcgcgggcctgcgtagcctggcagagccgtgggccgacaccaccacgccggccggccgcatggtgttgaccgtgttcgccggcattgccgagttcgagcgttccctaatcatcgaccgcacccggagcgggcgcgaggccgccaaggcccgaggcgtgaagtttggcccccgccctaccctcaccccggcacagatcgcgcacgcccgcgagctgatcgaccaggaaggccgcaccgtgaaagaggcggctgcactgcttggcgtgcatcgctcgaccctgtaccgcgcacttgagcgcagcgaggaagtgacgcccaccgaggccaggcggcgcggtgccttccgtgaggacgcattgaccgaggccgacgccctggcggccgccgagaatgaacgccaagaggaacaagcatgaaaccgcaccaggacggccaggacgaaccgtttttcattaccgaagagatcgaggcggagatgatcgcggccgggtacgtgttcgagccgcccgcgcacgtctcaaccgtgcggctgcatgaaatcctggccggtttgtctgatgccaagctggcggcctggccggccagcttggccgctgaagaaaccgagcgccgccgtctaaaaaggtgatgtgtatttgagtaaaacagcttgcgtcatgcggtcgctgcgtatatgatgcgatgagtaaataaacaaatacgcaaggggaacgcatgaaggttatcgctgtacttaaccagaaaggcgggtcaggcaagacgaccatcgcaacccatctagcccgcgccctgcaactcgccggggccgatgttctgttagtcgattccgatccccagggcagtgcccgcgattgggcggccgtgcgggaagatcaaccgctaaccgttgtcggcatcgaccgcccgacgattgaccgcgacgtgaaggccatcggccggcgcgacttcgtagtgatcgacggagcgccccaggcggcggacttggctgtgtccgcgatcaaggcagccgacttcgtgctgattccggtgcagccaagcccttacgacatatgggccaccgccgacctggtggagctggttaagcagcgcattgaggtcacggatggaaggctacaagcggcctttgtcgtgtcgcgggcgatcaaaggcacgcgcatcggcggtgaggttgccgaggcgctggccgggtacgagctgcccattcttgagtcccgtatcacgcagcgcgtgagctacccaggcactgccgccgccggcacaaccgttcttgaatcagaacccgagggcgacgctgcccgcgaggtccaggcgctggccgctgaaattaaatcaaaactcatttgagttaatgaggtaaagagaaaatgagcaaaagcacaaacacgctaagtgccggccgtccgagcgcacgcagcagcaaggctgcaacgttggccagcctggcagacacgccagccatgaagcgggtcaactttcagttgccggcggaggatcacaccaagctgaagatgtacgcggtacgccaaggcaagaccattaccgagctgctatctgaatacatcgcgcagctaccagagtaaatgagcaaatgaataaatgagtagatgaattttagcggctaaaggaggcggcatggaaaatcaagaacaaccaggcaccgacgccgtggaatgccccatgtgtggaggaacgggcggttggccaggcgtaagcggctgggttgtctgccggccctgcaatggcactggaacccccaagcccgaggaatcggcgtgacggtcgcaaaccatccggcccggtacaaatcggcgcggcgctgggtgatgacctggtggagaagttgaaggccgcgcaggccgcccagcggcaacgcatcgaggcagaagcacgccccggtgaatcgtggcaagcggccgctgatcgaatccgcaaagaatcccggcaaccgccggcagccggtgcgccgtcgattaggaagccgcccaagggcgacgagcaaccagattttttcgttccgatgctctatgacgtgggcacccgcgatagtcgcagcatcatggacgtggccgttttccgtctgtcgaagcgtgaccgacgagctggcgaggtgatccgctacgagcttccagacgggcacgtagaggtttccgcagggccggccggcatggccagtgtgtgggattacgacctggtactgatggcggtttcccatctaaccgaatccatgaaccgataccgggaagggaagggagacaagcccggccgcgtgttccgtccacacgttgcggacgtactcaagttctgccggcgagccgatggcggaaagcagaaagacgacctggtagaaacctgcattcggttaaacaccacgcacgttgccatgcagcgtacgaagaaggccaagaacggccgcctggtgacggtatccgagggtgaagccttgattagccgctacaagatcgtaaagagcgaaaccgggcggccggagtacatcgagatcgagctagctgattggatgtaccgcgagatcacagaaggcaagaacccggacgtgctgacggttcaccccgattactttttgatcgatcccggcatcggccgttttctctaccgcctggcacgccgcgccgcaggcaaggcagaagccagatggttgttcaagacgatctacgaacgcagtggcagcgccggagagttcaagaagttctgtttcaccgtgcgcaagctgatcgggtcaaatgacctgccggagtacgatttgaaggaggaggcggggcaggctggcccgatcctagtcatgcgctaccgcaacctgatcgagggcgaagcatccgccggttcctaatgtacggagcagatgctagggcaaattgccctagcaggggaaaaaggtcgaaaaggtctctttcctgtggatagcacgtacattgggaacccaaagccgtacattgggaaccggaacccgtacattgggaacccaaagccgtacattgggaaccggtcacacatgtaagtgactgatataaaagagaaaaaaggcgatttttccgcctaaaactctttaaaacttattaaaactcttaaaacccgcctggcctgtgcataactgtctggccagcgcacagccgaagagctgcaaaaagcgcctacccttcggtcgctgcgctccctacgccccgccgcttcgcgtcggcctatcgcggccgctggccgctcaaaaatggctggcctacggccaggcaatctaccagggcgcggacaagccgcgccgtcgccactcgaccgccggcgcccacatcaaggcaccctgcctcgcgcgtttcggtgatgacggtgaaaacctctgacacatgcagctcccggagacggtcacagcttgtctgtaagcggatgccgggagcagacaagcccgtcagggcgcgtcagcgggtgttggcgggtgtcggggcgcagccatgacccagtcacgtagcgatagcggagtgtatactggcttaactatgcggcatcagagcagattgtactgagagtgcaccatatgcggtgtgaaataccgcacagatgcgtaaggagaaaataccgcatcaggcgctcttccgcttcctcgctcactgactcgctgcgctcggtcgttcggctgcggcgagcggtatcagctcactcaaaggcggtaatacggttatccacagaatcaggggataacgcaggaaagaacatgtgagcaaaaggccagcaaaaggccaggaaccgtaaaaaggccgcgttgctggcgtttttccataggctccgcccccctgacgagcatcacaaaaatcgacgctcaagtcagaggtggcgaaacccgacaggactataaagataccaggcgtttccccctggaagctccctcgtgcgctctcctgttccgaccctgccgcttaccggatacctgtccgcctttctcccttcgggaagcgtggcgctttctcatagctcacgctgtaggtatctcagttcggtgtaggtcgttcgctccaagctgggctgtgtgcacgaaccccccgttcagcccgaccgctgcgccttatccggtaactatcgtcttgagtccaacccggtaagacacgacttatcgccactggcagcagccactggtaacaggattagcagagcgaggtatgtaggcggtgctacagagttcttgaagtggtggcctaactacggctacactagaaggacagtatttggtatctgcgctctgctgaagccagttaccttcggaaaaagagttggtagctcttgatccggcaaacaaaccaccgctggtagcggtggtttttttgtttgcaagcagcagattacgcgcagaaaaaaaggatctcaagaagatcctttgatcttttctacggggtctgacgctcagtggaacgaaaactcacgttaagggattttggtcatgcattctaggtactaaaacaattcatccagtaaaatataatattttattttctcccaatcaggcttgatccccagtaagtcaaaaaatagctcgacatactgttcttccccgatatcctccctgatcgaccggacgcagaaggcaatgtcataccacttgtccgccctgccgcttctcccaagatcaataaagccacttactttgccatctttcacaaagatgttgctgtctcccaggtcgccgtgggaaaagacaagttcctcttcgggcttttccgtctttaaaaaatcatacagctcgcgcggatctttaaatggagtgtcttcttcccagttttcgcaatccacatcggccagatcgttattcagtaagtaatccaattcggctaagcggctgtctaagctattcgtatagggacaatccgatatgtcgatggagtgaaagagcctgatgcactccgcatacagctcgataatcttttcagggctttgttcatcttcatactcttccgagcaaaggacgccatcggcctcactcatgagcagattgctccagccatcatgccgttcaaagtgcaggacctttggaacaggcagctttccttccagccatagcatcatgtccttttcccgttccacatcataggtggtccctttataccggctgtccgtcatttttaaatataggttttcattttctcccaccagcttatataccttagcaggagacattccttccgtatcttttacgcagcggtatttttcgatcagttttttcaattccggtgatattctcattttagccatttattatttccttcctcttttctacagtatttaaagataccccaagaagctaattataacaagacgaactccaattcactgttccttgcattctaaaaccttaaataccagaaaacagctttttcaaagttgttttcaaagttggcgtataacatagtatcgacggagccgattttgaaaccgcggtgatcacaggcagcaacgctctgtcatcgttacaatcaacatgctaccctccgcgagatcatccgtgtttcaaacccggcagcttagttgccgttcttccgaatagcatcggtaacatgagcaaagtctgccgccttacaacggctctcccgctgacgccgtcccggactgatgggctgcctgtatcgagtggtgattttgtgccgagctgccggtcggggagctgttggctggctggtggcaggatatattgtggtgtaaacaaattgacgcttagacaacttaataacacattgcggacgtttttaatgtactgaattaacgccgaatta

SEQ ID NO: 57 - DNA, 29 bp, Artificial
  amplification of the targeting sequence of the gene IVD from Arabidopsis thaliana to generate targeting vectors
atagaattcatgcagaggtttttctccgc

SEQ ID NO: 58 - DNA, 29 bp, Artificial
  amplification of the targeting sequence of the gene IVD from Arabidopsis thaliana to generate targeting vectors
atagaattccgaagaacgagaagagaaag

SEQ ID NO: 59 - DNA, 31 bp, Artificial
  amplification of the targeting sequence of the gene IVD from Arabidopsis thaliana to generate targeting vectors
atagtttaaacatgcagaggtttttctccgc

SEQ ID NO: 60 - DNA, 36 bp, Artificial
  amplification of the targeting sequence of the gene IVD from Arabidopsis thaliana to generate targeting vectors
ataccatggaagagcaaaggagagacgaagaacgag

SEQ ID NO: 61 - DNA, 81 bp, Arabidopsis thaliana
atgcagaggtttttctccgccagatcgattctcggttacgccgtcaagacgcggaggaggtctttctcttctcgttcttcg

SEQ ID NO: 62 - DNA, 89 bp, Arabidopsis thaliana
atgcagaggtttttctccgccagatcgattctcggttacgccgtcaagacgcggaggaggtctttctcttctcgttcttcgtctctcct

SEQ ID NO: 63 - DNA, 891 bp, Escherichia coli
  CDS (1)..(891): transl_table=11
atgcgtaagttcattttcgtattgctgacactgcttttggtcagccctttttcctttgcgatgaaaggtattatctggcaaccacaaaaccgagatagtcaggttaccgatacccagtggcaggggctgatgagtcagttacgtttgcaaggcttcgatacccttgttttgcaatggacccgttacggcgatgcatttacccagccagaacagcgcacgttattgtttaagcgggccgcagctgcgcaacaggctggtctgaagcttattgtcgggctgaacgccgatccggaattttttatgcaccagaaacagtcgtccgcagcgctggaaagctatcttaatcgcctgctggctgccgatctccagcaagccagattatggagcgccgcgcctggcataacgccggatggctggtacatcagcgcggaaattgacgacctgaactggcgcagcgaagccgcccgtcagcctttgctaacatggttaaacaacgcgcagcggctgattagcgatgtttcagcaaaaccggtttatatcagtagttttttcgccggaaacatgtcgcccgatggctatcgccaactgctggaacacgttaaagcaaccggcgttaatgtctgggtacaggatggcagcggcgtggataaactgaccgctgaacagcgtgaacgttatttacaggccagcgccgattgccaaagtcccgcccctgccagcggcgttgtttatgaactttttgtcgccggcaaaggcaaaacctttacagcgaaaccgaaaccggacgcagaaattgcctcgctgttagcgaaacgttcctcttgcggtaaagacactctctatttctctctgcgctatttgcccgtcgcgcacggcattctcgagtattaa

SEQ ID NO: 64 - protein, 296 aa, Escherichia coli
MRKFIFVLLTLLLVSPFSFAMKGIIWQPQNRDSQVTDTQWQGLMSQLRLQGFDTLVLQWTRYGDAFTQPEQRTLLFKRAAAAQQAGLKLIVGLNADPEFFMHQKQSSAALESYLNRLLAADLQQARLWSAAPGITPDGWYISAEIDDLNWRSEAARQPLLTWLNNAQRLISDVSAKPVYISSFFAGNMSPDGYRQLLEHVKATGVNVWVQDGSGVDKLTAEQRERYLQASADCQSPAPASGVVYELFVAGKGKTFTAKPKPDAEIASLLAKRSSCGKDTLYFSLRYLPVAHGILEY

SEQ ID NO: 65 - DNA, 891 bp, Shigella flexneri 2a str. 301
  CDS (1)..(891): transl_table=11
atgcgtaagttcattttcgtattgctgacactgcttttggtcagccctttttcctttgcgatgaaaggtattatctggcaaccacaaaaccgagatagtcaggttaccgatacccagtggcaggggctgatgagtcagttacgttttcaaggcttcgataccctggttttgcaatggacccgttacggcgatgcatttacccagccagaacagcgcacgttattgtttaagcgtgccgcagctgcgcaacagactggcctgaagctgattgtcgggctgaacgccgatccggaattttttatgcaccagaaacagtcgcctgcagcgctggaaagctatcttaatcgcctgctggctgccgatctccagcaagccagattatggagcgccgcgcctggcataacgccggatggctggtacatcagcgcggaaattgacgacctgaactggcgcagcgaagccgcccgtcaacctttgctaacatggttaaacaacgcgcagcggctgattagcgatgtttcagcaaaaccggtttatatcagtagttttttcgccggaaacatgtcgcccgatggctatcgccaactgctggaacaagttaaagcaaccggagttaatgtctgggtacaggatggcagcggcgtggataaacttaccgctgaacagcgtgaacgttatctacaggccagcgccgattgccaaagctccgccccagcaagcggcattgtttatgaactgtttgtcgccggcaaaggcaaaacctttacagcgaaaccgaaaccggacgcagaaattgcctcgctgttagcgaaacgttcctcttgcggtaaagacatgctctatttctctctgcgctatttgcccgtcgcgcacggcattctcgagtattaa

SEQ ID NO: 66 - protein, 296 aa, Shigella flexneri 2a str. 301
MRKFIFVLLTLLLVSPFSFAMKGIIWQPQNRDSQVTDTQWQGLMSQLRFQGFDTLVLQWTRYGDAFTQPEQRTLLFKRAAAAQQTGLKLIVGLNADPEFFMHQKQSPAALESYLNRLLAADLQQARLWSAAPGITPDGWYISAEIDDLNWRSEAARQPLLTWLNNAQRLISDVSAKPVYISSFFAGNMSPDGYRQLLEQVKATGVNVWVQDGSGVDKLTAEQRERYLQASADCQSSAPASGIVYELFVAGKGKTFTAKPKPDAEIASLLAKRSSCGKDMLYFSLRYLPVAHGILEY

SEQ ID NO: 67 - DNA, 840 bp, Pseudomonas putida KT2440
  CDS (1)..(840): transl_table=11
atgcgtacgctcatcgccttctgcctgctggccctgtgcctaccggccaccgctgaccagcgcctgttctaccaacccctcaaccgcgatgccagcgtcacacccgcccagtggcagcaactgtggcaagccaccgcggcccaaggtggcaaaaccctgatcgtgcaatggagtgcctatggcgacagcgatttcggcggtgcccagggctggctggccaacagcctgcgcaccgcgcgtgccgagggcttgcagctggtgctggggctgtacatggacccggcctactaccagcgcctcgacgagctggatggcgagggcctgaacagctactggaaagcgcagctggggcgctcgctcagccagtaccagcaactgcgccaggcctggcagttgccagtggacggctggtacctgcccatggagctggacgaccagcatctgcgcgagaccgaacggcgcgatgcgctgtacagccagttgcaggccttcaaccgccagttggacaagccgttgcatatcagcgccttcagcacaggcaagctgacgccgcgggtcaatgccgtctggctggatcaactggccggcttgggcttgactgtgtggtggcaggatggcgccggcaccgggcgtttgccggcgttggtgcgtcagggttacgagcaggcgttgccgtgccgggtgggtgtggtgcgcgaggcgttccgccaggtgagcgcgccggagcaggcgtttcgggcggagcccgccgagcccagggtgggtagcgggtgccatgccgaggcagtgtttgccttgcgctaccggccctgggcccggggtatcttgccacagcaatga

SEQ ID NO: 68 - protein, 279 aa, Pseudomonas putida KT2440
MRTLIAFCLLALCLPATADQRLFYQPLNRDASVTPAQWQQLWQATAAQGGKTLIVQWSAYGDSDFGGAQGWLANSLRTARAEGLQLVLGLYMDPAYYQRLDELDGEGLNSYWKAQLGRSLSQYQQLRQAWQLPVDGWYLPMELDDQHLRETERRDALYSQLQAFNRQLDKPLHISAFSTGKLTPRVNAVWLDQLAGLGLTVWWQDGAGTGRLPALVRQGYEQALPCRVGVVREAFRQVSAPEQAFRAEPAEPRVGSGCHAEAVFALRYRPWARGILPQQ

SEQ ID NO: 69 - DNA, 891 bp, Escherichia coli CFT073
  CDS (1)..(891): transl_table=11
atgcgtaagttcattttcgtattgttgacactgcttttggtcagccctttttcctttgcgatgaaaggtattatctggcaaccacaaaaccgtgatagtcaggttaccgatacccagtggcaggggctgatgagtcagttacgtttgcaaggcttcgataccctggttttgcaatggacccgttacggcgatgcattcacccagccagaacagcgcgcgttattgtttaagcgtgctacagctgcgcaacaggctggcctgaagctgattgtcgggctgaacgccgatccggaattttttatgcaccagaaacagtcgtccgcagcgctggaaagctatcttaatcgcctgctggctgccgatctccagcaagccagattatggagcgccgtgcctggcgtaacgccggatggctggtacatcagcgcggaaattgacgacctgaactggcgcagcgaagccgcccgtcagcctttgctaacatggttaaacaacgcgcagcggttgattagcgatgtttcagcaaaaccggtttatatcagtagttttttcgccggaaacatgtcgccagatggctatcgccaactgctggaacaagttaaagcaaccggtgttaatgtctgggtacaggatggcagcggcgtggataaactgaccgctgaacagcgtgaacgttatctacaggccagcgccgattgccaaagttccgccccagcaagcggcattgtttatgaactgtttgtcgctggtaaaggtaaaacgtttacagcgaaaccgaaaccgaacgcagaaattgcctcgctgttagcgaaacgttcctcttgcggtaaagacacgctctatttctctctgcgctatttgcccgccgcgcagagtatccttgagtattaa

SEQ ID NO: 70 - protein, 296 aa, Escherichia coli CFT073
MRKFIFVLLTLLLVSPFSFAMKGIIWQPQNRDSQVTDTQWQGLMSQLRLQGFDTLVLQWTRYGDAFTQPEQRALLFKRATAAQQAGLKLIVGLNADPEFFMHQKQSSAALESYLNRLLAADLQQARLWSAVPGVTPDGWYISAEIDDLNWRSEAARQPLLTWLNNAQRLISDVSAKPVYISSFFAGNMSPDGYRQLLEQVKATGVNVWVQDGSGVDKLTAEQRERYLQASADCQSSAPASGIVYELFVAGKGKTFTAKPKPNAEIASLLAKRSSCGKDTLYFSLRYLPAAQSILEY

SEQ ID NO: 71 - DNA, 840 bp, Pseudomonas putida GB-1
  CDS (1)..(840): transl_table=11
atgcgtacgatcatcgcctattgcctgctggtcctgtgcctacaggcctccgccgaccagcgcctgttctaccaaccgctgaaccgtgatgccagcgtcacccccgcccaatggcagcaactgtggcatgccaccgctgcccaaggtggcaacaccctgatcgtgcaatggagcgcctatggcgacagcgatttcggtggcgcccagggctggctggccaacagcctgcgcacggcgcgtgccgagggcctgcagctggttatggggctgtacatggacccggcctattaccagcgcctcgagcaactggatggcgagggcctgaacagctactggaaggcgcaattgggccgttcgctcagccagtaccaacaccttcgtcaggtgtggcagttgccggtggatggctggtacctgcccatggaactggacgaccagcattttcgtgatgccgaacgacgcgatgcgctctacagccaactgcaggcgttcaaccgccagctggacaaaccgttgcacatcagtgcattcagtgctggcaagctgtcgccgcgcgtccatgccagctggctggatcaactggtcgggttgggcttgaccgtgtggtggcaggatggcgccggtacagagcgtttgccgccgttggtgcgccagagctacgagcaggccttgccatgccgggtaggcgtggtgcgcgaggcgttccgccaggtgagcgcgcctgggcagccattcagggccgaacctgccgagcccaagctgggcagcgggtgccatgccgaggcggtgtttgccttgcgctaccggccttgggccacaggtgtcttgccacaaaattga

SEQ ID NO: 72 - protein, 279 aa, Pseudomonas putida GB-1
MRTIIAYCLLVLCLQASADQRLFYQPLNRDASVTPAQWQQLWHATAAQGGNTLIVQWSAYGDSDFGGAQGWLANSLRTARAEGLQLVMGLYMDPAYYQRLEQLDGEGLNSYWKAQLGRSLSQYQHLRQVWQLPVDGWYLPMELDDQHFRDAERRDALYSQLQAFNRQLDKPLHISAFSAGKLSPRVHASWLDQLVGLGLTVWWQDGAGTERLPPLVRQSYEQALPCRVGVVREAFRQVSAPGQPFRAEPAEPKLGSGCHAEAVFALRYRPWATGVLPQN

SEQ ID NO: 73 - DNA, 25 bp, Artificial sequence
  primer
atgcgtaagttcattttcgtattgc

SEQ ID NO: 74 - DNA, 23 bp, Artificial sequence
  primer
ttaatactcgagaatgccgtgcg

SEQ ID NO: 75 - protein, 295 aa, Artificial sequence
  consensus sequence
  Variant (3)..(4): Xaa in position 3 to 4 is any amino acid
  Variant (6)..(8): Xaa in position 6 to 8 is any amino acid
  Variant (10)..(11): Xaa in position 10 to 11 is any amino acid
  Variant (13)..(17): Xaa in position 13 to 17 is any amino acid
  Variant (18)..(19): Xaa in position 18 to 19 is any or no amino acid
  Variant (21)..(26): Xaa in position 21 to 26 is any amino acid
  Variant (29)..(29): Xaa in position 29 is any amino acid
  Variant (33)..(34): Xaa in position 33 to 34 is any amino acid
  Variant (37)..(38): Xaa in position 37 to 38 is any amino acid
  Variant (42)..(42): Xaa in position 42 is any amino acid
  Variant (44)..(49): Xaa in position 44 to 49 is any amino acid
  Variant (52)..(53): Xaa in position 52 to 53 is any amino acid
  Variant (56)..(57): Xaa in position 56 to 57 is any amino acid
  Variant (60)..(61): Xaa in position 60 to 61 is any amino acid
  Variant (65)..(73): Xaa in position 65 to 73 is any amino acid
  Variant (74)..(74): Xaa in position 74 is any or no amino acid
  Variant (76)..(81): Xaa in position 76 to 81 is any amino acid
  Variant (83)..(85): Xaa in position 83 to 85 is any amino acid
  Variant (88)..(88): Xaa in position 88 is any amino acid
  Variant (90)..(91): Xaa in position 90 to 91 is any amino acid
  Variant (94)..(95): Xaa in position 94 to 95 is any amino acid
  Variant (98)..(104): Xaa in position 98 to 104 is any amino acid
  Variant (106)..(109): Xaa in position 106 to 109 is any amino acid
  Variant (110)..(110): Xaa in position 110 is any or no amino acid
  Variant (112)..(112): Xaa in position 112 is any amino acid
  Variant (115)..(118): Xaa in position 115 to 118 is any amino acid
  Variant (120)..(122): Xaa in position 120 to 122 is any amino acid
  Variant (124)..(124): Xaa in position 124 is any amino acid
  Variant (126)..(137): Xaa in position 126 to 137 is any amino acid
  Variant (142)..(144): Xaa in position 142 to 144 is any amino acid
  Variant (146)..(146): Xaa in position 146 is any amino acid
  Variant (149)..(151): Xaa in position 149 to 151 is any amino acid
  Variant (153)..(156): Xaa in position 153 to 156 is any amino acid
  Variant (158)..(159): Xaa in position 158 to 159 is any amino acid
  Variant (161)..(163): Xaa in position 161 to 163 is any amino acid
  Variant (165)..(168): Xaa in position 165 to 168 is any amino acid
  Variant (170)..(172): Xaa in position 170 to 172 is any amino acid
  Variant (173)..(176): Xaa in position 173 to 176 is any or no amino acid
  Variant (179)..(180): Xaa in position 179 to 180 is any amino acid
  Variant (183)..(183): Xaa in position 183 is any amino acid
  Variant (185)..(185): Xaa in position 185 is any amino acid
  Variant (188)..(189): Xaa in position 188 to 189 is any amino acid
  Variant (192)..(197): Xaa in position 192 to 197 is any amino acid
  Variant (199)..(199): Xaa in position 199 is any amino acid
  Variant (201)..(204): Xaa in position 201 to 204 is any amino acid
  Variant (206)..(207): Xaa in position 206 to 207 is any amino acid
  Variant (210)..(210): Xaa in position 210 is any amino acid
  Variant (214)..(214): Xaa in position 214 is any amino acid
  Variant (216)..(218): Xaa in position 216 to 218 is any amino acid
  Variant (220)..(220): Xaa in position 220 is any amino acid
  Variant (222)..(223): Xaa in position 222 to 223 is any amino acid
  Variant (225)..(226): Xaa in position 225 to 226 is any amino acid
  Variant (228)..(228): Xaa in position 228 is any amino acid
  Variant (231)..(235): Xaa in position 231 to 235 is any amino acid
  Variant (236)..(241): Xaa in position 236 to 241 is any or no amino acid
  Variant (243)..(243): Xaa in position 243 is any amino acid
  Variant (245)..(245): Xaa in position 245 is any amino acid
  Variant (247)..(247): Xaa in position 247 is any amino acid
  Variant (249)..(261): Xaa in position 249 to 261 is any amino acid
  Variant (263)..(265): Xaa in position 263 to 265 is any amino acid
  Variant (266)..(271): Xaa in position 266 to 271 is any or no amino acid
  Variant (273)..(274): Xaa in position 273 to 274 is any amino acid
  Variant (276)..(282): Xaa in position 276 to 282 is any amino acid
  Variant (284)..(284): Xaa in position 284 is any amino acid
  Variant (288)..(288): Xaa in position 288 is any amino acid
  Variant (290)..(290): Xaa in position 290 is any amino acid
  Variant (292)..(292): Xaa in position 292 is any amino acid
MRXXIXXXLXXLXXXXXXXAXXXXXXQPXNRDXXVTXXQWQXLXXXXXXQGXXTLXXQWXXYGDXXXXXXXXXXLXXXXXXAXXXGLXLXXGLXXDPXXXXXXXQXXXXXLXSYXXXXLXXXLXQXXXXXXXXXXXXDGWYXXXEXDDXXXRXXXXRXXLXXXLXXXXRXXXXXXXKPXXISXFXAGXXSPXXXXXXLXQXXXXGXXVWXQDGXGXXXLXAXXRXXYXQAXXXXXXXXXXXGXVXEXFXXXXXXXXXXXXXPXXXXXXXXXKXXSXXXXXXXFXLRYXPXAXGIL

SEQ ID NO: 76 - protein, 59 aa, Artificial sequence
  protein pattern
  Variant (3)..(3): Xaa in position 3 is Leu or Val
  Variant (4)..(4): Xaa in position 4 is His or Tyr
  Variant (7)..(8): Xaa in position 7 to 8 is any or no amino acid
  Variant (10)..(11): Xaa in position 10 to 11 is any or no amino acid
  Variant (14)..(14): Xaa in position 14 is any amino acid
  Variant (15)..(15): Xaa in position 15 is Leu or Met
  Variant (18)..(18): Xaa in position 18 is Asp or Arg
  Variant (19)..(19): Xaa in position 19 is Gly or Val
  Variant (20)..(20): Xaa in position 20 is His or Tyr
  Variant (21)..(21): Xaa in position 21 is any amino acid
  Variant (22)..(22): Xaa in position 22 is Gln or Ser
  Variant (23)..(23): Xaa in position 23 is any amino acid
  Variant (25)..(25): Xaa in position 25 is Asp or Glu
  Variant (26)..(26): Xaa in position 26 is any amino acid
  Variant (27)..(27): Xaa in position 27 is Leu or Val
  Variant (28)..(28): Xaa in position 28 is any amino acid
  Variant (29)..(29): Xaa in position 29 is Ala or Gly
  Variant (30)..(30): Xaa in position 30 is any amino acid
  Variant (32)..(32): Xaa in position 32 is Leu or Val
  Variant (33)..(33): Xaa in position 33 is Asn or Thr
  Variant (36)..(36): Xaa in position 36 is any amino acid
  Variant (40)..(40): Xaa in position 40 is Ala or Ser
  Variant (42)..(42): Xaa in position 42 is Thr or Val
  Variant (43)..(43): Xaa in position 43 is Asp or Glu
  Variant (44)..(44): Xaa in position 44 is Lys or Arg
  Variant (46)..(46): Xaa in position 46 is Pro or Thr
  Variant (47)..(47): Xaa in position 47 is Ala or Pro
  Variant (48)..(49): Xaa in position 48 to 49 is any amino acid
  Variant (51)..(51): Xaa in position 51 is Glu or Gln
  Variant (52)..(52): Xaa in position 52 is Arg or Ser
  Variant (54)..(54): Xaa in position 54 is any amino acid
  Variant (57)..(57): Xaa in position 57 is any amino acid
  Variant (58)..(58): Xaa in position 58 is Ala or Pro
  Variant (59)..(59): Xaa in position 59 is Cys or Asp
KPXXISXXSXXAGXXSPXXXXXXLXXXXXXGXXVWXQDGXGXXXLXXXXRXXYXQAXXX

SEQ ID NO: 77 - protein, 53 aa, Artificial sequence
  protein pattern
  Variant (2)..(7): Xaa in position 2 to 7 is any amino acid
  Variant (10)..(10): Xaa in position 10 is any amino acid
  Variant (14)..(14): Xaa in position 14 is any or no amino acid
  Variant (16)..(16): Xaa in position 16 is any or no amino acid
  Variant (19)..(19): Xaa in position 19 is Asp or Pro
  Variant (20)..(20): Xaa in position 20 is Ala or Thr
  Variant (24)..(24): Xaa in position 24 is Gly or Gln
  Variant (26)..(26): Xaa in position 26 is any amino acid
  Variant (27)..(27): Xaa in position 27 is Gln or Ser
  Variant (28)..(28): Xaa in position 28 is Ala or Gln
  Variant (29)..(31): Xaa in position 29 to 31 is any amino acid
  Variant (34)..(34): Xaa in position 34 is any amino acid
  Variant (35)..(35): Xaa in position 35 is Asp or Lys
  Variant (38)..(38): Xaa in position 38 is Ile or Val
  Variant (39)..(39): Xaa in position 39 is Leu or Val
  Variant (42)..(42): Xaa in position 42 is Ser or Thr
  Variant (43)..(43): Xaa in position 43 is any amino acid
  Variant (47)..(47): Xaa in position 47 is Ala or Ser
  Variant (48)..(49): Xaa in position 48 to 49 is any amino acid
  Variant (50)..(50): Xaa in position 50 is Gly or Gln
  Variant (51)..(51): Xaa in position 51 is Gly or Pro
  Variant (52)..(52): Xaa in position 52 is Ala or Glu
AXXXXXXQPXNRDXSXVTXXQWQXLXXXXXXQGXXTLXXQWXXYGDXXXXXXQ

SEQ ID NO: 78 - protein, 35 aa, Artificial sequence
  protein pattern
  Variant (5)..(5): Xaa in position 5 is Ile or Leu
  Variant (6)..(6): Xaa in position 6 is Pro or Ser
  Variant (7)..(7): Xaa in position 7 is any amino acid
  Variant (9)..(9): Xaa in position 9 is Ile or Leu
  Variant (12)..(13): Xaa in position 12 to 13 is any amino acid
  Variant (14)..(14): Xaa in position 14 is Phe or Trp
  Variant (16)..(16): Xaa in position 16 is Asp or Ser
  Variant (17)..(18): Xaa in position 17 to 18 is Ala or Glu
  Variant (19)..(19): Xaa in position 19 is any amino acid
  Variant (21)..(21): Xaa in position 21 is Asp or Gln
  Variant (22)..(22): Xaa in position 22 is Ala or Pro
  Variant (24)..(24): Xaa in position 24 is any amino acid
  Variant (25)..(25): Xaa in position 25 is Ser or Thr
  Variant (26)..(26): Xaa in position 26 is any amino acid
  Variant (28)..(28): Xaa in position 28 is Asn or Gln
  Variant (29)..(29): Xaa in position 29 is Ala or Asn
  Variant (30)..(30): Xaa in position 30 is any amino acid
  Variant (31)..(31): Xaa in position 31 is Asn or Gln
  Variant (33)..(33): Xaa in position 33 is any amino acid
  Variant (34)..(34): Xaa in position 34 is Ile or Leu
  Variant (35)..(35): Xaa in position 35 is Asp or Ser
DGWYXXXEXDDXXXRXXXXRXXLXXXLXXXXRXXX

SEQ ID NO: 79 - protein, 27 aa, Artificial sequence
  protein pattern
  Variant (2)..(2): Xaa in position 2 is any or no amino acid
  Variant (4)..(5): Xaa in position 4 to 5 is any amino acid
  Variant (6)..(6): Xaa in position 6 is Ala or Gln
  Variant (7)..(7): Xaa in position 7 is Arg or Ser
  Variant (9)..(10): Xaa in position 9 to 10 is any or no amino acid
  Variant (12)..(12): Xaa in position 12 is Ala or Asp
  Variant (13)..(13): Xaa in position 13 is any amino acid
  Variant (14)..(14): Xaa in position 14 is Glu or Arg
  Variant (15)..(15): Xaa in position 15 is Gly or Ser
  Variant (16)..(16): Xaa in position 16 is any amino acid
  Variant (17)..(17): Xaa in position 17 is Cys or Asn
  Variant (18)..(18): Xaa in position 18 is Gly or Ser
  Variant (19)..(21): Xaa in position 19 to 21 is any amino acid
  Variant (22)..(22): Xaa in position 22 is Ala or Leu
  Variant (23)..(23): Xaa in position 23 is any amino acid
  Variant (24)..(24): Xaa in position 24 is Phe or Leu
  Variant (25)..(25): Xaa in position 25 is Gly or Ser
  Variant (26)..(26): Xaa in position 26 is any amino acid
  Variant (27)..(27): Xaa in position 27 is Arg or Ser
DXAXXXXLXXLXXXXXXXXXXXXXXXX

SEQ ID NO: 80 - protein, 24 aa, Artificial sequence
  protein pattern
  Variant (2)..(2): Xaa in position 2 is any or no amino acid
  Variant (4)..(5): Xaa in position 4 to 5 is any or no amino acid
  Variant (7)..(7): Xaa in position 7 is Ala or Glu
  Variant (8)..(8): Xaa in position 8 is Pro or Gln
  Variant (9)..(9): Xaa in position 9 is Gln or Arg
  Variant (10)..(10): Xaa in position 10 is Ala, Thr or Val
  Variant (12)..(15): Xaa in position 12 to 15 is any amino acid
  Variant (16)..(16): Xaa in position 16 is Ala or Val
  Variant (17)..(17): Xaa in position 17 is Glu or Gly
  Variant (18)..(18): Xaa in position 18 is Ala or Leu
  Variant (19)..(19): Xaa in position 19 is Asn or Val
  Variant (20)..(20): Xaa in position 20 is any amino acid
  Variant (21)..(21): Xaa in position 21 is Ala or Asp
  Variant (22)..(22): Xaa in position 22 is Leu or Pro
  Variant (23)..(23): Xaa in position 23 is Glu or Arg
  Variant (24)..(24): Xaa in position 24 is Phe or Tyr
RXAXXAXXXXGXXXXXXXXXXXXX

SEQ ID NO: 81 - DNA, 168 bp, Escherichia coli
  CDS (1)..(168): transl_table=11
atgaagagacaaaaacgagatcgcctggaacgggcacatcaacgtggttatcaggccggcatcgccggacgctcaaaagaaatgtgtccctatcagacgctgaatcaaaggtcacaatggctgggaggctggcgagaagccatggcggacagggtagtaatggcctaa

SEQ ID NO: 82 - protein, 55 aa, Escherichia coli
MKRQKRDRLERAHQRGYQAGIAGRSKEMCPYQTLNQRSQWLGGWREAMADRVVMA

SEQ ID NO: 83 - DNA, 174 bp, Vibrio cholerae O1 biovar eltor str. N16961
  CDS (1)..(174): transl_table=11
atgaagagacaaaagcgtgatcgcctagaaagagctcaatcgcaaggatacaaagccggtctaaacggtcgatcccatgacgaatgtccctatcaacagacggaagtacgctcttattggttaggtggttggcgtgatgctagaaacgataaactttctggtctctgcaaataa

SEQ ID NO: 84 - protein, 57 aa, Vibrio cholerae O1 biovar eltor str. N16961
MKRQKRDRLERAQSQGYKAGLNGRSHDECPYQQTEVRSYWLGGWRDARNDKLSGLCK

SEQ ID NO: 85 - DNA, 213 bp, Pseudomonas aeruginosa PAO1
  CDS (1)..(213): transl_table=11
atgagaagacttaagcgtgatccgttggaaagagccttcttgcgtggttatcagaacggcataaccggtaaatctcgtgatctttgtccgttcacccatcctacgacgcggcagtcctggctcaacggctggcgcgagggccgtggcgacaactgggacggcctcactggcacggccggcttacaacgtctcaatcaactccagcacgtgtaa

SEQ ID NO: 86 - protein, 70 aa, Pseudomonas aeruginosa PAO1
MRRLKRDPLERAFLRGYQNGITGKSRDLCPFTHPTTRQSWLNGWREGRGDNWDGLTGTAGLQRLNQLQHV

SEQ ID NO: 87 - DNA, 168 bp, Salmonella enterica subsp. enterica serovar Typhi str. CT18
  CDS (1)..(168): transl_table=11
atgaggagacaaaaacgagatcgcctggaacgggcacatcaacgtggatatcaggccggcatcgccggacgatcaaaagaaatgtgtccctatcagacgctgaatcaacggtcatactggttgggaggttggcgacaagccatggaggacagggcggtaatggcctga

SEQ ID NO: 88 - protein, 55 aa, Salmonella enterica subsp. enterica serovar Typhi str. CT18
MRRQKRDRLERAHQRGYQAGIAGRSKEMCPYQTLNQRSYWLGGWRQAMEDRAVMA

SEQ ID NO: 89 - DNA, 168 bp, Salmonella typhimurium LT2
  CDS (1)..(168): transl_table=11
atgaagagacaaaaacgagatcgcctggaacgggcacatcaacgtggatatcaggccggcatcgccggacgatcaaaagaaatgtgtccctatcagacgctgaatcaacggtcatactggttgggaggttggcgacaagccatggaggacagggcggtaatggcctga

SEQ ID NO: 90 - protein, 55 aa, Salmonella typhimurium LT2
MKRQKRDRLERAHQRGYQAGIAGRSKEMCPYQTLNQRSYWLGGWRQAMEDRAVMA

SEQ ID NO: 91 - DNA, 177 bp, Shewanella oneidensis MR-1
  CDS (1)..(177): transl_table=11
atgaaaagacaaaaacgagatcgtttagacagagctttttcaaaaggattccaagccggtattggtggacgctctaaagagctttgtccttatgcaaatcttgattcgcgatcacagtggttaggtggttggcgtgaaggtgttgatggccgagttaatgggctatttaataaatag

SEQ ID NO: 92 - protein, 58 aa, Shewanella oneidensis MR-1
MKRQKRDRLDRAFSKGFQAGIGGRSKELCPYANLDSRSQWLGGWREGVDGRVNGLFNK

SEQ ID NO: 93 - DNA, 198 bp, Vibrio vulnificus CMCP6
  CDS (1)..(198): transl_table=11
atggacctgtatgaggtagaaattatgaagagacaaaagcgtgatcgcctagaacgagcacaatcccaaggctacaaggcaggcttaaacggtagatctcaggaagaatgtccttatcaacagatggacgctcgttcgtattggttaggtggttggcgtgatgccagaagtgacaaactttctggtctctataaatga

SEQ ID NO: 94 - protein, 65 aa, Vibrio vulnificus CMCP6
MDLYEVEIMKRQKRDRLERAQSQGYKAGLNGRSQEECPYQQMDARSYWLGGWRDARSDKLSGLYK

SEQ ID NO: 95 - DNA, 216 bp, Pseudomonas syringae pv. tomato str. DC3000
  CDS (1)..(216): transl_table=11
atgagaagacttaagcgtgatccgttggaaagagcttttttacgcggatatcaatacggcgttcatggtaaatcccgtgagctttgcccttttactctaccgtcagtacgccaggcatggatcaatggctggcgcgaaggacgcggcgacaactgggacggtatgaccggcactgcgggcatccacagactcaacgaacttcacgcggtcggatga

SEQ ID NO: 96 - protein, 71 aa, Pseudomonas syringae pv. tomato str. DC3000
MRRLKRDPLERAFLRGYQYGVHGKSRELCPFTLPSVRQAWINGWREGRGDNWDGMTGTAGIHRLNELHAVG

SEQ ID NO: 97 - DNA, 174 bp, Vibrio parahaemolyticus RIMD 2210633
  CDS (1)..(174): transl_table=11
atgaagagacaaaagcgtgatcgcctagaacgagctcaatctcaaggctataaagctgggttgaatggaaggtctcaagaggcttgcccgtatcaacaagtagacgctcggtcgtattggttaggtggttggcgtgatgccagagatgaaaaacaatctggtctctataaataa

SEQ ID NO: 98 - protein, 57 aa, Vibrio parahaemolyticus RIMD 2210633
MKRQKRDRLERAQSQGYKAGLNGRSQEACPYQQVDARSYWLGGWRDARDEKQSGLYK

SEQ ID NO: 99 - DNA, 168 bp, Shigella flexneri 2a str. 2457T
  CDS (1)..(168): transl_table=11
atgaagagacaaaaacgagatcgcctggaacgggcacatcaacgtggttatcaggccggcatcgccggacgctcaaaagaaatgtgtccctatcagacgctgagtcaaaggtcacaatggctgggaggctggcgagaagccatggcggacagggtagtaatggcctga

SEQ ID NO: 100 - protein, 55 aa, Shigella flexneri 2a str. 2457T
MKRQKRDRLERAHQRGYQAGIAGRSKEMCPYQTLSQRSQWLGGWREAMADRVVMA

SEQ ID NO: 101 - DNA, 168 bp, Photorhabdus luminescens subsp. laumondii TTO1
  CDS (1)..(168): transl_table=11
atgaagagacagaaacgagatcgtttagcacgagcattatcgagagggtaccatgcaggtattttggggcgtccaagggagcattgtccctattattcattagatgcccgttctcattggttaggaggatggcgtcaggctatggaagacagggcgatgatggcttag

SEQ ID NO: 102 - protein, 55 aa, Photorhabdus luminescens subsp. laumondii TTO1
MKRQKRDRLARALSRGYHAGILGRPREHCPYYSLDARSHWLGGWRQAMEDRAMMA

SEQ ID NO: 103 - DNA, 174 bp, Vibrio vulnificus YJ016
  CDS (1)..(174): transl_table=11
atgaagagacaaaagcgtgatcgcctagaacgagcacaatcccaaggctacaaggcaggcttaaacggtagatctcaggaagaatgtccttatcaacagatggacgctcgttcgtattggttaggtggttggcgtgatgccagaagtgacaaactttctggtctctataaatga

SEQ ID NO: 104 - protein, 57 aa, Vibrio vulnificus YJ016
MKRQKRDRLERAQSQGYKAGLNGRSQEECPYQQMDARSYWLGGWRDARSDKLSGLYK

SEQ ID NO: 105 - DNA, 168 bp, Klebsiella pneumoniae subsp. pneumoniae MGH 78578
  CDS (1)..(168): transl_table=11
atgaagagacaaaaacgagatcgcctggaacgggcacaccaacgcggatatcaggcgggtatcgcgggaagatcgaaagaaatgtgtccataccagagcctgaatcaacgctcatggtggctgggaggctggcgagaagccatggaggacagggtactaacggcctga

SEQ ID NO: 106 - protein, 55 aa, Klebsiella pneumoniae subsp. pneumoniae MGH 78578
MKRQKRDRLERAHQRGYQAGIAGRSKEMCPYQSLNQRSWWLGGWREAMEDRVLTA

SEQ ID NO: 107 - DNA, 174 bp, Colwellia psychrerythraea 34H
  CDS (1)..(174): transl_table=11
atgaagcggcaaaaacgcgatcgccaaagtagggcacatacaagaggttaccaagcaggtatatctggtcgttccaaagaacattgcccataccaaattgatgctatcaaatcacagtggcttggcggatggcgagaagccatagaggataaacaacaggggctgtttaaataa

SEQ ID NO: 108 - protein, 57 aa, Colwellia psychrerythraea 34H
MKRQKRDRQSRAHTRGYQAGISGRSKEHCPYQIDAIKSQWLGGWREAIEDKQQGLFK

SEQ ID NO: 109 - DNA, 174 bp, Colwellia psychrerythraea 34H
  CDS (1)..(174): transl_table=11
atgaaaagacaaaaaagggataaattaggtagagcgcattctaacggatatcaggctggccttggcggcaaaactaaggagcagtgtccttatcaaaatattgatgctaaatcgcaatggcttggtggttggcgagacgccataagtgatagaaatttggggttatttaaatag

SEQ ID NO: 110 - protein, 57 aa, Colwellia psychrerythraea 34H
MKRQKRDKLGRAHSNGYQAGLGGKTKEQCPYQNIDAKSQWLGGWRDAISDRNLGLFK

SEQ ID NO: 111 - DNA, 216 bp, Pseudomonas fluorescens PfO-1
  CDS (1)..(216): transl_table=11
atgagaagacttaagcgtgatccgttggaaagagcatttttgcgcggatatcaatatggcgttggtggcaaatcccgtgagctttgcccatttactctaccgtcggtacgtcaagcctggatcaacggctggcgagaaggacgcggcgacaactgggacggtatgaccggcactgcgggaatccacagactcaacgaacttcacgccgtcggctga

SEQ ID NO: 112 - protein, 71 aa, Pseudomonas fluorescens PfO-1
MRRLKRDPLERAFLRGYQYGVGGKSRELCPFTLPSVRQAWINGWREGRGDNWDGMTGTAGIHRLNELHAVG

SEQ ID NO: 113 - DNA, 207 bp, Saccharophagus degradans 2-40
  CDS (1)..(207): transl_table=11
atgaaacgccaaaaacgagaccatacaagcagagcttttacccgcggctaccaagccggtgtagagggtagatcgcgcagcttgtgccctcactcaacaggtgagattaaacaatcatggttaaccggatggcgtgaaggccgcgaagatcactggaacggctttaatacactggcgcaagtccagagaatctccaatatttcttag

SEQ ID NO: 114 - protein, 68 aa, Saccharophagus degradans 2-40
MKRQKRDHTSRAFTRGYQAGVEGRSRSLCPHSTGEIKQSWLTGWREGREDHWNGFNTLAQVQRISNIS

SEQ ID NO: 115 - DNA, 171 bp, Pseudoalteromonas tunicata D2
  CDS (1)..(171): transl_table=11
atgaagagacaaaaacgagatcgtcttgaaagagcacacgcacagggttttaaagctggattagctggacgctctaaagaaatgtgcccatatgaaaacttagatccacgatctcattggctcggggggtggcgagaagccatcgaaaatcgaattatgtataaagtttaa

SEQ ID NO: 116 - protein, 56 aa, Pseudoalteromonas tunicata D2
MKRQKRDRLERAHAQGFKAGLAGRSKEMCPYENLDPRSHWLGGWREAIENRIMYKV

SEQ ID NO: 117 - DNA, 174 bp, Photobacterium sp. SKA34
  CDS (1)..(174): transl_table=11
atgaagagacaaaagcgggatcgtttagaacgtgcgcaggctcgaggttatcaagccggattaaatggccgttctactgatgcatgtccgtaccaaggtacagatgcccgtactaactggctaggtggttggcgagacgcaagagaagagttacaacaaggtctctacaaataa

SEQ ID NO: 118 - protein, 57 aa, Photobacterium sp. SKA34
MKRQKRDRLERAQARGYQAGLNGRSTDACPYQGTDARTNWLGGWRDAREELQQGLYK

SEQ ID NO: 119 - DNA, 207 bp, Neptuniibacter caesariensis
  CDS (1)..(207): transl_table=11
atgaagagacaaaagcgtgatcgtactaccacacttttcaatcgaggctttcaagccggattaagcggaaaatcccgggacaactgcccggttaatacatcagatttacgaagccactggatgagcggttggcgccaaggccgggaggctcactggaatggaatggaaggggtttctgccattcaatccgatccggcactacattga

SEQ ID NO: 120 - protein, 68 aa, Neptuniibacter caesariensis
MKRQKRDRTTTLFNRGFQAGLSGKSRDNCPVNTSDLRSHWMSGWRQGREAHWNGMEGVSAIQSDPALH

SEQ ID NO: 121 - DNA, 195 bp, Oceanobacter sp. RED65
  CDS (1)..(195): transl_table=11
atgaagagacagaagcgagatatggaccgccgagccttccaaaagggttacttagcgggtgtacaaggtcgatcaaaagatctatgcccagacggtaactctcatttcaattggatggcgggctggcgtgaaggccgagctgaccattgggatggctattctggtgtcgctggcgtccacaagcttccgttgtaa

SEQ ID NO: 122 - protein, 64 aa, Oceanobacter sp. RED65
MKRQKRDMDRRAFQKGYLAGVQGRSKDLCPDGNSHFNWMAGWREGRADHWDGYSGVAGVHKLPL

SEQ ID NO: 123 - DNA, 171 bp, Alteromonadales bacterium TW-7
  CDS (1)..(171): transl_table=11
atgaagagacagaaaagagatcgtttagaaagagctcattctcaaggtttcaaagcaggtttagcaggtcgttctaaagagctatgcccttatcaacagatagatccaaagtcagagtggttaggtggatggcgagaggcaattgaaaatcgaaatatgtataaaacctaa

SEQ ID NO: 124 - protein, 56 aa, Alteromonadales bacterium TW-7
MKRQKRDRLERAHSQGFKAGLAGRSKELCPYQQIDPKSEWLGGWREAIENRNMYKT

SEQ ID NO: 125 - DNA, 204 bp, marine gamma proteobacterium HTCC2143
  CDS (1)..(204): transl_table=11
atgagaagacaaaaacgtgatatgactgaacgcgcattttcgaaaggctatcaagctggttccagcggccgccataaagaagcctgcccccatgataatggcgatgttcgccagcaatggttaaccggctggcgcgagggccgaacagatcaatgggatggatacaccggcgtgtccggtatacataaattggaattacactaa

SEQ ID NO: 126 - protein, 67 aa, marine gamma proteobacterium HTCC2143
MRRQKRDMTERAFSKGYQAGSSGRHKEACPHDNGDVRQQWLTGWREGRTDQWDGYTGVSGIHKLELH

SEQ ID NO: 127 - DNA, 204 bp, marine gamma proteobacterium HTCC2080
  CDS (1)..(204): transl_table=11
atgcgaagatccaaacgcgatatgctgaaacgtgcttttgaacgtggctaccaaatcgggctttctgggcgttcacgtgaaacctgcccacatggaaccggcccccataaactgagttggttacaagggtggcgcgagggtcgaatcgaccagtgggaaggcctaaccaatattacagcctgccataagctttcgggcttttga

SEQ ID NO: 128 - protein, 67 aa, marine gamma proteobacterium HTCC2080
MRRSKRDMLKRAFERGYQIGLSGRSRETCPHGTGPHKLSWLQGWREGRIDQWEGLTNITACHKLSGF

SEQ ID NO: 129 - DNA, 213 bp, Marinobacter sp. ELB17
  CDS (1)..(213): transl_table=11
atgaaaagacagaaaagagacatggtcgctcgagcattcaagcggggttatctcgcaggagtgtccggtaaatcaaaagacagctgtcccattgaacaagctgaaattcgtcaagaatggctaaatgggtggcgagaaggccgcacagatcaatgggatggtttgaccggtgtctctggcatccatcgattagccaccgtcaccactgcgtga

SEQ ID NO: 130 - protein, 70 aa, Marinobacter sp. ELB17
MKRQKRDMVARAFKRGYLAGVSGKSKDSCPIEQAEIRQEWLNGWREGRTDQWDGLTGVSGIHRLATVTTA

SEQ ID NO: 131 - DNA, 177 bp, Moritella sp. PE36
  CDS (1)..(177): transl_table=11
atgaagagacagaaacgagatcgtttggaaagagcatattcgaaaggttaccaagctggaaccgcaggtcgctcgaatgaagtttgtccatttcaaagcgcagattcgcgcggtcagtggctaggtggttggcgtgaagcacaagagatccgaggtacagggctcttcatgaaataa

SEQ ID NO: 132 - protein, 58 aa, Moritella sp. PE36
MKRQKRDRLERAYSKGYQAGTAGRSNEVCPFQSADSRGQWLGGWREAQEIRGTGLFMK

SEQ ID NO: 133 - DNA, 23 bp, Artificial sequence
  primer
atgaagagacaaaaacgagatcg

SEQ ID NO: 134 - DNA, 24 bp, Artificial sequence
  primer
ttaggccattactaccctgtccgc

SEQ ID NO: 135 - protein, 45 aa, Artificial sequence
  consensus sequence
  Variant (2)..(2): Xaa in position 2 is any amino acid
  Variant (8)..(10): Xaa in position 8 to 10 is any amino acid
  Variant (13)..(15): Xaa in position 13 to 15 is any amino acid
  Variant (18)..(18): Xaa in position 18 is any amino acid
  Variant (21)..(22): Xaa in position 21 to 22 is any amino acid
  Variant (24)..(24): Xaa in position 24 is any amino acid
  Variant (26)..(28): Xaa in position 26 to 28 is any amino acid
  Variant (31)..(37): Xaa in position 31 to 37 is any amino acid
  Variant (38)..(39): Xaa in position 38 to 39 is any or no amino acid
  Variant (42)..(42): Xaa in position 42 is any amino acid
MXRQKRDXXXRAXXXGYXAGXXGXSXXXCPXXXXXXXXXWLXGWR

SEQ ID NO: 136 - protein, 29 aa, Artificial sequence
  protein pattern
  Variant (2)..(2): Xaa in position 2 is any or no amino acid
  Variant (7)..(9): Xaa in position 7 to 9 is any amino acid
  Variant (12)..(14): Xaa in position 12 to 14 is any amino acid
  Variant (16)..(16): Xaa in position 16 is Phe or Tyr
  Variant (17)..(17): Xaa in position 17 is any amino acid
  Variant (20)..(21): Xaa in position 20 to 21 is any amino acid
  Variant (23)..(23): Xaa in position 23 is Lys or Arg
  Variant (24)..(25): Xaa in position 24 to 25 is any amino acid
  Variant (26)..(26): Xaa in position 26 is Asp, Glu or Ser
  Variant (27)..(27): Xaa in position 27 is any amino acid
RXQKRDXXXRAXXXGXXAGXXGXXXXXCP

SEQ ID NO: 137 - protein, 9 aa, Artificial sequence
  protein pattern
  Variant (2)..(2): Xaa in position 2 is Gly, Asn, Ser or Thr
  Variant (6)..(6): Xaa in position 6 is Asp, Glu or Gln
  Variant (7)..(7): Xaa in position 7 is Ala or Gly
  Variant (8)..(8): Xaa in position 8 is any amino acid
  Variant (9)..(9): Xaa in position 9 is Ala, Asp, Glu, Gly, Asn, Ser or Thr
LXGWRXXXX

SEQ ID NO: 138 - DNA, 522 bp, Escherichia coli
  CDS (1)..(522): transl_table=11
atgcaaaaggtaaaattacccctgactctcgatccggttcgtacggctcaaaaacgccttgattaccagggtatctatacccctgatcaggttgagcgcgtcgccgaatccgtagtcagtgtggacagtgatgtggaatgctccatgtcgttcgctatcgataaccaacgtctcgcagtgttaaacggcgatgcgaaggtgacggtaacgctcgagtgtcagcgttgcgggaagccgtttactcatcaggtctacacaacgtattgttttagtcctgtgcgttcagacgaacaggctgaagcactgccggaagcgtatgaaccgattgaggttaacgaattcggtgaaatcgatctgcttgcaatggttgaagatgaaatcatcctcgccttgccggtagttccggtgcatgattctgaacactgtgaagtgtccgaagcggacatggtctttggtgaactgcctgaagaagcgcaaaagccaaacccatttgccgtattagccagcttaaagcgtaagtaa

SEQ ID NO: 139 - protein, 173 aa, Escherichia coli
MQKVKLPLTLDPVRTAQKRLDYQGIYTPDQVERVAESVVSVDSDVECSMSFAIDNQRLAVLNGDAKVTVTLECQRCGKPFTHQVYTTYCFSPVRSDEQAEALPEAYEPIEVNEFGEIDLLAMVEDEIILALPVVPVHDSEHCEVSEADMVFGELPEEAQKPNPFAVLASLKRK

SEQ ID NO: 140 - DNA, 525 bp, Pasteurella multocida subsp. multocida str. Pm70
  CDS (1)..(525): transl_table=11
atgcaaaaggtaaaattacccctaactgttgacccagtaaaagatgcgcagcgacgcttagattatgacggctattacgctattaatcagttgacgcgccttaatgagtcagtaagtaaagtgctcagcgatgcacaggttagattatcgttttttattgatccacaaaaattagtggtcatgaaggggcaagcaagtgtagaagtagagttaatctgccaacgttgtgaaaagcccttcgtgcaaatgattgactgtactttttgttacagtccagtggctaatttggatcaagccgatgtattgcccgaaatttatgaaccaatcgaatttaacgcgtttggggaaatagatttagttggtgcgattgaagatgaattaattttaagtctgccaatagtgccaatgcattcatctgaacactgtgaagtgtccgtggctgaacaggtttttggcgaattgcccgaagcgctggcaaaaaaaccgaacccgttcgctgtattagctagtttaaagcaaaagtaa

SEQ ID NO: 141 - protein, 174 aa, Pasteurella multocida subsp. multocida str. Pm70
MQKVKLPLTVDPVKDAQRRLDYDGYYAINQLTRLNESVSKVLSDAQVRLSFFIDPQKLVVMKGQASVEVELICQRCEKPFVQMIDCTFCYSPVANLDQADVLPEIYEPIEFNAFGEIDLVGAIEDELILSLPIVPMHSSEHCEVSVAEQVFGELPEALAKKPNPFAVLASLKQK

SEQ ID NO: 142 - DNA, 537 bp, Pseudomonas aeruginosa PAO1
  CDS (1)..(537): transl_table=11
atgttgaatgggccgattccacctcatatcgatccgcgcaagttggtcgaccgcggcgccaccctcgaaggtgtgtacgcgctcgccgatatgccgcgtgtatgcgagcaactgaccagcgatgccggtgaggtgcgcgtgaaggtttccttcgagcgcgaccaccagaagctggcggtcatgcatatgcagctcgataccgaggtgagcatggtatgccaacgctgcctggatgcggcggccattcccgtgcatggcgaatatacctacgccattcttcgggaaggtcagtccgccgacggtctgccgaaggggtacgatgcgctggaagtgggggaggaacccctggacctgctggcgctggtcgaggacgagctgttgctcgccttacccatcgttccggcccatgaccccgaagtatgtcagcacccggctggattcgtcgtcgaagacgagccggagtcgagcgaagtcgaggacaagcgtcctaatccgttcagcgtactggcacagttgaagcgtgacccaaacgtttag

SEQ ID NO: 143 - protein, 178 aa, Pseudomonas aeruginosa PAO1
MLNGPIPPHIDPRKLVDRGATLEGVYALADMPRVCEQLTSDAGEVRVKVSFERDHQKLAVMHMQLDTEVSMVCQRCLDAAAIPVHGEYTYAILREGQSADGLPKGYDALEVGEEPLDLLALVEDELLLALPIVPAHDPEVCQHPAGFVVEDEPESSEVEDKRPNPFSVLAQLKRDPNV

SEQ ID NO: 144 - DNA, 525 bp, Shewanella oneidensis MR-1
  CDS (1)..(525): transl_table=11
atgcaaacagtaaagataccggtttcaattgatcctattcgcgccgcctcaagccgttctacctatgaggggatagtgccagggcagcaattgaaaagattaaatgagttatgtgccggcgactgttccgatgtggcagtgtcgcttgaatgtggcgtagatttgcaggggatagtctacctgaaagggaaggctgtgacggagctcactctggtttgtcaacgttgcatgacactatttaccactgaggttacggtcgagttttgcttcggtccatgccggactaaggcagaaatcgatgagctcccggatgcgtatgacccaattgagtgcaatgagattggcgaagtacgtctgcatcaattgatcgaagatgaattgatagtcgctatgcctattattccgatgcatgaagagactgattgcaatatcggatccatggacatagttgtaggcgagatcgaacccgctcaagaggagcgtccaaatccgtttgcagtgttagaaaaactgaagagcaagtaa

SEQ ID NO: 145 - protein, 174 aa, Shewanella oneidensis MR-1
MQTVKIPVSIDPIRAASSRSTYEGIVPGQQLKRLNELCAGDCSDVAVSLECGVDLQGIVYLKGKAVTELTLVCQRCMTLFTTEVTVEFCFGPCRTKAEIDELPDAYDPIECNEIGEVRLHQLIEDELIVAMPIIPMHEETDCNIGSMDIVVGEIEPAQEERPNPFAVLEKLKSK

SEQ ID NO: 146 - DNA, 498 bp, Vibrio vulnificus CMCP6
  CDS (1)..(498): transl_table=11
gtggatccagccaaagccgcgcagaagagattggattacgatggcatcatccaagccagtctgtttaagcgtctagctgaaatgaccgaaggcgtaaaacgcgacgcagaagtctatttgtcatttgagatagatgaacagcgacttgttgttatctctggtaaagctaacatcgaagtcggtttagaatgtcaacgttgtaatgagaccttcacgcatctgtgtgaagtagagttcacttatactccttactacagtgagaaaagtgagcaagatgccccagaatgttacgatttggtagatcttaacgaatatggcgaagtcgaccttattcaacttgttgaagatgagttcatcttagagttacctcaaattgcaatgcatgacgaagcggattgcagcgttgattcaaataacatggtttttggtgagattcctgaagaaattgaggaaacaaaaccaaatccgttcgacgttttaaaaagcctaaagcgctaa

SEQ ID NO: 147 - protein, 165 aa, Vibrio vulnificus CMCP6
MDPAKAAQKRLDYDGIIQASLFKRLAEMTEGVKRDAEVYLSFEIDEQRLVVISGKANIEVGLECQRCNETFTHLCEVEFTYTPYYSEKSEQDAPECYDLVDLNEYGEVDLIQLVEDEFILELPQIAMHDEADCSVDSNNMVFGEIPEEIEETKPNPFDVLKSLKR

SEQ ID NO: 148 - DNA, 525 bp, Vibrio parahaemolyticus RIMD 2210633
  CDS (1)..(525): transl_table=11
atgcaaaaggtaaaaataccgcgaacggttgatccagcaaagtccgcacagaaacgattagattacgatggcatcatccaagctagtcttttcaagcgcttagcggaagcaactgaaggcgtaaaacgcgacgcagaagtctcattgtcatttgagatagatgaacagcgacttgttgttatctctggtaaagctaacatcgaagtcgaattagagtgtcagcgttgtaatgaggtattcacacacgcgtgtgaagttgaattcctttacactccttactacggtgagaagacggaagaggaagcaccagaaatttatgatttggtagatctaaatgagtacggtgaattagaccttatacaactggttgaagacgagttcatcttagcattacctcaaattgcgatgcacgatgaagcggattgtagcgttgattcaaataacatggtttttggtgagcttcctgaagaaattgaggaaaagaaaccgaatccattcgacgttttgaaaaatctgaaaaagtaa

SEQ ID NO: 149 - protein, 174 aa, Vibrio parahaemolyticus RIMD 2210633
MQKVKIPRTVDPAKSAQKRLDYDGIIQASLFKRLAEATEGVKRDAEVSLSFEIDEQRLVVISGKANIEVELECQRCNEVFTHACEVEFLYTPYYGEKTEEEAPEIYDLVDLNEYGELDLIQLVEDEFILALPQIAMHDEADCSVDSNNMVFGELPEEIEEKKPNPFDVLKNLKK

SEQ ID NO: 150 - DNA, 525 bp, Haemophilus ducreyi 35000HP
  CDS (1)..(525): transl_table=11
atgcaaaaggtaaaactaccccttactattgacccatttaaagatgctcagcgtcgagtcgattatgttggttatttttcaagtaagcaacttgttcgtttgggtgaatcagtatgtaatgtgctaaacgatgcgcaagttacactgtcgttatatgtcgatccacaacgcctttctgtgcttaaaggctcagcacaggttgaggtggagttgtgctgtcaacggtgcggtaactcgtttacacaagttattgactgttcttttttgttcagtcccgtgcgtaatttggatcaagcgggcgatttgcccgaaatttatgagcctatcgaagtcaatgcatttggtgaagtaaatttgctggatatgattgaagatgaatttatcctcgcgttaccgttggttccgatgcatagtgaagcacactgtgaagtgtctgtgagtgagcaggtgttcggtgaattgccagcagaattggcgaaaaaacctaacccgttcgcggtattagctaatttgaagaaaaactag

SEQ ID NO: 151 - protein, 174 aa, Haemophilus ducreyi 35000HP
MQKVKLPLTIDPFKDAQRRVDYVGYFSSKQLVRLGESVCNVLNDAQVTLSLYVDPQRLSVLKGSAQVEVELCCQRCGNSFTQVIDCSFLFSPVRNLDQAGDLPEIYEPIEVNAFGEVNLLDMIEDEFILALPLVPMHSEAHCEVSVSEQVFGELPAELAKKPNPFAVLANLKKN

SEQ ID NO: 152 - DNA, 525 bp, Photorhabdus luminescens subsp. laumondii TTO1
  CDS (1)..(525): transl_table=11
atgcaaaaagtaaaattacccctgaccattgatgcgcttcgcgcagctcagaaacgattagactacgcaggtagttattcacctgagcaagttttgcgtatcgcggaatctgtggttagcgtggacaatgatgtagacagcgttttatcgtttcagatagataaccaacgtctggcggttgtgcgtgggcattccgatgtggatgttacgcttgaatgtcagcgttgtggcggtaatttcagccatcacgttcacataacatattgttttagcccggtcgtcaatgatgaacaggttgaagcattaccggaagagtatgagccaattgacgttaacgaatttggcgaaatagatttgctggcaatgattgaagatgaaataattctttctctgccggtggttccggtacatgattctgaacactgtgaagtgtccgaagcggacatggtgtttggtgaattacctctagaggctgaaaaaccaaacccatttgccgtattagccagcttaaagaaaagtacttaa

SEQ ID NO: 153 - protein, 174 aa, Photorhabdus luminescens subsp. laumondii TTO1
MQKVKLPLTIDALRAAQKRLDYAGSYSPEQVLRIAESVVSVDNDVDSVLSFQIDNQRLAVVRGHSDVDVTLECQRCGGNFSHHVHITYCFSPVVNDEQVEALPEEYEPIDVNEFGEIDLLAMIEDEIILSLPVVPVHDSEHCEVSEADMVFGELPLEAEKPNPFAVLASLKKST

SEQ ID NO: 154 - DNA, 525 bp, Vibrio vulnificus YJ016
  CDS (1)..(525): transl_table=11
atgcaaaaggtaaaaataccgcgaacggtggatccagccaaagccgcgcaaaagagattggattacgatggcatcatccaagccagtctgtttaagcgtctagctgaaatgaccgaaggcgtaaaacgcgacgcagaagtctatttgtcatttgagatagatgaacagcgacttgttgttatctctggtaaagctaacatcgaagtcggtttagaatgtcaacgttgtaatgagaccttcacgcatctgtgtgaagtagagttcacttatactccttactacagtgagaaaagtgaacaagatgccccagaatgttacgatttggtagatcttaacgaatatggcgaagtcgaccttattcaacttgttgaagatgagttcatcttagaattacctcaaattgcaatgcatgacgaagcggattgcagcgttgattcaaataacatggtttttggtgagattcctgaagaaattgaggaaacaaaaccaaatccgttcgacgttttaaaaagcctaaagcgctaa

SEQ ID NO: 155 - protein, 174 aa, Vibrio vulnificus YJ016
MQKVKIPRTVDPAKAAQKRLDYDGIIQASLFKRLAEMTEGVKRDAEVYLSFEIDEQRLVVISGKANIEVGLECQRCNETFTHLCEVEFTYTPYYSEKSEQDAPECYDLVDLNEYGEVDLIQLVEDEFILELPQIAMHDEADCSVDSNNMVFGEIPEEIEETKPNPFDVLKSLKR

SEQ ID NO: 156 - DNA, 522 bp, Klebsiella pneumoniae subsp. pneumoniae MGH 78578
  CDS (1)..(522): transl_table=11
atgcaaaaggtaaaattacccctgactcttgatccggtacgcacggctcaaaaacgccttgattacgaaggcatctatgcccgcgatcaggttgaacgtgtaaccgattctgtagtcagcgtggacagcgatgtggaatgcagcatgtcgttcgctatcgataaccagcgtctcgccgttattactggcgatgcaaaggtaacggtaactctcgaatgccagcgttgcgggaaaccgttctcccatcacgtccacaccacgtattgttttagccccgtcagaaatgacgaacaggccgaagcactaccggaagcgtatgagccgattgaggttaacgaattcggtgaaatcgacctgcaggcaatggtcgaggatgaaattatcctctccctgcccgtagttccggtgcatgattctgaacactgtgaagtgtccgacgcggacatggtctttggcgaactgcctgaagaggcacaaaaaccaaacccatttgccgtattagccagcttaaagcgtaagtaa

SEQ ID NO: 157 - protein, 173 aa, Klebsiella pneumoniae subsp. pneumoniae MGH 78578
MQKVKLPLTLDPVRTAQKRLDYEGIYARDQVERVTDSVVSVDSDVECSMSFAIDNQRLAVITGDAKVTVTLECQRCGKPFSHHVHTTYCFSPVRNDEQAEALPEAYEPIEVNEFGEIDLQAMVEDEIILSLPVVPVHDSEHCEVSDADMVFGELPEEAQKPNPFAVLASLKRK

SEQ ID NO: 158 - DNA, 522 bp, Salmonella enterica subsp. arizonae serovar 62:z4,z23:--
  CDS (1)..(522): transl_table=11
atgcaaaaggtaaaattacccctgacgcttgatccggttcgtaccgctcaaaaacgccttgattaccagggtatctatacccccgatcaggtcgagcgcgttgccgaatccgtagtcagtgtggacagtgatgtggaatgctctatgtcgttcgctatcgataaccaacgtctcgccgttttaaccggcgatgcgatggttacggtatcgctagaatgccagcgttgcgggaaaccgtttactcatcaggttcacataacgtattgttttagccctgtccgttccgacgaacaggctgaagcactgccggaagcgtatgagccgattgaggtaaacgacttcggcgaaatcgatctgcttgcaatggttgaagatgaaatcatccttaccttgccggtagttccggtgcatgattctgaacactgtgaagtgtccgaagcggacatggtctttggcgaattgcctgatgaagcgcaaaagccaaatccatttgccgtattagccagcttaaagcgtaagtaa

SEQ ID NO: 159 - protein, 173 aa, Salmonella enterica subsp. arizonae serovar 62:z4,z23:--
MQKVKLPLTLDPVRTAQKRLDYQGIYTPDQVERVAESVVSVDSDVECSMSFAIDNQRLAVLTGDAMVTVSLECQRCGKPFTHQVHITYCFSPVRSDEQAEALPEAYEPIEVNDFGEIDLLAMVEDEIILTLPVVPVHDSEHCEVSEADMVFGELPDEAQKPNPFAVLASLKRK

SEQ ID NO: 160 - DNA, 525 bp, Haemophilus somnus 2336
  CDS (1)..(525): transl_table=11
atgcaaaaggtaaaactacccctaactgttgacccgattaaagatgcacagcgtagattggattatcaaggttgttatgtgtccaatcaagttactcgtttagcggagtcagtagtcaaagtgctcagcgatgtgcaggtaacattatcgtttttcgttgatccgcaaaaattgactgtaatgaaaggaagagcgagtgttgatgtggaattagaatgtcaacgttgtggttgtcctttcagtcaatcattggaatgtgagttttcttatagtccagtgtctgatttgggtaagatcaatgaattgccagagatttatgaaccgatagaattaaatgaattcggggaaatagatttaattggaacggttgaagatgaactgattgttgctcttccaattgttccgatgcattcatctgaacactgtgaagtgtccgtggctgaacaggtttttggcgaattgccggaagagctggcaaaaaaaccgaacccgttcgctgtattagctagtttaaagaaaaagtaa

SEQ ID NO: 161 - protein, 174 aa, Haemophilus somnus 2336
MQKVKLPLTVDPIKDAQRRLDYQGCYVSNQVTRLAESVVKVLSDVQVTLSFFVDPQKLTVMKGRASVDVELECQRCGCPFSQSLECEFSYSPVSDLGKINELPEIYEPIELNEFGEIDLIGTVEDELIVALPIVPMHSSEHCEVSVAEQVFGELPEELAKKPNPFAVLASLKKK

SEQ ID NO: 162 - DNA, 522 bp, Pectobacterium atrosepticum SCRI1043
  CDS (1)..(522): transl_table=11
atgcaaaaggtaaaattacccttaacccttgacgcggtccgtactgctcagaaacgtttagattacgttggtatctattcgtctgaacaagtagagcgtattgccgagtcagtggtgagtgtggatagtgatgttcaggcctctttatctttcaatattgataatcagcgtctggctgtgattgacggtaacgctgacgttgcggtgacactgatgtgtcagcgttgcggaaagacgtttgaacatcaggtccatgcgacattctgtttcagcccggtcgtcaatgatgagcaggccgaagcgttaccgggagcgtatgagccgatcggcgttgatgagtttggcgaagtcgatctgctggcaatgattgaagatgaaattattctgatgttgcctatcgccccggtacatgattctgaacactgtgaagtgtccgaagcggacatggtttttggtcaactgcctgcagaggcggaaaaaccaaatccgtttgccgtattagccagtttaaagcataagtaa

SEQ ID NO: 163 - protein, 173 aa, Pectobacterium atrosepticum SCRI1043
MQKVKLPLTLDAVRTAQKRLDYVGIYSSEQVERIAESVVSVDSDVQASLSFNIDNQRLAVIDGNADVAVTLMCQRCGKTFEHQVHATFCFSPVVNDEQAEALPGAYEPIGVDEFGEVDLLAMIEDEIILMLPIAPVHDSEHCEVSEADMVFGQLPAEAEKPNPFAVLASLKHK

SEQ ID NO: 164 - DNA, 525 bp, Mannheimia succiniciproducens MBEL55E
  CDS (1)..(525): transl_table=11
atgcaaaaggtaaaactacccctaaccgttgacccggttaaagatgcgcaacgcagattggattacgtaggctactacgcagccgatcagttggttcgtcttaacgagtcagtggtaaaagtgctcagcgatgcacaggtaacattatcgtttttcatcgatccgcaaaaattagtggtgatgaaaggtcaggcgcaggttgaggttgaattagaatgtcaacgttgcggtcagacgttcaatcaaacgctggaatgtacgttttgttatagtccggtggctaatttaagtaaaattgatgaattaccggagatttatgaaccgattgaatttaatgaattcggggaaatagatttaattggtacgattgaagatgaatttattttaaatcttccaattgttccaatgcattcatctgaacactgtgaagtgtccgcgcaggaacaggtttttggcgaattgccagaagaattggcaaaaaaaccgaacccgttcgctgtattagctaatttaaagcaaaagtaa

SEQ ID NO: 165 - protein, 174 aa, Mannheimia succiniciproducens MBEL55E
MQKVKLPLTVDPVKDAQRRLDYVGYYAADQLVRLNESVVKVLSDAQVTLSFFIDPQKLVVMKGQAQVEVELECQRCGQTFNQTLECTFCYSPVANLSKIDELPEIYEPIEFNEFGEIDLIGTIEDEFILNLPIVPMHSSEHCEVSAQEQVFGELPEELAKKPNPFAVLANLKQK

SEQ ID NO: 166 - DNA, 525 bp, Haemophilus influenzae 86-028NP
  CDS (1)..(525): transl_table=11
atgcaaaaggtaaaactacccctaaccgttgatccagtaaaagatgctcaaagacggcttgattatgttggttattattcggcaaatcagcttgagcgtttggcggaatcagtggtaaacgtgctcagcgatgcacaggtaacattatcgttttatgttgatccacaaaaattagtggtgatgaaaggtaaagtacagattgatgtcgatcttgaatgtcagcgttgtaacgaaccttacaaacaaacattggaatgtgagtttacttatagtccagtggctaattgggatcaggctgatgacttgcccgaaatttatgagccaatcgagttcaatgagtttggcgaaatagatttaattggcacggtggaagatgagctaattttagctttgccgcttgtcccaatgcattcatctgaacactgtgaagtgtccgcgcaggaacaggtttttggcgaattgcctgaagaattggcaaaaaaaccgaacccgttcgctgtattagctaatttaaagcaaaagtaa

SEQ ID NO: 167 - protein, 174 aa, Haemophilus influenzae 86-028NP
MQKVKLPLTVDPVKDAQRRLDYVGYYSANQLERLAESVVNVLSDAQVTLSFYVDPQKLVVMKGKVQIDVDLECQRCNEPYKQTLECEFTYSPVANWDQADDLPEIYEPIEFNEFGEIDLIGTVEDELILALPLVPMHSSEHCEVSAQEQVFGELPEELAKKPNPFAVLANLKQK

SEQ ID NO: 168 - DNA, 513 bp, Colwellia psychrerythraea 34H
  CDS (1)..(513): transl_table=11
atgcagaatcttaaacttccaataacaattagtccatcccgtagcgcgcaacgtagactcgtgtgcaaaggtgtatttaaattagcggatatgacgagactgcttgcagaatgcgaaagcggaagcgagcatgttcaagtaagtgttaagtttgatgtggatgaacgtggtttgacagtaatgtcaggtacgggatcggcattagttgcattaacttgtcagcggtgtaacgaaaattttgatcagtcacttgaagtagagtttacttttagtcctgccaaaaatgaggaagctgctgaaaaaatcccgtcatattatgacgtagtagaattagatgaaaatggtgaagtaaacttacgcgaattagtggaagaagagttaatgctcatgatcccattaattccacggcacaacattcaagattgttcagctgatgctgattcagtttggggtgagttgccagaagagcttgagaagccaaatccatttgatgtattaaaacaattcaagtag

SEQ ID NO: 169 - protein, 170 aa, Colwellia psychrerythraea 34H
MQNLKLPITISPSRSAQRRLVCKGVFKLADMTRLLAECESGSEHVQVSVKFDVDERGLTVMSGTGSALVALTCQRCNENFDQSLEVEFTFSPAKNEEAAEKIPSYYDVVELDENGEVNLRELVEEELMLMIPLIPRHNIQDCSADADSVWGELPEELEKPNPFDVLKQFK

SEQ ID NO: 170 - DNA, 522 bp, Saccharophagus degradans 2-40
  CDS (1)..(522): transl_table=11
atgcggctaccgcagtatatagaacctcgaaagttggctcagaagggcggttcattcgatggcgacatgttgccagaggatatgcctcgagtaatggaagccatagcttcgtgtgaaagtgttaacgctaagttgcagtttgacattgaagatcagcgacgcagaacaatgcgcggctctatacaaggtgatctgaagctagtttgccagcgctgtttacagccggtggattacaagcttgatgtggaagtgaatctcgccatggtgtgggatgaagatcaagccaaaaagcttccaggctatattgagccttggatagtgggtgaagaccccgaagatttacacgcaatattggaagaggaagtgctactcgctttaccggtagtggcatttcacgatgaagattgcatcgacgcgagtttgttaagcgttggtgaggaagttaagcagcctgagaagagtgagaacccttttctggtattagcagcattaaaaagcaagtccgactcgaaccaggactaa

SEQ ID NO: 171 - protein, 173 aa, Saccharophagus degradans 2-40
MRLPQYIEPRKLAQKGGSFDGDMLPEDMPRVMEAIASCESVNAKLQFDIEDQRRRTMRGSIQGDLKLVCQRCLQPVDYKLDVEVNLAMVWDEDQAKKLPGYIEPWIVGEDPEDLHAILEEEVLLALPVVAFHDEDCIDASLLSVGEEVKQPEKSENPFLVLAALKSKSDSNQD

SEQ ID NO: 172 - DNA, 525 bp, Haemophilus somnus 129PT
  CDS (1)..(525): transl_table=11
atgcaaaaggtaaaactacccctaactgttgacccgattaaagatgcacagcgtagattggattatcaaggttgttatgtgtccaatcaagttactcgtttagcggagtcagtagtcaaagtgctcagcgatgtgcaggtaacattatcgtttttcgttgatccgcaaaaattgactgtaatgaaaggaagagcgagtgttgatgtggaattagaatgtcaacgttgtggttatcctttcagtcaatcattggaatgtgagttttcttatagtccagtgtctgatttgggtaagatcaatgaattgccagagatttatgaaccgatagaattaaatgaattcggggaaatagatttaattggaacgattgaagatgaactgattgttgctcttccaattgttccgatgcattcatctgaacactgtgaagtgtccgtggctgaacaggtttttggcgaattgccggaagagctggcaaaaaaaccgaacccgttcgctgtattagctagtttaaagaaaaagtaa

SEQ ID NO: 173 - protein, 174 aa, Haemophilus somnus 129PT
MQKVKLPLTVDPIKDAQRRLDYQGCYVSNQVTRLAESVVKVLSDVQVTLSFFVDPQKLTVMKGRASVDVELECQRCGYPFSQSLECEFSYSPVSDLGKINELPEIYEPIELNEFGEIDLIGTIEDELIVALPIVPMHSSEHCEVSVAEQVFGELPEELAKKPNPFAVLASLKKK

SEQ ID NO: 174 - DNA, 525 bp, Shewanella sp. MR-4
  CDS (1)..(525): transl_table=11
atgcaaacagtaaagataccggtttcaattgatcctattcgcgccgcctcgagccgttctacctatgaggggatagtgccagggcagcaattgaaaagattaaatgagttatgtgccggcgactgttccgatgtggcagtgtcgattgaatgtggcgtagatttgcaggggatagtctacctgaaagggaaggctgtgacggagctcactctggtttgtcaacgttgcatgacgctatttaccactgaggttacggtcgagttttgcttcggtccatgccggactaaggcagaaatcgatgagctcccggatgcgtatgacccaattgagtgcaatgagattggcgaagtacgtctgcatcaattgatcgaagatgaattgatagtcgctatgcctatcatcccgatgcatgaagaaactgattgcaacatcgggtcaatggacatagttgtaggcgagatcgaacccgctcaagaggagcgtccaaatccgtttgcagtgttagaaaaactgaagagcaagtaa

SEQ ID NO: 175 - protein, 174 aa, Shewanella sp. MR-4
MQTVKIPVSIDPIRAASSRSTYEGIVPGQQLKRLNELCAGDCSDVAVSIECGVDLQGIVYLKGKAVTELTLVCQRCMTLFTTEVTVEFCFGPCRTKAEIDELPDAYDPIECNEIGEVRLHQLIEDELIVAMPIIPMHEETDCNIGSMDIVVGEIEPAQEERPNPFAVLEKLKSK

SEQ ID NO: 176 - DNA, 525 bp, Shewanella sp. ANA-3
  CDS (1)..(525): transl_table=11
atgcaaacagtaaagataccggtttcaattgatccttttcgcgccgcctcgagccgttctacctatgaggggatagtgcctgggcagcaattgagaagattaaatgagttatgtgccggcgactgttccgatgtggcagtgtcgattgaatgtggcgtagatttgcaggggatagtctacctgaaagggaaggctgtgacggagctcactctggtttgtcaacgttgcatgacgctatttaccactgaggttacggtcgagttttgcttcggtccatgccggactaaggcagaaatcgatgagctcccggatgcgtatgacccaattgagtgcaatgagattggcgaagtacgtctgcatcaattgatcgaagatgaattgatagtcgctatgcctatcatcccgatgcatgaagaaactgattgcaacaccgggtcaatggacatagttgtaggcgagatcgaacccgctcaagaggagcgtccaaatccgtttgcagtgttagaaaaactgaagagcaagtaa

SEQ ID NO: 177 - protein, 174 aa, Shewanella sp. ANA-3
MQTVKIPVSIDPFRAASSRSTYEGIVPGQQLRRLNELCAGDCSDVAVSIECGVDLQGIVYLKGKAVTELTLVCQRCMTLFTTEVTVEFCFGPCRTKAEIDELPDAYDPIECNEIGEVRLHQLIEDELIVAMPIIPMHEETDCNTGSMDIVVGEIEPAQEERPNPFAVLEKLKSK

SEQ ID NO: 178 - DNA, 519 bp, Photobacterium sp. SKA34
  CDS (1)..(519): transl_table=11
atgcaaaaggtaaaattgccgctaaaggtagatccagtacgcacagcacaaaaaagactcgattatgatggcatcatcaaagccgatcttttgtctcgcctagctgaatcaacccagagcgtaataagtgatgtaaacgtcaacttgtcttttgaccttgaccaacgtcgtattcctttcatccgcggtatcgcagatgtagacgtgatgttgacctgtcagcgatgtcagggagaatttccacaccatattcatgtggaattctgttatagtccggttcgcaacgaagaagccgtagatgagttaccggaagcctatgagccgacaatcgtcgacgaaaatggcgagatcaacttgattcaactcgttgaagacgaattgattctggaattaccacaagtcgcaatgcacgacgatgctgattgtgaaattggctcgaagaacatgtcttttggtgagattcccgttgctgatgagcgtccgaatccgtttgcagtattgaaaaatcttaagagttaa

SEQ ID NO: 179 - protein, 172 aa, Photobacterium sp. SKA34
MQKVKLPLKVDPVRTAQKRLDYDGIIKADLLSRLAESTQSVISDVNVNLSFDLDQRRIPFIRGIADVDVMLTCQRCQGEFPHHIHVEFCYSPVRNEEAVDELPEAYEPTIVDENGEINLIQLVEDELILELPQVAMHDDADCEIGSKNMSFGEIPVADERPNPFAVLKNLKS

SEQ ID NO: 180 - DNA, 522 bp, Neptuniibacter caesariensis
  CDS (1)..(522): transl_table=11
atgtcaaacggtccattacctattagagtagacccgcgaaaacttgctgagcgggagatacgaattgaaggcgaagcagagcttagtcgtatgcctcatctttgtcagggattagttcctgagaaagagggtaagattaacgtcgatcttcagtttgctgttgatgagcaaaaaattcgtattattacaggcagtgcgtcaggccacgtttatatggtttgtcagcgatgtcttgaaccagtagaagttgccgtagaggctgattttaatcttggcgttgccgccagcgaggaagctgctaagcagttacctcgtagttatgatcctctcattgttgaggatgaagagattgagttgctttctgtggttgaagaggaattgatcttaagccttcctcatgatgcatatcatgatgattgctcgatcaaaacttcattcggcgaagccgaggcagtggcagaagacaacaaaaaaccgaatccatttagtgtgttggctcagttgaagtccgacaacaaatag

SEQ ID NO: 181 - protein, 173 aa, Neptuniibacter caesariensis
MSNGPLPIRVDPRKLAEREIRIEGEAELSRMPHLCQGLVPEKEGKINVDLQFAVDEQKIRIITGSASGHVYMVCQRCLEPVEVAVEADFNLGVAASEEAAKQLPRSYDPLIVEDEEIELLSVVEEELILSLPHDAYHDDCSIKTSFGEAEAVAEDNKKPNPFSVLAQLKSDNK

SEQ ID NO: 182 - DNA, 525 bp, Alteromonadales bacterium TW-7
  CDS (1)..(525): transl_table=11
atgcaaaaggtaaaaattcccttcactcttcatcctgggaaagcagcgcaacaccgtttatcatacgatggtattgtaccgcttgaaaaactgactcgtttacgaggtgttgtacaggaagaagtaggtgaaatagcggtaaaaattcagtgcaaaaacgatgagcaaggtttagttgtgattagcggcaatttgtccacacacgtaactgtaacttgtcaacgttgtaatgatgatttagggttggatttggatcaagactttatgtattcgcctgttggtttggatgctgagtcggatgatcttccagaagactacgatgaagtagcgcttgatgaaaacggtgaaattaacgtgtttgagttaatcgaagacgaattaattttagcggtgccattagtgcctacacacaacgaagcttcgtgcaattactcgtcaaagcctgccagctttggtgtattaaaagcagaagatgataaaccaaatccatttgatattttgaaacaacttaagaaagattcttag

SEQ ID NO: 183 - protein, 174 aa, Alteromonadales bacterium TW-7
MQKVKIPFTLHPGKAAQHRLSYDGIVPLEKLTRLRGVVQEEVGEIAVKIQCKNDEQGLVVISGNLSTHVTVTCQRCNDDLGLDLDQDFMYSPVGLDAESDDLPEDYDEVALDENGEINVFELIEDELILAVPLVPTHNEASCNYSSKPASFGVLKAEDDKPNPFDILKQLKKDS

SEQ ID NO: 184 - DNA, 555 bp, Marinobacter sp. ELB17
  CDS (1)..(555): transl_table=11
atgtcaaatgcgataaatcccaagctacccaaatccgtcgatccatacaagttggcggaacagcatacggttctggaaggcgaagtgcctactggagccttatcccgtttccgcgatgccgttatgggcctggatgacaacgccgtttgtagcgttcgcctgtcctttcggatggatcctgaacgtcgccgtgtcgtaagtggagagctggcggctccggtacagctgcagtgtcagcgttgcatggggccaatgcaggtaacgttgcgttcacactttgagttggggctagtaaccagtgacgagcaggcgcaacggttaccgcagagccttgaaccgtttttgacaaacgacttcaacgcgaacctctggtttatggttgaagacgagctgttgttggtgctaccgccgttcccgctccatgaacgcgacgagtgcccggcgcgggaagatcttgaagccctggagcctggcagcaatgcagaaaagccggccgggaaatccgccgagaatccgttcagtgtgctggcgggtcttaagaacacgaagcactga

SEQ ID NO: 185 - protein, 184 aa, Marinobacter sp. ELB17
MSNAINPKLPKSVDPYKLAEQHTVLEGEVPTGALSRFRDAVMGLDDNAVCSVRLSFRMDPERRRVVSGELAAPVQLQCQRCMGPMQVTLRSHFELGLVTSDEQAQRLPQSLEPFLTNDFNANLWFMVEDELLLVLPPFPLHERDECPAREDLEALEPGSNAEKPAGKSAENPFSVLAGLKNTKH

SEQ ID NO: 186 - DNA, 549 bp, Moritella sp. PE36
  CDS (1)..(549): transl_table=11
atgatgaatctatattatccgcaacctatgaaaaaggtaaaactaccagtaactgttgatccttatcgtactgctcaacaaagattggacttcaacacttgtgttgaaggtcgtctgttgaaacgtattacggatgcaacagcaggtgaaccaagtgatgctgaggtatcaatatcgtacgacaaagataagcaaggtcttatagtgatacagggtaacgtatcactaactgtaagccttgaatgtcagcgttgtggtgagatatttacgcaagcttgtgaaaccgaatttagatatagtcctgtgaagaatgattcccaggtcgacgatctgccagatgcttatgagcccattgaattggatgcaaatggcgagataaatcaaatttcattgattgaagatgaagtgattatcaatttaccacttgttgctttgcaccaagaggaagattgttcagtgaatccaaattacatgagttttggtgaaatcgagcctgctgatgagcagcccaacccatttgccgctttatctgaattaaagcgcaagtaa

SEQ ID NO: 187 - protein, 182 aa, Moritella sp. PE36
MMNLYYPQPMKKVKLPVTVDPYRTAQQRLDFNTCVEGRLLKRITDATAGEPSDAEVSISYDKDKQGLIVIQGNVSLTVSLECQRCGEIFTQACETEFRYSPVKNDSQVDDLPDAYEPIELDANGEINQISLIEDEVIINLPLVALHQEEDCSVNPNYMSFGEIEPADEQPNPFAALSELKRK

SEQ ID NO: 188 - DNA, 525 bp, Shewanella hanedai
  CDS (1)..(525): transl_table=11
atgcacggttgcgttttatcggtttcaattgatccaacacgtgctgctgcgagtcttctttcttatgaaggtatgattcctggtaagcagttaaagcgattaaatgaattaagtgccggcgactgttccgatgtggcagtgtcgtttgaatgtggcgaagatatacaggggatagtctaccttaaagggaaggctgtgacggagctcactctgaattgtcaacgttgcatgacactatatactacaaaggttacggtcgacttcaactcctctccctgtgggaatgaagatgaaatcgatgagctcccggatgtgtatgaccctattgagtgtgatgaaataggcgaggttcgtctgcatcaattgattgaagatgaattgataattgctatgcccctgataccaatgcatgctaacgaaagttgtggcaaaggtgatcaagacatagttgtaggcgtaattgaaccttctcaagaggagcgtccaaatccgtttgcagtgttagaaaaactgaagagcaagtaa

SEQ ID NO: 189 - protein, 174 aa, Shewanella hanedai
MHGCVLSVSIDPTRAAASLLSYEGMIPGKQLKRLNELSAGDCSDVAVSFECGEDIQGIVYLKGKAVTELTLNCQRCMTLYTTKVTVDFNSSPCGNEDEIDELPDVYDPIECDEIGEVRLHQLIEDELIIAMPLIPMHANESCGKGDQDIVVGVIEPSQEERPNPFAVLEKLKSK

SEQ ID NO: 190 - DNA, 525 bp, Haemophilus influenzae
  CDS (1)..(525): transl_table=11
atgcaaaaggtaaaactacccctcactgttgatcccataaaagatgctcaaagacggcttgattatgttggttattatgcggcaaatcagcttgagcgtttggcggaatcagtggtaaacgtgctcagcgatgcacaggtaacattatcgttttatgttgatccacaaaaattagtggtgatgaaaggtaaagtacagattgatgtcgatcttgaatgtcagcgttgtaacgaaccttacaaacaaacattggaatgtgagtttacttatagtccagtggctaattgggatcaggctgatgacttgcccgaaatttatgagccaatcgagttcaatgagtttggcgaaatagatttaattggcacggtggaagatgagctaattttagctttgccgcttgtaccaatgcattcatctgaacactgtgaagtgtccgcgcaggaacaggtttttggcgtattgcctgaagaattggcaaaaaaaccgaacccgttcgctgtattagctaatttaaagcaaaagtaa

SEQ ID NO: 191 - protein, 174 aa, Haemophilus influenzae
MQKVKLPLTVDPIKDAQRRLDYVGYYAANQLERLAESVVNVLSDAQVTLSFYVDPQKLVVMKGKVQIDVDLECQRCNEPYKQTLECEFTYSPVANWDQADDLPEIYEPIEFNEFGEIDLIGTVEDELILALPLVPMHSSEHCEVSAQEQVFGVLPEELAKKPNPFAVLANLKQK

SEQ ID NO: 192 - DNA, 522 bp, Salmonella typhi
  CDS (1)..(522): transl_table=11
atgcaaaaggtaaaattacccctgactcttgatccggttcgtaccgctcaaaaacgccttgattaccagggtatctatacccccgatcaggttgagcgcgttgccgaatctgtagtcagtgtggacagtgatgtggaatgctccatgtcgttcgctatcgataaccagcgtctcgccgttttgactggcgatgcggtcgttacggtgtcgctcgaatgccagcgttgcgggaaaccgtttacccatcaggttcacacaacgtattgttttagccctgtccgttccgacgagcaggctgaagcactgccggaagcgtatgagccgattgaggtaaacgaattcggcgaaatcgatctgctggcgacggttgaagatgaaatcatcctcgccttgccggtagttccggtgcatgattctgaacactgtgaagtgtccgaggcggacatggtctttggcgaactgcctgatgaagcgcaaaagccaaacccatttgccgtattagccagcttaaagcgtaagtaa

SEQ ID NO: 193 - protein, 173 aa, Salmonella typhi
MQKVKLPLTLDPVRTAQKRLDYQGIYTPDQVERVAESVVSVDSDVECSMSFAIDNQRLAVLTGDAVVTVSLECQRCGKPFTHQVHTTYCFSPVRSDEQAEALPEAYEPIEVNEFGEIDLLATVEDEIILALPVVPVHDSEHCEVSEADMVFGELPDEAQKPNPFAVLASLKRK

SEQ ID NO: 194 - DNA, 25 bp, Artificial sequence
  primer
atgcaaaaggtaaaattacccctga

SEQ ID NO: 195 - DNA, 25 bp, Artificial sequence
  primer
ttacttacgctttaagctggctaat

SEQ ID NO: 196 - protein, 178 aa, Artificial sequence
  consensus sequence
  Variant (2)..(4): Xaa in position 2 to 4 is any amino acid
  Variant (6)..(6): Xaa in position 6 is any amino acid
  Variant (8)..(8): Xaa in position 8 is any amino acid
  Variant (9)..(10): Xaa in position 9 to 10 is any or no amino acid
  Variant (13)..(15): Xaa in position 13 to 15 is any amino acid
  Variant (17)..(18): Xaa in position 17 to 18 is any amino acid
  Variant (20)..(23): Xaa in position 20 to 23 is any amino acid
  Variant (25)..(32): Xaa in position 25 to 32 is any amino acid
  Variant (34)..(52): Xaa in position 34 to 52 is any amino acid
  Variant (53)..(55): Xaa in position 53 to 55 is any or no amino acid
  Variant (57)..(57): Xaa in position 57 is any amino acid
  Variant (59)..(64): Xaa in position 59 to 64 is any amino acid
  Variant (66)..(70): Xaa in position 66 to 70 is any amino acid
  Variant (72)..(72): Xaa in position 72 is any amino acid
  Variant (74)..(74): Xaa in position 74 is any amino acid
  Variant (79)..(93): Xaa in position 79 to 93 is any amino acid
  Variant (95)..(103): Xaa in position 95 to 103 is any amino acid
  Variant (106)..(107): Xaa in position 106 to 107 is any amino acid
  Variant (109)..(116): Xaa in position 109 to 116 is any amino acid
  Variant (119)..(120): Xaa in position 119 to 120 is any amino acid
  Variant (122)..(125): Xaa in position 122 to 125 is any amino acid
  Variant (129)..(129): Xaa in position 129 is any amino acid
  Variant (131)..(133): Xaa in position 131 to 133 is any amino acid
  Variant (135)..(138): Xaa in position 135 to 138 is any amino acid
  Variant (140)..(143): Xaa in position 140 to 143 is any amino acid
  Variant (145)..(149): Xaa in position 145 to 149 is any amino acid
  Variant (150)..(153): Xaa in position 150 to 153 is any or no amino acid
  Variant (155)..(162): Xaa in position 155 to 162 is any amino acid
  Variant (163)..(167): Xaa in position 163 to 167 is any or no amino acid
  Variant (172)..(172): Xaa in position 172 is any amino acid
  Variant (175)..(176): Xaa in position 175 to 176 is any amino acid
MXXXKXPXXXDPXXXAXXRXXXXGXXXXXXXXRXXXXXXXXXXXXXXXXXXXXXXDXQXXXXXXGXXXXXVXLXCQRCXXXXXXXXXXXXXXXPXXXXXXXXXLPXXYXXXXXXXXGEXXLXXXXEDEXIXXXPXXXXHXXXXCXXXXXXXXXGXXXXXXXXXXXXXPNPFXVLXXLK

SEQ ID NO: 197 - protein, 30 aa, Artificial sequence
  protein pattern
  Variant (3)..(3): Xaa in position 3 is Ile, Leu or Val
  Variant (4)..(4): Xaa in position 4 is Asp, Asn or Arg
  Variant (5)..(6): Xaa in position 5 to 6 is any amino acid
  Variant (7)..(7): Xaa in position 7 is Ala, Asp, Glu, Gly, Gln or Ser
  Variant (8)..(8): Xaa in position 8 is any amino acid
  Variant (9)..(9): Xaa in position 9 is Ile or Val
  Variant (13)..(13): Xaa in position 13 is any or no amino acid
  Variant (15)..(17): Xaa in position 15 to 17 is any amino acid
  Variant (18)..(18): Xaa in position 18 is any or no amino acid
  Variant (20)..(20): Xaa in position 20 is any amino acid
  Variant (21)..(21): Xaa in position 21 is Ala, Ile or Val
  Variant (22)..(22): Xaa in position 22 is Ala or Pro
  Variant (23)..(23): Xaa in position 23 is any amino acid
  Variant (25)..(25): Xaa in position 25 is Ala, Asp, Glu, Asn, Gln or Ser
  Variant (26)..(26): Xaa in position 26 is Asp, Glu, Asn or Ser
  Variant (27)..(27): Xaa in position 27 is Ala, Glu or Thr
  Variant (28)..(28): Xaa in position 28 is any amino acid
  Variant (30)..(30): Xaa in position 30 is Glu, Gly, Asn or Ser
GEXXXXXXXEDEXIXXXXPXXXXHXXXXCX

SEQ ID NO: 198 - protein, 28 aa, Artificial sequence
  protein pattern
  Variant (2)..(3): Xaa in position 2 to 3 is any amino acid
  Variant (4)..(4): Xaa in position 4 is Gly, Leu or Val
  Variant (5)..(5): Xaa in position 5 is any amino acid
  Variant (6)..(6): Xaa in position 6 is Ile or Leu
  Variant (8)..(9): Xaa in position 8 to 9 is any amino acid
  Variant (10)..(10): Xaa in position 10 is Ile, Leu or Val
  Variant (11)..(11): Xaa in position 11 is any amino acid
  Variant (12)..(12): Xaa in position 12 is Ala or Pro
  Variant (13)..(13): Xaa in position 13 is any amino acid
  Variant (14)..(14): Xaa in position 14 is Lys or Arg
  Variant (15)..(15): Xaa in position 15 is any amino acid
  Variant (17)..(17): Xaa in position 17 is any amino acid
  Variant (18)..(18): Xaa in position 18 is any or no amino acid
  Variant (20)..(23): Xaa in position 20 to 23 is any amino acid
  Variant (24)..(27): Xaa in position 24 to 27 is any or no amino acid
MXXXXXPXXXXXXXXAXXRXXXXXXXXG

SEQ ID NO: 199 - protein, 11 aa, Artificial sequence
  protein pattern
  Variant (5)..(5): Xaa in position 5 is Ala, Asp or Ser
  Variant (8)..(9): Xaa in position 8 to 9 is any amino acid
PNPFXVLXXLK

SEQ ID NO: 200 - DNA, 354 bp, Escherichia coli
  CDS (1)..(354): transl_table=11
atgatagataaaattaaatcaaatgcgcgtgatttaagacgcaatctcactttgcaggaacgaaagctctggcgatatcttcgcagccgacgttttagtgatttcaaatttcgccgtcaacatccagtggggagctacattctcgattttgcttgctgctcggcgcgtgtagtcgttgagctggatggtgggcagcatgatttagcagttgcctatgattccaggcgcactagctggcttgagtcgcagggctggaccgtgctgcgtttctggaataacgagattgattgtaatgaggagacggtgctggagaatattctgcaggaactgaaccgccggtcaccctctccctaa

SEQ ID NO: 201 - protein, 117 aa, Escherichia coli
MIDKIKSNARDLRRNLTLQERKLWRYLRSRRFSDFKFRRQHPVGSYILDFACCSARVVVELDGGQHDLAVAYDSRRTSWLESQGWTVLRFWNNEIDCNEETVLENILQELNRRSPSP

SEQ ID NO: 202 - DNA, 393 bp, Xanthomonas campestris pv. campestris
  CDS (1)..(393): transl_table=11
atgaaaatcaaaccaccattacccactgtcacacgcacccatgcgcgcgcattacgcaaagagctgacagacgcagaacgcgcactttggcgctgtctacgcagcaaccagctacacgatttcaagttcagacgtcagcatccgattccgccctacatcgcagatttttgttgtatcgatgcagcattgattattgagctggatggatcgcagcaccaagcatccagcgatcaggcaaggacgcggtggcttcaatcgaagggatggacagtgctgcgcttctggaataacgatgtgttgttttcgctggatgcggtggttgaaacgatcttcaagatggtcgctacgccgtaccctcaccccaacccctctcccggtgggagaggggcttga

SEQ ID NO: 203 - protein, 130 aa, Xanthomonas campestris pv. campestris
MKIKPPLPTVTRTHARALRKELTDAERALWRCLRSNQLHDFKFRRQHPIPPYIADFCCIDAALIIELDGSQHQASSDQARTRWLQSKGWTVLRFWNNDVLFSLDAVVETIFKMVATPYPHPNPSPGGRGA

SEQ ID NO: 204 - DNA, 390 bp, Neisseria meningitidis MC58
  CDS (1)..(390): transl_table=11
atgagcacgcacgagaaacttttaaccgccgacaaccccgtcctgcatcaacgcgccaaagccatgcgccaagaaatgagcgaggcggaagcaaaattgtggcagcacctgcgggcaggccgtctgaacggctataaattccgccgccagcagccgatggggaattatattgttgattttatgtgcgtaacgcccaagctgattgtcgaagcagacggcgggcagcacgcggaacaagccgtatacgaccacgcgcggacggcatatctcaacagcctgggctttaccgtgctgcgtttttggaatcacgaaattttgcagcagacaaacgatgtactggcggaaatcctgcgcgtattgcaggaattggaaaagcagtatgcgcaataa

SEQ ID NO: 205 - protein, 129 aa, Neisseria meningitidis MC58
MSTHEKLLTADNPVLHQRAKAMRQEMSEAEAKLWQHLRAGRLNGYKFRRQQPMGNYIVDFMCVTPKLIVEADGGQHAEQAVYDHARTAYLNSLGFTVLRFWNHEILQQTNDVLAEILRVLQELEKQYAQ

SEQ ID NO: 206 - DNA, 390 bp, Neisseria meningitidis Z2491
  CDS (1)..(390): transl_table=11
atgaacccgcacgagaaactcttgaccaccgacaaccccatcttgcgccaacgcgccaaagccatgcgccaagaaatgagcggggcggaagcaaaattgtggcagcacctgcgggcaggtcgtctgaacggctataaattccgccgccagcagccgatgggaaactatattgttgattttatgtgcgtaacgcccaagttgattgtcgaagcagacggagggcagcacacagaacaagccgcatacgaccacgcgcggacggcatatctcaacagcttgggctttaccgtactgcggttttggaatcacgagattttacagcagacaaacgatgtgctgacagaaatcctgctcgtgttgcaagaattggaaaagcaagctgcacgatag

SEQ ID NO: 207 - protein, 129 aa, Neisseria meningitidis Z2491
MNPHEKLLTTDNPILRQRAKAMRQEMSGAEAKLWQHLRAGRLNGYKFRRQQPMGNYIVDFMCVTPKLIVEADGGQHTEQAAYDHARTAYLNSLGFTVLRFWNHEILQQTNDVLTEILLVLQELEKQAAR

SEQ ID NO: 208 - DNA, 504 bp, Deinococcus radiodurans R1
  CDS (1)..(504): transl_table=11
ttgtcgaaattcaggtcgtgttcgtggaagtgttcagacatgggaaaatccttgtgtggggcgggcgggttggtctggacgccccctcaccccttgctgcgcaaggccctctcccaccgggggagaggggtaaaagacactaactttgtcggtatgacgacgcgagcggtgcgaaaaggaacgctgcgggcacgggcattgcggcgcacccaaaccgtggaagaaaaaacgctgtggctggccttgcgaaaccgcttcttgaacgtgaaattccgacgacagtggccgatgggcggctatgtcgtggattttgtctgttttgaggcaaaattgattgttgaactggacggcagccagcacgccgaggaagcggcgcgggactacgacgctgtgcggactgagtttctggaagcgggcggcttcaccgttctccgcttctggaacaacgaagtccgcaaaaatctggaaggcgttttgctggaaattcaaaagcgtttgccctag

SEQ ID NO: 209 - protein, 167 aa, Deinococcus radiodurans R1
MSKFRSCSWKCSDMGKSLCGAGGLVWTPPHPLLRKALSHRGRGVKDTNFVGMTTRAVRKGTLRARALRRTQTVEEKTLWLALRNRFLNVKFRRQWPMGGYVVDFVCFEAKLIVELDGSQHAEEAARDYDAVRTEFLEAGGFTVLRFWNNEVRKNLEGVLLEIQKRLP

SEQ ID NO: 210 - DNA, 369 bp, Agrobacterium tumefaciens str. C58
  CDS (1)..(369): transl_table=11
atgccccacgccaaggtcaaaccccaacaccgggaacatgcgcggcaaatgcgaaaggctctgaccgacgccgaactgaaattctggaacgcggtccgtgctcatcgcctcgacggcctctctttcagacgccaactgcctgtcgccggatatatcgttgatttcgcttgcccgtcacataagatcatcgtcgaactggatgggtttcagcacgctgaagatgctgcggcagcttacgaccggcagagaacacggacacttgaggaactaggctggaccgtcctccgtttctggaacgatgatatcctcaaagacatcgacaacgtctgtctccacattatccgaacggcagaggagaaccaaccatga

SEQ ID NO: 211 - protein, 122 aa, Agrobacterium tumefaciens str. C58
MPHAKVKPQHREHARQMRKALTDAELKFWNAVRAHRLDGLSFRRQLPVAGYIVDFACPSHKIIVELDGFQHAEDAAAAYDRQRTRTLEELGWTVLRFWNDDILKDIDNVCLHIIRTAEENQP

SEQ ID NO: 212 - DNA, 405 bp, Sinorhizobium meliloti 1021
  CDS (1)..(405): transl_table=11
atgagaggagcgaacgaacgcaagacagaacgcgcgagaggtctgcggcaaagcgacaacgatgcagaagcgctcctttggtcggagctgagagaccggcgtctaaacggcttcaagttcgtccggcaggtcgccgtcggtccttactttgctgatttcgcctgccgtgatgagaggctggtcgtcgaggtcgacggcagtcagcatcagatcggcagcggcgatgcgaggcgcgacaagttcatggtcatgaatggatggagtgtgctccgcttctggaatacggacatcttcaatgaccgcgccgcggtactggagacgatcgtggcggtgctcgagaagcggttggtgcgggaagtgaggagtgcggatttgacgttcattccgggggagaagaagagatga

SEQ ID NO: 213 - protein, 134 aa, Sinorhizobium meliloti 1021
MRGANERKTERARGLRQSDNDAEALLWSELRDRRLNGFKFVRQVAVGPYFADFACRDERLVVEVDGSQHQIGSGDARRDKFMVMNGWSVLRFWNTDIFNDRAAVLETIVAVLEKRLVREVRSADLTFIPGEKKR

SEQ ID NO: 214 - DNA, 345 bp, Caulobacter crescentus CB15
  CDS (1)..(345): transl_table=11
atggacgccaccgccaacgcccgtcgcctacgccaatcccagaccctggctgagaagacgctgtggaccctggtccgggcgcaccggctgggcgggttcaagttcaggcggcagacgccgatcggcggctatttcgcggacttcgtctgcgaacaggcccggctgatcgtcgagctggacggcgcggcgcatgaggggcgggaggactatgacgcccgtcgcaccgaggcgcttgagcggttcggctatgcggtgctgaggtttcgcaacgaacgggtgctggccgatccgggcgggacggcggacgatattctggcggcgctgcgggacgcgcggggagggtga

SEQ ID NO: 215 - protein, 114 aa, Caulobacter crescentus CB15
MDATANARRLRQSQTLAEKTLWTLVRAHRLGGFKFRRQTPIGGYFADFVCEQARLIVELDGAAHEGREDYDARRTEALERFGYAVLRFRNERVLADPGGTADDILAALRDARGG

SEQ ID NO: 216 - DNA, 342 bp, Caulobacter crescentus CB15
  CDS (1)..(342): transl_table=11
atgaaccgcaccgcgctcgcccgcaggcttcgccagcgccagaccttcgccgagaaggcgctatggacgctggtccgcaatcggcgcttgggcggcttcaagttccaacgccaggcggtgatcgaccgctatatcgtcgacttcgtctgcgagtccgcgaaggtcatcgtcgagttggacggggcggctcacgacggccgggaagaacacgacgccaatcgggcgagaatactcgagccttgcggctacctcgtgctgaggtttcgcaacgagcaggtcttggtcgatccgggcgggaccacggatgaaatactgacggtgttgcgcatggggagggcttga

SEQ ID NO: 217 - protein, 113 aa, Caulobacter crescentus CB15
MNRTALARRLRQRQTFAEKALWTLVRNRRLGGFKFQRQAVIDRYIVDFVCESAKVIVELDGAAHDGREEHDANRARILEPCGYLVLRFRNEQVLVDPGGTTDEILTVLRMGRA

SEQ ID NO: 218 - DNA, 534 bp, Caulobacter crescentus CB15
  CDS (1)..(534): transl_table=11
atgtgtccgggcgatgggctccgcccgccggacgcctgccagcgccccccattgcagcgggcgtccggtcgccgcctcccgctttgccccctagtcttgcgggaggcggccccccactttgcagcttgcgaatgttcctgtattgttccatctgtggtggagcggtctcgacaactcgacttcgcgcgacgtctgcgtcgtgacgcgcccgcgatggaacgggtgctttggcggctgttgcgagaccgtcgccttgatggcctcaagttccgccggcaactgcccatcggccgctatgtcgtcgacttcgcctgcctgcgccatcggctgatcgtcgaggccgacgggccgtatcacgatgaggcgcgtgacgcgcaacgggacgcttggctggccgggcagggcttccgtgtgctgaggttcaagaacgacgaactcaacaaccccgaccgcgtcctggggctgatccttgaagcctgcgccgctcccccttctccccttgcgggagaaggtgtcgacgcagtcgacggatga

SEQ ID NO: 219 - protein, 177 aa, Caulobacter crescentus CB15
MCPGDGLRPPDACQRPPLQRASGRRLPLCPLVLREAAPHFAACECSCIVPSVVERSRQLDFARRLRRDAPAMERVLWRLLRDRRLDGLKFRRQLPIGRYVVDFACLRHRLIVEADGPYHDEARDAQRDAWLAGQGFRVLRFKNDELNNPDRVLGLILEACAAPPSPLAGEGVDAVDG

SEQ ID NO: 220 - DNA, 330 bp, Xanthomonas axonopodis pv. citri str. 306
  CDS (1)..(330): transl_table=11
atgaccgatgcagagcgtgcagtgtggcgctgtttacgtagcaagcagctgcacggtttgaagttccggcgccagcatccgattccgccctacatcgcagatttttgttgcatcgaaagacgcttgatcatcgagttggacggatcgcagcacgatgcttctagcgatcaggcaaggtcgcagtggcttcaatcacaaggatggacagtactgcgcttctggaacaatgatgtattgctttcgctggatgcggtggttgagacgatctgcaagatggtcgctacgccgtaccctcaccccaacccctctcccggtgggagaggggcttga

SEQ ID NO: 221 - protein, 109 aa, Xanthomonas axonopodis pv. citri str. 306
MTDAERAVWRCLRSKQLHGLKFRRQHPIPPYIADFCCIERRLIIELDGSQHDASSDQARSQWLQSQGWTVLRFWNNDVLLSLDAVVETICKMVATPYPHPNPSPGGRGA

SEQ ID NO: 222 - DNA, 387 bp, Xanthomonas axonopodis pv. citri str. 306
  CDS (1)..(387): transl_table=11
atggacacctccgaatcagccattttccatggccttgagatgtctaggaaatcctgggcgtatcagaccgctgccgagcgtttgctttggtaccgcctgcgtgatcggcgtctgttgggattcaagttccgcaggcagtgtccggtcggcccgtatgtcgccgatttcgcctgcctggaacgtgcgctcatcgtagaacttgacggcagccaacatctggaggcgccctccgatgccgtgcgcgaggccttcctgcaccgaaaaggcttccagttgctgcgcttctggaataatgaagtgctggcgcgcaccgatgctgtctgcgacgcgattgtgcaacggctgtgcgttgcccgcttttctcctcctccttccggcgttcggtag

SEQ ID NO: 223 - protein, 128 aa, Xanthomonas axonopodis pv. citri str. 306
MDTSESAIFHGLEMSRKSWAYQTAAERLLWYRLRDRRLLGFKFRRQCPVGPYVADFACLERALIVELDGSQHLEAPSDAVREAFLHRKGFQLLRFWNNEVLARTDAVCDAIVQRLCVARFSPPPSGVR

SEQ ID NO: 224 - DNA, 366 bp, Bradyrhizobium japonicum USDA 110
  CDS (1)..(366): transl_table=11
gtgccacgagacccgtcccatcgaccgatcgccccgcctctccgccaatttgcaaggaagatgcggcacgagccgactgacgccgagagggcaatgtggcgcttgttgagggatcgtcggctctccactttcaagtttcgccgacaggagccgttcaagaactacattctcgactttgtctgtttcgagaagaggctcgtgatcgagattgacggaagccaacatgcggaatcacaaggcgacgcaactcgtgacgcagccttgtccgcggcaggtttcgccatagcgcgttactggaacaacgaggtgttgcaacagcccgcggctgtgctggaagacattcttgcaaagctcgccacgcggtaa

SEQ ID NO: 225 - protein, 121 aa, Bradyrhizobium japonicum USDA 110
MPRDPSHRPIAPPLRQFARKMRHEPTDAERAMWRLLRDRRLSTFKFRRQEPFKNYILDFVCFEKRLVIEIDGSQHAESQGDATRDAALSAAGFAIARYWNNEVLQQPAAVLEDILAKLATR

SEQ ID NO: 226 - DNA, 369 bp, Rhodopirellula baltica SH 1
  CDS (1)..(369): transl_table=11
atgccaatccgccaaccacctcaactcacccaaaacacacgcgaactccgaaccaaccaaaccaagcccgaatcactcgtctggacactcctccgcaaccgccgactcaacggacacaagtttcgacgccagttccccattccacctttcattgccgactttgcctgtgtcgagaaacgtttgatcgttgaactcgatggcgactaccacgaacagcaagagcaacaagacatgagccgaactgctcgattgaaccgcgacggatggatcgttttgcggttttgcaacgcggatgtcttggagaacaccgaggcggttggtgtggcgatattgcgggcgatgggagaggaatggcgaggtggtgaatga

SEQ ID NO: 227 - protein, 122 aa, Rhodopirellula baltica SH 1
MPIRQPPQLTQNTRELRTNQTKPESLVWTLLRNRRLNGHKFRRQFPIPPFIADFACVEKRLIVELDGDYHEQQEQQDMSRTARLNRDGWIVLRFCNADVLENTEAVGVAILRAMGEEWRGGE

SEQ ID NO: 228 - DNA, 480 bp, Rhodopseudomonas palustris CGA009
  CDS (1)..(480): transl_table=11
atggacgatccgaagcaaccgacctggaacgtgtcgccgagcctgcgtcgccatgcgcgcgagctgcgaaagaagtcgaccgaggccgagcggctgatgtggggcgagctgcgcgacaagcgtctcaatggcttctcgttcaagcgacaggtgccgatcgggccgtacatcgccgacttcgcctgccacgcgaaaaagctggtggtcgagctcgatggcggtcagcatttttccgatgacggtgaacgctccgatgcggcgcgcacggccgcgatcgaggctcgcgggtttcgggtgatccgcttcagcaatcatgaagtcatgactaatcgagcaggggtgttgcagagcattgcggatgtgcttgcggcaagggtcctcaccccaaccctctcccgcaagcgggagagggagcgcgccaagcgcgcggcgaagcctcgctctgacgcgggtgccgcgaacgaccagggcgatgagtag

SEQ ID NO: 229 - protein, 159 aa, Rhodopseudomonas palustris CGA009
MDDPKQPTWNVSPSLRRHARELRKKSTEAERLMWGELRDKRLNGFSFKRQVPIGPYIADFACHAKKLVVELDGGQHFSDDGERSDAARTAAIEARGFRVIRFSNHEVMTNRAGVLQSIADVLAARVLTPTLSRKRERERAKRAAKPRSDAGAANDQGDE

SEQ ID NO: 230 - DNA, 402 bp, Rhodopseudomonas palustris CGA009
  CDS (1)..(402): transl_table=11
gtggccagtgcgaccgcccgcggacttcgcaagcgtctcacgccgcaggaagcgcggctgtgggccgggctgcgcgagctcaagctgcgcggctatcacttccggcggcgcgcgccgatcggctgctatgtcgtagacttcgtctgcctgtcggcaaagctcgtcatcgacgccgatggcgagcagcaggccatgccggcacatttcgccgccgaccggcagcgtggtgttgtcctgcgccgccaaggcttccgtgtgctgcacttctggaattccgacatcgatcgttacttcgagggcgtgatgcagaccgtcctcgatgcgctgccacctccgtccgttcgacctaacgtgtcgcggaccggccactccatccacgaaggagcgggagagagcggttga

SEQ ID NO: 231 - protein, 133 aa, Rhodopseudomonas palustris CGA009
MASATARGLRKRLTPQEARLWAGLRELKLRGYHFRRRAPIGCYVVDFVCLSAKLVIDADGEQQAMPAHFAADRQRGVVLRRQGFRVLHFWNSDIDRYFEGVMQTVLDALPPPSVRPNVSRTGHSIHEGAGESG

SEQ ID NO: 232 - DNA, 435 bp, Rhodopseudomonas palustris CGA009
  CDS (1)..(435): transl_table=11
atggtcaagcgccagatcagcgacttcaagcgcgccaccgcgaacaaactgcggggtaacagcaccgctgccgaagacatcctgtggcggcgtttgcgacgaatgaatgtggaaggaagtcacttcagacggcaggtggtaatcgggccctacatcgccgatttcgcctgccttgcgaagcgactgatcatcgaggtcgacggatcgcaacacggcgacgaagacggactgaagcgtgacgaggtccggacgcaatggctgcagtcggaaggctaccgggtgatccgattctggaacaatgatgtgatgagcaagaccgacgccgtgatggacgccatttacaacgcgaccgctgtcaccccaccccgctcgccattggcgagcgaccctccccctccaggggagggtgacaccgtgcgtggggggaaagaataa

SEQ ID NO: 233 - protein, 144 aa, Rhodopseudomonas palustris CGA009
MVKRQISDFKRATANKLRGNSTAAEDILWRRLRRMNVEGSHFRRQVVIGPYIADFACLAKRLIIEVDGSQHGDEDGLKRDEVRTQWLQSEGYRVIRFWNNDVMSKTDAVMDAIYNATAVTPPRSPLASDPPPPGEGDTVRGGKE

SEQ ID NO: 234 - DNA, 528 bp, Geobacter sulfurreducens PCA
  CDS (1)..(528): transl_table=11
gtgaaggacatacccggcgaatcaagaccgaacgcaacggttgctgacgccgggagaagtatctggtcgagtatcgcagagaatggcggttatgacccccctcaatcccccctattccataggggggaagcgaacgacgagagcaggggggtggtgtccatgaaaacctacaccaaggctttgataccgcgtgcacgggacatgcgctcgaacatgacggagccggaaaagcggatgtggtatcagtgtttgaagcacctgccgctacgtttccgccgtcaacgccctgttggtccctacattgtcgatttctactgcgccgagctgaaactggtcatcgaaattgacggtgccagtcatgccaccgacgaagggattgtgtacgatgcgggacggacggcttttcttgaagggcttggcttgcgggttattcgattcggaaatcatgaagtcatgaacaacattgaaggcgtattcgagagcttgcaaaaagaagtgcgacccccctcaatcccccctattccatag

SEQ ID NO: 235 - protein, 175 aa, Geobacter sulfurreducens PCA
MKDIPGESRPNATVADAGRSIWSSIAENGGYDPPQSPLFHRGEANDESRGVVSMKTYTKALIPRARDMRSNMTEPEKRMWYQCLKHLPLRFRRQRPVGPYIVDFYCAELKLVIEIDGASHATDEGIVYDAGRTAFLEGLGLRVIRFGNHEVMNNIEGVFESLQKEVRPPSIPPIP

SEQ ID NO: 236 - DNA, 390 bp, Bradyrhizobium sp. ORS278
  CDS (1)..(390): transl_table=11
gtgatgtcagacacaccgcatcatcgaccgaccggcaagcgcatccgtactttcgcgaaagcgatgcgccgggagccgactgatgccgaagccgcaatgtggcggctgctgcgcggccggcgactgtcagagttcaagtttcgccgacaggtgccgttccgaaactacatcctggacttcgtctgcttcgagcagcggctggtgatcgagatcgatggcagccagcatgcggatgccacgggtgatcggacgagagacgaggtgcttgctggcgaaggattcaaagtggctcgatactggaacaatgatgtccttcaaaaacgaacggctgttctcgaggacatcctcgcaaagttgagcgagaggagagagatccctcacccggcatga

SEQ ID NO: 237 - protein, 129 aa, Bradyrhizobium sp. ORS278
MMSDTPHHRPTGKRIRTFAKAMRREPTDAEAAMWRLLRGRRLSEFKFRRQVPFRNYILDFVCFEQRLVIEIDGSQHADATGDRTRDEVLAGEGFKVARYWNNDVLQKRTAVLEDILAKLSERREIPHPA

SEQ ID NO: 238 - DNA, 501 bp, Synechococcus sp. PCC 7002
  CDS (1)..(501): transl_table=11
ttggggactttctactggtgtgctagacaggcgatcgcctctaccccatctttctcttgttcccccagaatgggggtcagggggcaaatttccccgattcgggggctagggggcaatacaacccaaagtaaacatatgcgatatcgaagaatacgcggcacaactcccgaaattgaagccgcagcccgtcgcctccgagacaatctaactccggcagaagcaaaactttgggaagcaatcagaggaaaacaactcgacggcttcaagtttcgctgtcaacatcctgttgaacaatttatcctcgatttttattgtcctagttgtaaattagtcgtagaaattgatggcgagattcaccgcgatcgccaagaatacgatcaagcccgcaccgaaaaactagagacattaggttatcgagtgactcgctttagcaacgatgaagtcatccataatttaggtgatgttttggagcgtatcagagcgcaattgagaagcccctag

SEQ ID NO: 239 - protein, 166 aa, Synechococcus sp. PCC 7002
MGTFYWCARQAIASTPSFSCSPRMGVRGQISPIRGLGGNTTQSKHMRYRRIRGTTPEIEAAARRLRDNLTPAEAKLWEAIRGKQLDGFKFRCQHPVEQFILDFYCPSCKLVVEIDGEIHRDRQEYDQARTEKLETLGYRVTRFSNDEVIHNLGDVLERIRAQLRSP

SEQ ID NO: 240 - DNA, 375 bp, Cyanothece sp. ATCC 51142
  CDS (1)..(375): transl_table=11
atgaaaactagcaatttctacttaccttataattctaagctgatagcaagggcaaaaaggttgagaaaaaacatgacacaagctgaaaaaaagctttggtatgattacctcagacattttcactgtcgcatccatagacaaagacccattgataactttattgttgatttctattgtccgagggcaaaacttgttatcgaagttgatggagaaattcatgacacagaatcagcgcaacaatatgatcacgaaagaacacgaagattagaagggtatggattaaccgttgttcgcttcactaaccaggaagtcctcaatcattttgtagaggtgtgtgaaaaaattgcagacttgattcctccgacatccctttga

SEQ ID NO: 241 - protein, 124 aa, Cyanothece sp. ATCC 51142
MKTSNFYLPYNSKLIARAKRLRKNMTQAEKKLWYDYLRHFHCRIHRQRPIDNFIVDFYCPRAKLVIEVDGEIHDTESAQQYDHERTRRLEGYGLTVVRFTNQEVLNHFVEVCEKIADLIPPTSL

SEQ ID NO: 242 - DNA, 387 bp, Nostoc punctiforme PCC 73102
  CDS (1)..(387): transl_table=11
atgacaaataaactcaatagcagcaatcaccatttaccttacaatccaaagcttgtagaaagagcgaaagaacttcgtaaaaatatgaccccagcagaaaaaaagctgtggtatgaatatttgagaaattttcaatttcgggttttaagacaacgaccgattaatcatttcatagttgatttctactgtcctactttaaaaatagtgattgaagttgatggggatagccattttacagatgaaagtcaagagtacgatctagagagaacaaacattttggaaggctatggtttaaagattattaggtttacaaatagtcaagttttaaatcactttgatagtgtgtgtgagcagatacagcgtctgatcccccctagcaccccttaa

SEQ ID NO: 243 - protein, 128 aa, Nostoc punctiforme PCC 73102
MTNKLNSSNHHLPYNPKLVERAKELRKNMTPAEKKLWYEYLRNFQFRVLRQRPINHFIVDFYCPTLKIVIEVDGDSHFTDESQEYDLERTNILEGYGLKIIRFTNSQVLNHFDSVCEQIQRLIPPSTP

SEQ ID NO: 244 - DNA, 402 bp, Nostoc punctiforme PCC 73102
  CDS (1)..(402): transl_table=11
atgatgaacaacctcaacagtagcaatttccatttaccttacaatccaaagcttgtagaaagagcaaaagaacttcgcaaaaatatgaccccagcagaaaaaaagctgtggtgtgaatatctgagtgattttcaatttcgggttttaagacaaagaccaattaatcattttatagttgatttctactgtcctactttacaagtagttaaaattgatggggatagccattttacagatgaaggtcaagattatgacatagagagaacacatattctagaaggctatggtttaaagattattaggtttacaaatagtcaagttttaaatcaatttgatagtgtgtgtgagcagatacagggtttaatccctcctaaactcccttttaaggggaaaaattcttaa

SEQ ID NO: 245 - protein, 133 aa, Nostoc punctiforme PCC 73102
MMNNLNSSNFHLPYNPKLVERAKELRKNMTPAEKKLWCEYLSDFQFRVLRQRPINHFIVDFYCPTLQVVKIDGDSHFTDEGQDYDIERTHILEGYGLKIIRFTNSQVLNQFDSVCEQIQGLIPPKLPFKGKNS

SEQ ID NO: 246 - DNA, 378 bp, Desulfotalea psychrophila LSv54
  CDS (1)..(378): transl_table=11
atgacaacaagcaaaagagccttcacactcaaaaagcataaaaccctccgacaaaagcttcgcaacaatctcacgccatcggaaagagggctctggctttacctcaggcgaaaaggttgcggttgcaagtttcgtcgccaacatagcatcggcagatacgtagtcgacttctactgtcatgaactcaaacttgtcattgaggtagatggcgatagtcatttccaatcaggtgccgttgaacatgatcaacagcgcgaagattttctcaaatcacttggcctcaccattctccactacacaaacgtcgatgtcctcaacaacggtcttgcagttgcagaaaatattgctactaaagtcgaattactacaacaaaaatag

SEQ ID NO: 247 - protein, 125 aa, Desulfotalea psychrophila LSv54
MTTSKRAFTLKKHKTLRQKLRNNLTPSERGLWLYLRRKGCGCKFRRQHSIGRYVVDFYCHELKLVIEVDGDSHFQSGAVEHDQQREDFLKSLGLTILHYTNVDVLNNGLAVAENIATKVELLQQK

SEQ ID NO: 248 - DNA, 405 bp, Mannheimia succiniciproducens MBEL55E
  CDS (1)..(405): transl_table=11
ttgtatataaactcaatctttttttacattgattactccaaacttaaaatcggagtaacaatggaattaaaagaatttgccctaaaattaaggaaaaatctcacggaagaagaatcaatcctttggtatcatttacgaaagaaacaactagccggctttcattttagaaaacaggcagttattgcaccttatgttgttgattttatttgttataaagccaaattgattattgaaattgacggtgaacaacatttcctgccttcagcattagtttacgatgagaaacgaactttttatttaaaatcaaaaggcttcagagttattcgatttaccaattatgaaatcaaacgggaattagatagtgtgttagataaaatttggtatgagttaacgggcgaattttaa

SEQ ID NO: 249 - protein, 134 aa, Mannheimia succiniciproducens MBEL55E
MYINSIFFYIDYSKLKIGVTMELKEFALKLRKNLTEEESILWYHLRKKQLAGFHFRKQAVIAPYVVDFICYKAKLIIEIDGEQHFLPSALVYDEKRTFYLKSKGFRVIRFTNYEIKRELDSVLDKIWYELTGEF

SEQ ID NO: 250 - DNA, 387 bp, Methylococcus capsulatus str. Bath
  CDS (1)..(387): transl_table=11
gtgaatcagcttgaacgtgccaaatttctaagagcaaaccagaccgaggccgaccaacagctttggtatcacctgcgcgcccgtcgtttcatggggttgaagttcaagcgtcagaagccaatcggttcgtacattgctgattttgtctgcatggaatacgggttggtcatcgaagtggacggagggcagcacggtggcgaatccgaccgacggcgggatgcgtggtttcgtgaacatggatttaccgtgctgcgattttggaacaacgaggttttgggagagactgcggcggtgttggaacgcatccgagtggaaattttggccctctcccccggcccctctcccgcaagcgggagaggggagaaaaaccaggaggccatggcatga

SEQ ID NO: 251 - protein, 128 aa, Methylococcus capsulatus str. Bath
MNQLERAKFLRANQTEADQQLWYHLRARRFMGLKFKRQKPIGSYIADFVCMEYGLVIEVDGGQHGGESDRRRDAWFREHGFTVLRFWNNEVLGETAAVLERIRVEILALSPGPSPASGRGEKNQEAMA

SEQ ID NO: 252 - DNA, 390 bp, Neisseria gonorrhoeae FA 1090
  CDS (1)..(390): transl_table=11
atgaacccgcccgagaaactattgaccgccgaaaaccccgccctgcgccaacgcgccaaagccatgcgtcaagaaatgagcgaggcggaagcaaaattgtggcaacacctgcgggcaggccgtctgaacggctataaattccgccgacagcagccgatggggaattatattgttgattttatgtgcgtaacgcccaagctgattgtcgaagcagacggcgggcagcacgcggaacaagccgtatacgaccacgcgcggacggtatatctcaacagcttgggctttaccgtgctgcgtttttggaatcacgaaattttgcagcagacaaacgatgtactggcggaaatcctgcgcgtattgcaggaattggaaaagcagccagcacggtag

SEQ ID NO: 253 - protein, 129 aa, Neisseria gonorrhoeae FA 1090
MNPPEKLLTAENPALRQRAKAMRQEMSEAEAKLWQHLRAGRLNGYKFRRQQPMGNYIVDFMCVTPKLIVEADGGQHAEQAVYDHARTVYLNSLGFTVLRFWNHEILQQTNDVLAEILRVLQELEKQPAR

SEQ ID NO: 254 - DNA, 372 bp, Pseudomonas fluorescens PfO-1
  CDS (1)..(372): transl_table=11
atgcaaaatcgccctaccctcgaccaacgccgattcgcccgccacttacgcgccagccagaccgattgtgagcaactgctctggcagaagctgcgggcgcggcaggtggcagggctgaaatttcggcggcaggtgccggttccgccattcgtgctggatttctactgtgtggaattgaagctggcggtagagctggatggggggcagcactttgaggaggcgggagaaattcatgaccggcggcgtacggcttatcttcagcgactggggattgaggtggtgcggtttagcaatctggaggtgattcagcagatgagtgacgtgctggagcagattgtgcgggttgcggaggttttgagagcgcaatcctga

SEQ ID NO: 255 - protein, 123 aa, Pseudomonas fluorescens PfO-1
MQNRPTLDQRRFARHLRASQTDCEQLLWQKLRARQVAGLKFRRQVPVPPFVLDFYCVELKLAVELDGGQHFEEAGEIHDRRRTAYLQRLGIEVVRFSNLEVIQQMSDVLEQIVRVAEVLRAQS

SEQ ID NO: 256 - DNA, 414 bp, Mesorhizobium sp. BNC1
  CDS (1)..(414): transl_table=11
atgccgcatacgccggtccctggacgcaatcgccgcaacgcgaaggcgatgcgcaacgcgatgacggacgccgagctgaagctctggaattctctacgtgcgcaccggctcgcaggtcttgggttccggcgccaaatgccaatcgccggctatattgctgatttcgcatgtccagccgaggaattgattgtggaagttgatggttcgcagcacggcgagccgaataccgcgcggcgagatgaactacgaaccgcgcgcctgaaagcagatggctggaccatccttcgcttctggaatgacgaaatcctgcgcgatattgacggcgtctgccgccacatcgtggccgcagcgggattgatcgcaggagatgcggccagggccggagtgctgcatgagaaggagctgacgcaatga

SEQ ID NO: 257 - protein, 137 aa, Mesorhizobium sp. BNC1
MPHTPVPGRNRRNAKAMRNAMTDAELKLWNSLRAHRLAGLGFRRQMPIAGYIADFACPAEELIVEVDGSQHGEPNTARRDELRTARLKADGWTILRFWNDEILRDIDGVCRHIVAAAGLIAGDAARAGVLHEKELTQ

SEQ ID NO: 258 - DNA, 357 bp, Mesorhizobium sp. BNC1
  CDS (1)..(357): transl_table=11
atgcgccaagctgttccgccgccgcaccgcacatatgcccgcaccatgcgggccgacgcgacgaaggccgaaaaccttttgtggcaagcgctgcgcaacaagaaactcgaaggcttaaaattcaggcggcaagtgccgctcgacggctacatcctcgacttcgtctgcttcgaggcgcggctgatcctggaggtcgatggcgggcagcattcgggcgcgatacgagacgccgtgcgcgacaggcattttgaagcccggggcttcaagacactgcgcttctggaacgacgaggtggaaaagaacctcggcggcatctgcctcaccatcctacatgaggcgaaggggaggatcgtttag

SEQ ID NO: 259 - protein, 118 aa, Mesorhizobium sp. BNC1
MRQAVPPPHRTYARTMRADATKAENLLWQALRNKKLEGLKFRRQVPLDGYILDFVCFEARLILEVDGGQHSGAIRDAVRDRHFEARGFKTLRFWNDEVEKNLGGICLTILHEAKGRIV

SEQ ID NO: 260 - DNA, 402 bp, Rhizobium leguminosarum bv. viciae 3841
  CDS (1)..(402): transl_table=11
atgagaggtcccaaaccgaaaaccaccgcccgagcgcgatcgctgcgtcagtcggataatgatgcagaagacagactgtggaatgagctgcgcgatcggcggctcaacggaaacaagtttgtccgacaattgccgatcggtccctattttgcagatttcgcccgccgtgaactgcgccttgtcgtcgaaatcgacggcagccaacatgcggaaagtcgacgagacggcattcgtgatgtcttcatgaccggcgatggctggtcggttgttcgtttctggaatgtggacgtgctgagagcgctgccatcggtgctggatactattctggcaatctgcgacgggcgattgaccgcgcgtgtcgaggtggcggatttgcggttctttccggctgcaagcgactag

SEQ ID NO: 261 - protein, 133 aa, Rhizobium leguminosarum bv. viciae 3841
MRGPKPKTTARARSLRQSDNDAEDRLWNELRDRRLNGNKFVRQLPIGPYFADFARRELRLVVEIDGSQHAESRRDGIRDVFMTGDGWSVVRFWNVDVLRALPSVLDTILAICDGRLTARVEVADLRFFPAASD

SEQ ID NO: 262 - DNA, 402 bp, Rhizobium leguminosarum bv. viciae 3841
  CDS (1)..(402): transl_table=11
atgagaggtcccaagcccaaaaccaccgcccgagcgcgatcgttgcgtcagtcggacaatgatgcagaggacagactgtggaatgagctgcgcgatcggcggctcaacggaaacaagtttgtccgacaattgccgattggtccctattttgcagatttcgcctgccgtgaattgcggctcgtcatcgaaatcgacggcagtcaacatgcggaaagtcgacgagacggcattcgtgatgtcttcatgaccggtgatggctggtcggtggtgcgcttctggaatgtggatgttctgacggcactgccatcggtgctggatactattctggcaatttgcgacggccggctggttgaacgggtcgaggtggcggatttgcgattctttccggcggcacgtgactag

SEQ ID NO: 263 - protein, 133 aa, Rhizobium leguminosarum bv. viciae 3841
MRGPKPKTTARARSLRQSDNDAEDRLWNELRDRRLNGNKFVRQLPIGPYFADFACRELRLVIEIDGSQHAESRRDGIRDVFMTGDGWSVVRFWNVDVLTALPSVLDTILAICDGRLVERVEVADLRFFPAARD

SEQ ID NO: 264 - DNA, 585 bp, Rhizobium leguminosarum bv. viciae 3841
  CDS (1)..(585): transl_table=11
atggctaatgtcacgccccgagccccctcatccgacccttcgggccaccttctccccgctggggagaagggaacggtagacgtcgcggtcttccccttctcccctcggggagaaggtgcccgaagggcggatgagggggctccgcgcgcgacgaaaattatcaagcaggatatccggaaacatcgcaccaacaagaccgaccaggccagaatgcttcgtcgcaacgaaactgaagaagaataccacctctggagcgacctccgcgcccgccgcttgaacggctataagtttgcaaggcaagttcccctcggcccattcatcgtcgatttcctctgtcgtgaacaacgattgatcgtcgaagtcgacggcttccagcatgccgatagcgtgtccgatcagcgccgaactgaatggctcaatgtgaatggctatgccgtgctgcgcttctggaaccaggaaatctcgcgcgaacgtcgctcagtactcgaaacggttctagccgccttacagggccggattgaggtcagcttagaactgcccagcttctattcgccagcccaatctgcagacaagaacggggaatga

SEQ ID NO: 265 - protein, 194 aa, Rhizobium leguminosarum bv. viciae 3841
MANVTPRAPSSDPSGHLLPAGEKGTVDVAVFPFSPRGEGARRADEGAPRATKIIKQDIRKHRTNKTDQARMLRRNETEEEYHLWSDLRARRLNGYKFARQVPLGPFIVDFLCREQRLIVEVDGFQHADSVSDQRRTEWLNVNGYAVLRFWNQEISRERRSVLETVLAALQGRIEVSLELPSFYSPAQSADKNGE

SEQ ID NO: 266 - DNA, 372 bp, Azoarcus sp. BH72
  CDS (1)..(372): transl_table=11
atgcaaggacgcaacaccccgaccaagaacttcgcccgcaacctgcgccgcaactccaccgacgctgaacgagtgctctggcggcatctgcgtggtggtcagttcggcgcgaagttccgccgtcagcatcctttcgcggactacgtgctcgatttcgtatgccttgaactgaagctggtggtggaactcgatggcgggcagcatgccgagcgcgtcgcgtatgacgatgcgcgtaccgcgatactgcggacggcgggcttcgatgtaattcgcttctggaacagcgaggtatttcaggagccggacgcggtggtggagcggttgcggttggtgatcgaggggcggcgaccgttgttcgaagcccgcggctga

SEQ ID NO: 267 - protein, 123 aa, Azoarcus sp. BH72
MQGRNTPTKNFARNLRRNSTDAERVLWRHLRGGQFGAKFRRQHPFADYVLDFVCLELKLVVELDGGQHAERVAYDDARTAILRTAGFDVIRFWNSEVFQEPDAVVERLRLVIEGRRPLFEARG

SEQ ID NO: 268 - DNA, 390 bp, Neisseria meningitidis FAM18
  CDS (1)..(390): transl_table=11
atgagcacgcacgagaaacttttaaccgccgacaaccccgtcctgcatcaacgcgccaaagccatgcgccaagaaatgagcgaggcggaagcaaaattgtggcagcacctgcgggcaggccgtctgaacggctataaattccgccgccagcagccgatgggaaactatattgttgattttatgtgcgtaacgcccaagttgattgtcgaagcagacggagggcagcacacagaacaagccgcatacgaccacgcgcggacggcatatctcaacagcttgggctttaccgtactgcggttttggaatcacgagattttacagcagacaaacgatgtgctgacagaaatcctgctcgtgttgcaagaattggaaaagcaagctgcacgatag

SEQ ID NO: 269 - protein, 129 aa, Neisseria meningitidis FAM18
MSTHEKLLTADNPVLHQRAKAMRQEMSEAEAKLWQHLRAGRLNGYKFRRQQPMGNYIVDFMCVTPKLIVEADGGQHTEQAAYDHARTAYLNSLGFTVLRFWNHEILQQTNDVLTEILLVLQELEKQAAR

SEQ ID NO: 270 - DNA, 369 bp, Cyanothece sp. PCC 8801
  CDS (1)..(369): transl_table=11
atgaaagatacccctagaatcagaggaacaaccccagaaattgaagcagcagcgagacgtttacggtgtaatcttactcccgcagaagcttatttatgggaagcattacgaggtaaaaaattaaagggtttaaagtttcgttgtcagcatcctgttgggcgttttattcttgatttttattgtccttcttgtaagttagcgattgagattgatggcagttctcatgatacgaaacaagagtatgatcaagtaagaacggaaaaactcgctcagtatggttatagggttctaagatttactaatgaggaggttatgactgatttatcaagagttttagcggaaattgaaaaggttgcttttaccccctaa

SEQ ID NO: 271 - protein, 122 aa, Cyanothece sp. PCC 8801
MKDTPRIRGTTPEIEAAARRLRCNLTPAEAYLWEALRGKKLKGLKFRCQHPVGRFILDFYCPSCKLAIEIDGSSHDTKQEYDQVRTEKLAQYGYRVLRFTNEEVMTDLSRVLAEIEKVAFTP

SEQ ID NO: 272 - DNA, 372 bp, Microcystis aeruginosa PCC 7806
  CDS (1)..(372): transl_table=11
atgaacctaaacaacagcgactttcatctaccttataatactgccctagtagccagagcgaaagaactgcgaaagaacatgaccttagcagagaaaaagctgtggtattcctatctaaaaaatttcaaattcaaagtcctaagacaacgccccattgatcatttcattgttgatttttattgccctagcctcaaacttgtgattgaaattgatggagatactcactttacggatgagggaaaagcctatgataaagagagaactgcgcgattagaaagctatgaattaaaagttattagattcacgaattcgcaggtattaagaaattttgaggcggtttgtgagcagctaaatctttcgatccccccttaa

SEQ ID NO: 273 - protein, 123 aa, Microcystis aeruginosa PCC 7806
MNLNNSDFHLPYNTALVARAKELRKNMTLAEKKLWYSYLKNFKFKVLRQRPIDHFIVDFYCPSLKLVIEIDGDTHFTDEGKAYDKERTARLESYELKVIRFTNSQVLRNFEAVCEQLNLSIPP

SEQ ID NO: 274 - DNA, 366 bp, Burkholderia sacchari
  CDS (1)..(366): transl_table=11
atgacgaacgcagagcaactgctatggcgccacctccgcgcccaccgcctgtgcggcgagaaattccgcagacagcaccccatcggcccctacatcgtggacttcatgcacttcggtgcgcgtttgatcatcgaggccgatggcgggcagcacaacggcagcgccaccgacgcagtgcgtgacacctggttgcggacgcgaggcttcaaggttctgcgcttctggaacgacgagatattgtcgaacgtcgatgtggtgcttgaggtgattctcggtgacatcgccgaaaggttcccctctcccccagcccctctccctcctgggagaggggagatcgcggacttttatcgatacggatttctatga

SEQ ID NO: 275 - protein, 121 aa, Burkholderia sacchari
MTNAEQLLWRHLRAHRLCGEKFRRQHPIGPYIVDFMHFGARLIIEADGGQHNGSATDAVRDTWLRTRGFKVLRFWNDEILSNVDVVLEVILGDIAERFPSPPAPLPPGRGEIADFYRYGFL

SEQ ID NO: 276 - DNA, 390 bp, Neisseria gonorrhoeae
  CDS (1)..(390): transl_table=11
atgaacccgcccgagaaactattgaccgccgaaaaccccgccctacgccaacgcgccaaagccatgcgtcaagaaatgagcgaggcggaagcaaaattgtggcaacacctgcgggcaggccgtctgaacggctataaattccgccgacagcagccgatggggaattatattgttgattttatgtgcgtaacgcccaagctgattgtcgaagcagacggcgggcagcacgcggaacaagccgtatacgaccacgcgcggacggtatatctcaacagcttgggctttaccgcgctgcgtttttggaatcacgaaatcttgcagcagacaaacgatgtactggcggaaatcctgcgcgtattgcaggaattggaaaagcagccagcacggtag

SEQ ID NO: 277 - protein, 129 aa, Neisseria gonorrhoeae
MNPPEKLLTAENPALRQRAKAMRQEMSEAEAKLWQHLRAGRLNGYKFRRQQPMGNYIVDFMCVTPKLIVEADGGQHAEQAVYDHARTVYLNSLGFTALRFWNHEILQQTNDVLAEILRVLQELEKQPAR

SEQ ID NO: 278 - DNA, 435 bp, Neisseria meningitidis
  CDS (1)..(435): transl_table=11
atgaacccgcacgagaaacttttgaccaccgacaaccccatcttgcgccaacgcgccaaagccatgcgccaagaaatgagcggggcggaagcaaaattgtggcagcacctgcgggcaggtcgtctgaacggctataaattccgccgccagcagccgatggggaattatattgttgattttatgtgcgtaacgcccaagctgattgtcgaagcagacggcgggcagcacgcggaacaagccgtatacgaccacgcgcggacggcatatctcaacagcctgggctttaccgtgctgcgtttttggaatcacgaaattttgcagcagacaatcgatgtactggcggaaatcctgctcgtgttgcaagcacactggaaaagcaagctgcacgatagcagatggctgattttgattggattattgaaaataataggataa

SEQ ID NO: 279 - protein, 144 aa, Neisseria meningitidis
MNPHEKLLTTDNPILRQRAKAMRQEMSGAEAKLWQHLRAGRLNGYKFRRQQPMGNYIVDFMCVTPKLIVEADGGQHAEQAVYDHARTAYLNSLGFTVLRFWNHEILQQTIDVLAEILLVLQAHWKSKLHDSRWLILIGLLKIIG

SEQ ID NO: 280 - DNA, 474 bp, Haemophilus influenzae
  CDS (1)..(474): transl_table=11
atgataacttgccttcccctgcttgcgggggaaggtgcccgaaggaagggggatatagggatgcgaaataaaaataaacgattagcccaatatgctacagaattaagacgtaatatgacagatgcagaatatgcactatggtaccatttgagaaataaactcttttgcggtatccgttttaatagacaggttattattggtcattacattgtggatttttgcagtagaaaattaaaacttgttattgaattagatggcattcagcacgtagaacaagaacaatatgatttagaaagaacaaaattcttaacagcacaaggctataaagttattcgcttttggaatgatgaagtactaaaaaacatagataatgtacttgaggcaatttatgttgaaattgagcatttatccccccctcacttcggcagctccccccataaatgggtggagccaagattagaggttctaaaataa

SEQ ID NO: 281 - protein, 157 aa, Haemophilus influenzae
MITCLPLLAGEGARRKGDIGMRNKNKRLAQYATELRRNMTDAEYALWYHLRNKLFCGIRFNRQVIIGHYIVDFCSRKLKLVIELDGIQHVEQEQYDLERTKFLTAQGYKVIRFWNDEVLKNIDNVLEAIYVEIEHLSPPHFGSSPHKWVEPRLEVLK

SEQ ID NO: 282 - DNA, 366 bp, Haemophilus influenzae
  CDS (1)..(366): transl_table=11
atgcaaccctatgaaaaatacttaaagctgaattcgcagaaactgcgagcggatcaaacggatacagaaagaaagctatggcaacgcatcaatcgagatcaattattaggatttcgatttaatcgacaaaagccacttttaagttatatcgttgatttttattgtgcaaagacaaagctgattattgaattagatggtagtcagcactataaacctgattatcaggaaaaagatgcattgcgagatgcagaattaaattcacttggttttacagtgatgcggtttagcaatgatgaagtcatgcgtgaaattgaagcggtagtagagcagatttatttgtttttagagaatgtaaggactgattga

SEQ ID NO: 283 - protein, 121 aa, Haemophilus influenzae
MQPYEKYLKLNSQKLRADQTDTERKLWQRINRDQLLGFRFNRQKPLLSYIVDFYCAKTKLIIELDGSQHYKPDYQEKDALRDAELNSLGFTVMRFSNDEVMREIEAVVEQIYLFLENVRTD

SEQ ID NO: 284 - DNA, 28 bp, Artificial sequence
  primer
atgatagataaaattaaatcaaatgcgc

SEQ ID NO: 285 - DNA, 22 bp, Artificial sequence
  primer
ttagggagagggtgaccggcgg

SEQ ID NO: 286 - protein, 100 aa, Artificial sequence
  consensus sequence
  Variant (2)..(4): Xaa in position 2 to 4 is any amino acid
  Variant (6)..(9): Xaa in position 6 to 9 is any amino acid
  Variant (10)..(11): Xaa in position 10 to 11 is any or no amino acid
  Variant (13)..(14): Xaa in position 13 to 14 is any amino acid
  Variant (17)..(19): Xaa in position 17 to 19 is any amino acid
  Variant (21)..(26): Xaa in position 21 to 26 is any amino acid
  Variant (27)..(28): Xaa in position 27 to 28 is any or no amino acid
  Variant (30)..(30): Xaa in position 30 is any amino acid
  Variant (33)..(33): Xaa in position 33 is any amino acid
  Variant (35)..(40): Xaa in position 35 to 40 is any amino acid
  Variant (43)..(43): Xaa in position 43 is any amino acid
  Variant (45)..(48): Xaa in position 45 to 48 is any amino acid
  Variant (50)..(51): Xaa in position 50 to 51 is any amino acid
  Variant (53)..(53): Xaa in position 53 is any amino acid
  Variant (56)..(57): Xaa in position 56 to 57 is any amino acid
  Variant (59)..(62): Xaa in position 59 to 62 is any amino acid
  Variant (63)..(66): Xaa in position 63 to 66 is any or no amino acid
  Variant (68)..(69): Xaa in position 68 to 69 is any amino acid
  Variant (71)..(73): Xaa in position 71 to 73 is any amino acid
  Variant (75)..(77): Xaa in position 75 to 77 is any amino acid
  Variant (79)..(80): Xaa in position 79 to 80 is any amino acid
  Variant (82)..(82): Xaa in position 82 is any amino acid
  Variant (85)..(85): Xaa in position 85 is any amino acid
  Variant (87)..(94): Xaa in position 87 to 94 is any amino acid
  Variant (95)..(95): Xaa in position 95 is any or no amino acid
  Variant (97)..(99): Xaa in position 97 to 99 is any amino acid
AXXXRXXXXXXEXXLWXXXRXXXXXXXXFXRQXPXXXXXXDFXCXXXXLXXEXDGXXHXXXXXXXXDXXRXXXLXXXGXXVXRFXNXXXXXXXXXVXXXI

SEQ ID NO: 287 - protein, 13 aa, Artificial sequence
  protein pattern
  Variant (2)..(2): Xaa in position 2 is any or no amino acid
  Variant (4)..(4): Xaa in position 4 is any amino acid
  Variant (6)..(6): Xaa in position 6 is Phe, Ile, Leu, Met or Val
  Variant (7)..(8): Xaa in position 7 to 8 is any amino acid
  Variant (9)..(9): Xaa in position 9 is Phe or Tyr
  Variant (10)..(10): Xaa in position 10 is Phe, Ile or Val
  Variant (11)..(11): Xaa in position 11 is Ala, Leu or Val
RXQXPXXXXXXDF

SEQ ID NO: 288 - protein, 23 aa, Artificial sequence
  protein pattern
  Variant (2)..(3): Xaa in position 2 to 3 is any amino acid
  Variant (5)..(5): Xaa in position 5 is Asp or Thr
  Variant (6)..(7): Xaa in position 6 to 7 is any amino acid
  Variant (8)..(8): Xaa in position 8 is Phe, Leu or Met
  Variant (9)..(11): Xaa in position 9 to 11 is any amino acid
  Variant (12)..(12): Xaa in position 12 is Glu or Gly
  Variant (13)..(16): Xaa in position 13 to 16 is any amino acid
  Variant (19)..(19): Xaa in position 19 is any amino acid
  Variant (21)..(21): Xaa in position 21 is any amino acid
  Variant (22)..(22): Xaa in position 22 is Asp, Glu, Gln or Arg
  Variant (23)..(23): Xaa in position 23 is Ile, Leu or Val
DXXRXXXXXXXXXXXXRFXNXXX

SEQ ID NO: 289 - DNA, 390 bp, Escherichia coli
  CDS (1)..(390): transl_table=11
atgagcaacgtaccagcagaactgaaatacagcaaagaacacgaatggctgcgtaaagaagccgacggcacttacaccgttggtattaccgaacatgctcaggagctgttaggcgatatggtgtttgttgacctgccggaagtgggcgcaacggttagcgcgggcgatgactgcgcggttgccgaatcggtaaaagcggcgtcagacatttatgcgccagtaagcggtgaaatcgtggcggtaaacgacgcactgagcgattccccggaactggtgaacagcgaaccgtatgcaggcggctggatctttaaaatcaaagccagcgatgaaagcgaactggaatcactgctggatgcgaccgcatacgaagcattgttagaagacgagtaa

SEQ ID NO: 290 - protein, 129 aa, Escherichia coli
MSNVPAELKYSKEHEWLRKEADGTYTVGITEHAQELLGDMVFVDLPEVGATVSAGDDCAVAESVKAASDIYAPVSGEIVAVNDALSDSPELVNSEPYAGGWIFKIKASDESELESLLDATAYEALLEDE

SEQ ID NO: 291 - DNA, 468 bp, Glycine max
  CDS (1)..(468)
atggcttgcaggcaattgtgggcttcaagagctgcctcttacctgaggatctctgtgtttcacagaggcttttctaatgttgttaaagatttgaagtatgctgattctcatgagtgggtgaaagttgatgaaaattctgcaaccgtcggcataactgatcatgcccaagatcatttaggtgatgttgtatatgttgaattgccagaagtgggagcagctgtaacacaaggaggtagttttggtgcagttgaaagtgtgaaggcaactagtgacattaactctcctgtttcaggaaaagttgttgaagttaatgaagcgcttaacagctctcctgctttgatcaattcaagcccttataaagatggatggataattaaagttgaaataagtgacaatggtgaactaaacaacttgatggattcagatcaatactccaaattctgtgaagaagaagattccaagcactga

SEQ ID NO: 292 - protein, 155 aa, Glycine max
MACRQLWASRAASYLRISVFHRGFSNVVKDLKYADSHEWVKVDENSATVGITDHAQDHLGDVVYVELPEVGAAVTQGGSFGAVESVKATSDINSPVSGKVVEVNEALNSSPALINSSPYKDGWIIKVEISDNGELNNLMDSDQYSKFCEEEDSKH

SEQ ID NO: 293 - DNA, 435 bp, Pyrococcus abyssi GE5
  CDS (1)..(435): transl_table=11
ttgttgggaaaagagaatgtggtggttaatatgattgaggttggagaatacaaggttaaggaaggcctctattataccaaggaacatgagtgggctcaagtgctggaagatggaacagttctcgttggaataactgattacgctcagaaggagcttggagatatagcctatgttgagctccctgaagttggaaaggaggttaaaaagggagaagttctttgtgaagttgaaagcgttaaagccgttagtgaagtgtacgcacctgtaagcggagaagttattgaggtcaacgaggaactaagtgacagccccgagaagataaacgaagatccttatggggcttggatagctaagatcaaaccaaataacttagaagaggaacttaaagagttgatggacgcagagaagtatgctgaattcttaaagagcctttaa

SEQ ID NO: 294 - protein, 144 aa, Pyrococcus abyssi GE5
MLGKENVVVNMIEVGEYKVKEGLYYTKEHEWAQVLEDGTVLVGITDYAQKELGDIAYVELPEVGKEVKKGEVLCEVESVKAVSEVYAPVSGEVIEVNEELSDSPEKINEDPYGAWIAKIKPNNLEEELKELMDAEKYAEFLKSL

SEQ ID NO: 295 - DNA, 471 bp, Arabidopsis thaliana
  CDS (1)..(471)
atggcttgtagactcttttgggcttctagggttgcttctcatctaaggatctccgttgctcaacgagggttttcttccgtggttttgaaggatttgaaatatgctgattcacatgaatgggtgaagattgacgggaataaagcaacctttggtataacggatcacgcgcaggaccatttaggagatgtggtctatgtggagttacctgatgtaggacattcggtgtcacaagggaagagttttggagcagttgaaagtgtgaaagcaactagcgatatcaattctccagtctcgggtaaggtggttgaagtcaatgaggagctgaccgagtcccctggattggtgaactctagcccgtatgaacaaggatggatcataaaagttgagctgagtgatgcaggcgaggcagagaagctgatggattcagacaagtactctaagttctgcgaagaagaagacgccaagcactga

SEQ ID NO: 296 - protein, 156 aa, Arabidopsis thaliana
MACRLFWASRVASHLRISVAQRGFSSVVLKDLKYADSHEWVKIDGNKATFGITDHAQDHLGDVVYVELPDVGHSVSQGKSFGAVESVKATSDINSPVSGKVVEVNEELTESPGLVNSSPYEQGWIIKVELSDAGEAEKLMDSDKYSKFCEEEDAKH

SEQ ID NO: 297 - DNA, 429 bp, Sulfolobus tokodaii str. 7
  CDS (1)..(429): transl_table=11
gtgatagtaatgtcagaaattatagtcggtggaaaatacaaagtattaaaagatagatattattcagaaacagatgagtggatattggttaaagaaaacatagctattgtgggaataactgattatgcacagaaaaaactacgtgatatcgtaggtgttgaattaccagagatagataaagaagttaaggctaatgatccggttgctgttgtagaatccgtaaaagccgctgcagatatttactctccattatctggaaaagtaatagaaacaaaccaaaaactgactgagtcaccagaactaataaataaagatccttatggtgaaggctggatatttaaactagagataagtgacaggaacgaaatagaaaaattgttaagtccggaaaagtatagtgaattaataaaacaaagagagggattataa

SEQ ID NO: 298 - protein, 142 aa, Sulfolobus tokodaii str. 7
MIVMSEIIVGGKYKVLKDRYYSETDEWILVKENIAIVGITDYAQKKLRDIVGVELPEIDKEVKANDPVAVVESVKAAADIYSPLSGKVIETNQKLTESPELINKDPYGEGWIFKLEISDRNEIEKLLSPEKYSELIKQREGL

SEQ ID NO: 299 - DNA, 366 bp, Rhodopseudomonas palustris CGA009
  CDS (1)..(366): transl_table=11
atgaccacgctctacacccccgatcatgaatggctgaagatcgagggcgacgtcgccacgatcggcatcaccgactacgcccaggaacagcttggcgacgtggtgtttgtcgagctgccgaaggtcggccgcgccgtgaagaaggccgaagccgcagcggtggtggaatcggtgaaggccgcctccgacgtttacgcgccgatctccggcgaagtgctcgaagtcaacgagacgctcggcaccgagcccggcctggtgaactccgacgccggcggcgccgcatggttcttcaaactcagaatcgccgacaagagcgaactcgacggcctgatggacgaggccgcctacaagacccacacggcctga

SEQ ID NO: 300 - protein, 121 aa, Rhodopseudomonas palustris CGA009
MTTLYTPDHEWLKIEGDVATIGITDYAQEQLGDVVFVELPKVGRAVKKAEAAAVVESVKAASDVYAPISGEVLEVNETLGTEPGLVNSDAGGAAWFFKLRIADKSELDGLMDEAAYKTHTA

SEQ ID NO: 301 - DNA, 375 bp, Geobacter sulfurreducens PCA
  CDS (1)..(375): transl_table=11
atggaaacctatttcaccaaagagcacgagtgggtcaaggtcaaggaaggcgtggccgccgtggggatcaccgagtacgccgctcaccagctgggagacgttaccttcgtggagctgccgcaggtcgggaagcaggtgaagcagttcgaggtgctggcggccatcgagtcggtgaaggcggccagtgacatctacgccccggtttcggggaaggtgacccaggtgaacgaagcccttgacgatcgtcccgagatcgtgaacgaggccgccgaggaggcggggtggattgcctggatcgagatgggggatacctctgaactgaacggtctcctgacccgcgaacagtacgacgagtatctgaagggcctcgaataa

SEQ ID NO: 302 - protein, 124 aa, Geobacter sulfurreducens PCA
METYFTKEHEWVKVKEGVAAVGITEYAAHQLGDVTFVELPQVGKQVKQFEVLAAIESVKAASDIYAPVSGKVTQVNEALDDRPEIVNEAAEEAGWIAWIEMGDTSELNGLLTREQYDEYLKGLE

SEQ ID NO: 303 - DNA, 390 bp, Bdellovibrio bacteriovorus HD100
  CDS (1)..(390): transl_table=11
atgggatttcatattcctgaagattactactacacaaaagaacacgaatgggctcaagttgacgagaacatcgtaaccgtaggcatcactgagttcgctcaagaccaattgggtgaagtggtttacgtggaacttccagaagaaggtcaaaaaatcactcaaggccaaactttcggtgttattgagtccgttaaagccgtgagcgacctttacgctcctgtttccggcactgtaatcgaagtaaacgcgtccctgggcgacgatccttctgttttgaacgacgatccagtaaatgaaggctggttggttcgtatcgaaatggatactgaaaaagagctcgcaaacctgatgagagctccagattacaaaaaattgatcagcgagaagtaa

SEQ ID NO: 304 - protein, 129 aa, Bdellovibrio bacteriovorus HD100
MGFHIPEDYYYTKEHEWAQVDENIVTVGITEFAQDQLGEVVYVELPEEGQKITQGQTFGVIESVKAVSDLYAPVSGTVIEVNASLGDDPSVLNDDPVNEGWLVRIEMDTEKELANLMRAPDYKKLISEK

SEQ ID NO: 305 - DNA, 513 bp, Nasonia vitripennis
  CDS (1)..(513)
atggcgcgactggtagcgcagatcgccaggtgcaccgccaggtcgatgctatttaatcacgaggctgccgcattcaaggctgctccgaaatcttccagcctcgttcggcacatcgcgagcacacatcgcttggaagctgaaaggaggtacaccgacaaacatgagtgggtaacgctgaatggcaatattggtacagtaggaatttcggattacgcacaagatgctcttggagacgttgtttatgcacaacttccagacatcggccaagtgatcaaaaaagaagatgaatgtggagccctggagtcggtcaaggcagcctctgagataatgagcccctgcagtggcaaagtcctcgagaagaacgaagccgtcgagagcaaaccgggtcttatcaacacgtcctgctacgacgagggatggctcttcaagatcgaactgagcgatcccgaggagataaaaactcttatggacgaagatgcctacaacgagtacctcaagactgaccctcattaa

SEQ ID NO: 306 - protein, 170 aa, Nasonia vitripennis
MARLVAQIARCTARSMLFNHEAAAFKAAPKSSSLVRHIASTHRLEAERRYTDKHEWVTLNGNIGTVGISDYAQDALGDVVYAQLPDIGQVIKKEDECGALESVKAASEIMSPCSGKVLEKNEAVESKPGLINTSCYDEGWLFKIELSDPEEIKTLMDEDAYNEYLKTDPH

SEQ ID NO: 307 - DNA, 492 bp, Aedes aegypti
  CDS (1)..(492)
atggtgttatgtcatatccgtacctctctgcggcttggccagctggtcagtgtatccatcaagtcacaccacggatatcagtggcggtttctaagcaccactagttcgctgttgaaagagaggttatatactgataaacacgagtgggtctccgtcgacggtgaagttggaacggttggcatttcgaactttgcacaggaagctctcggtgatgtagtattcgcacagctcccggacgttggaaccaagctatcgcaaaaggacgaatgtggagcactggaaagtgtgaaagcagccagtgaagtctactcccctgtttccggagtggttacggagaagaactccgcggtcgaggaaacacccggattggtaaactcatcgtgttacgaaaatggttggctgttcaaactgaaattgacgaaaacggaagaattaacaaaactgatgaacgaacagcagtatgcggatttcctcaagagcgacggccattaa

SEQ ID NO: 308 - protein, 163 aa, Aedes aegypti
MVLCHIRTSLRLGQLVSVSIKSHHGYQWRFLSTTSSLLKERLYTDKHEWVSVDGEVGTVGISNFAQEALGDVVFAQLPDVGTKLSQKDECGALESVKAASEVYSPVSGVVTEKNSAVEETPGLVNSSCYENGWLFKLKLTKTEELTKLMNEQQYADFLKSDGH

SEQ ID NO: 309 - DNA, 480 bp, Chlamydomonas reinhardtii
  CDS (1)..(480)
atggcccttcgcgcattcggcagccttgccctcggcaacctgggtctgcaggcccaggtcatgcagtttgctggcgcgaccgctatgcgcgcctacgctactgtcgagaagggctacaagtatgctgcttcgcacgagtgggccaaggtcgacggcgacgttgcgaccgtgggcatttcggaccacgctcagggcgagctgggtgatgtggtgtacgtggagctgcccgatgtgggcaaggcggtgaagaagggcgagacctttggcgtagttgagtccgtgaaggccgccagcgacgtgtactcgcccatcagcggcgaggtcgtggaggtcaactccctgctggtcgacaagcccggcacggtgaactcctcgcctttcaaggagggctggatcatcaaggtgaagctgtccaacaagggcgagctctccagcctgctggactcggacgcctacgccaaggaatgcgagaagcactaa

SEQ ID NO: 310 - protein, 159 aa, Chlamydomonas reinhardtii
MALRAFGSLALGNLGLQAQVMQFAGATAMRAYATVEKGYKYAASHEWAKVDGDVATVGISDHAQGELGDVVYVELPDVGKAVKKGETFGVVESVKAASDVYSPISGEVVEVNSLLVDKPGTVNSSPFKEGWIIKVKLSNKGELSSLLDSDAYAKECEKH

SEQ ID NO: 311 - DNA, 480 bp, Physcomitrella patens subsp. patens
  CDS (1)..(480)
atggcgcaacagctgcttcgtccctgggcagtgcgatcggcgtctgcatttcggcagacgatggctcccttcttccaacgcttctccacggccacagtggtggacaacctccgatactcgaagtcgcatgagtggacgaggctggaaggcgacaccgccgtggtggggatcacgcaccacgcgcaggaggcgttaggcgatgtggtgttcgtggatctgccggaggtcgggaaggcgatctcgcagggggactcgttcgggagcgtggagagtgtcaaggccgtgagcgatgtgtattcccctgtgtccggggaggttgtggaggtcaacagtgagctcacggagtcgcctggattggtgaacaagggtccgtttgaggaaggttggatgatgaaactcaagctcaaggatcccgctgaggttcagtcgttgctgactgctgagagttacaagcagtacatcgaagaggaaggccactga

SEQ ID NO: 312 - protein, 159 aa, Physcomitrella patens subsp. patens
MAQQLLRPWAVRSASAFRQTMAPFFQRFSTATVVDNLRYSKSHEWTRLEGDTAVVGITHHAQEALGDVVFVDLPEVGKAISQGDSFGSVESVKAVSDVYSPVSGEVVEVNSELTESPGLVNKGPFEEGWMMKLKLKDPAEVQSLLTAESYKQYIEEEGH

SEQ ID NO: 313 - DNA, 474 bp, Coprinopsis cinerea okayama7#130
  CDS (1)..(474)
atgcaagccatcttcagaacaactgtcgctcgtgctcgtcctgccaggacctttgctttgagaaccgccgcgttccgacctgctcaattcaggactgtcgttaccaaacgctacacgaccgaccacgaagccattgctttcgacgactcgactggtatcggcacggtctcgattacggactatgcacagtcgtctcttggggacgtcgtgttcgtcgagctgccgagtgaaggcaccgaagttgcgcaaggagaccaaattggcgccgttgaaagtgtcaaggctgcttctgatatctatgctccggtttctggcactgtcgaggcaatcaacgaggccctctcttccgagccaagccttctcaacaagtctcctgaagacaagggctggctctgcaagattaagctctcgtcccccgctgagctcgaagaacttttgacggaggaggcctacaaggcgcactgcgagtcatag

SEQ ID NO: 314 - protein, 157 aa, Coprinopsis cinerea okayama7#130
MQAIFRTTVARARPARTFALRTAAFRPAQFRTVVTKRYTTDHEAIAFDDSTGIGTVSITDYAQSSLGDVVFVELPSEGTEVAQGDQIGAVESVKAASDIYAPVSGTVEAINEALSSEPSLLNKSPEDKGWLCKIKLSSPAELEELLTEEAYKAHCES

SEQ ID NO: 315 - DNA, 489 bp, Culex quinquefasciatus
  CDS (1)..(489)
atggtgttatgtcatattcgcgcgacgttgcggcttggccaactggtcgccagcaggtcacagcaggccaggcaccagtgtcgattcctcagcaccagcagcttcctgttgaaagagagattgttcaccgacaaacacgaatgggtcgcagtagatggagatatcggaacggttggaatctcgaaatttgcacaggaagccctcggtgacgtcgtgttcgcccagttacctgacgtgggaacgaaattggcccagaaggacgaatgtggtgccttggagagtgtgaaagcggccagtgaggtgtactcgccggtgtcgggaaccgttacagaaaagaacaccgccgttgaggagacgcctggtctggtgaactcgtcgtgttatgaaaatgggtggctattcaaactgcgactgaccaagtcggaagagttgtccaagttgatgaatgaagagcagtacgccgagttcctgaagcatgatgcccactaa

SEQ ID NO: 316 - protein, 162 aa, Culex quinquefasciatus
MVLCHIRATLRLGQLVASRSQQARHQCRFLSTSSFLLKERLFTDKHEWVAVDGDIGTVGISKFAQEALGDVVFAQLPDVGTKLAQKDECGALESVKAASEVYSPVSGTVTEKNTAVEETPGLVNSSCYENGWLFKLRLTKSEELSKLMNEEQYAEFLKHDAH

SEQ ID NO: 317 - DNA, 492 bp, Anopheles gambiae str. PEST
  CDS (1)..(492)
atggtgttatgtcacgttcgtgcgaccgtgcgtttaggcagcttggtggccaaggccagcgcgcaaagctggaccctgcgggcccgaccgttcagcatcagcagtgtggcgctgaaagagcgtcttttcacggacaagcatgaatgggtgtcggtggacggtgatgtgggcacggttggcatttcgaactttgcacaggaggccctcggtgatgtggtgttcgcacagctgcccgatcccggaaccaaactatcgcagaaggacgagtgtggcgcactggagagtgtgaaggcggcgagcgaaatctactcacccgtgtccggtgaggtgacggtgaaaaatggtgccgtagaggagacgcccggtctggtgaactcatcctgctacgaaaatggttggcttttcaagctgaagctcaccaaaccggacgagctgtcgaagctgatgagcgaagagcagtatacggagtttttgaaaactgctgaccattag

SEQ ID NO: 318 - protein, 163 aa, Anopheles gambiae str. PEST
MVLCHVRATVRLGSLVAKASAQSWTLRARPFSISSVALKERLFTDKHEWVSVDGDVGTVGISNFAQEALGDVVFAQLPDPGTKLSQKDECGALESVKAASEIYSPVSGEVTVKNGAVEETPGLVNSSCYENGWLFKLKLTKPDELSKLMSEEQYTEFLKTADH

SEQ ID NO: 319 - DNA, 537 bp, Magnaporthe grisea 70-15
  CDS (1)..(537)
atggcttcaattgcacgctgcctgagggctgccaggcctgcaggagtttcaatcctcgccaagaccccgcgaccggcgccggccgtcggcaaaatgaatgtggttcggccgttttcggtcactgccataaacccgatccgcaagtacaccaaagaccacgaatggattgacctcagcgccgacaagaagactggcgtcatcggtatctctgagtatgcggccgaagccctgggcgacgtcgtatacgtcgagctgcccgacataggcaaggatatttccaagggcgatgccattggcgccgtcgagtctgtcaagtcggctgccgacatcaactcccccatctcgtgcaaagtcacacaggtcaacaacgttctcgaggaggcgcccggcaccatcaacaaggtccccgaggatgattcccacggcggtggctggattgccaaggtcgaggttggcgagcagggcgtcaaggagctggatgagcttatggatgccgaggcctacaaggctttcactgctgccgagggcgaccactaa

SEQ ID NO: 320 - protein, 178 aa, Magnaporthe grisea 70-15
MASIARCLRAARPAGVSILAKTPRPAPAVGKMNVVRPFSVTAINPIRKYTKDHEWIDLSADKKTGVIGISEYAAEALGDVVYVELPDIGKDISKGDAIGAVESVKSAADINSPISCKVTQVNNVLEEAPGTINKVPEDDSHGGGWIAKVEVGEQGVKELDELMDAEAYKAFTAAEGDH

SEQ ID NO: 321 - DNA, 522 bp, Gibberella zeae PH-1
  CDS (1)..(522)
atgtctggtctctttgctcgtcaagcttgggctactgcctccaaggtccgatctactgctctgcgagcaccaaaggttgcgtttacctgcagagtcaacaacattgctccccgacgatcattttcagtttccatgaaccttctggctagaaaatacactgagagccacgaatggattgacgtagccgccgatggcaagacctgcacaattggcatttcaaactacgccgctgaagctctcggcgacgtagtctacgtggaactccccgcagtaggcgaagagacagcccagggcgagtcctttggcagcgtcgagtccgtcaagtcagcctctgacatcaactcgcccgtttctggttccgtcgtcgaggtcaacgaccccatcgtcgagacacctgctgatctcggcaaggaccctgagaagagtggctggttgatcaaggttgaggctgaggatgtttctgctttggatgcactgatggatgaggctgcttatgccgagcacatcaagggggagcactaa

SEQ ID NO: 322 - protein, 173 aa, Gibberella zeae PH-1
MSGLFARQAWATASKVRSTALRAPKVAFTCRVNNIAPRRSFSVSMNLLARKYTESHEWIDVAADGKTCTIGISNYAAEALGDVVYVELPAVGEETAQGESFGSVESVKSASDINSPVSGSVVEVNDPIVETPADLGKDPEKSGWLIKVEAEDVSALDALMDEAAYAEHIKGEH

SEQ ID NO: 323 - DNA, 507 bp, Gibberella zeae PH-1
  CDS (1)..(507)
atggcttcaattgctcgctctctgcgcttcgccgcccctctaacaaggggtatcgctcctcgcgctcccattgcccgccctatccgagctttctcctccaccaaattgagcctcgctcgcaaatacacaaaagaccacgaatggatcgatctctccgccgataagaagcacggtttcgtcggtatctcagagtacgctgccgagcagctcggtgatgtagtctacgttgagctccccgaagccggtcagtgggttgagcaaggtgacgctgtcggcgccgtcgagtcagtcaagtctgccagcgacatcaacgctcccgttcgtttgcgtgttgtccaagtcaacgataacctcgaagagaagccctccacgattaacaaggttcccgaggacgatagcgccggtggtggctggatcgcaaaggtcgaggttgacgaggagggcgccaagcagtttgagaagctattggatgccgaggcttacaagacttttgctggagccgattaa

SEQ ID NO: 324 - protein, 168 aa, Gibberella zeae PH-1
MASIARSLRFAAPLTRGIAPRAPIARPIRAFSSTKLSLARKYTKDHEWIDLSADKKHGFVGISEYAAEQLGDVVYVELPEAGQWVEQGDAVGAVESVKSASDINAPVRLRVVQVNDNLEEKPSTINKVPEDDSAGGGWIAKVEVDEEGAKQFEKLLDAEAYKTFAGAD

SEQ ID NO: 325 - DNA, 519 bp, Candida glabrata CBS 138
  CDS (1)..(519)
atgttctctagagttgttgttagatcaagcaggtttgtagcttctccactacgtttggctctcagatgtcaatccacaaacgctttaaacaagagccagttgccatttactcactctggtgaaggaccattggccgtcaagtacacttctcaacacgaatggatcgctgcacacagtgacggtaccgcattcttaggtataacgaaatatgctgccgatgccctaggtgatgccacttacattgagatcccagaagctgacactgaggtctccgccggtgactctgtctcatctgttgagtcagtcaagtctgcctccgaagtatacaccccattgtcaggtacggtggtggaaggtaacgcagctctagaagagtctccacaattgatcaacactgacccactgggtgaaggttggatcgccaagataaaattagagaacccagaagagatcaacaccacagaaggtctactgactttagaacaatacgagcaatcactagagcacgatgagcattaa

SEQ ID NO: 326 - protein, 172 aa, Candida glabrata CBS 138
MFSRVVVRSSRFVASPLRLALRCQSTNALNKSQLPFTHSGEGPLAVKYTSQHEWIAAHSDGTAFLGITKYAADALGDATYIEIPEADTEVSAGDSVSSVESVKSASEVYTPLSGTVVEGNAALEESPQLINTDPLGEGWIAKIKLENPEEINTTEGLLTLEQYEQSLEHDEH

SEQ ID NO: 327 - DNA, 528 bp, Kluyveromyces lactis NRRL Y-1140
  CDS (1)..(528)
atgttctcttcatctatttctcgtactgcttttgtctcttctcgtattgcgaagagcacagtttctcgtttgttcttgagagctcaatcgacaaatgctttaaaccaatctcaattgcctttcactttctctcaaaccggtccaaaaaccgttaaatacactacacagcatgaatgggttgctgctcatccagatggatctgccttcattggtattaccaagtacgcagccgatgcacttggtgatgccacttacgtcgaattgccagatgttgataccgaattagaggctggcgattcgtttggttctgttgaatccgtcaagtctgcatctgaaatttactctcctgtcgctggtactgtcgtggaagtgaacgaagctttgtctgactcgccacaattgatcaacagcgacccagctggtgaaggttggatcatcaagattaaaattaacgatgaggcagatttacaatccgatgaattgttatcgctagagcagtacgaagctcatctaaaggaagaccattga

SEQ ID NO: 328 - protein, 175 aa, Kluyveromyces lactis NRRL Y-1140
MFSSSISRTAFVSSRIAKSTVSRLFLRAQSTNALNQSQLPFTFSQTGPKTVKYTTQHEWVAAHPDGSAFIGITKYAADALGDATYVELPDVDTELEAGDSFGSVESVKSASEIYSPVAGTVVEVNEALSDSPQLINSDPAGEGWIIKIKINDEADLQSDELLSLEQYEAHLKEDH

SEQ ID NO: 329 - DNA, 573 bp, Debaryomyces hansenii CBS767
  CDS (1)..(573)
atgtttagaaacttaatcaacgccagaatctcgaccagagtaggatcccagttagcaaagaatgcaattggtgccagaattaacgccgctaaggtcgcaccaggggttagtttcatgagatacaactccagcaatttcaagttgaactctgactcttttgttgtcaaataccaggaagctggtcctaaatccgtcaagttcaccgaagaacacgaatggattgcattccaaagagatgacagtgtgttccttggtatcacccaatatgccagtgaagcattaggggaagctaccttcgtcgaattaccagaagtcggtgacaccgtcgaagtgggtgaatcgatcggttctgtcgaatcggtcaagtctgcttccgaaatctactccccagttgccggtgaaattgtcgctgtcaacgaagagttggaatcaaggccacaactcatcagcgatgatccaatgggtaacgcttggattgctcaaataaaattgaacgagccagccgaagtggtagaaggtcaagaatcgttattgagtgaaactcaatacgaagagttgttggatagtaactaa

SEQ ID NO: 330 - protein, 190 aa, Debaryomyces hansenii CBS767
MFRNLINARISTRVGSQLAKNAIGARINAAKVAPGVSFMRYNSSNFKLNSDSFVVKYQEAGPKSVKFTEEHEWIAFQRDDSVFLGITQYASEALGEATFVELPEVGDTVEVGESIGSVESVKSASEIYSPVAGEIVAVNEELESRPQLISDDPMGNAWIAQIKLNEPAEVVEGQESLLSETQYEELLDSN

SEQ ID NO: 331 - DNA, 522 bp, Aspergillus nidulans FGSC A4
  CDS (1)..(522)
atgtctgccgccgctcgatttatccgcccctttgcctcccgcgcccttgcacagaagcttcctttgagctccgtccgcagggtctcgcccgcaattggtttcccgcggggaacagtccgcagcttttctcagagcacattcttgcaagtgaagaagtacacagagtctcacgaatggattgagctcgctgatgacggcaagactgccaaaatcggaatcacagaatacgccgccaagtccctaggtgatgtcgtctacgttgagctccccgagccgggcactgaggttggtgccggcgagcccgttggcgccgtcgagtccgtcaaatctgcttcagacgtgctctctcccgtctctggaactgtgacgaagggcaacgaggtcctcagtgacaaggccaaattcatcaacgagagcccggagggtgaggcatggattgccgagatcgaagtcagcgatgcctccgaggtggatgggctgctcgaccttaaggcttacaaggccactattgatgaggagtaa

SEQ ID NO: 332 - protein, 173 aa, Aspergillus nidulans FGSC A4
MSAAARFIRPFASRALAQKLPLSSVRRVSPAIGFPRGTVRSFSQSTFLQVKKYTESHEWIELADDGKTAKIGITEYAAKSLGDVVYVELPEPGTEVGAGEPVGAVESVKSASDVLSPVSGTVTKGNEVLSDKAKFINESPEGEAWIAEIEVSDASEVDGLLDLKAYKATIDEE

SEQ ID NO: 333 - DNA, 534 bp, Candida albicans SC5314
  CDS (1)..(534): transl_table=12
atgattagaacattattaagaccaacttcattgagacttgttacaccaacttttagatctttctccacattttcaaccagatttcaattgatagataaagattcacacgcctacaaatatttatatgaaaaaacccccgttgttacaaaattcactgaagatcatgaatgggttcatttatatgatgatgattctgcttttgttggtattactcaatacgctgctcaagctttaggcgatgtcacatttgttgacttgccagaagttggtgatcatttggaattgaatgagactttgggttctgttgaatcagttaaatcatcagctgatgtttactctccagttgatggtgaagttgttggggttaatctcaaattagaaagtgaaccaggtattttaaaccacgatccaacgaaaggtggatggattgttcacattaaattggatgacccaactcaagtcactaaatctgaaactttaatgagtgaagaacaatataagaagtttttagaagaagaagaagaaggccattaa

SEQ ID NO: 334 - protein, 177 aa, Candida albicans SC5314
MIRTLLRPTSLRLVTPTFRSFSTFSTRFQLIDKDSHAYKYLYEKTPVVTKFTEDHEWVHLYDDDSAFVGITQYAAQALGDVTFVDLPEVGDHLELNETLGSVESVKSSADVYSPVDGEVVGVNLKLESEPGILNHDPTKGGWIVHIKLDDPTQVTKSETLMSEEQYKKFLEEEEEGH

SEQ ID NO: 335 - DNA, 483 bp, Cryptococcus neoformans var. neoformans B-3501A
  CDS (1)..(483)
atgctctctgctctccgccccatcgcccgacccctcgccggctctctcaggactcgcattgcgcccaggccctctgcgctcaagttctctgccctcaggttcgtctctaccaccaagtacactactgaccacgaatgggtcacttttgagtctgagaccaacgtcggtgtcgttggtatcaccgagtacgcccagaaggctttaggagatgtcgtctttgtcgagttgcccggtgaaggtaccgaggtcgcccagggtgattccattggtgctgtcgagtctgtcaaggctgcctctgacatctatgcccctatctctggtgtcgtcgagtctatcaacgagacccttgccgaccaacctagcttgttgaacaagtctcccgagaaagacggctggctttgcaaggtcaagctctccgaccccgccgagtttgatgacctcttgtctgctgacgcttacaaagcccattgcgagggtgcttaa

SEQ ID NO: 336 - protein, 160 aa, Cryptococcus neoformans var. neoformans B-3501A
MLSALRPIARPLAGSLRTRIAPRPSALKFSALRFVSTTKYTTDHEWVTFESETNVGVVGITEYAQKALGDVVFVELPGEGTEVAQGDSIGAVESVKAASDIYAPISGVVESINETLADQPSLLNKSPEKDGWLCKVKLSDPAEFDDLLSADAYKAHCEGA

SEQ ID NO: 337 - DNA, 495 bp, Tribolium castaneum
  CDS (1)..(495)
atggtcatccaccggttcgtaagatgtgtcaacaattcaacagcgagacaattaatctttaaccaatgccgcaaacacgctattaataggtcgattttcacaactccctcgttctgggcagaacgcttatatacagacaaacacgagtgggtggaagttgatggtaaaaccgggaaagtgggaatatcacaatacgctcaggaggcgctgggggatgtagtttacgcacaactgccagatgtcgacactgtcctaaaacaaaaagacgaatgtggggctcttgaaagtgtgaaagctgcaagtgaggtttatagtcccatttctggtaaagttgtagagaaaaatacaagtgttgaagaaacgccgtctttgatcaactcgtcatgttatgataaggggtggttgtttaaaatcgaattgtccgatactggggaacttaagagtttaatgactgaaacacaatataatgaatatcttaaaacacaagagcattag

SEQ ID NO: 338 - protein, 164 aa, Tribolium castaneum
MVIHRFVRCVNNSTARQLIFNQCRKHAINRSIFTTPSFWAERLYTDKHEWVEVDGKTGKVGISQYAQEALGDVVYAQLPDVDTVLKQKDECGALESVKAASEVYSPISGKVVEKNTSVEETPSLINSSCYDKGWLFKIELSDTGELKSLMTETQYNEYLKTQEH

SEQ ID NO: 339 - DNA, 369 bp, Dichelobacter nodosus VCS1703A
  CDS (1)..(369): transl_table=11
atgagaaaattcacaaaagatcacgaatgggtagacgttcaaggcgatgaagccgtcatcggaattactgatcacgcgcaggcggaattaggcgatattgtgtttgttgaattgccagcggtaggtgatgttgttgaagtcggtcaagaagaatctgccgtgattgaatctgtgaaagctgccggcggtattacggcacccgtttccggagaagtggttgctattaatgaagcgttaattgatgaaccgtcaaaagtaaataccgatgccgaaggcgatggctggtttttccgcgtgaaattagccgataaatctcaattagacgatttgatggatgaggcagcttataaagcctatcttggagtgtga

SEQ ID NO: 340 - protein, 122 aa, Dichelobacter nodosus VCS1703A
MRKFTKDHEWVDVQGDEAVIGITDHAQAELGDIVFVELPAVGDVVEVGQEESAVIESVKAAGGITAPVSGEVVAINEALIDEPSKVNTDAEGDGWFFRVKLADKSQLDDLMDEAAYKAYLGV

SEQ ID NO: 341 - DNA, 384 bp, Kineococcus radiotolerans SRS30216
  CDS (1)..(384): transl_table=11
atgtccaacgtccccgccgacctccgctacaccagcgagcacgaatgggtgcgcgtcgaggcggacggcaccgtccgggtcggcatcaccgaccacgcccaggacgccctcggggacgtcgtctacgtctcgctgcccgctgagggcgagaccgtcaccgccggcggcgcgtgcggcgaggtggagtccaccaagagcgtcagcgagatcaccgcgccggtctccggcacggtctccgggcacaaccccggtctggagacgcgtccggacctggtgaacaccgacccctacggcgagggctggatgttcaccatcgccccctccgacaccgccgaggtcgagggcctgctcgacgccgaggcgtacgccgcccacgccggctga

SEQ ID NO: 342 - protein, 127 aa, Kineococcus radiotolerans SRS30216
MSNVPADLRYTSEHEWVRVEADGTVRVGITDHAQDALGDVVYVSLPAEGETVTAGGACGEVESTKSVSEITAPVSGTVSGHNPGLETRPDLVNTDPYGEGWMFTIAPSDTAEVEGLLDAEAYAAHAG

SEQ ID NO: 343 - DNA, 378 bp, Xanthobacter autotrophicus Py2
  CDS (1)..(378): transl_table=11
atgacgagcgtgcgctacacgaaggaccacgaatatgtgcgcgtcgaaggcgacgtggccgtggtgggcatctccgactatgcccagcagcagctgggtgacgtggtgttcgtcgagctgccggagatcggcaaggtcgtgaccaagggcggcgaggccgccgtggtggagagcgtgaaggcggcgagcgaggtctacgccccgctctccggcgaggtggtggaggtgaacagcgagctggaaggcgcccccggcctcgtcaacgaggctccggaaggcaagggctggttcatgaagctgaagctctccaaccccgccgagctggacgagcttttgaatgagcacgcctacaaggacttcctggacacgttggcctga

SEQ ID NO: 344 - protein, 125 aa, Xanthobacter autotrophicus Py2
MTSVRYTKDHEYVRVEGDVAVVGISDYAQQQLGDVVFVELPEIGKVVTKGGEAAVVESVKAASEVYAPLSGEVVEVNSELEGAPGLVNEAPEGKGWFMKLKLSNPAELDELLNEHAYKDFLDTLA

SEQ ID NO: 345 - DNA, 396 bp, Prochlorococcus marinus str. MIT 9211
  CDS (1)..(396): transl_table=11
atgaccatggcctttgattttcctaaccaatttcgcttcgcggacagtcacgaatatgcttttccggaaggagatttagtccgaattgggattagtgcctttgctgttgatcagctgggagacattgtttttgttgacttacctgatgtgggagcttttttatctaggggtaatagctttggctctgttgaatcggtaaaagctgttgaagatatgtatgcccctataagtggagaggtcctacaaattaatcaggctgtccttgctgatccagagcaactccaaaatgatcctcatggggcaggttggctactgcaaattcgtatgtctgactctgctgaattaactcagctaatggatgccgactcttatgcaagtaagattgcggccaattaa

SEQ ID NO: 346 - protein, 131 aa, Prochlorococcus marinus str. MIT 9211
MTMAFDFPNQFRFADSHEYAFPEGDLVRIGISAFAVDQLGDIVFVDLPDVGAFLSRGNSFGSVESVKAVEDMYAPISGEVLQINQAVLADPEQLQNDPHGAGWLLQIRMSDSAELTQLMDADSYASKIAAN

SEQ ID NO: 347 - DNA, 384 bp, Pseudomonas putida GB-1
  CDS (1)..(384): transl_table=11
atgagcgagttgcgtttcactgaagatcacgaatggctgcgcgtcgaagccgatggcagcgtcaccgtgggcatcaccgcctacgcccagaacgcccttggcgatgtggttttcgtgcaactgcccgagttgcagcagtacgagaaaggcagcgaagcgtccaccgttgaatcggtaaaggccgccagcggcgtgtacatgccgctgagcggcgaagtggtcgcggtcaacgaccagctggaaaacagcccagagctggtcaacgaagacccgatgggcgaaggctggttcttccgcttcaacccggccgacatgagcgaagtcagcgcactgctcgaccaggacgcctacgaccgcctgatcaaagccaacgacgacgcttga

SEQ ID NO: 348 - protein, 127 aa, Pseudomonas putida GB-1
MSELRFTEDHEWLRVEADGSVTVGITAYAQNALGDVVFVQLPELQQYEKGSEASTVESVKAASGVYMPLSGEVVAVNDQLENSPELVNEDPMGEGWFFRFNPADMSEVSALLDQDAYDRLIKANDDA

SEQ ID NO: 349 - DNA, 378 bp, Pseudomonas putida GB-1
  CDS (1)..(378): transl_table=11
atgagcactctgcgttttacccccgaacacgaatggctgcgcctggaggcgactggcgagttgaccgtcggtattaccagctatgcccaggcggcattgggggacgtggtgtacgtacagctgccggagccgggtgcgtatggcgagggcaatgaagtcgcggtgctcgagtcggtgaaggccgccagcaacatcaccatgcctttgaccggcaccgtggtggccgtcaaccaggcgctggccgacgacccagagctggtcaacgcctcgccaatgcaggacggctggttcttccgcatccaggccagcaaccctggcgacctcgatagcctgatggaccaggacggctatgaccgtttcctggccgaaaacgcctga

SEQ ID NO: 350 - protein, 125 aa, Pseudomonas putida GB-1
MSTLRFTPEHEWLRLEATGELTVGITSYAQAALGDVVYVQLPEPGAYGEGNEVAVLESVKAASNITMPLTGTVVAVNQALADDPELVNASPMQDGWFFRIQASNPGDLDSLMDQDGYDRFLAENA

SEQ ID NO: 351 - DNA, 384 bp, Pseudomonas putida GB-1
  CDS (1)..(384): transl_table=11
atgagcaatatccccgccgacctgcgttttgccgaaagccatgaatgggctcgcctggaagccgacggcagcgtgaccgtgggtatcagcgaccacgcccagcaagccttgggtgacgtggtgttcgtcgagttggccgaagtcggcaaggtattcgccgctggcgacgctgccggcgtggtcgagtcggtcaaggccgcttcggacatctacgccccgatcggtggcgaagtgattgccgtcaacgaagaactggccgacagcccagagcagctcaacgaagaaccgtacggcgcgtggatcttcaaactgaagccaagcgacaaggccgagctggacaagctgctggacgctgctggttacgcagcagctatcggcgagtaa

SEQ ID NO: 352 - protein, 127 aa, Pseudomonas putida GB-1
MSNIPADLRFAESHEWARLEADGSVTVGISDHAQQALGDVVFVELAEVGKVFAAGDAAGVVESVKAASDIYAPIGGEVIAVNEELADSPEQLNEEPYGAWIFKLKPSDKAELDKLLDAAGYAAAIGE

SEQ ID NO: 353 - DNA, 396 bp, Mycobacterium abscessus
  CDS (1)..(396): transl_table=11
gtgaccgaaattcccgccgatctgcactacaccgaggaacacgaatgggtgcggcgcaccggtgacaccaccgtgcgcatcggaatcaccgactacgcacagtcgcagctcggtgacgtggtgtttgtccagctgccggatgtcggctccgagctgaccgcgggctccacgttcggtgaggtggaatccaccaaatcggtatcggacctgttcgcgcccatcacggcgaaagtcattgccgcgaatggtgatttggattccgacccacagctggtcaattccgatccctacggcgagggctggttggttgatttggaagccgccagtgcggccgacctggacgcggctcttaatgacctcttagacgcatcgggatatggtgacgccaccgactag

SEQ ID NO: 354 - protein, 131 aa, Mycobacterium abscessus
MTEIPADLHYTEEHEWVRRTGDTTVRIGITDYAQSQLGDVVFVQLPDVGSELTAGSTFGEVESTKSVSDLFAPITAKVIAANGDLDSDPQLVNSDPYGEGWLVDLEAASAADLDAALNDLLDASGYGDATD

SEQ ID NO: 355 - DNA, 399 bp, Synechococcus sp. PCC 7002
  CDS (1)..(399): transl_table=11
atggaactcgaatatccagatgacctccgctatttagatagccacgaatatattcgcctcgatggggaaattgccaccattggcttgagtgcccatgccatcgatgaattgggggatattgtgttcctagagttaccggaagaaggggatgcaattgttgtgggtgaaacctttggcagcattgaatcagtcaaagccgtcgaggatctttacgcgccaatttctggcactgtcattgaccgtaatgaggcgttaatccaatccccagagatggtttccgaagacccctacgaagaagggtggtttatcaaagtgcgggtcgataacctcgacgatgaaatgctcgccgaaacgatgaccgccgaagaataccggcttcaggtggcaggcgaagaatag

SEQ ID NO: 356 - protein, 132 aa, Synechococcus sp. PCC 7002
MELEYPDDLRYLDSHEYIRLDGEIATIGLSAHAIDELGDIVFLELPEEGDAIVVGETFGSIESVKAVEDLYAPISGTVIDRNEALIQSPEMVSEDPYEEGWFIKVRVDNLDDEMLAETMTAEEYRLQVAGEE

SEQ ID NO: 357 - DNA, 369 bp, Thermotoga sp. RQ2
  CDS (1)..(369): transl_table=11
atgaaaaagtacacgaaaactcacgaatgggtggtggttgaggacaaagtggcaacggttgggatcacgaatcacgctcaggaacagctcggcgatgtggtctacgtggatcttcctgaagtcggcagagaggtgaagaaaggggaagttgtggcgagtatagagtctgtgaaagccgcagcggacgtgtacgctcctctcagtgggaagatcgtggaagtgaacgagaaactcgatactgaacctgaactcataaacaaggatccagaaggagaaggctggcttttcaaaatggaaatatccgatgaaggcgaactcgaagatcttctggatgaacaggcttatcaggaattctgtgctcaggagtag

SEQ ID NO: 358 - protein, 122 aa, Thermotoga sp. RQ2
MKKYTKTHEWVVVEDKVATVGITNHAQEQLGDVVYVDLPEVGREVKKGEVVASIESVKAAADVYAPLSGKIVEVNEKLDTEPELINKDPEGEGWLFKMEISDEGELEDLLDEQAYQEFCAQE

SEQ ID NO: 359 - DNA, 402 bp, Cyanothece sp. ATCC 51142
  CDS (1)..(402): transl_table=11
atggaattagaatttcctgaagatttaagatatttagatagtcatgagtacattcgattagatggagaaattgcaaccattggcattagtgcttatgctatcgagcagttaggggatcttgtctttctagaattgcccgaagtaggagactccctagaaagaggaagcagctttggttcgattgagtcagtgaaagcagcagaagacctttatccccccgtctcaggaacggtcattgatcggaacgaagcgatgatcgaaaccccagaggtcattgctgatgatccctatggggacggatggctgctcaaagttcgggttgaaaacccagatgatgaattagaagacaccctatcggctcacgactatcgtgccatgcttgaaggggaagagggcatctaa

SEQ ID NO: 360 - protein, 133 aa, Cyanothece sp. ATCC 51142
MELEFPEDLRYLDSHEYIRLDGEIATIGISAYAIEQLGDLVFLELPEVGDSLERGSSFGSIESVKAAEDLYPPVSGTVIDRNEAMIETPEVIADDPYGDGWLLKVRVENPDDELEDTLSAHDYRAMLEGEEGI

SEQ ID NO: 361 - DNA, 384 bp, Exiguobacterium sibiricum 255-15
  CDS (1)..(384): transl_table=11
atgagtcaagtcaaagacaatctacgttattcggaagagcatgaatgggtcgaagtaacaggaaacaaagcacgaatcggaatcacggatttcgcgcaacatgaacttggcgatatcgtcttcgtcgaactgccagaagtcggagatacgatttcggcaaacgagccgtttggttcagtcgaatccgttaaaacggtatccgaattgtacgcaccgatttcagggaaagtcgttgccatcaatgaatcactttcagattccccagaactcgtcaacgaatcaccattcgaaggtgcttggatggttgatatcgagatcgcagacgaagcacaagtcgaagcattgatggacgctgctgcttacaaatcgatgatcaacgagtaa

SEQ ID NO: 362 - protein, 127 aa, Exiguobacterium sibiricum 255-15
MSQVKDNLRYSEEHEWVEVTGNKARIGITDFAQHELGDIVFVELPEVGDTISANEPFGSVESVKTVSELYAPISGKVVAINESLSDSPELVNESPFEGAWMVDIEIADEAQVEALMDAAAYKSMINE

SEQ ID NO: 363 - DNA, 405 bp, Mycobacterium marinum M
  CDS (1)..(405): transl_table=11
gtgagcgatatccccgccgacctgcactacaccgccgagcacgagtggattcgccggaccgcggaggacaccgtgcgggtcgggatcaccgacttcgcgcagtctgcgctcggtgatgtggtcttcgtgcagctgcccgacgtgggtgccgaagtgaccgccggggagaccttcggcgaggtcgaatcgaccaagtcggtgtctgatctgtttgccccgatctcgggcaaggtggccgcggtgaacgctgatctggaagcgacgccacagctggtgaacaccgatccgtatggcgccggctggttgctggacgtccaggtcgagggttccgacgtcgccgcgctggaatcggcgttggcggctttgcttgacgcccagacctaccgcgacacggtgaccgaatga

SEQ ID NO: 364 - protein, 134 aa, Mycobacterium marinum M
MSDIPADLHYTAEHEWIRRTAEDTVRVGITDFAQSALGDVVFVQLPDVGAEVTAGETFGEVESTKSVSDLFAPISGKVAAVNADLEATPQLVNTDPYGAGWLLDVQVEGSDVAALESALAALLDAQTYRDTVTE

SEQ ID NO: 365 - DNA, 369 bp, Candidatus Protochlamydia amoebophila UWE25
  CDS (1)..(369): transl_table=11
atgaaatatacagattctcatgaatgggttgttttagaatcgactgatgtagctcgtattggtgtgacgcagtttgcgcaaaaagaactcggtgatattgtttatgttgaactgccaactctacataaaaaagttactgctggacaggaggtggtggttttagagtctactaaagcggccgctgatgtttattctcctgttagtggagaaatcgttgaagtgaatcaaagtttatctactcagcctgaactcattaatcagtcttccgaaaaagaaggatggttatttaaacttcgtttatctaattcctcagaattagacttattaatggatgaaaaggattatcgtgcgatgttaaacggagcataa

SEQ ID NO: 366 - protein, 122 aa, Candidatus Protochlamydia amoebophila UWE25
MKYTDSHEWVVLESTDVARIGVTQFAQKELGDIVYVELPTLHKKVTAGQEVVVLESTKAAADVYSPVSGEIVEVNQSLSTQPELINQSSEKEGWLFKLRLSNSSELDLLMDEKDYRAMLNGA

SEQ ID NO: 367 - DNA, 372 bp, Propionibacterium acnes KPA171202
  CDS (1)..(372): transl_table=11
atggaactgtccgaacttaagtactccgccgagcatgagtgggtcgccgttgatggtgacaccgtgaccgtaggaatcaccgactacgccgcagaggccctgggggacgtcgtctttgtcgacgtcccccaggtcggcagcgatgtttctgccggatccgccattggcgaggtcgaatcgactaaatcggtctccgacctctttagccccgtgacgggcaccgtctcggaagttaataaggccatcaccgagtctcccgagcttgtcaactccgatccgttcggacagggatggttgttcaaggtttccggtggtcagctgggtgacgacctcatggaccgtgacgcctacctcaagctcaccgccgagtga

SEQ ID NO: 368 - protein, 123 aa, Propionibacterium acnes KPA171202
MELSELKYSAEHEWVAVDGDTVTVGITDYAAEALGDVVFVDVPQVGSDVSAGSAIGEVESTKSVSDLFSPVTGTVSEVNKAITESPELVNSDPFGQGWLFKVSGGQLGDDLMDRDAYLKLTAE

SEQ ID NO: 369 - DNA, 396 bp, Desulfotalea psychrophila LSv54
  CDS (1)..(396): transl_table=11
atgaaagaatttgacgaattaaacctacccggagatctacgctacagtgatgatcacgaatgggcaaagcttgaggatggagttgttcgaattggcgtaactgactatgcacaggatcagttgggcgatattgtttttgttgagatgcctgaagtaggtgataccttcgacaagggcgatgaatttggtaccctcgagtcagttaaagctgtttctgaactgtatctgccaatcggtggtgaagttgttgctataaatgaggccctggtagatgcaccggagcttatcaatagtgatccctatgccaactggatcgtggcccttaagccagcggatgcggcagagcttgaagaacttttggatgttgctgcatatagcgagatgatcaaaggttag

SEQ ID NO: 370 - protein, 131 aa, Desulfotalea psychrophila LSv54
MKEFDELNLPGDLRYSDDHEWAKLEDGVVRIGVTDYAQDQLGDIVFVEMPEVGDTFDKGDEFGTLESVKAVSELYLPIGGEVVAINEALVDAPELINSDPYANWIVALKPADAAELEELLDVAAYSEMIKG

SEQ ID NO: 371 - DNA, 387 bp, Symbiobacterium thermophilum IAM 14863
  CDS (1)..(387): transl_table=11
atggcgaacgtaccggcggatctcaagtactcgaaggagcacgagtggatcagggtcgaaggcaacatcggcatcgtgggcatcacctggttcgcccaggatcagttgggcgacgtggtcttcgtcgagctgcctgaggtggggcgtgaactgaagcagaacgagcagttcggcgtggtggagtcggtcaagaccgtttcggacctgtactgcccggcctccggcaaggtggtggaggtcaacacgaagctggagagctcgccggagctgatcaaccaggacccctacggcgagggctggattctgaagctggagctctcgaacccggccgaactggacaacctgctggatgcggcggcttacgacgcgtttaccaaggagggctaa

SEQ ID NO: 372 - protein, 128 aa, Symbiobacterium thermophilum IAM 14863
MANVPADLKYSKEHEWIRVEGNIGIVGITWFAQDQLGDVVFVELPEVGRELKQNEQFGVVESVKTVSDLYCPASGKVVEVNTKLESSPELINQDPYGEGWILKLELSNPAELDNLLDAAAYDAFTKEG

SEQ ID NO: 373 - DNA, 381 bp, Burkholderia pseudomallei K96243
  CDS (1)..(381): transl_table=11
atgagcaacgtcccggccgaactgaaatacaccgacgaacacgagtggattcgcaccgaagccgacggcacgctgacgatcggcatcaccgaccacgcgcaaaccacgctcggcgacatcgtcttcctcgagctgccgaaagtcggctcgcaagtgaaggcgggcgacgccatcggcgtcgtcgaatcggtgaaagccgcgtcggacatctactcgcccgtgaccggcgaagtgatcgcgatcaacacggacgtggccgatgcgccggaagaggtgaacggcgacgcgtacggcgcatggctcttcaagatcaagctggcggccgacgcctcgaccgactgcctgctcgacgccgccgcctacgagaagctggtcggctga

SEQ ID NO: 374 - protein, 126 aa, Burkholderia pseudomallei K96243
MSNVPAELKYTDEHEWIRTEADGTLTIGITDHAQTTLGDIVFLELPKVGSQVKAGDAIGVVESVKAASDIYSPVTGEVIAINTDVADAPEEVNGDAYGAWLFKIKLAADASTDCLLDAAAYEKLVG

SEQ ID NO: 375 - DNA, 360 bp, Silicibacter pomeroyi DSS-3
  CDS (1)..(360): transl_table=11
atgaaatataccgaagagcatgagtggctgctggccgaggatgaccttatcgtggttgggatcaccgcccatgccgccgagcagttgggggatgtggtgttcgtggaattgcccgaacccggcaccgaggtcagcaaggatgacgagatcgtggtgatcgaatcggtcaaggcggcctcggatatcctggcgccgctggatggcgagatcgtcgaagtgaacgaagcgctgatcgacaatcccggcatggtcaacgaagacccgatgggcgaggcctggttcttcaagatgcgcccgtccgacctgtcgccgatggacgactatatggacgaggcggcctataccgatttcatcagctga

SEQ ID NO: 376 - protein, 119 aa, Silicibacter pomeroyi DSS-3
MKYTEEHEWLLAEDDLIVVGITAHAAEQLGDVVFVELPEPGTEVSKDDEIVVIESVKAASDILAPLDGEIVEVNEALIDNPGMVNEDPMGEAWFFKMRPSDLSPMDDYMDEAAYTDFIS

SEQ ID NO: 377 - DNA, 441 bp, Bacillus clausii KSM-K16
  CDS (1)..(441): transl_table=11
atgagcgatttcctgtatgataaacttcgaaaagaccacattggaggggttaacatgagtaatttacctgaagagctaaagtattccgaagaacatgagtgggtaaaaacggaagacggcaaagtccgtatcggcatcactgattttgcccaatctgaactaggcgatattgtcttcgtcgaacttcctgaagtgggcgatgagattgaagcggacgagccatttggcagcgttgagtccgtcaagactgtatctgaattgtatgcgccaattagcggaaaagtcgttgaagtgaatgaagaacttgatgattccccagagcttgtcaatgagtcaccgtacgaaaaagcgtggatgatcgtggttgagccggctgacgcaagtgaagtggacaagctgatgtcagcaggagaatatgcggagatgattagcgaagattaa

SEQ ID NO: 378 - protein, 146 aa, Bacillus clausii KSM-K16
MSDFLYDKLRKDHIGGVNMSNLPEELKYSEEHEWVKTEDGKVRIGITDFAQSELGDIVFVELPEVGDEIEADEPFGSVESVKTVSELYAPISGKVVEVNEELDDSPELVNESPYEKAWMIVVEPADASEVDKLMSAGEYAEMISED

SEQ ID NO: 379 - DNA, 387 bp, Pseudomonas syringae pv. syringae B728a
  CDS (1)..(387): transl_table=11
atgagcaatattcccgccgagctgcgtttcgccgaaagtcatgaatgggcacgtctggagtcagacggtaccgtgaccgtcggcatctcggaccatgcacaggaagcactgggcgatgtggtcttcgtcgaactgccggaaatcggcacagcgttcgctgccggtgacaccgccggtgttgtcgagtcggtcaaggccgcttcggatatctactcgccggttgcgggcgaggtgatcgaagtcaacacagcgttgggcgatgcccccgagtcgctcaacagtgattcgtacggtgcctggatcttcaagctcaagccaagcgacgccagcggtgatctggccaagctgctggatgcagccgggtacaagagcgctatcggcgaataa

SEQ ID NO: 380 - protein, 128 aa, Pseudomonas syringae pv. syringae B728a
MSNIPAELRFAESHEWARLESDGTVTVGISDHAQEALGDVVFVELPEIGTAFAAGDTAGVVESVKAASDIYSPVAGEVIEVNTALGDAPESLNSDSYGAWIFKLKPSDASGDLAKLLDAAGYKSAIGE

SEQ ID NO: 381 - DNA, 384 bp, Pseudomonas fluorescens Pf-5
  CDS (1)..(384): transl_table=11
atgagcgagttgcgttttactgaagatcacgaatggctgcgtaccgaagcggatggcagtgtcaccgtcggcattacggctttcgcccagaacgccctgggtgatgtggtgtttgtgcaactgccggagctgcagggctacgacaagggcgccgaagccgccaccgtggaatcggtgaaagccgccagcggcgtgtacatgcccctggacggtgaagtggtcgccaccaacccggccctggaagacagcccggaactggtcaacgaagacccgctgggcgaaggctggttcttccgcttcatccctgccgatgccgctgccgttggccaattgctggaccaggacgcctacgaccgcctgatcaaagccagcgccgaagcctga

SEQ ID NO: 382 - protein, 127 aa, Pseudomonas fluorescens Pf-5
MSELRFTEDHEWLRTEADGSVTVGITAFAQNALGDVVFVQLPELQGYDKGAEAATVESVKAASGVYMPLDGEVVATNPALEDSPELVNEDPLGEGWFFRFIPADAAAVGQLLDQDAYDRLIKASAEA

SEQ ID NO: 383 - DNA, 384 bp, Pseudomonas fluorescens Pf-5
  CDS (1)..(384): transl_table=11
atgagcgatatccctgcccacctgcgttttgccgacagtcacgaatgggcccgcctggaagccgacggcagcgtgaccgtaggtattagcgaccacgctcaggaagccctgggcgatgtggttttcgtcgagctgactgaagtcggcaacgtgtttggcgcaggggaccaggccggtgtggtggagtcggtgaaagccgcttccgacatctatgcgccggtggccggtgaagtgattgcggtcaacgaagagctgagcgccagccccgagttgctcaacagcgatccgtacggtgcctggatcttcaagctcaagccaagcaacccgggcgatctggacaagctgctggacgccgccggctacaaggccgccatcggcgagtaa

SEQ ID NO: 384 - protein, 127 aa, Pseudomonas fluorescens Pf-5
MSDIPAHLRFADSHEWARLEADGSVTVGISDHAQEALGDVVFVELTEVGNVFGAGDQAGVVESVKAASDIYAPVAGEVIAVNEELSASPELLNSDPYGAWIFKLKPSNPGDLDKLLDAAGYKAAIGE

SEQ ID NO: 385 - DNA, 390 bp, Colwellia psychrerythraea 34H
  CDS (1)..(390): transl_table=11
atgagcaacattccttcagaattaaaatatgcaacttcacacgaatgggttcgcgttgacagcgacggtatcgctacagttggtatcagtgaacatgcccaaggccttttaggtgatatggtatttgttgaattacctgacgttgatgattcaatcagcgctggtgatgatgttgctgttgcagaatcagtaaaagcagcttcagacatttacgcaccagtttcaggtactgttgttgcaatcaacgaagcacttgaagacgctcctgagttacttaactctgacgcttttggtgaaggttggttatttcaagttaaacttgacgatgtaagtgagttagaaaacttacttgatgcagaaggttataagaactctatcgacgaagattaa

SEQ ID NO: 386 - protein, 129 aa, Colwellia psychrerythraea 34H
MSNIPSELKYATSHEWVRVDSDGIATVGISEHAQGLLGDMVFVELPDVDDSISAGDDVAVAESVKAASDIYAPVSGTVVAINEALEDAPELLNSDAFGEGWLFQVKLDDVSELENLLDAEGYKNSIDED

SEQ ID NO: 387 - DNA, 387 bp, Colwellia psychrerythraea 34H
  CDS (1)..(387): transl_table=11
atgagcacagtagaaaaagattatcaatttgccccaagtcacgagtgggttaaaaataacaacgacggtactgttactatcggtatttcaaaccacgcgcaagaattgctaggtgatgttgttttcattgaattaccagaacaaggcgatgaaataacggcaggcgaacaatttaccctcgtagaatcagtaaaagccgcttcagacgtatatgcgcctgtttcgggtgaaatcattgaaattaatgaagcactagaagactcaccagagtcaattaaccaatcggcatttgttgaaggctggattgtaaaagttaagctttcagagcctgagcagttagaaaacttactcagttatgaggcatataatgccggtatcgaagaataa

SEQ ID NO: 388 - protein, 128 aa, Colwellia psychrerythraea 34H
MSTVEKDYQFAPSHEWVKNNNDGTVTIGISNHAQELLGDVVFIELPEQGDEITAGEQFTLVESVKAASDVYAPVSGEIIEINEALEDSPESINQSAFVEGWIVKVKLSEPEQLENLLSYEAYNAGIEE

SEQ ID NO: 389 - DNA, 390 bp, Pseudomonas syringae pv. phaseolicola 1448A
  CDS (1)..(390): transl_table=11
atgagcaatattcccgccgagctgcgtttcgccgaaagtcatgaatgggcacgtcttgaagcagatggcaccgtgaccgtcggcatctcggaccatgcacaggaagcactgggcgatgtggtcttcgtcgagctgccggaaatcggcaaagtgttcgctgcccgtgaccccgccggtgtcgtcgagtcggtaaaggctgcttcggatatctactcgccggttgctggcgaggtggtcgaggtcaatgaagcactgggcgattcgcccgagtcgctcaacagggatccgtacggtagtgcatggatcttcaagctcaagccaagcgacgccagcggtcatctggccaagctgctggatgcagccgggtacaagagcgctatcggcgaataa

SEQ ID NO: 390 - protein, 129 aa, Pseudomonas syringae pv. phaseolicola 1448A
MSNIPAELRFAESHEWARLEADGTVTVGISDHAQEALGDVVFVELPEIGKVFAARDPAGVVESVKAASDIYSPVAGEVVEVNEALGDSPESLNRDPYGSAWIFKLKPSDASGHLAKLLDAAGYKSAIGE

SEQ ID NO: 391 - DNA, 381 bp, Ralstonia eutropha JMP134
  CDS (1)..(381): transl_table=11
atgaatttccccgctgacctgaaatacaccgagtcgcacgagtgggtgcgtgtcgaagccgacggcaccctgacgattggcatcaccgaccacgcgcaggacgcgctcggcgacatcgtcttcctggaactgcccgaagtcggcaagtcggtcggcgccggcgacgcgctggccgtggtggagtcggtgaaggccgcttccgacatctacgccccggtggccggcgaagtgatcgccgtgaacgaggccgccacggccgcaccggaaagcgtgaacgccgacgcgttcgacgcgtggctattcaagctcaagccggccaacgccgacgacgtgaatggcctgatgtcggctgacgcctacaaggccagcgtcggcgcctga

SEQ ID NO: 392 - protein, 126 aa, Ralstonia eutropha JMP134
MNFPADLKYTESHEWVRVEADGTLTIGITDHAQDALGDIVFLELPEVGKSVGAGDALAVVESVKAASDIYAPVAGEVIAVNEAATAAPESVNADAFDAWLFKLKPANADDVNGLMSADAYKASVGA

SEQ ID NO: 393 - DNA, 384 bp, Pseudomonas fluorescens PfO-1
  CDS (1)..(384): transl_table=11
atgagcgagttgcgttttactgaagatcacgaatggctgcgcgccgaagccgatggttctgtcaccgttggcatcaccgctttcgcgcagaacgccctgggcgacgtggtgttcgtgcaactgcctgaattgcaggcttacgagaaaggcgccgaagccgccaccgtggaatcggtaaaagccgccagcggcgtttacatgccactggacggtgaagtcctggccaccaacccggccctggaagacagccctgaactggtgaacgaagatccgctgggcgaaggctggttcttccgcttcaagccagccgacgcgaccgccgtcgccaagctgctggatcaggacgcctacgaccgcctgatcaaagcccaagccgaagcctga

SEQ ID NO: 394 - protein, 127 aa, Pseudomonas fluorescens PfO-1
MSELRFTEDHEWLRAEADGSVTVGITAFAQNALGDVVFVQLPELQAYEKGAEAATVESVKAASGVYMPLDGEVLATNPALEDSPELVNEDPLGEGWFFRFKPADATAVAKLLDQDAYDRLIKAQAEA

SEQ ID NO: 395 - DNA, 384 bp, Pseudomonas fluorescens PfO-1
  CDS (1)..(384): transl_table=11
atgagcaacatcccagctgaactgcgttttgccgaaagtcatgaatgggcgcgtctggaagccgacggcaccgtcaccgtgggcatcagcgatcatgcccaggaagcgttgggtgatgtggtgtttgtcgagctggcagaagtgggcaaggtgttcgccgccggtgataccgccggtgtcgtcgagtcggtgaaggccgcttccgacatctactccccggtcggtggcgaagtgatcgccgtcaacgaagacctggccggttcgccggaagaactgaacaacgatccgtacgccgcatggatcttcaagctcaagccaagcgacaaggccgagctggacaagctgctcgacgctgccgcctataaggctgccatcggcgaataa

SEQ ID NO: 396 - protein, 127 aa, Pseudomonas fluorescens PfO-1
MSNIPAELRFAESHEWARLEADGTVTVGISDHAQEALGDVVFVELAEVGKVFAAGDTAGVVESVKAASDIYSPVGGEVIAVNEDLAGSPEELNNDPYAAWIFKLKPSDKAELDKLLDAAAYKAAIGE

SEQ ID NO: 397 - DNA, 393 bp, Carboxydothermus hydrogenoformans Z-2901
  CDS (1)..(393): transl_table=11
atgagtgtggtacctaaggatttaaagtacagccgtgagcatgagtggattaaggtagatggcaatatcggtattatcggtattaccgattttgcccaaaaatctttgggagatatcgtatttattgagcttcccggtgtgggggatgaaatttccgccggagatagctttggagttgtagagtcggtaaaagctgcttccgacttatatgctcccgtttccggaaaagttgtggaagttaatgaagaagttattgaatcgccgcaactggtaaatgaagatccctatggtaaggggtggatgattaaagtggaaattagtaacgaagcggagttagacgaactgctctcccccgaagattacgaaaaacttctggaagaggaaggagagtaa

SEQ ID NO: 398 - protein, 130 aa, Carboxydothermus hydrogenoformans Z-2901
MSVVPKDLKYSREHEWIKVDGNIGIIGITDFAQKSLGDIVFIELPGVGDEISAGDSFGVVESVKAASDLYAPVSGKVVEVNEEVIESPQLVNEDPYGKGWMIKVEISNEAELDELLSPEDYEKLLEEEGE

SEQ ID NO: 399 - DNA, 468 bp, Burkholderia sp. 383
  CDS (1)..(468): transl_table=11
atggcgcccggcgcaacaccacacccggcgcgccccggcggcgcgtcagcaaaacgaataaacccttttaatcaggagcttccgatgagcaacgtcccggccgatctgaaatacaccgacgaacacgagtggatccgcaccgaagcagacggcacgctgacggtcggcatcaccgatcacgcacagagcacgcttggcgacatcgtgttcctcgagttgccgcaagccggcaagcaggtgaaggcaggcgacgccatcggcgtcgtcgagtcggtgaaggctgcatccgacatctactcgccggtatcgggcgagatcatcgcgttcaaccaggacgctgcggacacgccggaagatgtcaatggcgatccgtacgaagcctggctgttcaagatcaagctcgccgccggcgccaataccgacaacctgctcagcgccgacgcttacaagaagctgatcggcgactaa

SEQ ID NO: 400 - protein, 155 aa, Burkholderia sp. 383
MAPGATPHPARPGGASAKRINPFNQELPMSNVPADLKYTDEHEWIRTEADGTLTVGITDHAQSTLGDIVFLELPQAGKQVKAGDAIGVVESVKAASDIYSPVSGEIIAFNQDAADTPEDVNGDPYEAWLFKIKLAAGANTDNLLSADAYKKLIGD

SEQ ID NO: 401 - DNA, 393 bp, Moorella thermoacetica ATCC 39073
  CDS (1)..(393): transl_table=11
atgaatttcccggctcatctgcattatagtaaagaccatgagtgggtagaagtcgatggtaaccgtgcccgtatcggtattaccgactatgcccaggagtccctgggggacatagtttttgtggaactgccccaggtaggggatgaactggcgacgggcgacagctttggggtcgtcgagtcggtaaagtcggcttccgacgtctatgcgccggtgggcggcaaggtggtggctgttaacgaagccctcctggacgccccccaggacatcaacgccgacccctacggcaagggctggatgattgaactggaattgagcgatccgagtgaagtagaaagcctcatggatgccagtgcttacctggaactggtaaaggaggagaagggggagtaa

SEQ ID NO: 402 - protein, 130 aa, Moorella thermoacetica ATCC 39073
MNFPAHLHYSKDHEWVEVDGNRARIGITDYAQESLGDIVFVELPQVGDELATGDSFGVVESVKSASDVYAPVGGKVVAVNEALLDAPQDINADPYGKGWMIELELSDPSEVESLMDASAYLELVKEEKGE

SEQ ID NO: 403 - DNA, 381 bp, Burkholderia thailandensis E264
  CDS (1)..(381): transl_table=11
atgagcaacgtcccggccgaactgaaatacaccgacgaacacgagtggattcgcaccgaagccgacggcacgctgacgatcggcatcaccgaccacgcgcaaaccacgctcggcgacatcgtcttcctcgagttgccgaaagtcggctcgcaggtgaaggcgggcgacgccgtcggcgtcgtcgaatcggtgaaagccgcgtcggacatctactcgcccgtgaccggcgaagtgatcgcgatcaacacggatgtggccgacgcgccggaagaggtgaacggcgacgcgtacggcgcatggctcttcaagatcaagctggcggccggcgcatcgaccgacagcctgctcgacgccgccgcctacgagaagctggtcggctga

SEQ ID NO: 404 - protein, 126 aa, Burkholderia thailandensis E264
MSNVPAELKYTDEHEWIRTEADGTLTIGITDHAQTTLGDIVFLELPKVGSQVKAGDAVGVVESVKAASDIYSPVTGEVIAINTDVADAPEEVNGDAYGAWLFKIKLAAGASTDSLLDAAAYEKLVG

SEQ ID NO: 405 - DNA, 381 bp, Frankia sp. CcI3
  CDS (1)..(381): transl_table=11
gtgtacccggacgacctgaagtacacccgtgagcacgaatggatccggctcgacgggagcacggcacgggtcggcatcacgtcctacgcgcaggaggcgctgggcgacatcgtctttgtctctctgcccgacctcggctccgcggtccaggccggtgagtccttcggagaggtcgagtcgaccaagagcgtgtccgagatctacgcgccgatcgccggagaggtgacggcgcgcaacgaggcacttgccggtgcgccggaactgatcaactctgatccctatggggaaggctggctcgtcgagctcacggtcgcggatgtcgtcgacgtcaccggcctactgaccgccgaagagtacgcggagcacgtgaaggaaaactga

SEQ ID NO: 406 - protein, 126 aa, Frankia sp. CcI3
MYPDDLKYTREHEWIRLDGSTARVGITSYAQEALGDIVFVSLPDLGSAVQAGESFGEVESTKSVSEIYAPIAGEVTARNEALAGAPELINSDPYGEGWLVELTVADVVDVTGLLTAEEYAEHVKEN

SEQ ID NO: 407 - DNA, 372 bp, Novosphingobium aromaticivorans DSM 12444
  CDS (1)..(372): transl_table=11
atgacccgctatttcaccaaggaccacgaatggatcgcggtcgagggcagcgaagcgaccgtcggcatcaccgactacgcacagagccagctcggtgacatcaccttcgtcgaactgcccggcgagggcagcgaagtcggcaagggcgacagcgcatcggtggtggacagcgtcaaggccgcgtcggacgtgtacgccccggtttcgggcaaggtcactctcgccaatgccgcgctcgaagagcagcccgaactggtcaacaccgaccctgaaggcgagggctggctgtggaagatgaccctggccgatgccgccgaactcgacggcctgatggacgaggctgcctatcaggcctacgtcgcggagctttga

SEQ ID NO: 408 - protein, 123 aa, Novosphingobium aromaticivorans DSM 12444
MTRYFTKDHEWIAVEGSEATVGITDYAQSQLGDITFVELPGEGSEVGKGDSASVVDSVKAASDVYAPVSGKVTLANAALEEQPELVNTDPEGEGWLWKMTLADAAELDGLMDEAAYQAYVAEL

SEQ ID NO: 409 - DNA, 387 bp, Desulfitobacterium hafniense Y51
  CDS (1)..(387): transl_table=11
atgaatccagtagaattaaagtacagcaaatctcatgagtgggctaaggtcgaaggaaatactgtgactttggggattacggctcacgctcaggacagcttaggagatgtggtctttgtggagctgcctgataacgataccacggtggtggccggggaggcctttggaaccgttgaatccgtcaaggccgtgtcggatatgattgctccggtgagcggcagggttatcgattataatcaagaggttctggattctcctgaacttctcaatgatgatccttatggtgagggatggctgattaaggtggaagtggatgatctgacggtattggatgaactcttatcagccgcggaatatgaggcgtttcttgcggaggagggccaataa

SEQ ID NO: 410 - protein, 128 aa, Desulfitobacterium hafniense Y51
MNPVELKYSKSHEWAKVEGNTVTLGITAHAQDSLGDVVFVELPDNDTTVVAGEAFGTVESVKAVSDMIAPVSGRVIDYNQEVLDSPELLNDDPYGEGWLIKVEVDDLTVLDELLSAAEYEAFLAEEGQ

SEQ ID NO: 411 - DNA, 381 bp, Ralstonia metallidurans CH34
  CDS (1)..(381): transl_table=11
atgaatttccccgctgacctgaagtacaccgagtcgcacgaatgggtgcgcgtcgagtccgacggcacgctgacgatcggcatcaccgatcacgcgcaggacgcgctcggcgacatcgtcttcctggaactgcccgaagtgggcaagtcggtcggcgccggcgacgcgcttgccgtggtggaatcggtaaaggccgcctccgacatctacgccccggtggctggcgaagtgatcgccgtgaacgaagccgcctcggcctcgccggaatcggtcaacgccaatgcgttcgacgcctggctgttcaagctgaagccggccaacagcgacgacgtgaacggcctgatgagtgccgacgcctacaaggccagcgtcggcgcctga

SEQ ID NO: 412 - protein, 126 aa, Ralstonia metallidurans CH34
MNFPADLKYTESHEWVRVESDGTLTIGITDHAQDALGDIVFLELPEVGKSVGAGDALAVVESVKAASDIYAPVAGEVIAVNEAASASPESVNANAFDAWLFKLKPANSDDVNGLMSADAYKASVGA

SEQ ID NO: 413 - DNA, 381 bp, Rubrobacter xylanophilus DSM 9941
  CDS (1)..(381): transl_table=11
gtggctgagataccgcaggatctcgtctacaccagaacccatgagtgggcccgcatagagggcgacgccgccaccgtcggtataaccgaccacgcccaggaggagctcggcgacgtggtcttcgtggagctcccggaggtgggaagctccgtgcaggccggagagcccttcggcaccatagagtccgtgaaggccgtctcagacctctactccccagtgagcggagaggtgaccgaggtgaacacctccctcgaggagagcccggagaaggtgaacgaagacccctacggcgagggctggctcctccgcgtcaggctctccgaggagcccgacctcctctcccccgaggagtacgcccgccgcctcgaagaggaggagtag

SEQ ID NO: 414 - protein, 126 aa, Rubrobacter xylanophilus DSM 9941
MAEIPQDLVYTRTHEWARIEGDAATVGITDHAQEELGDVVFVELPEVGSSVQAGEPFGTIESVKAVSDLYSPVSGEVTEVNTSLEESPEKVNEDPYGEGWLLRVRLSEEPDLLSPEEYARRLEEEE

SEQ ID NO: 415 - DNA, 369 bp, Mesorhizobium sp. BNC1
  CDS (1)..(369): transl_table=11
atgagcaagacctatttcacagaagaccacgagtggatccgcgtcgaaggagagacggcgaccgtgggcatcaccgattatgcccaggagcaactgggcgatctcgtcttcgtcgagctgcccgaaacgggcaagacgctcaagaagggagacgcggcggtggtggttgaatccgtgaaggccgcctccgatgtctatgctccagtggacggcgaagtgaccgaagtgaacgaagcgctgtccagcgaacccgctctcgtcaacggcgccccgatggatggcggctggctgtggaagatgaagctttccgacaaaagccagctcgaaggccttatggacgaggcaggctacaaggcgacgatcgcctag

SEQ ID NO: 416 - protein, 122 aa, Mesorhizobium sp. BNC1
MSKTYFTEDHEWIRVEGETATVGITDYAQEQLGDLVFVELPETGKTLKKGDAAVVVESVKAASDVYAPVDGEVTEVNEALSSEPALVNGAPMDGGWLWKMKLSDKSQLEGLMDEAGYKATIA

SEQ ID NO: 417 - DNA, 405 bp, Rhodococcus sp. RHA1
  CDS (1)..(405): transl_table=11
gtgagtgagctcgaaatccccgccgatcgtcggtacaccgccgaacacgagtgggtcgagcggacggggcccacgacggtacgcgtcggcatcaccgatttcgcgcagtcccagctcggcgacgtcgtgttcgtccagcttccggcggtcgacgaggccgtgacggcgggcgaatcgttcggcgaggtggaatccaccaagagcgtctccgacatcttcgccccgctgacggcgaaagtcgttgccgccaatgccgatctggacggcaacccggaacttgtgaactccgcgccctacgggcaggggtggctggtggacctcggtgtcgacgacgaggcgaccctcgacgcggcactggccgaaatgctggacgccgccggctatgcagacatcacggcaggataa

SEQ ID NO: 418 - protein, 134 aa, Rhodococcus sp. RHA1
MSELEIPADRRYTAEHEWVERTGPTTVRVGITDFAQSQLGDVVFVQLPAVDEAVTAGESFGEVESTKSVSDIFAPLTAKVVAANADLDGNPELVNSAPYGQGWLVDLGVDDEATLDAALAEMLDAAGYADITAG

SEQ ID NO: 419 - DNA, 372 bp, Hyphomonas neptunium ATCC 15444
  CDS (1)..(372): transl_table=11
atgaccacctactacaccaaagatcatgaatgggttcgcgtcgaaggcgacaccggcactgtgggcatcacctcctacgccgccggacagctcggcgatgttgtctatgttgagcttcctgaagccggcgcgagccttgccaagggcgacggctttgccgttgtcgaaagcgtgaaagctgcttcggacgtgtatgcgccaatttccggcgccgttctggaatccaataccggtcttgccgacgcgcctgaaaaggtcagcgaagcggccgagagcgatgcctggttcgtccgcgtcaagatttcggacactgccgagcttgaaggcctgatggatctggccgcctacactgaatattgcgaagggctctga

SEQ ID NO: 420 - protein, 123 aa, Hyphomonas neptunium ATCC 15444
MTTYYTKDHEWVRVEGDTGTVGITSYAAGQLGDVVYVELPEAGASLAKGDGFAVVESVKAASDVYAPISGAVLESNTGLADAPEKVSEAAESDAWFVRVKISDTAELEGLMDLAAYTEYCEGL

SEQ ID NO: 421 - DNA, 390 bp, Pseudomonas aeruginosa UCBPP-PA14
  CDS (1)..(390): transl_table=11
atgagcaatattcccgccgaactgcgttacgcccagagccacgaatgggctcgtctggaagccgacggcagcgttaccgtgggcatttccgaccatgcccaggaagcccttggcgatgtggtcttcatcgagctgccggagctgggcaagaccctcgccgccggccaggaagcgggcgtggtcgagtcggtgaaggccgcctccgacatctattcgccgatcggcggcgaagtcatcgctatcaacgaagccctggccgacaccccggaagacgtcaacaacgacccgtacgcgtcctggttcttcaagctcaagccgagcaatccggccgagctggacaagctgctcgacgccgctggctaccaggccgccgtcgacgcggaaggctga

SEQ ID NO: 422 - protein, 129 aa, Pseudomonas aeruginosa UCBPP-PA14
MSNIPAELRYAQSHEWARLEADGSVTVGISDHAQEALGDVVFIELPELGKTLAAGQEAGVVESVKAASDIYSPIGGEVIAINEALADTPEDVNNDPYASWFFKLKPSNPAELDKLLDAAGYQAAVDAEG

SEQ ID NO: 423 - DNA, 384 bp, Solibacter usitatus Ellin6076
  CDS (1)..(384): transl_table=11
atgtatccagaaaatttccggtatacgaaggaacacgagtgggtcctcgcggaaggcgactcaggcacagtcgggatcaccgaccacgcccagcaggaactcggcgatatcgtctatgtggacctgcccaaggtcggttcgcacgtggaggcaggtaagtcgctcgggtcggtggagagcgtgaaggcggtttccgacatctactctccggtcagcggagaggtcgtagagatcaaccagaccctggccgacgcccccgagaccctgaacacagatccgcacggcgcggcctggctggtgaagatcaagctgagcggcgccgccgaagttcagaatctgatgtcggccgccgactatctaagttatataggagctcaaaagtag

SEQ ID NO: 424 - protein, 127 aa, Solibacter usitatus Ellin6076
MYPENFRYTKEHEWVLAEGDSGTVGITDHAQQELGDIVYVDLPKVGSHVEAGKSLGSVESVKAVSDIYSPVSGEVVEINQTLADAPETLNTDPHGAAWLVKIKLSGAAEVQNLMSAADYLSYIGAQK

SEQ ID NO: 425 - DNA, 387 bp, Nocardioides sp. JS614
  CDS (1)..(387): transl_table=11
ttgtaccccgacgacttgaagtacacgaccgagcacgagtgggtccgcgagcccggggagcacgagggctcggtccggatcgggatcacccactacgcgcaggacgccctgggcgacatcgtctacgtctccctcccggagctcgggtcgaccgtcgaggccggcagcacctgcggtgagctggagtccaccaagtcggtgagcgacgtctacgcgccggtctccggcgaggtggtggcccgcaacgacgcgctggacgcgacgccggagctggtgaacaacgacccgtacggcggcggctggctcttcgaggtggtcccgagcgaccgcgccgggctggacgggctgctggacgccacggcgtaccaggcctcgctcgacgcctga

SEQ ID NO: 426 - protein, 128 aa, Nocardioides sp. JS614
MYPDDLKYTTEHEWVREPGEHEGSVRIGITHYAQDALGDIVYVSLPELGSTVEAGSTCGELESTKSVSDVYAPVSGEVVARNDALDATPELVNNDPYGGGWLFEVVPSDRAGLDGLLDATAYQASLDA

SEQ ID NO: 427 - DNA, 375 bp, Acidovorax sp. JS42
  CDS (1)..(375): transl_table=11
atgagcatccagttttccaaagaccatgaatggatcaacgcagccgacccggccgcggccgtcgtcggcatcaccgtccacgcgcaggatgcgttgggcgatgtggtgttcgtggacctgcccgcggtgggcaccacctttgcccagggcgacgtggccggtgtggtcgagtccgtcaaggccgctgccgatgtctacatgcccgtgtccggcgaaatcgtcgaggtcaacgaggccttgcgcgccgacccgtccctggccaactccgacccgctgggcgccggctggttcttcaaggtcaagctcagcgacgccggccagctcgccggcctgatggacgaaacggcctataccgccttcgcccagaacgcctga

SEQ ID NO: 428 - protein, 124 aa, Acidovorax sp. JS42
MSIQFSKDHEWINAADPAAAVVGITVHAQDALGDVVFVDLPAVGTTFAQGDVAGVVESVKAAADVYMPVSGEIVEVNEALRADPSLANSDPLGAGWFFKVKLSDAGQLAGLMDETAYTAFAQNA

SEQ ID NO: 429 - DNA, 378 bp, Magnetospirillum magnetotacticum MS-1
  CDS (1)..(378): transl_table=11
atgagcagcaagcgtttcaccaaggatcatgagtggatcgaggtcgagggcgatatcggcaccgtcggcatcagcgactatgcccagcacgctttgggcgacgttgtcttcgtcgaggttcccgatgcgggccgcgatttggccaagggcgccgaggccgccgtggtggaatcggtgaaggccgcgtccgaggtctattccccggtgtcgggcatcgtgaccgctggcaatcaggccatcgtcgaccagcccggcctggtcaacgaggccgccgagagcaccgcctggttcttcaagctgaagctgaccaatccgggcgaggtcggcgacctgatggatcaggccgcctacgacgcgtatctcaagaccctggaatag

SEQ ID NO: 430 - protein, 125 aa, Magnetospirillum magnetotacticum MS-1
MSSKRFTKDHEWIEVEGDIGTVGISDYAQHALGDVVFVEVPDAGRDLAKGAEAAVVESVKAASEVYSPVSGIVTAGNQAIVDQPGLVNEAAESTAWFFKLKLTNPGEVGDLMDQAAYDAYLKTLE

SEQ ID NO: 431 - DNA, 399 bp, Crocosphaera watsonii WH 8501
  CDS (1)..(399): transl_table=11
atggatctagaatttcctgaagatttaaaatatttggatacccacgagtacatccgtttagatggagaaattgccactattggcattagttcttatgcgatcgagcaattaggggatctcgtctttttagagttacccgaagtaggggactccttagaattaggaactagctttggttctattgagtcggttaaggcagcagaagacctttatccccccgtttcaggaaccgtggttgatcgcaatgaagaaatgattgaaagccccgaggcgatcgctgatgatccctacggtgatggatggttattaaaagtccgtattgaaaacctcgatgacgaatcagaagataccatgtctgctcaagactatcgtgctttggttgaaggggaagagacttaa

SEQ ID NO: 432 - protein, 132 aa, Crocosphaera watsonii WH 8501
MDLEFPEDLKYLDTHEYIRLDGEIATIGISSYAIEQLGDLVFLELPEVGDSLELGTSFGSIESVKAAEDLYPPVSGTVVDRNEEMIESPEAIADDPYGDGWLLKVRIENLDDESEDTMSAQDYRALVEGEET

SEQ ID NO: 433 - DNA, 384 bp, Prosthecochloris aestuarii DSM 271
  CDS (1)..(384): transl_table=11
atgaatattcctgcagatcttctctacacgaaggaccacgagtggataaaggtgcttgatgacggcacgacagcgcttgtcggtattactgattttgctcagtcagagcttggcgatattgtgtttgtcgaaacaaaacctgttggcaccgaactcagcgagcatgatgtgttcggtacagtcgaggcagtcaaaaccgttgccgatctgttcgctccggtcgatggtgtgattgtggaggtcaatgaagcgcttgacgcagccgaagtggtcaattccagtccgtatgaggatggctggatggtgaaagtatcgctgaaggatgcttcccagttcgacgctctgatgagtgcggcagaatacagcgagatggtgggcgagtaa

SEQ ID NO: 434 - protein, 127 aa, Prosthecochloris aestuarii DSM 271
MNIPADLLYTKDHEWIKVLDDGTTALVGITDFAQSELGDIVFVETKPVGTELSEHDVFGTVEAVKTVADLFAPVDGVIVEVNEALDAAEVVNSSPYEDGWMVKVSLKDASQFDALMSAAEYSEMVGE

SEQ ID NO: 435 - DNA, 378 bp, Croceibacter atlanticus HTCC2559
  CDS (1)..(378): transl_table=11
atgaatatcccacaagaattaaaatatactaaagatcacgaatggattaagattgaaggtgatgtagcaactgtaggtattactgattttgctcaaggcgaattaggagatatcgtatatgttgaagtagaaactgtagatgaaactctagatagagaagaagtatttggtacggttgaagctgtgaagactgtttcagatcttttcttaccgcttactggtgagattatagagtttaatgaaacgttagaagacgagccagaattagtaaactcagacccatacggaaaaggctggatggttaaaattaaattttctgaagcttcagaagtagaagacttgttagatgctgaagcctataaagaattggttggttaa

SEQ ID NO: 436 - protein, 125 aa, Croceibacter atlanticus HTCC2559
MNIPQELKYTKDHEWIKIEGDVATVGITDFAQGELGDIVYVEVETVDETLDREEVFGTVEAVKTVSDLFLPLTGEIIEFNETLEDEPELVNSDPYGKGWMVKIKFSEASEVEDLLDAEAYKELVG

SEQ ID NO: 437 - DNA, 360 bp, Sulfitobacter sp. EE-36
  CDS (1)..(360): transl_table=11
atgaagtttaccgaagagcacgaatggctgcgggttgaaggcgacgagatcgttgttggcatcaccattcacgccgccgaacaactgggtgacgtggtgtttgtcgaactgcccgacgaaggcacgaccgtcagcaaggacgacgaggtcgtcgtgatcgaatccgtcaaagccgcgtctgatattctggcaccgatcgatggcgagatcatcgaggtcaacagcacgctgtccgacaaccccgcgatggtgaatgacgatccgcagggcgaggcgtggttcttcaagatgaaggcgtccgatccaagccagatggacgagttcatggacgaagccgcctatcagaagttcatcgggtaa

SEQ ID NO: 438 - protein, 119 aa, Sulfitobacter sp. EE-36
MKFTEEHEWLRVEGDEIVVGITIHAAEQLGDVVFVELPDEGTTVSKDDEVVVIESVKAASDILAPIDGEIIEVNSTLSDNPAMVNDDPQGEAWFFKMKASDPSQMDEFMDEAAYQKFIG

SEQ ID NO: 439 - DNA, 360 bp, Roseovarius nubinhibens ISM
  CDS (1)..(360): transl_table=11
atgaaattcacagaagaacatgaatggctgcgcgaggaagacgggcttatcgtcgtcggcatcaccgagcatgcggcagagcagcttggcgatgtggtctttgtcgagctgcccgaggaaggcaccgaagtggccaaggatgacgaggtcgtggtgatcgaatccgtcaaggcggcgtcggatatcctcgcccccatcgatggcgagatcgtcgaggtgaacagcgtgctcgccgatgagccggccaaggtcaatgacgatccgctgggcgatgcgtggttcttcaagatcaaggcgtcggacccgtcgcagatggacgacatgatggatgaagccgcctacaaggcctttatcggctga

SEQ ID NO: 440 - protein, 119 aa, Roseovarius nubinhibens ISM
MKFTEEHEWLREEDGLIVVGITEHAAEQLGDVVFVELPEEGTEVAKDDEVVVIESVKAASDILAPIDGEIVEVNSVLADEPAKVNDDPLGDAWFFKIKASDPSQMDDMMDEAAYKAFIG

SEQ ID NO: 441 - DNA, 360 bp, Oceanicola batsensis HTCC2597
  CDS (1)..(360): transl_table=11
atgaaattcaccgaagaacacgaatggctgcggcccgacggcgacgagatcgtggtcggcatcaccgaacacgccgccgaacagctgggcgacatcgtcttcgtcgaactgcccgaggtcggcaccgaggtctcgaaggacgacgaatgcgtcgtgatcgaatcggtcaaggcggcgtcggacatcctcgcgccgctcgacggcgagatcaccgaggtgaacgaggcgctggtcgaggatcccggcaaggtgaacgaggatcccatgggcgacgcctggttcttcaagatcaagccctcggagccgtcccagatggacgactacctctccgagaaggaataccaggacctgatctcctga

SEQ ID NO: 442 - protein, 119 aa, Oceanicola batsensis HTCC2597
MKFTEEHEWLRPDGDEIVVGITEHAAEQLGDIVFVELPEVGTEVSKDDECVVIESVKAASDILAPLDGEITEVNEALVEDPGKVNEDPMGDAWFFKIKPSEPSQMDDYLSEKEYQDLIS

SEQ ID NO: 443 - DNA, 390 bp, Pseudoalteromonas tunicata D2
  CDS (1)..(390): transl_table=11
atgagcaatatcccaagcgatttaaaatacgcatcatcacacgagtgggttcgcgctgaaggtaacggtgtttacactgttggtattacagagcacgcacaagaacttttaggtgacatggtgtttgttgagttaccagatgttgaagctgaatatgaagccggtgatgattgcgctgttgcagaatcagtaaaagcagcgtctgatatctacgcaccaattagcgggactattgttgaagtgaatgaagtacttgaaaattcaccagagactgtaaatcaagagccttatggtgatggttggttattccgcattaaagcatcagatgagtctgagcttgataacctacttgatgctgaaggttacgaaaactcaatcgacgaagaataa

SEQ ID NO: 444 - protein, 129 aa, Pseudoalteromonas tunicata D2
MSNIPSDLKYASSHEWVRAEGNGVYTVGITEHAQELLGDMVFVELPDVEAEYEAGDDCAVAESVKAASDIYAPISGTIVEVNEVLENSPETVNQEPYGDGWLFRIKASDESELDNLLDAEGYENSIDEE

SEQ ID NO: 445 - DNA, 399 bp, Photobacterium sp. SKA34
  CDS (1)..(399): transl_table=11
atgagttacgttcctcttgaattacaatatacccacagccacgaatggattcgttctgaaggtgatgggatttatacgattggtattacagaccatgctcaatcattacttggtgatatggtttatgttgaattacctgatattgaatcgcccacagacgtgggggaagagtgtgcgatggctgaatctgtaaaagcggcctcagatatttatgcccccttgtctggtgtcgtgatagctattaacgatgaattagattcggcgccagagctcatcaatagtgatccctatggtgacggttggttatttcagattagggtgaatgatgttaacgaactgaatgatttattgatggcggaagattacgccaccattattgttgaagatgaagaacagtaa

SEQ ID NO: 446 - protein, 132 aa, Photobacterium sp. SKA34
MSYVPLELQYTHSHEWIRSEGDGIYTIGITDHAQSLLGDMVYVELPDIESPTDVGEECAMAESVKAASDIYAPLSGVVIAINDELDSAPELINSDPYGDGWLFQIRVNDVNELNDLLMAEDYATIIVEDEEQ

SEQ ID NO: 447 - DNA, 381 bp, Photobacterium sp. SKA34
  CDS (1)..(381): transl_table=11
atggaatcaacattaaagtttaccagtagccacgaatggatccgtaataacggtgatggaacagtgacggttggtatttctgatcatgcgcaaggtttattaggcgatgtggtatttgttgatttacctgaagttggtgatacgacagatgctggtgatgcattctctttagtggaatcagtaaaagccgcttctgacatttacgcccctatcacaggtgaagttgttgccattaatgaagatttagaagacagccctgaactggttaatgaagaaccttatgaaggcggctggattgcaaccatcaagcttagcaatactgatgaattgacaacattaattgatgctgaaacctatcttgcttcaattgaagaagactaa

SEQ ID NO: 448 - protein, 126 aa, Photobacterium sp. SKA34
MESTLKFTSSHEWIRNNGDGTVTVGISDHAQGLLGDVVFVDLPEVGDTTDAGDAFSLVESVKAASDIYAPITGEVVAINEDLEDSPELVNEEPYEGGWIATIKLSNTDELTTLIDAETYLASIEED

SEQ ID NO: 449 - DNA, 393 bp, Neptuniibacter caesariensis
  CDS (1)..(393): transl_table=11
atgagtaacatcccatctgaactgaaatacgttgctagtcatgaatggattcgcgttgagggtgacggcacagttacaatcggtgtcactgatcacgcacaggatctgttgggtgatgtagtttttgttgaactgccagaagttggtgctgaagttgctatgggcgacgagtcaggtgttgttgagtctgttaaggcggcatcggatatttatgctccacttagcggtgaagttgtggaagttaacgaagaattggaagattcgcctgaactggttaattctgacccttacgctgatggctggttcttcaaactgaaactgtctgatcaggatgagctgaatgaactgctggatgcagaagcttacaatgatctgtgcgagtcagaagcttaa

SEQ ID NO: 450 - protein, 130 aa, Neptuniibacter caesariensis
MSNIPSELKYVASHEWIRVEGDGTVTIGVTDHAQDLLGDVVFVELPEVGAEVAMGDESGVVESVKAASDIYAPLSGEVVEVNEELEDSPELVNSDPYADGWFFKLKLSDQDELNELLDAEAYNDLCESEA

SEQ ID NO: 451 - DNA, 390 bp, Neptuniibacter caesariensis
  CDS (1)..(390): transl_table=11
atgagcattccatctaactacctttttgcaccaagccacgagtgggtactggacaacggtgacggcactgtaactgttggtatctctgaccacgctcaggagctgctgggtgatgttgtattcgttgaactgccagaagaaggccgtgaagttgaagccggcgaagagttctctctggttgagtctgtaaaagcagcgtctgacatctacgcgccaatctctggtgaagtcgttgcagttaacgaagagctggaagacgcgcctgagactgttaacgaatccccattcggtgacggctggatcgttaagatcaaagttgcagatgcttctgaactggaaaaactgctaaacgctgaagcgtacgcagctacgattgctgaagaagcgtga

SEQ ID NO: 452 - protein, 129 aa, Neptuniibacter caesariensis
MSIPSNYLFAPSHEWVLDNGDGTVTVGISDHAQELLGDVVFVELPEEGREVEAGEEFSLVESVKAASDIYAPISGEVVAVNEELEDAPETVNESPFGDGWIVKIKVADASELEKLLNAEAYAATIAEEA

SEQ ID NO: 453 - DNA, 381 bp, Flavobacteria bacterium BBFL7
  CDS (1)..(381): transl_table=11
atgaatatcccagcagaattaaagtatactaaagatcacgagtggattcgtatagaaggtgatacagcaactgtaggtattactgactttgcacaaagcgagttaggagatatcgtgtatgtagaagttgaaaccgttgatgaaacactagatgtagaggaagtttttggaacagttgaggctgttaaaacagtgtctgatttatttttaccattaactggagaaattacagctttcaatgagaagctagaagatgagccagaactagtaaattcagatccttatggtgatggatggatgattaaaatgaccttctctgatgctgctcaagttgaagaattattaactgcagatgcttacaaagagttaataggtggctaa

SEQ ID NO: 454 - protein, 126 aa, Flavobacteria bacterium BBFL7
MNIPAELKYTKDHEWIRIEGDTATVGITDFAQSELGDIVYVEVETVDETLDVEEVFGTVEAVKTVSDLFLPLTGEITAFNEKLEDEPELVNSDPYGDGWMIKMTFSDAAQVEELLTADAYKELIGG

SEQ ID NO: 455 - DNA, 384 bp, Oceanobacter sp. RED65
  CDS (1)..(384): transl_table=11
atggcacaagtacctgcgaatctaaaatacgtttcttcgcacgagtggatccgcgatgagggcgatggcgtggttactgttggcgttactgattttgcccaagagcaactaggcgatgtagtattcgttgagcttcctgaagaaggtgtagagatcaataaagaagacgcgattgccgttgtagaatctgtaaaagccgccagcgatatctatgctccagtatcaggtgaagtcatcgcagtaaacgaaggtctagcggacgaacctgaaaaagtgaacgaagaaccttacgacggagcttggttcttcaaagtaaaactcagtgaaccgagtgaaatggatgctctactaagtgctgaacagtacgaagctgagtgccagtaa

SEQ ID NO: 456 - protein, 127 aa, Oceanobacter sp. RED65
MAQVPANLKYVSSHEWIRDEGDGVVTVGVTDFAQEQLGDVVFVELPEEGVEINKEDAIAVVESVKAASDIYAPVSGEVIAVNEGLADEPEKVNEEPYDGAWFFKVKLSEPSEMDALLSAEQYEAECQ

SEQ ID NO: 457 - DNA, 387 bp, Desulfitobacterium hafniense DCB-2
  CDS (1)..(387): transl_table=11
atgaatccagtagaattaaagtacagcaaatctcatgagtgggctaaggtcgaaggaaatactgtgactttggggattacggctcacgctcaggacagcttaggagatgtggtctttgtggagctgcctgataacgataccacggtggtggccggggaggcctttggaaccgttgaatccgtcaaggccgtgtcggatatgattgctccggtcagcggcaaggttatcgattataatcaagaggtgctggattctccggaacttctcaatgatgatccttatggtgagggatggctgattaaggtggaagtggatgatctgacggtattggatgaactcttatcagccgcggaatatgaggcgtttcttgcggaggagggccaataa

SEQ ID NO: 458 - protein, 128 aa, Desulfitobacterium hafniense DCB-2
MNPVELKYSKSHEWAKVEGNTVTLGITAHAQDSLGDVVFVELPDNDTTVVAGEAFGTVESVKAVSDMIAPVSGKVIDYNQEVLDSPELLNDDPYGEGWLIKVEVDDLTVLDELLSAAEYEAFLAEEGQ

SEQ ID NO: 459 - DNA, 390 bp, Alteromonadales bacterium TW-7
  CDS (1)..(390): transl_table=11
atgagcaatatccctactgaattaaaatacgcttcttcacacgagtgggttcgcgacgaaggtgacggtacctttacagttggtattacagaacacgcgcaagaactacttggcgacatggtgtttgttgaattaccagaagtaggcgacgaagtagacgcaggcgaagactgtgcagtagcggagtcggttaaagctgcttcagacatttacgcaccaattggtggtgaagtgattgctattaatgaagagctagaagacgcacctgaaacagtaaacaacgacgcgtacggcgacggttggttattccgtcttaaagcatctgatgtgtctgagctagacaacctattagacgctgaaggctactcgcacactatcgacgaagagtaa

SEQ ID NO: 460 - protein, 129 aa, Alteromonadales bacterium TW-7
MSNIPTELKYASSHEWVRDEGDGTFTVGITEHAQELLGDMVFVELPEVGDEVDAGEDCAVAESVKAASDIYAPIGGEVIAINEELEDAPETVNNDAYGDGWLFRLKASDVSELDNLLDAEGYSHTIDEE

SEQ ID NO: 461 - DNA, 390 bp, Marinobacter sp. ELB17
  CDS (1)..(390): transl_table=11
atgagcgatgttccctctgatttgaaataccttgaaacccaccagtgggtgcgggtagataaaagcggtctggccaccgtgggcattaccgattttgcccagcggcagttgggcgacgtggtttatattggcgttccggagctgggcgctaccgtgaccggcggcgaagaagccggcgtggtggagtccgtcaaatctgcctcagacgtattcagcccggtaacgggcgaagtggtcgaaattaacgagcggctagaagacgagccggaaaaagtgaacgaagacccttacggcgaaggctggctgtttcgggtgaaaatgaccgacgacggcgagcttgatggcctgatggatgcagacacttacagcgacctggtcgcagcggagtaa

SEQ ID NO: 462 - protein, 129 aa, Marinobacter sp. ELB17
MSDVPSDLKYLETHQWVRVDKSGLATVGITDFAQRQLGDVVYIGVPELGATVTGGEEAGVVESVKSASDVFSPVTGEVVEINERLEDEPEKVNEDPYGEGWLFRVKMTDDGELDGLMDADTYSDLVAAE

SEQ ID NO: 463 - DNA, 372 bp, Erythrobacter sp. SD-21
  CDS (1)..(372): transl_table=11
atggcccgttatttcaccgatgaacacgaatggatcgacttggaaggcgacaccgccacggtcggcatcaccgatttcgcgcaaggccagctgggcgacatcgtcttcgtcgaactgcctgaagtcggcaccatggtcgaaaagggcaaggacgccgccgtggtcgaaagcgtcaaggcggcgagcgacgtttacgcgcctctgtcgggcgaggtcgtcgaggtgaacgacgggctggaagacgatcccgcgctcgtcaattcctcgcccgaggaagacggctggttcttcaagatggcgatctccgacaagtccgagctcgaagggctgatggacgacaaggcctacaagagcttctgcgacgggctttga

SEQ ID NO: 464 - protein, 123 aa, Erythrobacter sp. SD-21
MARYFTDEHEWIDLEGDTATVGITDFAQGQLGDIVFVELPEVGTMVEKGKDAAVVESVKAASDVYAPLSGEVVEVNDGLEDDPALVNSSPEEDGWFFKMAISDKSELEGLMDDKAYKSFCDGL

SEQ ID NO: 465 - DNA, 387 bp, Moritella sp. PE36
  CDS (1)..(387): transl_table=11
atgagtaatatcccagctgaattaaaatatgcatcttcacacgaatgggttcgtaacgaaggtgacggtacttacactgtcggtatttctgaccatgcgcaaggccttttaggtgacatggtattcattgatttaccagacgtaggtgatgaaatcactgctggcgaagattgcgcagtaggcgaatctgttaaagcggcatcagacatctacgcaccaatcagtggtgaagttgtcgcaatcaatgaagaattagaagactcgccagagttagtaaactcggatgcattcggcgaaggctggttgttccgcgttaaagcgtctgacgaaagcgaactcgcagcgctacttgacgcggctggttatgctgagtcaatcgaagactaa

SEQ ID NO: 466 - protein, 128 aa, Moritella sp. PE36
MSNIPAELKYASSHEWVRNEGDGTYTVGISDHAQGLLGDMVFIDLPDVGDEITAGEDCAVGESVKAASDIYAPISGEVVAINEELEDSPELVNSDAFGEGWLFRVKASDESELAALLDAAGYAESIED

SEQ ID NO: 467 - DNA, 390 bp, Rickettsiella grylli
  CDS (1)..(390): transl_table=11
atgaaaaatttacctgaattaaaatatacatcgactcacgagtggattcggtttgaagagaacaacagtgtctatgtcggtattactccacatgcccaagagctattaggtgatgtcgtttatgttgaattgcctccgattaataaacgcttgaatcaacatgaagaagcctgtgttttagaatccgttaaagccgctgctgatgtctatgcgcccctttcaggtgtggtaacagatattaatacgtcattgaacgataaacctgagcttattaatacggatgcttacggacaagggtggttgtttcgactacaattttcagacgccactgaactaaaaaaattaatggatcaaatacagtacgagcaacatattttggttgaggcctaa

SEQ ID NO: 468 - protein, 129 aa, Rickettsiella grylli
MKNLPELKYTSTHEWIRFEENNSVYVGITPHAQELLGDVVYVELPPINKRLNQHEEACVLESVKAAADVYAPLSGVVTDINTSLNDKPELINTDAYGQGWLFRLQFSDATELKKLMDQIQYEQHILVEA

SEQ ID NO: 469 - DNA, 390 bp, Gemmata obscuriglobus UQM 2246
  CDS (1)..(390): transl_table=11
atggcgaacccgtcgaacctgaagtacgcgaccacgcacgagtgggccaaactggacggcgacacggtggttgtgggcatcaccgcgttcgcggttgagcaactgaccgagccgacctacctggagctgcccgcggtgggcacggcgctggccccgggcgggaagttcggcgtgatcgagtcgtacaagtccacctcggacctgtactcgccggtcgcggggacggtggtggagcggaacgacccgctgacgggcgacccgaagccggtgtacgacgacgccttcggcgccgggtggatgctgaagatcaagctgtccccgggcgcgacgctcgaccacctgctgagcgccgagcagtacgaccagcagctcgcgaccgaaggccactaa

SEQ ID NO: 470 - protein, 129 aa, Gemmata obscuriglobus UQM 2246
MANPSNLKYATTHEWAKLDGDTVVVGITAFAVEQLTEPTYLELPAVGTALAPGGKFGVIESYKSTSDLYSPVAGTVVERNDPLTGDPKPVYDDAFGAGWMLKIKLSPGATLDHLLSAEQYDQQLATEGH

SEQ ID NO: 471 - DNA, 387 bp, Thauera sp. MZ1T
  CDS (1)..(387): transl_table=11
atgagcaacgttcccagcaccctcaagtacaccaagtcccacgaatggatccgcgtcgaggacgacggcaccctgaccatcggcgtcaccgaccacgcccaggaggccctcggcgacatcgtcttcctcgaactgccggaagccggccgcgcgctgtccgccggcgaagcctgcgcggtgatcgaatcggtcaaggctgcctccgacatctacgcccccgtggcaggtgaagtgatcgccaacaatcaggacgcgatcgacgcccccgagagcgtcaacgccgacgcgtactccgcctggctgttcaagctcgcgccggccaacgccgccgacgtcgccgcgctgatggacgccgcagcctacgaagcggaaatcgcccaggcctga

SEQ ID NO: 472 - protein, 128 aa, Thauera sp. MZ1T
MSNVPSTLKYTKSHEWIRVEDDGTLTIGVTDHAQEALGDIVFLELPEAGRALSAGEACAVIESVKAASDIYAPVAGEVIANNQDAIDAPESVNADAYSAWLFKLAPANAADVAALMDAAAYEAEIAQA

SEQ ID NO: 473 - DNA, 375 bp, Verrucomicrobium spinosum DSM 4136
  CDS (1)..(375): transl_table=11
atgagccttgttccagaccagttgctataccgtgaatcgcacgaatgggttgatacagccaccggattggtaggcatcaccgaccacgcccagcacgaactgaccgatgtggtctatgtggagttgcccaaggtgggcgcagtggtgaaggccggtgaccacatcgcggtggtggagtccgtcaaggccgcgagcgacatctactcgcccgtgagcggggagatcgtggaggccaatgaggcccttagcggggatccttcgctgctgaacaccgatccctacgacaagggctggatctgcaagatcaaggtggcagatcccgccgagaccggcgccctcatggacgccgcgtcctatcgtcagcacatcgcgtaa

SEQ ID NO: 474 - protein, 124 aa, Verrucomicrobium spinosum DSM 4136
MSLVPDQLLYRESHEWVDTATGLVGITDHAQHELTDVVYVELPKVGAVVKAGDHIAVVESVKAASDIYSPVSGEIVEANEALSGDPSLLNTDPYDKGWICKIKVADPAETGALMDAASYRQHIA

SEQ ID NO: 475 - DNA, 468 bp, Populus tremuloides
  CDS (1)..(468)
atggcttcaagattgttatgggcttcaagggctgcttcttacctcaggatctctgtttctcatagagggtttgcttctgttataaaggacttgaagtacgctgaaagtcatgaatgggtgaaggttgctggtaatactgctaccgttggtataacggatcatgctcaagatcatttaggtgatgtagtgtatgttgaattaccagaagtgggtgctactgtaaatcagggttctggatttggtgcagttgaaagtgtcaaggctaccagtgatgtttattctcctgtttcgggaaatgtggttgaagttaatgaagaactgagcaactctcctggtttggtcaattcaagcccctatgaaaagggatggattatgaaggttgaaattaaagatgccagtgaactagagaccttgaagaactcagatgactatgctaagttctgtgaagaagaagatgcaaagcattga

SEQ ID NO: 476 - protein, 155 aa, Populus tremuloides
MASRLLWASRAASYLRISVSHRGFASVIKDLKYAESHEWVKVAGNTATVGITDHAQDHLGDVVYVELPEVGATVNQGSGFGAVESVKATSDVYSPVSGNVVEVNEELSNSPGLVNSSPYEKGWIMKVEIKDASELETLKNSDDYAKFCEEEDAKH

SEQ ID NO: 477 - DNA, 477 bp, Oryza sativa subsp
  CDS (7)..(477)
atggccatggccgcctccaggttgctgtgggcttcccgcgccgcctcctacctcaagatctccactttccccagggccttctccaccgtgctgaaggatctgaagtatgctgacactcatgaatgggttaaggttgagggtgattcggcaaccgttggaattacagaccatgcccagcaccatttgggtgatgttgtgtatgtggagcttccagaagttggcagcagtgtatcccagggaaagaactttggtgctgttgaaagtgtgaaggcaaccagcgatatctactctccagtatctggagaggtggttgcagtgaacgatggactaggcgatgaacctggattggttaatacaagtccatacgagagtgggtggatcatcaaggtcaaggttagtgattcaggtgagctcaattcattgatggatgacgcgaaatactcgaaattctgcgaggaagaagatagcaagcattga

SEQ ID NO: 478 - protein, 156 aa, Oryza sativa subsp
MAASRLLWASRAASYLKISTFPRAFSTVLKDLKYADTHEWVKVEGDSATVGITDHAQHHLGDVVYVELPEVGSSVSQGKNFGAVESVKATSDIYSPVSGEVVAVNDGLGDEPGLVNTSPYESGWIIKVKVSDSGELNSLMDDAKYSKFCEEEDSKH

SEQ ID NO: 479 - DNA, 513 bp, Oryza sativa subsp
  CDS (1)..(513)
atggccgccgccgccgccgcctcaagggcgctctgggcttgccgcaccgcctcctaccttcggatctcctccttccccagggctttctccaccgtccttaaagatctaaaatatgctgatactcatgagtgggtgaaggttgagggtgattcagcaaccataggggtcacagaccatgctcaggaccatttgggtgatgttgtgtatgttgagcttccagaagttggttccacagtatcacaaggaacgaactttggtgcggttgaaagtgtgaaagcaaccagtgatatcaatgcaccagtatctggagagattattcaagtaaatgatgaactaagtgaaaaaccaggatttttgacaatttgcttctgcaattttacacagataaatggaagtccatatgagaagggatggatcatcaaggttaagataagtgatccaagtgagttaaactcgctgatggatgatgagaagtacaagaagttttgtgaggaagaagatggcaaacactga

SEQ ID NO: 480 - protein, 170 aa, Oryza sativa subsp
MAAAAAASRALWACRTASYLRISSFPRAFSTVLKDLKYADTHEWVKVEGDSATIGVTDHAQDHLGDVVYVELPEVGSTVSQGTNFGAVESVKATSDINAPVSGEIIQVNDELSEKPGFLTICFCNFTQINGSPYEKGWIIKVKISDPSELNSLMDDEKYKKFCEEEDGKH

SEQ ID NO: 481 - DNA, 498 bp, Vitis vinifera
  CDS (1)..(498)
atggcactgagaatgtgggcttcttctactgctaatgctctgagagtctcttgtgcctccaaagctcacgtgtctcctgcattttctctctcaagatgcttttcctctgttttggatgggttgaagtatgcaacttcacatgaatgggtgaagcatgaaggctcagtggcaacaattggtatcactgatcatgctcaggaccacctaggagaagtagtgtttgtggagctaccagagcctggtggttcagtttcaaaaggaaacggctttggagctgtggaaagtgtgaaagcaaccagtgatatcaattccccaatctctggcgaggttgttgaggtcaactctaagcttagtgaatcgcctggtttgatcaattcaagcccatatgaagatggatggatgatcaaggtgaagcctggtaatccatcagagttggaatccttgatgggtccaaaggaatatacgaaattctgtgaggaagaagatgctgcccattag

SEQ ID NO: 482 - protein, 165 aa, Vitis vinifera
MALRMWASSTANALRVSCASKAHVSPAFSLSRCFSSVLDGLKYATSHEWVKHEGSVATIGITDHAQDHLGEVVFVELPEPGGSVSKGNGFGAVESVKATSDINSPISGEVVEVNSKLSESPGLINSSPYEDGWMIKVKPGNPSELESLMGPKEYTKFCEEEDAAH

SEQ ID NO: 483 - DNA, 465 bp, Vitis vinifera
  CDS (1)..(465)
atggcttcaaggttgtgggcttcgagggctgcttcatacctcaggctctctgtcttccacagagggttctcttctgttgtgaaggatctgaagtatgctgactctcatgagtgggtgaaaattgatgggaattctgctattgttggcataaccgaccatgctcaagatcatttaggtgatgttgtgtatgttgagttaccagaagcaggggctgctgtaaaccagggcagcggttttggtgcagttgaaagcgtgaaggccacaagtgatataaactctcctgtttctggaaaagtggttgaagttaatgaagagctcaacagctcacccggtttggttaatgcgagcccatacgaaaatgggtggattataaaggtggagatgagtgacaccggtgaattaaattctttgatggactcagaacagtacaccaagttttgtgaagaagaagatgccaagcattga

SEQ ID NO: 484 - protein, 154 aa, Vitis vinifera
MASRLWASRAASYLRLSVFHRGFSSVVKDLKYADSHEWVKIDGNSAIVGITDHAQDHLGDVVYVELPEAGAAVNQGSGFGAVESVKATSDINSPVSGKVVEVNEELNSSPGLVNASPYENGWIIKVEMSDTGELNSLMDSEQYTKFCEEEDAKH

SEQ ID NO: 485 - DNA, 498 bp, Vitis vinifera
  CDS (1)..(498)
atggcactgagaatgtgggcttcttctactgctaatgctctgagagtctcttgtgcctccaaagctcatgtgtctcctgcattttctctctcaagatgcttttcctctgttttggatggattgaagtatgcaacttcacatgaatgggtgaagcatgaaggctcagtggcaacaattggtatcactgatcatgctcaggaccacctaggagaagtagtgtttgtggagataccagagcctggtggttcagtttcaaaaggaaacggctttggagctgtggaaagtgtgaaagcaaccagtgatgtcaattccccaatctctggcgaggttgttgaggtcaactctaagcttagtgaagcgcctggtttgatcaattcaagcccatatgaagatggatggatgatcaaggtgaagcctagtaatccatcagagttggaatccttgatgggtccaaaggaatatacgaaattctgtgaggaagaagatgctgcccattag

SEQ ID NO: 486 - protein, 165 aa, Vitis vinifera
MALRMWASSTANALRVSCASKAHVSPAFSLSRCFSSVLDGLKYATSHEWVKHEGSVATIGITDHAQDHLGEVVFVEIPEPGGSVSKGNGFGAVESVKATSDVNSPISGEVVEVNSKLSEAPGLINSSPYEDGWMIKVKPSNPSELESLMGPKEYTKFCEEEDAAH

SEQ ID NO: 487 - DNA, 468 bp, Vitis vinifera
  CDS (1)..(468)
atggctggtgggttgttgtgggcaacaagggccgcttcatatttgaggatctcagtgcccttcagagccttttcttctgttgttaaggatttgaaatatgttgattctcatgagtgggccaaagttgacggaaatttagcaaccatagggattaccgaccatgctcaggatcatttaggtgatgttgtgtatgtggaactgcctgaagttggagccaatgtttcacagggtggcagttttggtgctgttgagagtgtcaaagcaaccagcgacatcaactcccctgtttcgggcaaagtggttgaagtcaatgaagaactcagcagctctccaggtttggttaacgggagcccgtacgagaaagggtggatcataaaggtagagatcagcaacccaagtgagctcaactccttgatggactcagagcagtactccaagttctgtgaagaagaagatgcaaagcattga

SEQ ID NO: 488 - protein, 155 aa, Vitis vinifera
MAGGLLWATRAASYLRISVPFRAFSSVVKDLKYVDSHEWAKVDGNLATIGITDHAQDHLGDVVYVELPEVGANVSQGGSFGAVESVKATSDINSPVSGKVVEVNEELSSSPGLVNGSPYEKGWIIKVEISNPSELNSLMDSEQYSKFCEEEDAKH

SEQ ID NO: 489 - DNA, 396 bp, Microcystis aeruginosa PCC 7806
  CDS (1)..(396): transl_table=11
atggaactggaatatcccgaggatttgagatacctagaaacccacgaatacgtcagactcgaaggtgaaatcgctaccttgggaattagtgcttttgccgtcgatcaattgggtgatatcgtgtttctagaattgcccgaattgggagaggcgctggaagtaggtagtagtttcggcacgattgaatcggtaaaagcggtggaagaactttatcctcccgtctcggggaccgtagttgatcgcaatcaagcgatgattgactcccccgaattaattgccgatgatccccacggggagggttggttattaaaagtgcgggtagaaaatcccgataatgccttggctgacaccctctccgctagtgaataccgcgagcaagtagcaggggaaagttaa

SEQ ID NO: 490 - protein, 131 aa, Microcystis aeruginosa PCC 7806
MELEYPEDLRYLETHEYVRLEGEIATLGISAFAVDQLGDIVFLELPELGEALEVGSSFGTIESVKAVEELYPPVSGTVVDRNQAMIDSPELIADDPHGEGWLLKVRVENPDNALADTLSASEYREQVAGES

SEQ ID NO: 491 - DNA, 495 bp, Picea sitchensis
  CDS (1)..(495)
atggcgttgagagtgtgggcatctcaaactgcaacatctcttgggattggatgcagacgtcctcttcgatcactcggatttcctgctgttcctttttctcgaggattttctgaagttatcgaggggttgaagtatgcagattcccatgagtgggtgaaatctgatggcacagtgggcataacccaccatgctcaggaccacttgggagatgttgtgtttgtcgacctgccagaagttggagcagcggtttcgaaaggtagcagtttcggtgcagtagagagtgtaaaagcaaccagtgatattattgctccggtttctggagaagtagttgaaaccaacacaaagctaaccgagactcctgccttgattaatggaagcccatacgaagaagggtggctcataaaagtgcgcattcaggacccatcagagatggacactttaatgaatgcagagaaatataaacatttctgtgaagaagaagatgccagtcactga

SEQ ID NO: 492 - protein, 164 aa, Picea sitchensis
MALRVWASQTATSLGIGCRRPLRSLGFPAVPFSRGFSEVIEGLKYADSHEWVKSDGTVGITHHAQDHLGDVVFVDLPEVGAAVSKGSSFGAVESVKATSDIIAPVSGEVVETNTKLTETPALINGSPYEEGWLIKVRIQDPSEMDTLMNAEKYKHFCEEEDASH

SEQ ID NO: 493 - DNA, 516 bp, Picea sitchensis
  CDS (1)..(516)
atggcatcgagggtggcatggcgggcttcacgaggtgctgcatctcttctgaggatgagaagtacctgcgtcgaatctaggccgcctttcagatttcctttcgcttactcccgggggttctcttctgttgtcaagaacttcaaatataccgattcacatgagtgggtcaaagttgatggccctcttgctgttatcggaataactgaccatgctcaggaacatctgggagatgttgtgtttgttgaactaccagatgtgggaactactgtttcaaaagggggcactgttggtgttgtagaaagtgtgaaatcaaccagtgatgtattctcgccagtttctggggaagttgctgaagtcaactctgagcttaatagctctcctggtttggttaatggaagcccatacgatggtggatggataataaaagtacggatgaatgaccctgcagacgtggactcattgttggatgcagatcaatatacgacgttctgcgaaaaggagaattctagtcattaa

SEQ ID NO: 494 - protein, 171 aa, Picea sitchensis
MASRVAWRASRGAASLLRMRSTCVESRPPFRFPFAYSRGFSSVVKNFKYTDSHEWVKVDGPLAVIGITDHAQEHLGDVVFVELPDVGTTVSKGGTVGVVESVKSTSDVFSPVSGEVAEVNSELNSSPGLVNGSPYDGGWIIKVRMNDPADVDSLLDADQYTTFCEKENSSH

SEQ ID NO: 495 - DNA, 498 bp, Populus trichocarpa
  CDS (1)..(498)
atggcactgaggttgtgggcttcttcaacggccaatgcactgagaatctctgttgcctcctccacagctcacctctctccttcctactccctctcaagatgcttctctactgttgtagatgggttgaagtatgcatcttcacatgagtgggtgaagcatgaagggccggtggccactattggcattacagatcatgctcaggatcatctgggagaagtagtgttcgtagacttgccagaaccggaaggtgctgtcagccaagggaagagctttggagcagtggaaagcgtgaaagcaactagtgatatcaattctccaatctccggcgagattgttgaggttaatacaaagcttagtgaaactcctggactgataaataaaagtccatatgaagagggatggatgatcaaggtgaagccaagcaacccatcagaattacagtccctacttggtccaaaggaatacacaaaattctgtgaggaagaagaatctcattag

SEQ ID NO: 496 - protein, 165 aa, Populus trichocarpa
MALRLWASSTANALRISVASSTAHLSPSYSLSRCFSTVVDGLKYASSHEWVKHEGPVATIGITDHAQDHLGEVVFVDLPEPEGAVSQGKSFGAVESVKATSDINSPISGEIVEVNTKLSETPGLINKSPYEEGWMIKVKPSNPSELQSLLGPKEYTKFCEEEESH

SEQ ID NO: 497 - DNA, 498 bp, Populus jackii
  CDS (1)..(498)
atggcactgaggttgtgggcttcttcaacggccaatgcactgagaatctctgttgcctcctccacagctcacctctctccttcctactccctctcaagatgcttctctactgttgtagatgggttgaagtatgcatcttcacatgagtgggtgaagcatgaaggtccggtggccactattggcattacagatcatgctcaggatcatctgggagaagtggtgttcgtagacttgccagaaccggaaggtcctgtcagccaagggaagagctttggagcagtggaaagcgtgaaagcaactagtgatatcaattctccaatctccggcgagattgttgaggttaatacaaagcttagtgaaactcctggactgataaataaaagtccatatgaagagggatggatgatcaaggtgaagccaagcaacccatcagaattacagtccctcctgggtccaaaggaatacacaaaattctgcgaggaagaagaatctcattag

SEQ ID NO: 498 - protein, 165 aa, Populus jackii
MALRLWASSTANALRISVASSTAHLSPSYSLSRCFSTVVDGLKYASSHEWVKHEGPVATIGITDHAQDHLGEVVFVDLPEPEGPVSQGKSFGAVESVKATSDINSPISGEIVEVNTKLSETPGLINKSPYEEGWMIKVKPSNPSELQSLLGPKEYTKFCEEEESH

SEQ ID NO: 499 - DNA, 492 bp, Populus jackii
  CDS (1)..(492)
atggcactgaggttgtgggcttcttctacagccaatgcactgagaatctcagtcgcctccacagctcacgtctctccttcatactccctctcaagatgcttctccactgtactagatgggttgaagtatgcaacttcacatgaatgggtgaagcatgaaggctcgctggctactattggcattaccgatcatgctcaggaccatttgggtgaagtagtgttcgtggacctgccagagccggatggttctgtcagccaagggaagagctttggagcagtggaaagtgtgaaggcaactagtgatatcaattctccgatctccggtgagattgttgaggttaatacacagcttagtgagactcctggactgataaataaaagtccatatgaagagggatggatgatcaaggtgaagccaagcaacccatcagaactagaatccttactgggtgcaaaggaatacaccaaactctgcgaggaagaagatcattag

SEQ ID NO: 500 - protein, 163 aa, Populus jackii
MALRLWASSTANALRISVASTAHVSPSYSLSRCFSTVLDGLKYATSHEWVKHEGSLATIGITDHAQDHLGEVVFVDLPEPDGSVSQGKSFGAVESVKATSDINSPISGEIVEVNTQLSETPGLINKSPYEEGWMIKVKPSNPSELESLLGAKEYTKLCEEEDH

SEQ ID NO: 501 - DNA, 492 bp, Populus tremuloides
  CDS (1)..(492)
atggcactgaggttgtgggcttcttctacagccaatgcactgagaatctcagtcgcctccacagctcacgtctctccttcatactccctctcaagatgcttctccactgtactagatgggttgaagtatgcaacttcacatgaatgggtgaagcatgaaggctcggtggctaccattggcattaccgatcatgctcaggaccatttgggtgaagtagtgttcgtggacctgccagaggcggatgattctgtcagccaagggaagagctttggagcagtggaaagtgtgaaggcaactagtgatatcaattctccgatctccggtgagattgttgaggttaatacacagcttagtgagactcctggactgataaataaaagtccatatgaagagggatggatgatcaaggtgaagccaagcaacccatcagaaatagaatccttactgggtccaaaggaatacaccaaactctgcgaggaagaagatcattag

SEQ ID NO: 502 - protein, 163 aa, Populus tremuloides
MALRLWASSTANALRISVASTAHVSPSYSLSRCFSTVLDGLKYATSHEWVKHEGSVATIGITDHAQDHLGEVVFVDLPEADDSVSQGKSFGAVESVKATSDINSPISGEIVEVNTQLSETPGLINKSPYEEGWMIKVKPSNPSEIESLLGPKEYTKLCEEEDH

SEQ ID NO: 503 - DNA, 390 bp, Candidatus Kuenenia stuttgartiensis
  CDS (1)..(390): transl_table=11
atgaatataccagaagaacttcagtatacaaaaacgcacgaatgggtaaaaaaaatacacgggaatgaagtatccattggcattactgaccatgcccagcatcaattgcaggacatagtgtacgtcgaattgccgttaataggaagagaactgaagatgggcgctccctgtgcagtagttgagtcagtaaaagctgcatatgacatttatgcacccctttccggcaaggtgacaaaaattaatcaggaactcagggaaagtccacaattaataaatgaagacccttacggtaagggatggtttttacatattgaaatatccaatccgaacgaacttgcagatcttttaagtccggttcaataccggactgccaatgaatccgaacagtaa

SEQ ID NO: 504 - protein, 129 aa, Candidatus Kuenenia stuttgartiensis
MNIPEELQYTKTHEWVKKIHGNEVSIGITDHAQHQLQDIVYVELPLIGRELKMGAPCAVVESVKAAYDIYAPLSGKVTKINQELRESPQLINEDPYGKGWFLHIEISNPNELADLLSPVQYRTANESEQ

SEQ ID NO: 505 - DNA, 480 bp, Chlamydomonas incerta
  CDS (1)..(480)
atggcccttcgcgcgttcggcagcctcgccctcggcaagctgggtctgcaggcccaagtcatgcagttcgctggcgcgactgctatgcgcacctacgctactgtcgagaagggctacaagtacgcgccttcgcacgagtgggccaaggttgacggcgatgtggcgaccgtcggcatttcggaccacgctcagggcgagctgggtgatgtggtgtacgtggagctgcccgatgtgggcaaggcggtgaagaagggcgagaccttcggcgtagttgagtccgtcaaggccgccagcgatgtctactcgcccatcagcggcgaggccgtggaggtcaactccgtgctggttgacaagcccggcacggtcaactcctcgcctttcaaggagggttggatcatcaaggtgaagctgtcgaacaagggcgagctgtccagcctgctggactcggatgcctatgccaaggagtgtgagaagcactaa

SEQ ID NO: 506 - protein, 159 aa, Chlamydomonas incerta
MALRAFGSLALGKLGLQAQVMQFAGATAMRTYATVEKGYKYAPSHEWAKVDGDVATVGISDHAQGELGDVVYVELPDVGKAVKKGETFGVVESVKAASDVYSPISGEAVEVNSVLVDKPGTVNSSPFKEGWIIKVKLSNKGELSSLLDSDAYAKECEKH

SEQ ID NO: 507 - DNA, 468 bp, Medicago truncatula
  CDS (1)..(468)
atggcttgcaggcagttatgggcttcaagagcagcatcatacctcaggatctctctctttcacagaagcttctctaacgttttgaacaatctgaagtatgctgattctcatgaatgggtgaaagttgacggaaagtctgcaaccattggcataactgatcatgcccaagatcatttgggtgatgttgtgtatgttgaattgccagaagtgggaacggcagtgacacaaggagatggttttggtgcagttgaaagtgtgaaggcaactagtgacatcaactctcctgtttcaggaaaagtgattgaagttaatgaagagctcagcaactctccagctttggtcaactcaagcccttatgaaaatggatggataattaaagttgagatgagtgacagtggcgaacttgacaaattgatggattcagaaaagtataccaagttctgtgaagaagaagattccagtcattaa

SEQ ID NO: 508 - protein, 155 aa, Medicago truncatula
MACRQLWASRAASYLRISLFHRSFSNVLNNLKYADSHEWVKVDGKSATIGITDHAQDHLGDVVYVELPEVGTAVTQGDGFGAVESVKATSDINSPVSGKVIEVNEELSNSPALVNSSPYENGWIIKVEMSDSGELDKLMDSEKYTKFCEEEDSSH

SEQ ID NO: 509 - DNA, 489 bp, Flaveria pringlei
  CDS (1)..(489)
atggctcttagaatctgggcttcttccacagccaatgctctaaggttatcctctgcaaccagacctcatttctcccctctttcaagatgcttctcttcagttttggatgggttgaagtatgcaagttcacatgaatgggtcaagcatgaaggttctgttgctactattggtattactgaccatgctcaggaccatcttggagaggtggtgtttgtggacttgcctgataccggtggctcagtgaccaaagccaccgggttcggggcagtagaaagtgtcaaagccaccagtgacgttaactccccgatctctggagagatcgtggaggtgaacacgaagctcagcgagactcctggtttgatcaattcgagcccgtatgaagacggatggatgattaaggtgaaaccaagcaacccatcagagttggaatctttaatgggtgcaaaagagtacacaaagttctgtgaagaagaagatactgctcactag

SEQ ID NO: 510 - protein, 162 aa, Flaveria pringlei
MALRIWASSTANALRLSSATRPHFSPLSRCFSSVLDGLKYASSHEWVKHEGSVATIGITDHAQDHLGEVVFVDLPDTGGSVTKATGFGAVESVKATSDVNSPISGEIVEVNTKLSETPGLINSSPYEDGWMIKVKPSNPSELESLMGAKEYTKFCEEEDTAH

SEQ ID NO: 511 - DNA, 489 bp, Flaveria pringlei
  CDS (1)..(489)
atggctcttagaatgtgggcttcttccacagccaatgctctaaggctatcctctgctactagacctcatttctcacctctttccagatgcttctcttcagttttggatggattgaagtatgcaaattctcatgagtgggtgaagcatgaaggctctgttgctactattggtatcactgaccatgctcaggaccatcttggggaggtggtgtttgtggatttaccagaaacaggtggctctgtgaccaaagccaccggttttggtgcagtagaaagtgttaaagccaccagtgacgttaactccccgatctctggagagatcgttgaggtgaactcgaagttgtccgagactcctggtttgatcaattcgagcccgtatgaagatggatggatgattaaggtgaagccaagcaacccgtcggagctggattctttaatgggtgcaaaagagtacacaaagttctgtgaagaagaagatgctgctcactag

SEQ ID NO: 512 - protein, 162 aa, Flaveria pringlei
MALRMWASSTANALRLSSATRPHFSPLSRCFSSVLDGLKYANSHEWVKHEGSVATIGITDHAQDHLGEVVFVDLPETGGSVTKATGFGAVESVKATSDVNSPISGEIVEVNSKLSETPGLINSSPYEDGWMIKVKPSNPSELDSLMGAKEYTKFCEEEDAAH

SEQ ID NO: 513 - DNA, 498 bp, Pisum sativum var
  CDS (1)..(498)
atggcacttaggatgtgggcttcttcaactgctaatgcactcaaactctcctcttcctctagattacatctctcccctaccttttccatctccagatgtttctctaatgtattggatggactcaagtacgcaccttcacatgaatgggtcaagcatgaaggatcagtagccactattggtatcactgaccatgcccaggaccatcttggagaggttgtgtttgtggagcttccagaacctggtgtctcagttacaaagggtaaaggtttcggagctgttgaaagtgtgaaggcaacaagtgatgtaaactctcctatttccggtgaggttatcgaagttaatacggggctcaccggaaagcctggcctcatcaattcaagcccctatgaagatggatggatgataaaaataaagccaactattccagatgaattagaatccttgttgggtgcaaaagagtacacaaagttttgtgaggaagaagatgctgcacattga

SEQ ID NO: 514 - protein, 165 aa, Pisum sativum var
MALRMWASSTANALKLSSSSRLHLSPTFSISRCFSNVLDGLKYAPSHEWVKHEGSVATIGITDHAQDHLGEVVFVELPEPGVSVTKGKGFGAVESVKATSDVNSPISGEVIEVNTGLTGKPGLINSSPYEDGWMIKIKPTIPDELESLLGAKEYTKFCEEEDAAH

SEQ ID NO: 515 - DNA, 387 bp, Eubacterium acidaminophilum
  CDS (1)..(387): transl_table=11
atgagcaaaatagtacaaggactttattacacaactcaccatgactgggttaaggttgacggaaacaaggcatatgtaggtgctacagactacgcacagcacgctctaggagatatagtatacgttgagcttccagaagtgggagaagaatttggcgttgaagatgcatacggcgttatagaatcagttaaggcggcttcagatgcttacgctccactaagcggaaaaatagttgaagttaacagcgagcttgaagatgctcctgagagcataaacgaagctccatacgaaaaatggcttgtagctatagaaatgagcgacgcatcagaactagaaaaactaatggacgctagcgcttacgaagacttctgcaacaaggaggcttaa

SEQ ID NO: 516 - protein, 128 aa, Eubacterium acidaminophilum
MSKIVQGLYYTTHHDWVKVDGNKAYVGATDYAQHALGDIVYVELPEVGEEFGVEDAYGVIESVKAASDAYAPLSGKIVEVNSELEDAPESINEAPYEKWLVAIEMSDASELEKLMDASAYEDFCNKEA

SEQ ID NO: 517 - DNA, 498 bp, Populus tremuloides
  CDS (1)..(498)
atggcactgaggttgtgggcttcttcaacggccaatgcactgagaatctctgttgcctcctccgctgctcacctctctccttcatactccctctcaagatgcttctctactgttgtagatgggttgaagtatgcatcttcacatgagtgggtgaagcatgaaggtccggtggccactattggcattacagatcatgctcaggatcatctgggagaagtggtgttcgtagacttgccagaaccggaaggttctgtcagccaagggaagagctttggagcagtggaaagcgtgaaagcaactagtgatatcaattctccaatctccggcgagattgttgaggttaatacaaagcttagtgaaactcctggactgataaataaaagtccatatgaagagggatggatgatcaaggtgaagccaagcgacccatcagaattacagtccctacttggtccaaaggaatacacaaaattctgcgaggaagaagaatctcattag

SEQ ID NO: 518 - protein, 165 aa, Populus tremuloides
MALRLWASSTANALRISVASSAAHLSPSYSLSRCFSTVVDGLKYASSHEWVKHEGPVATIGITDHAQDHLGEVVFVDLPEPEGSVSQGKSFGAVESVKATSDINSPISGEIVEVNTKLSETPGLINKSPYEEGWMIKVKPSDPSELQSLLGPKEYTKFCEEEESH

SEQ ID NO: 519 - DNA, 468 bp, Populus tremuloides
  CDS (1)..(468)
atggcttcaagattgttgtgggcttcaagggctgcttcttaccttaggatctctgtttctcatagagggtttgcttctgttgtaaaggacttgaagtatgctgaaagtcatgaatgggtaaaggttgatggtaaaactgctactgttggtataaccgatcatgctcaagatcatttaggtgatgttgtgtatgttgaattaccggaagtgggtgctactgtgagtcagggttctggatttggcgcagttgaaagtgtcaaggctaccagtgatgtctattctcctgtttctggagatgtggttgaagttaatgaagaactgaacagctctcctggtttggtcaattcaagcccctatgagaagggatggattatgaaggttgaaattaaagatgacagtgaactaaagaacttgaagaactcagatgagtacgctaagttctgtgaagaagaagatgcaaagcattga

SEQ ID NO: 520 - protein, 155 aa, Populus tremuloides
MASRLLWASRAASYLRISVSHRGFASVVKDLKYAESHEWVKVDGKTATVGITDHAQDHLGDVVYVELPEVGATVSQGSGFGAVESVKATSDVYSPVSGDVVEVNEELNSSPGLVNSSPYEKGWIMKVEIKDDSELKNLKNSDEYAKFCEEEDAKH

SEQ ID NO: 521 - DNA, 606 bp, Triticum aestivum
  CDS (1)..(606)
atggctctgaggctgtgggcgagctcagctgccaatgccctcaagatttcaagcagcggcgccagggctgctgccccggcctattcgatctccagatacttctccactgttattgatggcttgaagtacacttcctcccacgagtgggtcaagaacgacggctccgtggccacgattggcatcagtgaccacgcccagggccatctcggggaggtggtgttcgtggagctgccggaggccggcacgaaggtgagccagggcggagccttcggcaacgtggagagtgtgaaggccaccagcgacgtcaactcgcccatctccggcgaggtcgtcgaggtcaactcaaagctgtccgagacccccggccttgtacgcacagcaaacacctcgcctccgtcgattagcaatcctttcagtctttcacgtccgtgtagcgatcctaatgaactgtgttgttgcgattgcgccgtggcctggcagatcaactcgagcccgtacgaggaggggtggatgatcaaggtgaagccgagcagcccggcggagctggagggcctgctggactcggccaagtacaccaagcactgcgaggaggaggacgcccactag

SEQ ID NO: 522 - protein, 201 aa, Triticum aestivum
MALRLWASSAANALKISSSGARAAAPAYSISRYFSTVIDGLKYTSSHEWVKNDGSVATIGISDHAQGHLGEVVFVELPEAGTKVSQGGAFGNVESVKATSDVNSPISGEVVEVNSKLSETPGLVRTANTSPPSISNPFSLSRPCSDPNELCCCDCAVAWQINSSPYEEGWMIKVKPSSPAELEGLLDSAKYTKHCEEEDAH

SEQ ID NO: 523 - DNA, 498 bp, Arabidopsis thaliana
  CDS (1)..(498)
atggcactaagaatgtgggcttcttctacagcaaacgctctcaagctttcttcttctgtttccaagtctcatctctctcctttctccttctctagatgcttctccacagttttggagggtttgaagtatgcaaattcacatgagtgggttaaacatgaaggctctgttgccaccattggcatcactgcccatgctcaggaccatttaggtgaagtggtgtttgttgaactgccagaggacaatacttcagtgagcaaagagaaaagctttggagcagtggagagtgtgaaggcaacaagtgagatcttatcaccaatctcaggtgaaatcattgaggttaacaagaagctcacagaatcacctggcttgatcaactcaagcccctatgaagatggttggatgatcaaagtgaaaccaagtagccccgcggagttggaatctttgatgggtccaaaggaatacaccaagttctgcgaggaggaagatgctgctcactag

SEQ ID NO: 524 - protein, 165 aa, Arabidopsis thaliana
MALRMWASSTANALKLSSSVSKSHLSPFSFSRCFSTVLEGLKYANSHEWVKHEGSVATIGITAHAQDHLGEVVFVELPEDNTSVSKEKSFGAVESVKATSEILSPISGEIIEVNKKLTESPGLINSSPYEDGWMIKVKPSSPAELESLMGPKEYTKFCEEEDAAH

SEQ ID NO: 525 - DNA, 384 bp, Pseudomonas aeruginosa
  CDS (1)..(384): transl_table=11
atgagcaagttgcgctttaccaccgaccacgaatggctgcgccaggacgacgacgggctgctgaccgtcggcatcaccgcctacgcccaggacgccctcggtgacgtggtattcgtgcagttgccggaactcggcgaacacgccgccggcagtgaagtggcggtgctggagtcggtcaaggccgccagcaacatcctgatgccgctggacggcgaggtggtggcgatcaacgacgcgctgccggacgccccggagctggtcaaccaggacccgctcggcgaggcctggttcttccgcttccgtccggccgacgccggcgcctgggaaaagctgctcgaccaggccgcctacgaccgcctgctgaacgccaacgccgacgcctga

SEQ ID NO: 526 - protein, 127 aa, Pseudomonas aeruginosa
MSKLRFTTDHEWLRQDDDGLLTVGITAYAQDALGDVVFVQLPELGEHAAGSEVAVLESVKAASNILMPLDGEVVAINDALPDAPELVNQDPLGEAWFFRFRPADAGAWEKLLDQAAYDRLLNANADA

SEQ ID NO: 527 - DNA, 384 bp, Pseudomonas putida
  CDS (1)..(384): transl_table=11
atgagcgagttgcgtttcactgaagatcacgaatggctgcgcgtcgaagccgatggcagcgtcaccgtgggcatcaccgcctacgcccagaatgcccttggcgacgtggttttcgtgcaactgccagagttgcagcagtatgaaaaaggcaacgaagcgtccaccgtcgaatcggtcaaggccgccagcggcgtgtacatgccactgacgggtgaagtggtcgaggtcaacggccagctcgaagacagccctgaactggtcaacgaagacccgatgggcgaaggctggttcttccgcttcatccctgccgatgcagaagccgtaaccgctctgctcgaccaggacgcctacgaccgcctgctcaaagccaacgacgacgcctga

SEQ ID NO: 528 - protein, 127 aa, Pseudomonas putida
MSELRFTEDHEWLRVEADGSVTVGITAYAQNALGDVVFVQLPELQQYEKGNEASTVESVKAASGVYMPLTGEVVEVNGQLEDSPELVNEDPMGEGWFFRFIPADAEAVTALLDQDAYDRLLKANDDA

SEQ ID NO: 529 - DNA, 414 bp, Sulfolobus solfataricus
  CDS (1)..(414): transl_table=11
atgaatgaaatgaaagtaggtagatacgtagttctgacagatagattatacacagagactgacgaatgggtggtgctttctaatgataacgtggcagtaattggaataactgattacgcacaaaagaagttaagagatatagtaggaattgaattacctcaactgcagaaggaagtgaaagctggagaatctgtaggagttatagaatctgttaaagctgctgcagatattttctctccattaagtgggataatagttgaggtaaacaataaattacttgagcatccagagataataaataaggatccgtatggtgaaggctggattttcaagttaaaggcgtctaagttatctgaagaaaaagaaaaactacttagcccggaaaagtatattgaaaaaataaagggtgggtag

SEQ ID NO: 530 - protein, 137 aa, Sulfolobus solfataricus
MNEMKVGRYVVLTDRLYTETDEWVVLSNDNVAVIGITDYAQKKLRDIVGIELPQLQKEVKAGESVGVIESVKAAADIFSPLSGIIVEVNNKLLEHPEIINKDPYGEGWIFKLKASKLSEEKEKLLSPEKYIEKIKGG

SEQ ID NO: 531 - DNA, 501 bp, Arabidopsis thaliana
  CDS (1)..(501)
atggcactgagaatgtgggcttcctctacagcaaatgctctcaagctctcttcttctgcctccaaatctcatctcttgccagctttctccatctccagatgcttctcctcagtgttggaaggacttaagtatgcaaattcacatgagtgggtgaaacatgaaggctcagttgctacaattggtatcactgaccatgcgcaggaccatttaggagaagttgtgtttgtggagctgcctgaagcaaacagttcagtgagcaaagaaaaaagctttggagctgttgagagtgttaaggccacaagtgagattctatctccaatctctggtgaagtcattgaggttaacacaaagctcaccgagtcacctggtttgatcaactcaagcccttatgaagatggttggatgataaaggtgaaaccgagcagccccgcggagttggaagctctgatgggtccaaaggaatacaccaagttctgcgaagaagaagacgctgctcactag

SEQ ID NO: 532 - protein, 166 aa, Arabidopsis thaliana
MALRMWASSTANALKLSSSASKSHLLPAFSISRCFSSVLEGLKYANSHEWVKHEGSVATIGITDHAQDHLGEVVFVELPEANSSVSKEKSFGAVESVKATSEILSPISGEVIEVNTKLTESPGLINSSPYEDGWMIKVKPSSPAELEALMGPKEYTKFCEEEDAAH

SEQ ID NO: 533 - DNA, 390 bp, Pseudomonas aeruginosa
  CDS (1)..(390): transl_table=11
atgagcaatattcccgccgaactgcgttacgcccagagccacgaatgggctcgcctggaagccgacggcagcgttaccgtgggcatttccgaccatgcccaggaagcccttggcgatgtggtcttcatcgagctgccggagctgggcaagaccctcgccgccgggcaggaagcgggcgtggtcgagtcggtgaaggccgcctccgacatctattcgccgatcggcggcgaagtcatcgccatcaacgaagccctggccgacaccccggaagacgtcaacaacgacccgtacgtgtcctggttcttcaagctcaagccgagcaatccggccgagctggacaagctgctcgatgccgctggctaccaggccgccgtcgacgcggaaggctga

SEQ ID NO: 534 - protein, 129 aa, Pseudomonas aeruginosa
MSNIPAELRYAQSHEWARLEADGSVTVGISDHAQEALGDVVFIELPELGKTLAAGQEAGVVESVKAASDIYSPIGGEVIAINEALADTPEDVNNDPYVSWFFKLKPSNPAELDKLLDAAGYQAAVDAEG

SEQ ID NO: 535 - DNA, 384 bp, Pseudomonas putida
  CDS (1)..(384): transl_table=11
atgagcaatatccccgccgaactgcgttttgccgaaagccatgagtgggctcgcctggaagccgacggcagtgtgaccgtgggtatcagcgatcacgcccaggaagccttgggtgatgtggtattcgtcgagctggctgaagtcggcaaagtgtttggcgctggcgacgctgcgggtgtggtcgagtcggtcaaggccgcttcggacatctatgccccggtcggtggcgaagtgattgcggtcaacgaagagctggccgatagcccggaactgctgaacgaagagccttacggttcgtggatcttcaaattgaagccaagcaacccggccgagctggacaagttgctggatgcggctggctaccaggcgctgattggcgagtaa

SEQ ID NO: 536 - protein, 127 aa, Pseudomonas putida
MSNIPAELRFAESHEWARLEADGSVTVGISDHAQEALGDVVFVELAEVGKVFGAGDAAGVVESVKAASDIYAPVGGEVIAVNEELADSPELLNEEPYGSWIFKLKPSNPAELDKLLDAAGYQALIGE

SEQ ID NO: 537 - DNA, 387 bp, Pseudomonas syringae pv
  CDS (1)..(387): transl_table=11
atgagcaatattcccgccgagctgcgtttcgccgaaagtcatgaatgggcacgcctggaggctgatggcaccgtgaccgttggcatctcggaccatgcacaggaagcgctgggcgatgtggtcttcgtcgaactgccggaaatcggcaaggtgttcgctgccggtgatgtggctggcgttgtcgagtcggtgaaggcggcctcggacatctactcgccagtggccggtgaagttgtcgaggtcaatgaggcgctgggcgattcgcccgagtcgctcaacagcgagccgtacagcgcctggatcttcaaggtcaagccagccagtgcagaggctgatctggccaaactgctggacgctgcaggctacaaaggcgccatcggcgagtaa

SEQ ID NO: 538 - protein, 128 aa, Pseudomonas syringae pv
MSNIPAELRFAESHEWARLEADGTVTVGISDHAQEALGDVVFVELPEIGKVFAAGDVAGVVESVKAASDIYSPVAGEVVEVNEALGDSPESLNSEPYSAWIFKVKPASAEADLAKLLDAAGYKGAIGE

SEQ ID NO: 539 - DNA, 381 bp, Thermoanaerobacter tengcongensis
  CDS (1)..(381): transl_table=11
atggaagttttagaaggcctttattattcaaaagaccatgagtgggtaaaagtagagggagacaaggtatacataggaatcacagactatgctcagcattcactgggaaacatcgtttacgttgaacttccggaggtaggatctgaactttctgctggagatgtacttggagtagtagaatctgtaaaagctgcttcagacgtgtacactccagtagacataaaagtgttggaagtaaacaattctctggtggaagacccatcccttataaacaatgacccatatggaagctggatggtgatagcagagcttaaagacaaatctcagttagataaactaatgaaggccgatgagtacagaaaattcttagaggaggagtga

SEQ ID NO: 540 - protein, 126 aa, Thermoanaerobacter tengcongensis
MEVLEGLYYSKDHEWVKVEGDKVYIGITDYAQHSLGNIVYVELPEVGSELSAGDVLGVVESVKAASDVYTPVDIKVLEVNNSLVEDPSLINNDPYGSWMVIAELKDKSQLDKLMKADEYRKFLEEE

SEQ ID NO: 541 - DNA, 516 bp, Aquifex aeolicus
  CDS (1)..(516): transl_table=11
atggaagacttctacgttgaagattaccttgtaaagggagatcgctactacacaaaagagcacgagtgggtcagggttaaaaacggctttgcggaagttggtataacagattacgcccagaaacaactgggagacatagtttacgtggaccttcccgagaagggaaaggaggtggatgcgggagacaccttggctaacatagagtccgttaaaaacgtagctcccgtttacgcacccgttacgggcacagttgtggaggtaaacgaggacctcaaagacgagccggggataataaacgacgacccgtatgaggcgggctggatagctgttatagagatgaaggatcccacggaagtggaagatttgatgacagcacaggattacgcagagtacctcaaagaaattgtagaagaggaaaaggaagaagaagttgaagtaaaagaagaggaattaatagaaaccgagtccatagaagagttgtccgaagaagaactcggatacgaggagaataaatga

SEQ ID NO: 542 - protein, 171 aa, Aquifex aeolicus
MEDFYVEDYLVKGDRYYTKEHEWVRVKNGFAEVGITDYAQKQLGDIVYVDLPEKGKEVDAGDTLANIESVKNVAPVYAPVTGTVVEVNEDLKDEPGIINDDPYEAGWIAVIEMKDPTEVEDLMTAQDYAEYLKEIVEEEKEEEVEVKEEELIETESIEELSEEELGYEENK

SEQ ID NO: 543 - DNA, 375 bp, Acinetobacter sp
  CDS (1)..(375): transl_table=11
atgaatcatccttcagaattgaagtatgcaactacccatgaatgggtacgaattgaaggtgatcttatcgtcactggaattagtgatcatgcacaagatgccttaggcgatcttgtctatgtagaagttcctgaagtagggagccatatgactgctggcacacaagctggcgtggttgagtctgtaaaaacagcttcagacattcatgcaccagtatcgggtacagtggttgaagtcaatactgcactggaagatgatccagactttatcaatgacgaaccttatggcaaaggctggatttataaaatgaaaccagacaacatcgcagacgtagatcaacttctctccaataccgattacgaagctggtttataa

SEQ ID NO: 544 - protein, 124 aa, Acinetobacter sp
MNHPSELKYATTHEWVRIEGDLIVTGISDHAQDALGDLVYVEVPEVGSHMTAGTQAGVVESVKTASDIHAPVSGTVVEVNTALEDDPDFINDEPYGKGWIYKMKPDNIADVDQLLSNTDYEAGL

SEQ ID NO: 545 - DNA, 381 bp, Acidobacteria bacterium
  CDS (1)..(381): transl_table=11
atggcctatccagccgacttcaaatacaccaaagaacacgaatggatctctgccgacggtaaaatcggcatcaccgaccacgcgcaatcctctctcggcgatatcgtcttcgtcgaactccccaaagtcggcgccaccatcaccaagggccagagcttcggctccgtcgaatccgtgaaggccgtcagcgacctcttcgccccggtcagcggtaaagtcaccgccgtcaacgaagaactcgccaccacgcccgaaaaagtaaacaccgacgcccacgccgcctggatggtcaaagtcgagctcaccaacccgtccgaactcaacgacctcctaagcgccgccgactacgaaaagttcgccgccgaagaagccggccactaa

SEQ ID NO: 546 - protein, 126 aa, Acidobacteria bacterium
MAYPADFKYTKEHEWISADGKIGITDHAQSSLGDIVFVELPKVGATITKGQSFGSVESVKAVSDLFAPVSGKVTAVNEELATTPEKVNTDAHAAWMVKVELTNPSELNDLLSAADYEKFAAEEAGH

SEQ ID NO: 547 - DNA, 432 bp, Aeropyrum pernix
  CDS (1)..(432): transl_table=11
gtgggcgggcaagttattgaggttgaggtggctggcgtcaggttcctcctacgcaaggacctcaggtacacggagagcgacgagtgggccaggctggaggacggggtagccactgtaggtataacggacttcgcgcagaaggagctgaaggacattgttggcgtggagctccctgagaaggggaggaaggttaagaagggggaggcggtggcgacggtcgagtccataaaggctactgcagacatctacgcccccctctctggcgagatagtcgacgtcaacgagaagctcctagaccagccggagctgataaacgacgacccctacggtgagggatggatattcaagatcaaagtcgaggatccaggcgagttcgaaagcctcctcacgcctgagcagtatgttgagagcgtcaggaagaggaaggagtaa

SEQ ID NO: 548 - protein, 143 aa, Aeropyrum pernix
MGGQVIEVEVAGVRFLLRKDLRYTESDEWARLEDGVATVGITDFAQKELKDIVGVELPEKGRKVKKGEAVATVESIKATADIYAPLSGEIVDVNEKLLDQPELINDDPYGEGWIFKIKVEDPGEFESLLTPEQYVESVRKRKE

SEQ ID NO: 549 - DNA, 363 bp, Agrobacterium tumefaciens
  CDS (1)..(363): transl_table=11
atgctgaaatttaccgcagaacacgaatggctgaagttcgaaggcgatatcgccaccgtcggcatcaccagccacgccgctgaacagcttggcgatctcgtttttgtcgagctgccggaagtgggcgcaaccttcgccaaggatggcgatgctgcgaccgtggaatccgtcaaggcggcgtccgacgtctattgtccgctggatggcgaagtggtcgaaatcaaccaggccatcgttgatgacccctcgctggtcaattccgatccgcagggtgccggctggttcttcaagctgaagctttccaatgccgcggatgccgagacactgctcgatgaagcagcctacaaggagctgatcgcgtaa

SEQ ID NO: 550 - protein, 120 aa, Agrobacterium tumefaciens
MLKFTAEHEWLKFEGDIATVGITSHAAEQLGDLVFVELPEVGATFAKDGDAATVESVKAASDVYCPLDGEVVEINQAIVDDPSLVNSDPQGAGWFFKLKLSNAADAETLLDEAAYKELIA

SEQ ID NO: 551 - DNA, 393 bp, Alkalilimnicola ehrlichei
  CDS (1)..(393): transl_table=11
atgacccaggtaccagacaacctcaagtacaaccgcacccacgagtggacccgcttggaggacgacggcacgctcaccatcggcatcaccgatcacgcccagagcgaactgggcgatttggtgttcgtggagacgcccacggtggggcgccactacgacgccgaggaggcctgcgccgtggtggaatcggtcaaggccgcctccgacatctacgcgccggtgggcggcgaggtgatcgaggccaattcagagctgcaggacagcccggagctggtcaacaccgacccctacggcgagggttggatcatgcgcatccgcccggacgacagcgacgacctggagcaactgctggacccggaggactaccaggacctggtggccgacgaggagtaa

SEQ ID NO: 552 - protein, 130 aa, Alkalilimnicola ehrlichei
MTQVPDNLKYNRTHEWTRLEDDGTLTIGITDHAQSELGDLVFVETPTVGRHYDAEEACAVVESVKAASDIYAPVGGEVIEANSELQDSPELVNTDPYGEGWIMRIRPDDSDDLEQLLDPEDYQDLVADEE

SEQ ID NO: 553 - DNA, 393 bp, Anabaena sp
  CDS (1)..(393): transl_table=11
atgtcgtcgtttgaataccctcaagatttaagatatttggatactcatgaatacgtgagactagatggcgaaatcgctactatcggtattacagaatttgctgtagatcaattgggtgatgtggtttttctagaactgccagacattggcgatttactaacaaaaggagacacttttggttcaattgaatcagtcaaagccgtcgaaaacttgaacgcaccaatcaccggaacagttgtagaacgcaacgaaattttggttgaatcgcccgaagcggttgcagatgatccctacggtgaaggttggttcttgaaggtgcgtgtgaatgatcctgacgaagtaaatgatgctttgacggcggatgaatatcgtgctgaggtagaaggcgagtag

SEQ ID NO: 554 - protein, 130 aa, Anabaena sp
MSSFEYPQDLRYLDTHEYVRLDGEIATIGITEFAVDQLGDVVFLELPDIGDLLTKGDTFGSIESVKAVENLNAPITGTVVERNEILVESPEAVADDPYGEGWFLKVRVNDPDEVNDALTADEYRAEVEGE

SEQ ID NO: 555 - DNA, 393 bp, Anabaena variabilis
  CDS (1)..(393): transl_table=11
atgtcgtcgtttgaataccctcaagatttaagatatttggatactcatgaatatgtgaggttagatggcgaaatcgctactatcggtattacagaatttgctgtagatcaattgggtgatgtggtttttctagaactgccagatattggcgatttactgactaaaggagacactttcggcacaattgaatcagtcaaagccgtcgaagacttgaacgcaccaatcacaggaacagttgtagaacgcaacgaaattttgattgaatctcccgacgcagttgcagatgatccctacggtgaaggatggttcttgaaagtacgtgtgaatgaccctgacgaagtaaatgatgctttgacggcagatgaatatcgtgctgaggtagaaggggaatag

SEQ ID NO: 556 - protein, 130 aa, Anabaena variabilis
MSSFEYPQDLRYLDTHEYVRLDGEIATIGITEFAVDQLGDVVFLELPDIGDLLTKGDTFGTIESVKAVEDLNAPITGTVVERNEILIESPDAVADDPYGEGWFLKVRVNDPDEVNDALTADEYRAEVEGE

SEQ ID NO: 557 - DNA, 384 bp, Azoarcus sp
  CDS (1)..(384): transl_table=11
atgagcaccatccccaacgatctcaagtacaccaagtctcacgagtggatccgcctggaggcggatggcaccctcaccgtgggtgtcaccgaccacgcgcaagccgcgctgggtgacgtcgtgtttctcgaactgccggaggccggccgggttgtcagcgcaggtgaagcctgcgccgtgatcgagtccgtcaaggcggcttccgacatctacgcccccgtggccggcgaagtcatcgcgcgcaacgacagcgttaccgatgccccggagagcgtgaatgccgacgcctacgccgcgtggctgttcaagctcaagcccgccaacgccggcgacacctcggcgctgctcgacgcagccggctacgcgaccgaaatcgccgactga

SEQ ID NO: 558 - protein, 127 aa, Azoarcus sp
MSTIPNDLKYTKSHEWIRLEADGTLTVGVTDHAQAALGDVVFLELPEAGRVVSAGEACAVIESVKAASDIYAPVAGEVIARNDSVTDAPESVNADAYAAWLFKLKPANAGDTSALLDAAGYATEIAD

SEQ ID NO: 559 - DNA, 387 bp, Azoarcus sp
  CDS (1)..(387): transl_table=11
atgagcaacgttcccgccgagctgaaatacacgaagtcccacgaatggatccgcgtcgaagccgacggctccctgacgatcggcgtcaccgaccacgcgcaggaagcgctcggcgacgtggttttcctcgagctcccggaagccggtcggcagctcgcggccggcgaggcgtgcgccgtcatcgaatcggtcaaggcggcttccgacatctacgcgccggtcgacggcgaagtcatcgcatcgaaccaggacgccgtcgacgcaccggagtctgtcaatgccgacgcctacgcggcgtggctgttcaagctcaagccggccaacgccggcgacgtcgcggcgctgctcgacgcccagggctaccaggccgagatcgcgaacgcctga

SEQ ID NO: 560 - protein, 128 aa, Azoarcus sp
MSNVPAELKYTKSHEWIRVEADGSLTIGVTDHAQEALGDVVFLELPEAGRQLAAGEACAVIESVKAASDIYAPVDGEVIASNQDAVDAPESVNADAYAAWLFKLKPANAGDVAALLDAQGYQAEIANA

SEQ ID NO: 561 - DNA, 384 bp, Bacillus anthracis
  CDS (1)..(384): transl_table=11
atgagcattccaaataatttacgttactctgaagaacacgaatgggtaaaaactgaaggtaatgaagttgttatcggtattactcactttgcacaaaatgaactaggcgatatcgtattcgttgaacttcctgaagtaggtgcaacaatcgaagctgacgagccattcggaagcgtagaatctgttaaaacagtttctgaattatacgcacctgtaagcggtaaagttgtagcagtaaacgaagaattaagtgaccaaccagaacttgttaacgaatctccatacgagggtgcatggatggttaaagttgaactttctgatgcaagccaagttgagaagttattaactgctgaaaaatatgcagaaatgacaaaccaagactaa

SEQ ID NO: 562 - protein, 127 aa, Bacillus anthracis
MSIPNNLRYSEEHEWVKTEGNEVVIGITHFAQNELGDIVFVELPEVGATIEADEPFGSVESVKTVSELYAPVSGKVVAVNEELSDQPELVNESPYEGAWMVKVELSDASQVEKLLTAEKYAEMTNQD

SEQ ID NO: 563 - DNA, 384 bp, Bacillus cereus
  CDS (1)..(384): transl_table=11
atgagcattccaaataatttacgttactctgaagaacacgaatgggtaaaaactgaaggtaatgaagttgttatcggtattactcactttgcacaaagtgagctaggcgatatcgtattcgttgaacttccagaagtaggtgcaacaatcgaagctgacgagccattcggaagcgtagaatctgttaaaacagtttctgaattatacgcacctgtaagcggtaaagttgtagcagtaaacgaagaattaagtgaccaaccagaacttgttaacgaatctccatacgagggtgcatggatggttaaagttgaactttctgatgcaagccaagttgagaagttattaactgctgaaaaatatgcagaaatgacaaaccaagactaa

SEQ ID NO: 564 - protein, 127 aa, Bacillus cereus
MSIPNNLRYSEEHEWVKTEGNEVVIGITHFAQSELGDIVFVELPEVGATIEADEPFGSVESVKTVSELYAPVSGKVVAVNEELSDQPELVNESPYEGAWMVKVELSDASQVEKLLTAEKYAEMTNQD

SEQ ID NO: 565 - DNA, 381 bp, Bacteroides fragilis
  CDS (1)..(381): transl_table=11
atgaacttcccacagaatgtaaagtacactaacgaacacgaatggatccgcctcgaaggcgatgtagcttatgtaggtatcaccgactacgctcaggagcaactgggcgacatcgtatttgtcgatattcctactgaaggcgaaacactggaagcgggagaagtgttcggtacgatcgaagtagttaaaacaatctctgacctcttcctgcccgtagccggtgaagtggtagaacaaaacccggcactggaagagaatccggaattagtgaataaagatccgtatggcgaaggctggctcatcaaaatgaaacctgccaatgcagcagaccttgacaacttgctggatgccgaaggatacaaagcagtggtaaatgcataa

SEQ ID NO: 566 - protein, 126 aa, Bacteroides fragilis
MNFPQNVKYTNEHEWIRLEGDVAYVGITDYAQEQLGDIVFVDIPTEGETLEAGEVFGTIEVVKTISDLFLPVAGEVVEQNPALEENPELVNKDPYGEGWLIKMKPANAADLDNLLDAEGYKAVVNA

SEQ ID NO: 567 - DNA, 381 bp, Bacteroides fragilis
  CDS (1)..(381): transl_table=11
atgaacttcccacagaatgtaaagtacactaacgaacacgaatggatccgcctcgaaggcgatgtagcttatgtaggtatcaccgactacgctcaggagcaactgggcgacatcgtatttgtcgatattcctactgaaggcgaaacactggaagcggaagaagtgttcggtacgatcgaagtagttaaaacaatctctgacctcttcctgcccgtagccggtgaagtggtagaacaaaacccggcactggaagagaatccggaattagtgaataaagatccgtatggcgaaggctggctcatcaaaatgaaacctgccaatgcagcagaccttgacaacttgctggatgccgaaggatacaaagcagtggtaaatgcataa

SEQ ID NO: 568 - protein, 126 aa, Bacteroides fragilis
MNFPQNVKYTNEHEWIRLEGDVAYVGITDYAQEQLGDIVFVDIPTEGETLEAEEVFGTIEVVKTISDLFLPVAGEVVEQNPALEENPELVNKDPYGEGWLIKMKPANAADLDNLLDAEGYKAVVNA

SEQ ID NO: 569 - DNA, 387 bp, Bacillus halodurans
  CDS (1)..(387): transl_table=11
gtgtcaaatttaccaaacgagttaaagtattcagaagagcatgagtgggtaaaagttgagggagacaaagttcgtatcggaattacggattttgctcaatcagagctaggtgatattgtctttgtagagcttccagaagttggtgatgaagtggaagcggacgagccttttggcagcgtagaatcagtaaagacagtctctgaactgtacgctcctgtttccggaaaagtagtagaagtcaacgaagagcttgacgataaccctgagtacgttaacgaatctccatacgaaaaagcatggatgattgtcgttgaaccatcagacgcctctcaagtggaagagctcatgagcgctgacgaatacaaggaaatgatcagcgaagaataa

SEQ ID NO: 570 - protein, 128 aa, Bacillus halodurans
MSNLPNELKYSEEHEWVKVEGDKVRIGITDFAQSELGDIVFVELPEVGDEVEADEPFGSVESVKTVSELYAPVSGKVVEVNEELDDNPEYVNESPYEKAWMIVVEPSDASQVEELMSADEYKEMISEE

SEQ ID NO: 571 - DNA, 384 bp, Bacillus licheniformis
  CDS (1)..(384): transl_table=11
atgagcacaccgaaagagttgcgttattcagaagaacacgaatgggtgaaaaccgaaggagataaagtcagaatcggcattacagactttgcacaatctgagcttggagacatcgtatttgtcgagcttcctgaagtgggagacgaaatcaaagcggacgagccttttggcagcgttgaatccgtaaagaccgtttctgagctgtatgccccgatcaacggaaaagtggtcgaagtgaacgaagatctggaagacagccctgaattcgtcaacgagtctccgtatgaaaaggcttggatgattgtcgtcgagccgtcagacgcttctgaaatcgaaaacctgatgacagccgggcaatatgaggacatgataaaagaagactaa

SEQ ID NO: 572 - protein, 127 aa, Bacillus licheniformis
MSTPKELRYSEEHEWVKTEGDKVRIGITDFAQSELGDIVFVELPEVGDEIKADEPFGSVESVKTVSELYAPINGKVVEVNEDLEDSPEFVNESPYEKAWMIVVEPSDASEIENLMTAGQYEDMIKED

SEQ ID NO: 573 - DNA, 381 bp, Bacteroides thetaiotaomicron
  CDS (1)..(381): transl_table=11
atgaactttccacagaacttgaagtacacgaatgaacacgagtggattcgcgtagaaggagacatcgcttacgtaggtatcacagattacgcacaggaacaactgggcgatattgtattcgttgatattcctaccgtaggagaaacgttggaagccggagaaactttcggaacgattgaagtggtaaagaccatttccgatcttttcttaccgttggcaggcgagatactcgaacagaacgaagctttggaagaaaatccggagctggtaaacaaagacccttacggcgaaggctggctgatcaagatgaagcctgctgatgccagtgctgcggaagacctgctcgatgccgaagcatacaaggcagtggtcaacggctga

SEQ ID NO: 574 - protein, 126 aa, Bacteroides thetaiotaomicron
MNFPQNLKYTNEHEWIRVEGDIAYVGITDYAQEQLGDIVFVDIPTVGETLEAGETFGTIEVVKTISDLFLPLAGEILEQNEALEENPELVNKDPYGEGWLIKMKPADASAAEDLLDAEAYKAVVNG

SEQ ID NO: 575 - DNA, 369 bp, Bartonella quintana
  CDS (1)..(369): transl_table=11
atgtctcaaatttattttacacaagatcatgaatggcttagcgttgaaggacaagtagtgactgtggggatcacaaattatgcccaagaacaattaggtgatttggtttttgttgatttgccacaaagcgggacgaaactttccaagggggatgctgctgctgttgtggaatcggtgaaggcggcttcagatgtttatgcacctcttgatggtgaagtggtcgaaattaatgaagctttggcaaatagtcctgaactggtaaaccagaaagctgaaaaagaaggatggctctggaaaatgacagtgcaggatgaaacgcaacttgaagggttgctggatgaggctgcttataaaacattgattggatga

SEQ ID NO: 576 - protein, 122 aa, Bartonella quintana
MSQIYFTQDHEWLSVEGQVVTVGITNYAQEQLGDLVFVDLPQSGTKLSKGDAAAVVESVKAASDVYAPLDGEVVEINEALANSPELVNQKAEKEGWLWKMTVQDETQLEGLLDEAAYKTLIG

SEQ ID NO: 577 - DNA, 414 bp, Bifidobacterium longum
  CDS (1)..(414): transl_table=11
atgactatgagtgatgacaacgaaaacgaacagccgctgaatctcgacattcccgaccacctcgaatactccgaggaacatgcatgggtggaccgttcggtcgaccccgcaatcatcggcattaccgaatacgccgccgaccagcttggcgaacttgtgtttgtggatctgcctgagcctggcgcccgtgtggaggccggcgacgagatcgtggagcttgaatcctccaaggccgtccagccgctgatcagccccgtggcgggtacggtcaagtatgtgaaccgtgacgtggcggacgacccgtccgtggtcaacggcgatccgtacggcgaaggctggctgctgaaggttgagcttgacgacgatgagccggagctgctgagcgccgacgaatacgcgaaggtcgtgcggtag

SEQ ID NO: 578 - protein, 137 aa, Bifidobacterium longum
MTMSDDNENEQPLNLDIPDHLEYSEEHAWVDRSVDPAIIGITEYAADQLGELVFVDLPEPGARVEAGDEIVELESSKAVQPLISPVAGTVKYVNRDVADDPSVVNGDPYGEGWLLKVELDDDEPELLSADEYAKVVR

SEQ ID NO: 579 - DNA, 375 bp, Bordetella pertussis
  CDS (1)..(375): transl_table=11
atgagcctgcccaccgatcgcaagtacaccgagtcccacgaatgggtccaagccgaaggcgatgtgttcgtcgtcggcatcaccgacaacgcccaggagcagctgggcgatctggtcttcgtcggcgacgtcaaggtcggcgccacgctgaaggccggcgaaaccgccggcgtggtcgagtcggtcaaggccgcctcggacatttatgcgccggtcgacggcgagatcgtcgcgttcaacgacgaactcgaagccaaccccagcctgatcaacgaatcggcctataccgcctggatcttcaagatcaagccggccaacgcggccgacctggacaagctgcttgacgcggccggctaccaggccgtcgccggctga

SEQ ID NO: 580 - protein, 124 aa, Bordetella pertussis
MSLPTDRKYTESHEWVQAEGDVFVVGITDNAQEQLGDLVFVGDVKVGATLKAGETAGVVESVKAASDIYAPVDGEIVAFNDELEANPSLINESAYTAWIFKIKPANAADLDKLLDAAGYQAVAG

SEQ ID NO: 581 - DNA, 369 bp, Bradyrhizobium japonicum
  CDS (1)..(369): transl_table=11
atgaccacgacgctgtacacctccgaccatgaatggctcgccatcgagggcgatgtcgccaccgtcgggatcaccgactacgcgcagtcgcagctcggcgacgtcgtgttcatcgagctgcccaagctcggccgcgcgctgaagaaggcggaagccgccgccgtggtggagtccgtgaaggccgcctccgacgtctacgcgcctgtgacgggcgaggtgctcgagaccaacgatgcgctcgccgccgagccggcgctggtgaactcggatgcgcaaggcaaggcctggttcttcaagatcaagattgccgacaagagcgaactaggcggcctcatggatgaagccgcctacaaggcccacacggcgtga

SEQ ID NO: 582 - protein, 122 aa, Bradyrhizobium japonicum
MTTTLYTSDHEWLAIEGDVATVGITDYAQSQLGDVVFIELPKLGRALKKAEAAAVVESVKAASDVYAPVTGEVLETNDALAAEPALVNSDAQGKAWFFKIKIADKSELGGLMDEAAYKAHTA

SEQ ID NO: 583 - DNA, 381 bp, Burkholderia vietnamiensis
  CDS (1)..(381): transl_table=11
atgagcaacgtcccggccgatctgaagtacaccgacgaacacgagtgggtccgcaccgaggcagacggcacgctgacggtcggcatcaccgatcacgcgcagagcacgctcggcgacatcgtcttcctcgagctgccgcaagtcggcaagtcggtgaatgcgggcgacgcggtgggcgtcgtcgaatcggtgaaggcggcatccgacatctactcgccggtgtccggcgaagtcgtcgcgatcaacgaagaagcgaccgattcgccggaaggcgtgaacggcgacgcatacggcgtgtggctgttcaagctgaagctcgccgacggcgcatcgaccgacaagctgatcgacgccgccgcgtacagcaagctgatcgactaa

SEQ ID NO: 584 - protein, 126 aa, Burkholderia vietnamiensis
MSNVPADLKYTDEHEWVRTEADGTLTVGITDHAQSTLGDIVFLELPQVGKSVNAGDAVGVVESVKAASDIYSPVSGEVVAINEEATDSPEGVNGDAYGVWLFKLKLADGASTDKLIDAAAYSKLID

SEQ ID NO: 585 - DNA, 381 bp, Burkholderia xenovorans
  CDS (1)..(381): transl_table=11
atgagcatcccggccgatctgaaatacaccgaatcgcacgagtgggtccgcaccgaagcggacggcacactgacggtcggcatcaccgaccacgcgcaggaagcgctcggcgatatcgtcttcttcgaagtccaggaactgggcaagaccgtgagcgcgggcgacaccgtcgccgtgatcgaatcggtcaaggccgcttccgatatctacgcgccggtttcgggcgagatcatcgaagcgaacagcgccgtggccgatacgcctgatctggtcaacagcacaccgtacgaaagctggctcttcaagatcaagccggccgcggacgccgcgctggaccgtctgatcgacgccgacgcatacagcaagtcgatcggcgcctga

SEQ ID NO: 586 - protein, 126 aa, Burkholderia xenovorans
MSIPADLKYTESHEWVRTEADGTLTVGITDHAQEALGDIVFFEVQELGKTVSAGDTVAVIESVKAASDIYAPVSGEIIEANSAVADTPDLVNSTPYESWLFKIKPAADAALDRLIDADAYSKSIGA

SEQ ID NO: 587 - DNA, 366 bp, Caulobacter crescentus
  CDS (1)..(366): transl_table=11
atgcgtttcaccaaggatcacgagtgggtcatcgtcgagggcgatgtggccacggtcggcatcaccgcctacgccgccgagcagctgggcgacgtcgtgttcgtcgagaccccggaagcgggcaaggtcgtcaagcagggcgaaggcctggccgtcgtcgagagcgtcaaggccgcctcggacgtctacgccccggtgtcgggcgaggtgatcgagggcaacggcgagctggccggcgccccggagaccgtcaacgccctgccggaaagcggcggctggttcgccaagatcaagctcgccaacccggccgagctcgacgccctgatggaccgcgacgcctacgaagccttcctgggcactctgtag

SEQ ID NO: 588 - protein, 121 aa, Caulobacter crescentus
MRFTKDHEWVIVEGDVATVGITAYAAEQLGDVVFVETPEAGKVVKQGEGLAVVESVKAASDVYAPVSGEVIEGNGELAGAPETVNALPESGGWFAKIKLANPAELDALMDRDAYEAFLGTL

SEQ ID NO: 589 - DNA, 384 bp, Chlorobium tepidum
  CDS (1)..(384): transl_table=11
atgaacatccctgacaatctccgctataccaaagatcacgaatggatcaagctgcttgaagatggcctgaccgctctggtcggcatcaccgactttgcgcagtccgagcttggcgacatcgtgttcgtcgaaaccaaaccggttggaacaaaggttgctgcgcacggtacgtttggaaccgttgaggcggtcaaaacggttgccgatctgttcgctcctgcggctggcgaaattgtcgaggtcaatgctggactcgacgatgcggcgattgttaactccgatccctacaacgagggctggattgtcaagatgaagctcgataatcctgccgatgtcgaggcactactctctccggcggactacagcgccctgatcggtgagtaa

SEQ ID NO: 590 - protein, 127 aa, Chlorobium tepidum
MNIPDNLRYTKDHEWIKLLEDGLTALVGITDFAQSELGDIVFVETKPVGTKVAAHGTFGTVEAVKTVADLFAPAAGEIVEVNAGLDDAAIVNSDPYNEGWIVKMKLDNPADVEALLSPADYSALIGE

SEQ ID NO: 591 - DNA, 387 bp, Chromobacterium violaceum
  CDS (1)..(387): transl_table=11
atgagcaacattcccgccgaactgaaatacgtcgacagccacgaatggctgcgcctggaagccgacggctccgtgaccgtgggcatcaccgcgcacgcgcaggaattgctgggcgacatcgtcttcgtcgagctgccgaaagtcggcgcgagtctggccaaggatgagcaggccggcgtggtggagtcggtgaaggccgcttccgacgtctactgtccgatcgccggcgaagtgctggccgtcaacgaggagctggagggcgagccggagctggccaacagcgatccgtacggcgacggctggttcttcaagatcaagccggccaacgccgccgatctgaacggcctgatggacgccgccgcctacgccaaggaaatcggcgcctga

SEQ ID NO: 592 - protein, 128 aa, Chromobacterium violaceum
MSNIPAELKYVDSHEWLRLEADGSVTVGITAHAQELLGDIVFVELPKVGASLAKDEQAGVVESVKAASDVYCPIAGEVLAVNEELEGEPELANSDPYGDGWFFKIKPANAADLNGLMDAAAYAKEIGA

SEQ ID NO: 593 - DNA, 372 bp, Clavibacter michiganensis subsp
  CDS (1)..(372): transl_table=11
atgaccgaccagaccagcctccagtacaccgccgagcacgagtgggtgctcatcgacggcgacgtcgcgaccgtcggcatcacctcctacgccgccgacaagctcggcgacgtcgtcttcgtcgagctgcccgccgtgggcgacgagctcgcgggcggctcggtcgtcggcgagatcgagtcgaccaagtcggtcggcgagctgttcgcgcccatcgacggcaccgtcaccgaggtcaacgacgacgtcgtggcctcgcccgacctcgtcaacagcgacccgttcggcgccggctggctcgtgaaggtgcgcttcgaggcgctgccgacgctcctcagccacgacgagtacgtcgcgctggtgggcgagtga

SEQ ID NO: 594 - protein, 123 aa, Clavibacter michiganensis subsp
MTDQTSLQYTAEHEWVLIDGDVATVGITSYAADKLGDVVFVELPAVGDELAGGSVVGEIESTKSVGELFAPIDGTVTEVNDDVVASPDLVNSDPFGAGWLVKVRFEALPTLLSHDEYVALVGE

SEQ ID NO: 595 - DNA, 378 bp, Clostridium difficile
  CDS (1)..(378): transl_table=11
atgaaattattaccagaattaaaatactctaaagatcatgagtgggtaaaagtaattgatggagatgttgtatatataggtataacagactatgctcaagatcaattaggagaaatattgtttgttgaaacaccagaagtagaagatactgtaactaagggagtagattttggagtagttgagtcttctaaagtagcttctgatttaatatctcctgttaatggtgaggtattggaagttaatgaaaaattagaagatgagccagaatgtataaatgaagacccatatgaaaactggatattaaaagtaaaactagctgatgtggctgaacttgatacgttattaagtgataaagaatacgaggctggattagaataa

SEQ ID NO: 596 - protein, 125 aa, Clostridium difficile
MKLLPELKYSKDHEWVKVIDGDVVYIGITDYAQDQLGEILFVETPEVEDTVTKGVDFGVVESSKVASDLISPVNGEVLEVNEKLEDEPECINEDPYENWILKVKLADVAELDTLLSDKEYEAGLE

SEQ ID NO: 597 - DNA, 381 bp, Cytophaga hutchinsonii
  CDS (1)..(381): transl_table=11
atgaactttccttctgaattaaaatacagcaaagatcacgaatgggttcgtgtagaaggccagacagcttatgttggcattactgattttgcgcaaaaagaattaggtgatattgtttacctggatgtaacatctgttggacaaacgattgataaagaagcaatcttcggaacaattgaagcagtaaaaacagtttcagatttatttatgccggttagcggggaagtattagaattcaatgctgaattggaatctgcgcctgaattagttaattcagatccatatggtaaaggctggatcgtgaaggttacgttagcgaatgcttcagacctggatgctttattagatgcagccgcctatacaacactggttggtgcttaa

SEQ ID NO: 598 - protein, 126 aa, Cytophaga hutchinsonii
MNFPSELKYSKDHEWVRVEGQTAYVGITDFAQKELGDIVYLDVTSVGQTIDKEAIFGTIEAVKTVSDLFMPVSGEVLEFNAELESAPELVNSDPYGKGWIVKVTLANASDLDALLDAAAYTTLVGA

SEQ ID NO: 599 - DNA, 387 bp, Dechloromonas aromatica
  CDS (1)..(387): transl_table=11
atgtcgaacgttccttccaacctcaagtacaccgcctcccacgaatggatgctgctcaacgctgacggctcggtcactgtcggcattaccgaccacgcccaggaagccctcggcgacctcgttttcgtcgaactgccggaagtcggcgcccatttcgatgccgaaaaggaaattgctgtcgtcgaatcggtcaaggctgcggctgacgtgtacgccccgatcgccggcaccgtgaccgaagtcaatcaggccgctgccgatgccccggaatcggtcaatcaggacgcctacgccgcctggctgttcaagatgaccccggacaatgtcgccgacctcgacaagatgcttgacgccgctgcctaccaggccgttgctgacgccgcctaa

SEQ ID NO: 600 - protein, 128 aa, Dechloromonas aromatica
MSNVPSNLKYTASHEWMLLNADGSVTVGITDHAQEALGDLVFVELPEVGAHFDAEKEIAVVESVKAAADVYAPIAGTVTEVNQAAADAPESVNQDAYAAWLFKMTPDNVADLDKMLDAAAYQAVADAA

SEQ ID NO: 601 - DNA, 363 bp, Deinococcus radiodurans
  CDS (1)..(363): transl_table=11
atgaccaccacccccaccgaccgcaaatacgccgcctcccacgaatggctcacccaagacggcaccgtgggcatctccgaccacgcgcaggagcagctcggcgacgtggtgtacgtcgaactgcccgaagtgggccgcgaagtgaaggccggcgaagccgtcgccgtcgtggaatcggtcaagaccgccagcgacatctacgccccggccagcggcacgattaccgccgtcaacgacgaactgagcggcagccccgaaaaggtcaacgaaagcccctacgaaggcggctggctgttcaagctcgacgtgaccgaggaaggcgacctgctggacgcggcggcgtatgaggcgcaggcgaactga

SEQ ID NO: 602 - protein, 120 aa, Deinococcus radiodurans
MTTTPTDRKYAASHEWLTQDGTVGISDHAQEQLGDVVYVELPEVGREVKAGEAVAVVESVKTASDIYAPASGTITAVNDELSGSPEKVNESPYEGGWLFKLDVTEEGDLLDAAAYEAQAN

SEQ ID NO: 603 - DNA, 384 bp, Desulfovibrio desulfuricans
  CDS (1)..(384): transl_table=11
atgaatattcccgcagaactgaagttctcgaaaagtcatgaatgggtccgccttgaaggcgatgaggcagtgatcggcataaccgagtttgctcaggaacagctgggcgatcttactttcattgaactgcccgccgcaggcgataccctgacagcaggcgaagaaatggggtccgtcgagtccgtcaaagccgcaagtgaactgtacgcacctgtctccggcgaagtgacagaggtgaacctgcaccttgaagatgctcccgaagccgtaaacgaatcgccctacgacaaaggctggatgctgaaggtcaaagtgtctgccgtggctggcagtctgctttccgcagaagaatacgcagccctcatcgaaagcgaagcgcactag

SEQ ID NO: 604 - protein, 127 aa, Desulfovibrio desulfuricans
MNIPAELKFSKSHEWVRLEGDEAVIGITEFAQEQLGDLTFIELPAAGDTLTAGEEMGSVESVKAASELYAPVSGEVTEVNLHLEDAPEAVNESPYDKGWMLKVKVSAVAGSLLSAEEYAALIESEAH

SEQ ID NO: 605 - DNA, 384 bp, Desulfovibrio vulgaris
  CDS (1)..(384): transl_table=11
atgagcatccccgccgaactcaagtacagcaagacccacgaatggattcgcatcgaaggcgacgaagccgtcatcggcatcacccatttcgcacaggaacagcttggcgacctgaccttcgtcgaccttcccggtgtgggcgacaccctcgacgtggaacaggagatgggctccgtcgaatccgtcaaggctgccagcgagctctacgcacctgtcgccggagaggtcatcgccgtcaatgacgccctcgcatcggctcccgaactggtcaaccagtcgccctacaccgaaggctggatgctgcgtgtgaagcttgccgcaacccctgaagacctgctcgacgccaccgcctacggtgaactcgtcgccagcgaagcccactag

SEQ ID NO: 606 - protein, 127 aa, Desulfovibrio vulgaris
MSIPAELKYSKTHEWIRIEGDEAVIGITHFAQEQLGDLTFVDLPGVGDTLDVEQEMGSVESVKAASELYAPVAGEVIAVNDALASAPELVNQSPYTEGWMLRVKLAATPEDLLDATAYGELVASEAH

SEQ ID NO: 607 - DNA, 498 bp, Drosophila melanogaster
  CDS (1)..(498)
atggtattcataacgaaattcgcaaggattgggctgcaggccgcccgccagcttagtgtcacgccccttggcgccgtccaggctcgcgccattcacctgacaagccttctagccaaagaacgccgatacacaaacaaacacgagtgggtggaggtggtatccggcagcaatgccatagtaggcatctccagctacgcccaggaggctctcggggatgtggtgttcgcccaactcccagaacccggcacggaactcaagcaggatgacgaatgtggggccctggagagcgttaaagcggctagcgaggtgtattcacccgttagtggcaaggtaattgaaaagaatgccgaggtggaggacacaccggccctagtcaacagcagttgctatgaaaagggctggcttttcaaggtggacctgaaaaatcccaaggaactcgaagcccttatgaccgaggatcagtacaaagccttcctgagcagcagtggggatcactag

SEQ ID NO: 608 - protein, 165 aa, Drosophila melanogaster
MVFITKFARIGLQAARQLSVTPLGAVQARAIHLTSLLAKERRYTNKHEWVEVVSGSNAIVGISSYAQEALGDVVFAQLPEPGTELKQDDECGALESVKAASEVYSPVSGKVIEKNAEVEDTPALVNSSCYEKGWLFKVDLKNPKELEALMTEDQYKAFLSSSGDH

SEQ ID NO: 609 - DNA, 393 bp, Erwinia carotovora subsp
  CDS (1)..(393): transl_table=11
atgagcaatgtaccaacagaattaaaatatgccacgtcacacgaatgggtactgcatgaaggcgacggtatctacagcgtgggcattaccgaacacgcgcaggagcttctgggtgacatggtttttatcgatttaccggaagtcggcacggtggtcgcggcaggcgatgactgcgcggttgcggagtcggtaaaagcggcctcggatatttatgcaccgatcagcggtgaggtcgtggaagttaacgaagacctggaaaattcccctgagctggtcaacagcgcgccttataccgacggctggctgtttcgtatcaaaatttctgatgagtctgatttggatgaactgcttgatgccgaaggctatcaggcgtcgttagaagaagacgagtag

SEQ ID NO: 610 - protein, 130 aa, Erwinia carotovora subsp
MSNVPTELKYATSHEWVLHEGDGIYSVGITEHAQELLGDMVFIDLPEVGTVVAAGDDCAVAESVKAASDIYAPISGEVVEVNEDLENSPELVNSAPYTDGWLFRIKISDESDLDELLDAEGYQASLEEDE

SEQ ID NO: 611 - DNA, 489 bp, Flaveria anomala
  CDS (1)..(489)
atggctcttagaatgtgggcttcttccacagccaatgctctaaggctatcctctgctactagaccccatttctcacctctttccagatgcttctcttcagttttggatggattgaagtatgcaaattcacatgagtgggtgaagcatgaaggctctgttgctactattggtatcactgaccatgctcaggatcatcttggagaggtggtgtttgtggatttaccagaagccggtggctctgtgaccaaagccaccggctttggtgctgtagaaagtgtcaaagctaccagtgacgttaactccccgatctctggagagatcgttgaggtgaactcgaagttgtccgagactcctggtttgatcaattcgagcccgtatgaagatggatggatgattaaggtgaagccaagcaacccgtcggagctggattctttaatgggtgcaaaagagtacacaaagttctgtgaagaagaagatgctgctcactag

SEQ ID NO: 612 - protein, 162 aa, Flaveria anomala
MALRMWASSTANALRLSSATRPHFSPLSRCFSSVLDGLKYANSHEWVKHEGSVATIGITDHAQDHLGEVVFVDLPEAGGSVTKATGFGAVESVKATSDVNSPISGEIVEVNSKLSETPGLINSSPYEDGWMIKVKPSNPSELDSLMGAKEYTKFCEEEDAAH

SEQ ID NO: 613 - DNA, 489 bp, Flaveria pringlei
  CDS (1)..(489)
atggctcttagaatctgggcttcttccacagccaatgctctaaggctatcctctgctactagacctcatttctcacctctttccagatgcttctcttcagttttggatggattgaagtatgcaaattcacatgagtgggtgaagcatgaaggttctgttgctactattggtatcactgaccatgctcaggatcatcttggggaggtggtgtttgtggatttaccagaagccggtggctctgtgaccaaagccaccggctttggtgcagtagaaagtgtcaaagccaccagtgacgttaactccccgatctctggagagatcgttgaggtgaactcgaagttgtctgagactcctggtttgatcaattcgagcccgtatgaagatggatggatgattaaggtgaagccaagcaacccgtcggagctggattctttaatgggtgcaaaagagtacacaaagttctgcgaagaagaagattctgctcactag

SEQ ID NO: 614 - protein, 162 aa, Flaveria pringlei
MALRIWASSTANALRLSSATRPHFSPLSRCFSSVLDGLKYANSHEWVKHEGSVATIGITDHAQDHLGEVVFVDLPEAGGSVTKATGFGAVESVKATSDVNSPISGEIVEVNSKLSETPGLINSSPYEDGWMIKVKPSNPSELDSLMGAKEYTKFCEEEDSAH

SEQ ID NO: 615 - DNA, 498 bp, Flaveria trinervia
  CDS (1)..(498)
atggctcttagaatctgggcttcttccacagccaaggctctaaggctatcctctgcttctagacctcatttctcaccacttttcagatgcttctcttcagctgcagttttggatggattgaagtatgcaaattcacatgagtgggtgaagcatgaaggttctgttgctactattggtatcactgatcatgctcaggatcatcttggggaggtggtgtttgtggaattaccagaagtcggtggctctgtgaccaaagccaccggctttggtgcagtagaaagtgtcaaagccactagtgacgttaactccccgatctctggagagatcgttgaggtgaactcgaagttgaccaagactcctggtttgatcaataagagcccgtatgaagatggatggatgattaaggtgaagccaagcaacccgtcggagctggattcgttaatgggtccaaaagagtacacaaagttctgcgaagaagaaggtgctgctgctcactag

SEQ ID NO: 616 - protein, 165 aa, Flaveria trinervia
MALRIWASSTAKALRLSSASRPHFSPLFRCFSSAAVLDGLKYANSHEWVKHEGSVATIGITDHAQDHLGEVVFVELPEVGGSVTKATGFGAVESVKATSDVNSPISGEIVEVNSKLTKTPGLINKSPYEDGWMIKVKPSNPSELDSLMGPKEYTKFCEEEGAAAH

SEQ ID NO: 617 - DNA, 384 bp, Geobacillus kaustophilus
  CDS (1)..(384): transl_table=11
atgaacacgccgaaagaacttcgctatacaaaggagcatgagtgggtgcgcgtggaaggagagaacgtgcgcatcggcattacggattacgcccaatcagagcttggcgacatcgtctttgtcgagctgccggaagtcggcgcagaggttacggcgaacgagccgttcggcagcgttgaatcggtgaaaacggtctcggaattgtatgcgccgatcagcggcacggtcgttgaagtgaatgaggcgttaaatgaccatccggagtacgtgaacgaatcgccgtatgacaaagcgtggatgatcgtcgtcaaaccgaatgatttgagcgaaatcgacaatttgttgacggcggaacaatacgaggcgatgatcaacgaaggataa

SEQ ID NO: 618 - protein, 127 aa, Geobacillus kaustophilus
MNTPKELRYTKEHEWVRVEGENVRIGITDYAQSELGDIVFVELPEVGAEVTANEPFGSVESVKTVSELYAPISGTVVEVNEALNDHPEYVNESPYDKAWMIVVKPNDLSEIDNLLTAEQYEAMINEG

SEQ ID NO: 619 - DNA, 390 bp, Gloeobacter violaceus
  CDS (1)..(390): transl_table=11
atggccctggaatacccggaggaactaaaatatctcgactcccacgagtacctgcgcgtcgagggagacaccgtggtggtgggcgtcacgtcctatgccgtcgatcaactcggcgacatcgtctttgtctcgcttccggaggaaggcgatcgcatcaaccgcggcgacagcttcggttcgatcgaatcggtcaaggcggtcgaagaactgtacgccccgctctccggcacggttttgtcggtcaacaccgtcgcagtcgaagatccggcgcttatcggtagcgatccctatggcgacggttggctcatcaaggtccgtctcgccgaccctgccgacgagttgggcgaaacgatgactgccgaggaataccgcgagcgcgtcgaaggctga

SEQ ID NO: 620 - protein, 129 aa, Gloeobacter violaceus
MALEYPEELKYLDSHEYLRVEGDTVVVGVTSYAVDQLGDIVFVSLPEEGDRINRGDSFGSIESVKAVEELYAPLSGTVLSVNTVAVEDPALIGSDPYGDGWLIKVRLADPADELGETMTAEEYRERVEG

SEQ ID NO: 621 - DNA, 384 bp, Haloarcula marismortui
  CDS (1)..(384): transl_table=11
atgagcttcgacgttcccgacgacctgcgatatctggagtcacacgaatgggtacgcgtcgccggtgacactgccgaggtcggcatcacggcgttcgcacaggacgaactcggcgacgtggtgttcgtcgaactgcccgatgaaggcacggagctgactgcgggcgaggacttcggcgtggtggagtctatcaaggctgtgtccgacgtgtacgcccccgtctccggcaccgtcacagcagtcaacgaccgactccgcgacgagccggaactgctgaacgaggacccgttcggcgacggctggatgctcactgtcgaggttgacgacaagagcgaaaccgacgacctgctttcacccgacgcgtaccgcgatcagatcgagtaa

SEQ ID NO: 622 - protein, 127 aa, Haloarcula marismortui
MSFDVPDDLRYLESHEWVRVAGDTAEVGITAFAQDELGDVVFVELPDEGTELTAGEDFGVVESIKAVSDVYAPVSGTVTAVNDRLRDEPELLNEDPFGDGWMLTVEVDDKSETDDLLSPDAYRDQIE

SEQ ID NO: 623 - DNA, 375 bp, Halobacterium salinarium
  CDS (1)..(375): transl_table=11
atgagcttcgacgttcctgacgacctgcagtatctcgaatcacacgaatggatcgaccctgcgaccggccgcgtcggcatcagcgagttcgcccaagacgaactcggcgatgtcgtgttcgtggagctgccgagcgtcggcgacgcgctcgaccagcacgacgagctcggcgtcgtcgagtctatcaaggcggtttcggacctgtacgcgcccgtttcgggcgaggtgacggcggtcaacgacgccctgacgaacgagccggagttggtcaacgaggcccccttcggcgacggctggctggtcgagatcgacttcgacagcgacgacctcgaagcgacgcttgactccgacgactaccgcgcacagatcgcgtga

SEQ ID NO: 624 - protein, 124 aa, Halobacterium salinarium
MSFDVPDDLQYLESHEWIDPATGRVGISEFAQDELGDVVFVELPSVGDALDQHDELGVVESIKAVSDLYAPVSGEVTAVNDALTNEPELVNEAPFGDGWLVEIDFDSDDLEATLDSDDYRAQIA

SEQ ID NO: 625 - DNA, 390 bp, Idiomarina loihiensis
  CDS (1)..(390): transl_table=11
atgagcaatattccagcagatttgaaatacgcatcaactcacgagtgggttcgtgacgagggcgacggtacctttacagtaggtatctctgagcacgcgcaggaacttcttggcgatatggtgtttgttgagttacctgacgtaggtgacaaagtggcaacaggcgacgacattgctgtagctgaatctgtaaaagcagcatccgacatctacgcaccaatgacaggtgaagtggttgcgattaacgaagacctggaagatgcccctgaaaccgttaacaacgacccttacggtgacggctggttattccgtataaaagcagatgacagcagcgagctggacaacttgctggacgccaacacttacgaggcttcaatcgacgaagactga

SEQ ID NO: 626 - protein, 129 aa, Idiomarina loihiensis
MSNIPADLKYASTHEWVRDEGDGTFTVGISEHAQELLGDMVFVELPDVGDKVATGDDIAVAESVKAASDIYAPMTGEVVAINEDLEDAPETVNNDPYGDGWLFRIKADDSSELDNLLDANTYEASIDED

SEQ ID NO: 627 - DNA, 390 bp, Klebsiella pneumoniae subsp
  CDS (1)..(390): transl_table=11
atgagcaacgtaccagcagaactgaaatacagcaaagaacacgagtggctgcgtaaagaagcggaaggtacctataccgtagggatcaccgagcacgcgcaggagctgcttggcgatatggttttcgttgacctgccggaagtgggcgccaccgttgaagcgggtgccgattgcgcggttgccgaatccgtgaaggcggcctccgatatctacgcgccgattagcggtgaaatcgttgccgtcaacgaagagctgaacgactctccggaactggtcaacagcgacccgtataccgacggctggatcttcaagatcaaagccagcgacgaagcgcaggttgccgcgctgctggatgccgccgcgtatgaagctttactggaagacgaataa

SEQ ID NO: 628 - protein, 129 aa, Klebsiella pneumoniae subsp
MSNVPAELKYSKEHEWLRKEAEGTYTVGITEHAQELLGDMVFVDLPEVGATVEAGADCAVAESVKAASDIYAPISGEIVAVNEELNDSPELVNSDPYTDGWIFKIKASDEAQVAALLDAAAYEALLEDE

SEQ ID NO: 629 - DNA, 393 bp, Leptospira interrogans serogroup Icterohaemorrhagiae serovar
  CDS (1)..(393): transl_table=11
atggcagaaacacaggctcccacaggttatcttttctccgaaaaacacgaatgggtaaaagtagaaggagacatggctcttatcggtatttcggattttgctcaatccgcattaggtgatattgtgtttgtagatcttccaaaaaccggaaagaacattaaacaatttgaaaccttcggaacaatcgaatcggtaaaagcggctgaagacttatacgctcctattggtggagaagtgattgaatccaattcggctctttctaaaaatccgggagacgtcaactctaaaccattcgattcctggatgattaaggtgaaaggtttttccacttccgaactggacaaacttttaactccggaaaaatacaaggccttagtcgccggattagaataa

SEQ ID NO: 630 - protein, 130 aa, Leptospira interrogans serogroup Icterohaemorrhagiae serovar
MAETQAPTGYLFSEKHEWVKVEGDMALIGISDFAQSALGDIVFVDLPKTGKNIKQFETFGTIESVKAAEDLYAPIGGEVIESNSALSKNPGDVNSKPFDSWMIKVKGFSTSELDKLLTPEKYKALVAGLE

SEQ ID NO: 631 - DNA, 378 bp, Listeria innocua
  CDS (1)..(378): transl_table=11
atgagtttaccaaaagacttattgtacacagaagaacatgaatgggtgaaagcagaagacggtagttatattattggaattactgactttgcccaagatcaattaggggatattgtatttgtcgaattgccagaagttggcgatacagtaacaaaaggtgattcaatcggtagcattgaatccgttaaaacagtatctgatttttatgcgccagtaactggtaaagtagttgctgttaatgaaacattagaagatgagccagaactaattaatagcaacccgtatgacactggttggattttaaaacttactgaagtagaagaagcggatgtaactgctcttttatcaagtgatgattacgaaaaaggattagattaa

SEQ ID NO: 632 - protein, 125 aa, Listeria innocua
MSLPKDLLYTEEHEWVKAEDGSYIIGITDFAQDQLGDIVFVELPEVGDTVTKGDSIGSIESVKTVSDFYAPVTGKVVAVNETLEDEPELINSNPYDTGWILKLTEVEEADVTALLSSDDYEKGLD

SEQ ID NO: 633 - DNA, 378 bp, Listeria monocytogenes
  CDS (1)..(378): transl_table=11
atgagtttaccaaaagacttattgtacacagaagaacacgaatgggtgaaagcagacgatggtagttatgttattggaattacggactttgctcaagatcaattaggggatatcgtatttgttgaattgccagaggttggcgacactgtaacaaaaggtgactccattggtagcattgaatctgtaaaaacagtatctgatttttacgcaccagtaactggtaaagtagttgctgttaacgaaacattagaagatgaaccagaattaattaatagcaatccatacgatacaggctggattttaaaacttgaagaagtagaagaagcggatgtaaaggctcttttatcaagtgacgattacgaaaaagtattagattaa

SEQ ID NO: 634 - protein, 125 aa, Listeria monocytogenes
MSLPKDLLYTEEHEWVKADDGSYVIGITDFAQDQLGDIVFVELPEVGDTVTKGDSIGSIESVKTVSDFYAPVTGKVVAVNETLEDEPELINSNPYDTGWILKLEEVEEADVKALLSSDDYEKVLD

SEQ ID NO: 635 - DNA, 423 bp, Magnetococcus sp
  CDS (1)..(423): transl_table=11
atgtccattccgcaggaactatactataccaaagaccatgagtggctacgtaaagaaggggatgaggtggtgatcggcattacccgctttgccgccgatcaattgggcgatgtggtgtttgtggagctcccccaggtagaagataccctgcaaatggggggtaccttcggtgtggttgaatcggttaaagccgcatcggacctcttttcacccatcaccgggcaggtgatcgcaaccaatccagacctcgcagaagccccagagttggttaacgaagatccctatggtaaagggtggatgttacgcttgaaacccgaagatcctgcacaaatggatgcattgcttaccgcccaagcgtataccgcttggcttgaaacctgctcaagtttcgcagttcgtttcggccagaatttgacgttgtga

SEQ ID NO: 636 - protein, 140 aa, Magnetococcus sp
MSIPQELYYTKDHEWLRKEGDEVVIGITRFAADQLGDVVFVELPQVEDTLQMGGTFGVVESVKAASDLFSPITGQVIATNPDLAEAPELVNEDPYGKGWMLRLKPEDPAQMDALLTAQAYTAWLETCSSFAVRFGQNLTL

SEQ ID NO: 637 - DNA, 492 bp, Mesembryanthemum crystallinum
  CDS (1)..(492)
atggctttgagaatgtgggcttcttcagcagccaatgctcttggtgtctcttgtgcccccaaatctcatcttctcccagctctttctctctccagatgcttctccactgttttggatggattgaagtatgcatcctcccatgaatgggtgaaacatggaggttcagtggccaccattggcattactgatcatgctcagggacatctaggggatgtggtgtttgcagagctgccagaaggaggagcagtatcagcagggaaaccctttgcttcagtggagagtgtgaaagctacaagtgatgtcaactcccccatctcaggtgaaattgttgaggttaacaccaagctttctgattcccctggtttgctcaattcaagtccatatgaagaagggtggatggtcaaagtgaagccaagcaatccagcggagttggaaagcctgatgggttctaaagagtacacaaaattctgtgaggaagaagatgctcattaa

SEQ ID NO: 638 - protein, 163 aa, Mesembryanthemum crystallinum
MALRMWASSAANALGVSCAPKSHLLPALSLSRCFSTVLDGLKYASSHEWVKHGGSVATIGITDHAQGHLGDVVFAELPEGGAVSAGKPFASVESVKATSDVNSPISGEIVEVNTKLSDSPGLLNSSPYEEGWMVKVKPSNPAELESLMGSKEYTKFCEEEDAH

SEQ ID NO: 639 - DNA, 384 bp, Methylococcus capsulatus
  CDS (1)..(384): transl_table=11
atgagcaatttgccggccgggctgaaatacgccaagacccacgaatgggcccgcttggaagcggatggaaccgtcaaggtcggaatttccgaccatgcccaggaagcgctgggggatctggtctatctggaactgccggcggtcggccgccgcgtccacgccggcgaggcctgtgcggtggtcgaatcggtgaaagcggcagcggacgtcaacagccccttgagcggagagatcgtcgctcgcaacgaggctctggccgacgcgccggaacgggtcaaccagtcgccctacgaggcctggctgttcgccgtgagacccgacgacattggggaaatggaccagctgctcgacgccgagggttaccggaccatcgccgaagagtga

SEQ ID NO: 640 - protein, 127 aa, Methylococcus capsulatus
MSNLPAGLKYAKTHEWARLEADGTVKVGISDHAQEALGDLVYLELPAVGRRVHAGEACAVVESVKAAADVNSPLSGEIVARNEALADAPERVNQSPYEAWLFAVRPDDIGEMDQLLDAEGYRTIAEE

SEQ ID NO: 641 - DNA, 372 bp, Methylobacillus flagellatus
  CDS (1)..(372): transl_table=11
atgaatattcctgaaaacctgcaatacactgccgaacatctgtgggtacgtccagacgagaacggccattggctcgccggcattaccgaccatgcccaggatttgctgggcgatatcgtatatgtcgaggcccctaagccgggaacccgcctatccgcaggccagccttgcggactggtagaatctgtcaagaccggttccgacctgcatgcccctctcgatggtaccgtaaccgccatcaatgaagccctgcaaattacaccggaagagatcaacgacaggccttacgatgcctggattttttccttcgagcctgagcatgcacctacgggactgctaagtgcagctgaatacagagcactgctgggctaa

SEQ ID NO: 642 - protein, 123 aa, Methylobacillus flagellatus
MNIPENLQYTAEHLWVRPDENGHWLAGITDHAQDLLGDIVYVEAPKPGTRLSAGQPCGLVESVKTGSDLHAPLDGTVTAINEALQITPEEINDRPYDAWIFSFEPEHAPTGLLSAAEYRALLG

SEQ ID NO: 643 - DNA, 399 bp, Mycobacterium avium
  CDS (1)..(399): transl_table=11
gtgagcgacatcccgcccgacctgcactacaccgccgaacacgaatgggttcgccgaagcggtgatgacaccgtgcgggtgggcatcaccgacttcgcccagtcggcgttgggtgacgtcgttttcgttcagctgcccgaggtgggcgcgcagctgaccgccggggaatccttcggcgaggtcgaatccacgaaatcggtgtcggacctctacgccccggtgtcgggcacggtgacggcggtcaacaccgacctggaaggcagcccgcagctggtcaactccgacccgtacggggccggctggttgctggatgtccaggtgtccgacgccgccgccttggagtcggccatcaccgcactgctcgacgccgaggcctaccgcggaacgctgaccgaatga

SEQ ID NO: 644 - protein, 132 aa, Mycobacterium avium
MSDIPPDLHYTAEHEWVRRSGDDTVRVGITDFAQSALGDVVFVQLPEVGAQLTAGESFGEVESTKSVSDLYAPVSGTVTAVNTDLEGSPQLVNSDPYGAGWLLDVQVSDAAALESAITALLDAEAYRGTLTE

SEQ ID NO: 645 - DNA, 405 bp, Mycobacterium bovis
  CDS (1)..(405): transl_table=11
gtgagcgatatcccgtccgatctgcactacaccgccgaacacgagtggattcgccgcagtggcgacgacaccgtccgggtggggatcaccgactatgcacagtcggcgcttggcgacgtcgttttcgttcagctacccgttatcggcaccgcggtcaccgccggcgagaccttcggcgaagtggaatcgacgaaatctgtgtcggatctctatgcgcccatttcgggtaaggtgtctgcggtcaacagcgatctggacggcactccgcaattggtgaattccgacccctacggagccggctggctgctggacatccaggtcgacagctcggatgtcgctgccctggagtcagctttgacgacactgctcgacgctgaggcctaccgcggcacactgaccgagtga

SEQ ID NO: 646 - protein, 134 aa, Mycobacterium bovis
MSDIPSDLHYTAEHEWIRRSGDDTVRVGITDYAQSALGDVVFVQLPVIGTAVTAGETFGEVESTKSVSDLYAPISGKVSAVNSDLDGTPQLVNSDPYGAGWLLDIQVDSSDVAALESALTTLLDAEAYRGTLTE

SEQ ID NO: 647 - DNA, 399 bp, Mycobacterium leprae
  CDS (1)..(399): transl_table=11
gtgagtgatatcccgtccgatctgcattacactgctgagcatgagtggattcggcgcagtcgcgaagacaccgtccgggtcgggctcaccgacttcgcgcagtcgacactgggtgatgtggttttcgtccagctgccagaagttggcgctgagttagcggcgggcaaatccttcggcgaagtggaatcgacgaaatcggtgtcggacttgtatgcaccggtgtcgggtacagtgtcggcggtaaacaccgatctggaaggcagtccccaactagtgaactctgacccatacggcgctggctggctactggatgttcacgtctccgacgtcggggctttggagtcagctatcgcaacgctgcttgacgccgagacttatcgcggcacgctaaccaaatga

SEQ ID NO: 648 - protein, 132 aa, Mycobacterium leprae
MSDIPSDLHYTAEHEWIRRSREDTVRVGLTDFAQSTLGDVVFVQLPEVGAELAAGKSFGEVESTKSVSDLYAPVSGTVSAVNTDLEGSPQLVNSDPYGAGWLLDVHVSDVGALESAIATLLDAETYRGTLTK

SEQ ID NO: 649 - DNA, 396 bp, Mycobacterium smegmatis
  CDS (1)..(396): transl_table=11
gtgagcgagatcccagccgacctgtactacacctccgagcacgagtgggtgttgcgcaccggtgacgacacggtgcgcgtcggcatcaccgactacgcgcagtccgccctcggcgacgtggtgttcgtccagctgcccgacgtcggcgccgacgtcgcctcgggcgacgcgttcggcgaggtcgaatccaccaagtcggtgtcggatctctacgcaccggtcaccgcgaaagtcgttgccgtcaacggtgatctggaaggcagccccgagctggtcaactccgatccgtacggcgagggctggctggtcgacctgcgggtcgaggcgggcaccctcgacgaggcgctcggcggtttgctggacgcggagggctaccgcgcggtcgtcaccgagtga

SEQ ID NO: 650 - protein, 131 aa, Mycobacterium smegmatis
MSEIPADLYYTSEHEWVLRTGDDTVRVGITDYAQSALGDVVFVQLPDVGADVASGDAFGEVESTKSVSDLYAPVTAKVVAVNGDLEGSPELVNSDPYGEGWLVDLRVEAGTLDEALGGLLDAEGYRAVVTE

SEQ ID NO: 651 - DNA, 396 bp, Mycobacterium sp
  CDS (1)..(396): transl_table=11
gtgagcgagatcccagccgagctgtactacaccgacgaacacgagtgggtgctccgtacgggtgacgacacgctgcgcgtcggcatcaccgactatgcgcaggcggcgctcggtgacgtcgtgttcgtacagctgcccgacgtcggcgccgagctgacctcgggggagtcgttcggcgaggtggagtcgaccaaatcggtatccgatctgtatgcccccgtcagcgcgaaagtgcttgccgtcaacggaaatctggaggccagccccgatctggtcaactccgatccgtacggcgagggctggctggtcgacctgcagctcgacgccgatgacatggaggcggcgctgggcggtctgctggacgcggacggctaccgtggcgtggtgaccgagtga

SEQ ID NO: 652 - protein, 131 aa, Mycobacterium sp
MSEIPAELYYTDEHEWVLRTGDDTLRVGITDYAQAALGDVVFVQLPDVGAELTSGESFGEVESTKSVSDLYAPVSAKVLAVNGNLEASPDLVNSDPYGEGWLVDLQLDADDMEAALGGLLDADGYRGVVTE

SEQ ID NO: 653 - DNA, 390 bp, Myxococcus xanthus
  CDS (1)..(390): transl_table=11
atggccgacaacatccccggcgacctgaagtacacccgtgagcacgagtgggcccgcgtccagggcacctcggtggtggtgggcgtcacgcagcacgcgcaggagtccctgggcgacgtggtctacgtggagctgcccaaggtgggctccacggtgacggagggcaagcagttcggcgtcatcgagtccaccaaggcggtgtcggagctgtactcgccgctgacgggcaaggtggtgaaggtgaacgacgggctgtcggacaacccctccaccgtgaacaccgacccctacggtgcgggctggattgtggaaatcgagccctcggaccccaagcaggtggacggactcatggacgccgccgcgtacaccgccctgctccagaacagctga

SEQ ID NO: 654 - protein, 129 aa, Myxococcus xanthus
MADNIPGDLKYTREHEWARVQGTSVVVGVTQHAQESLGDVVYVELPKVGSTVTEGKQFGVIESTKAVSELYSPLTGKVVKVNDGLSDNPSTVNTDPYGAGWIVEIEPSDPKQVDGLMDAAAYTALLQNS

SEQ ID NO: 655 - DNA, 387 bp, Neisseria gonorrhoeae
  CDS (1)..(387): transl_table=11
atgagcaacaacatcccaacagaactgaaatacgttgccagccatgaatggctgcgccttgaagaagacggtaccattaccgtcggtattacccatcacgcgcaagagctgttgggcgacatcgtgtttgtcgagctgcccgaagtcggtgcgaacctcgccgccgaagaacagtccggtgtggttgagtctgtaaaagccgcatccgacgtgtatgcgccgattgcgggcgaagtcgttgccgtcaacgatgacttgccaggcgcgccggaaaccgccaacagcgacccttacggcgcaggctggttcttcaaaatcaaacctgccaatcctgccgattacgacggcctgctgactgccgaacaatacgcgggcgaagtggattaa

SEQ ID NO: 656 - protein, 128 aa, Neisseria gonorrhoeae
MSNNIPTELKYVASHEWLRLEEDGTITVGITHHAQELLGDIVFVELPEVGANLAAEEQSGVVESVKAASDVYAPIAGEVVAVNDDLPGAPETANSDPYGAGWFFKIKPANPADYDGLLTAEQYAGEVD

SEQ ID NO: 657 - DNA, 387 bp, Neisseria meningitidis serogroup A
  CDS (1)..(387): transl_table=11
atgagcagcaacatcccggcagaactgaaatacgttgccagccacgaatggctgcgccttgaagaagacggtatcatcaccgtcggtattacccaccacgcgcaagagctgttgggcgacatcgtgtttgtcgagctgcctgaagtcggcgcaaaccttgccgccgaagaacaagccggtgtggttgagtctgtaaaagccgcgtccgacgtgtacgcaccgattgcaggtgaagtcgttgccgtcaacgaagatttgccaagcgctccggaaactgccaacagcgatccttacggtgcaggctggttcttcaaactcaaaccggcaaacgttgccgattacgacgttctgctgactgccgaacaatacgcgggcgaagtggattaa

SEQ ID NO: 658 - protein, 128 aa, Neisseria meningitidis serogroup A
MSSNIPAELKYVASHEWLRLEEDGIITVGITHHAQELLGDIVFVELPEVGANLAAEEQAGVVESVKAASDVYAPIAGEVVAVNEDLPSAPETANSDPYGAGWFFKLKPANVADYDVLLTAEQYAGEVD

SEQ ID NO: 659 - DNA, 387 bp, Neisseria meningitidis serogroup B
  CDS (1)..(387): transl_table=11
atgagcaacaacatcccggccgaactgaaatacgttgccagccatgaatggctgcgccttgaagaagacggtacgattaccgtcggcattacccaccacgcgcaagagctgttgggcgacatcgtgttcgtcgagctgcccgaagtcggcgcgaaccttgccgctgaagagcaagccggtgtggttgagtctgtaaaagccgcgtccgacgtgtacgcaccgattgcaggcgaagtcgttgccgtcaacgaagatttgccaagcgctccggaaactgccaacagcgatccttacggtgcaggctggttcttcaaactcaaaccggcaaacgttgccgattacgacagtctgctgactgccgaacaatacgcgggcgaagtggattaa

SEQ ID NO: 660 - protein, 128 aa, Neisseria meningitidis serogroup B
MSNNIPAELKYVASHEWLRLEEDGTITVGITHHAQELLGDIVFVELPEVGANLAAEEQAGVVESVKAASDVYAPIAGEVVAVNEDLPSAPETANSDPYGAGWFFKLKPANVADYDSLLTAEQYAGEVD

SEQ ID NO: 661 - DNA, 390 bp, Nitrosomonas europaea
  CDS (1)..(390): transl_table=11
atgagcgttccggcagaactgaaatatacagaatcacacgaatgggtcagattggaagcagatggcagtgtcacggtaggaattacccagcatgcccaggaattactgggggacatggtattcgttcagttgcccgatgtcgggcgcgcgctggcacagcgtgaagattgcgctgtggtggagtcggtcaaggcagcatcggatatttatgcgccactgggtggagaagtcattgcagtcaactctgaagtggaaacatctccggaaaaaataaacgaggattgctacgcagcctggctgttcaagctcaaaccggccaatgctggtgaagtggatggtctgctcgatgccggcggatatcagaaactgctggatagcgaagcgcattga

SEQ ID NO: 662 - protein, 129 aa, Nitrosomonas europaea
MSVPAELKYTESHEWVRLEADGSVTVGITQHAQELLGDMVFVQLPDVGRALAQREDCAVVESVKAASDIYAPLGGEVIAVNSEVETSPEKINEDCYAAWLFKLKPANAGEVDGLLDAGGYQKLLDSEAH

SEQ ID NO: 663 - DNA, 399 bp, Nocardia farcinica
  CDS (1)..(399): transl_table=11
gtggcagtgacccccgaggatctgcgctacaccgaggagcacgagtgggtccggcggatcggccccacgcgggtccgggtcggcatcaccgactacgcccagtcccagctgggtgacgtcgtgtacgttcagctgccggacgagcagcgcgaggccgccgcgggcgagagtatcgccgaggtggaatcgaccaagagcgtctcggacatctacgccccgctggccgcgaaagtcgttgcggtgaacgaagaactgtccaacgcgccggagacgctgaacgccgatccgtacggtgcgggctggctgttcgagctggaggtggccgatgccgccgcactcgacgtcacgctgggcgaactgctggatgcggcaggttatcaaggagttatcgggggctga

SEQ ID NO: 664 - protein, 132 aa, Nocardia farcinica
MAVTPEDLRYTEEHEWVRRIGPTRVRVGITDYAQSQLGDVVYVQLPDEQREAAAGESIAEVESTKSVSDIYAPLAAKVVAVNEELSNAPETLNADPYGAGWLFELEVADAAALDVTLGELLDAAGYQGVIGG

SEQ ID NO: 665 - DNA, 381 bp, Oceanobacillus iheyensis
  CDS (1)..(381): transl_table=11
atgagtttgccacaagatttattgtattctaaggagcatgaatgggtaaaacaagaagatggaaaattacgcattgggattacagactttgctcaagatgaattaggagacattgtgtttgttgaacttcctgaaattggtgaagaattaaaagtcgatgatccttttggtagtgtagaatctgtaaagacagtatctgagctctatgcacccgtaagtggaaaagtagtcgaaatcaacgatgacttggaagatagcccagagtatgttaatgaatctccatatgaaaaagcttggatgatagtgattgaaccatctgatgaaaaggaacttgaagagctattatccgcagagaattacgaggcatttatacaagactaa

SEQ ID NO: 666 - protein, 126 aa, Oceanobacillus iheyensis
MSLPQDLLYSKEHEWVKQEDGKLRIGITDFAQDELGDIVFVELPEIGEELKVDDPFGSVESVKTVSELYAPVSGKVVEINDDLEDSPEYVNESPYEKAWMIVIEPSDEKELEELLSAENYEAFIQD

SEQ ID NO: 667 - DNA, 498 bp, Pisum sativum
  CDS (1)..(498)
atggcacttaggatgtgggcttcttcaactgccaatgcactcaaactctcctcttcctctagattacatctctcccctaccttttccatctccagatgtttctctaatgttttggatggactcaagtacgcaccttcacatgaatgggtcaagcatgaaggatcagtagccactattggtatcactgaccatgcccaggaccatcttggagaggttgtgtttgtggagcttccagaacctggtgtctcagttacaaagggtaaaggtttcggagctgttgaaagtgtgaaggcaacaagtgatgtaaactctcctatttccggtgaggttatcgaggttaatactgggctcaccggaaagcctggcctcatcaattcaagcccctatgaagatggatggatgataaaaataaagccaactagtccagatgaattagaatccttgttgggtgcaaaagagtacacaaagttttgtgaggaagaagatgctgcacattga

SEQ ID NO: 668 - protein, 165 aa, Pisum sativum
MALRMWASSTANALKLSSSSRLHLSPTFSISRCFSNVLDGLKYAPSHEWVKHEGSVATIGITDHAQDHLGEVVFVELPEPGVSVTKGKGFGAVESVKATSDVNSPISGEVIEVNTGLTGKPGLINSSPYEDGWMIKIKPTSPDELESLLGAKEYTKFCEEEDAAH

SEQ ID NO: 669 - DNA, 393 bp, Photorhabdus luminescens subsp
  CDS (1)..(393): transl_table=11
atgagtaatgtacccgcagagttaaaatatgttgaatcacatgagtgggttcgtgcagaaggtaatgatgaatacacggtaggtattaccgagcatgcacaggagctgctcggtgatatggtttttgttgatttgccggaagtaggtgatcaaatcaatcttggtgatgattgtgcggttgttgaatcagtaaaagcggcttctgatatctatgcaccactgagtggtaaaattattgccgttaatgacgcgctaaatgacgcgcctgaactggttaacagtgagccttatcatgaaggctggctgttccgtattaaagcctctgataaaagtgaactttcgagtttgctgaatgccgaaggatatcaggcacttctggacgaagaagaataa

SEQ ID NO: 670 - protein, 130 aa, Photorhabdus luminescens subsp
MSNVPAELKYVESHEWVRAEGNDEYTVGITEHAQELLGDMVFVDLPEVGDQINLGDDCAVVESVKAASDIYAPLSGKIIAVNDALNDAPELVNSEPYHEGWLFRIKASDKSELSSLLNAEGYQALLDEEE

SEQ ID NO: 671 - DNA, 375 bp, Picrophilus torridus
  CDS (1)..(375): transl_table=11
atgtccagggttccagacaatctttattatacaaaaagccatgaatggtttttaatagaaaatggtgttgcaacggttggaataacagattatgcccagcatcagcttacagatattgtctatgtggattttccaaaaaatggtgagcacaaaaataagggcgaaacacttttaacaatagaatctgttaaatctgccgaggatgtttattctcctgtaacaggagagatcattgaaataaacagggatctggaatcaaaaccagagctgataaacgaggatccatataaaaactggcttgttaaaataaggctttcaaatgataactttgatgggatgtccggtgaggagtacaaaaagtacataggcgaataa

SEQ ID NO: 672 - protein, 124 aa, Picrophilus torridus
MSRVPDNLYYTKSHEWFLIENGVATVGITDYAQHQLTDIVYVDFPKNGEHKNKGETLLTIESVKSAEDVYSPVTGEIIEINRDLESKPELINEDPYKNWLVKIRLSNDNFDGMSGEEYKKYIGE

SEQ ID NO: 673 - DNA, 381 bp, Porphyromonas gingivalis
  CDS (1)..(381): transl_table=11
atgaaaactcctgcagaactgaagtattctaaggatcatgagtgggctcgccaagaaggcgacgttgtcttcatcggtatcacggactatgctcaaggcgaattgggcgaaattgtctatgtggacgttactaccgaaggcgaaacgctcgaggctgatgaggttttcggatcgatcgaagctgtgaagactgtttccgacctgatgatgcctatcgccggcgaggtattggaagtgaaccctgatctggaagagcaacccgaactcgtaaacagcgatccctacggtgccggttggattatcaaggttaaggctgcaaatgctgccgacttcgacaacctcctgagtgctgccgaatacgaaaaactgatagctcaataa

SEQ ID NO: 674 - protein, 126 aa, Porphyromonas gingivalis
MKTPAELKYSKDHEWARQEGDVVFIGITDYAQGELGEIVYVDVTTEGETLEADEVFGSIEAVKTVSDLMMPIAGEVLEVNPDLEEQPELVNSDPYGAGWIIKVKAANAADFDNLLSAAEYEKLIAQ

SEQ ID NO: 675 - DNA, 390 bp, Prochlorococcus marinus
  CDS (1)..(390): transl_table=11
atgatttttgattttccaaaaaagtttcgctttgctgatagtcatgaatatgcctgtcccgaaggagatttagttcgaataggcattagtgcttttgctgtagatcaattaggggacatagtttttgttgatcttcctggaattggcactttgttagaacaaggaatcagttttggctctgtcgagtccgttaaggctgtagaggacatgaatgctccgattggaggggaggtattacaaataaatgaatctgttctaaatagtcctgaagagttgcaaaatgatccacatggagaagggtggctattacttgttaagccttctgatgcaagtcaattagacaaattgatgtcatcagaaatatattctgaaaaagtgtcttcgaaataa

SEQ ID NO: 676 - protein, 129 aa, Prochlorococcus marinus
MIFDFPKKFRFADSHEYACPEGDLVRIGISAFAVDQLGDIVFVDLPGIGTLLEQGISFGSVESVKAVEDMNAPIGGEVLQINESVLNSPEELQNDPHGEGWLLLVKPSDASQLDKLMSSEIYSEKVSSK

SEQ ID NO: 677 - DNA, 405 bp, Pyrococcus furiosus
  CDS (1)..(405): transl_table=11
atgattgaagttggagaatacaaaattaaggaaggtttgtactatacaaaggagcatgaatgggttcaggtcttagaagacggaactgttttagttggtataactgactatgctcaaaaagagttaggagacctggcctatgttgaacttcccgaagtgggaaaggtcgtagagaagggagatgtcctttgtgaagttgagagcgttaaagccgttagtgaagtctatgctcccgtaagtggggaagtaatagaagtgaatgaagaacttgcagatagtccagagaaaataaatgaagatccctatgaagcttggatagccaagattaagccaaagaacttagaagaagagcttaaagagttaatggatgcaaaagcctacgcagaatacttaaagaccctctaa

SEQ ID NO: 678 - protein, 134 aa, Pyrococcus furiosus
MIEVGEYKIKEGLYYTKEHEWVQVLEDGTVLVGITDYAQKELGDLAYVELPEVGKVVEKGDVLCEVESVKAVSEVYAPVSGEVIEVNEELADSPEKINEDPYEAWIAKIKPKNLEEELKELMDAKAYAEYLKTL

SEQ ID NO: 679 - DNA, 417 bp, Pyrococcus horikoshii
  CDS (1)..(417): transl_table=11
gtggtggttgttatgattgaggttggggagtacaaggtcaaggaaggactatactatacaaaggaccatgaatgggctcaggttctagaagatggaaccgtgctcgttggcataactgattatgctcagaaggagcttggagatttagcctatgttgaattacctgaggtaggaaaggaagttagcaagggagacgtgttatgtgaagttgaaagcgttaaggccgtgagcgaagtttacgctcctgtaagtggggaggtcattgaagttaacgaagagctaagtgatagccccgaaaagattaacgaggatccgtatggggcttggatagccaaaataaaaccaaagaacctagaggaagaacttaaagagttaatggatgcagaaaaatacgcggagtacttgaaaactctctaa

SEQ ID NO: 680 - protein, 138 aa, Pyrococcus horikoshii
MVVVMIEVGEYKVKEGLYYTKDHEWAQVLEDGTVLVGITDYAQKELGDLAYVELPEVGKEVSKGDVLCEVESVKAVSEVYAPVSGEVIEVNEELSDSPEKINEDPYGAWIAKIKPKNLEEELKELMDAEKYAEYLKTL

SEQ ID NO: 681 - DNA, 405 bp, Pyrococcus kodakaraensis
  CDS (1)..(405): transl_table=11
atgatcgaagtcggggaatacaaggtcaaggaaggcctctactacacgaaagaccacgagtgggctcaagttcttgatgacggcacggttctcgttggcataagcgattacgcccagaaggagctgggagacctcgcctacgtcgagcttccggaagtcggcaaggaagtcagcaagggcgacgttctctgtgagattgagagcgtcaaggcagtcagcgaggtctacgccccagtcagcggcgaggtcatcgaggtcaacgaggccctcgaggacagccccgagctcctcaacgaggatccctacgagaactggatcgccaagctcaagccgaccaaccttgaggaagagctcaaggagcttatggacgcccaagcctacgccgaatacctgaggagcctttga

SEQ ID NO: 682 - protein, 134 aa, Pyrococcus kodakaraensis
MIEVGEYKVKEGLYYTKDHEWAQVLDDGTVLVGISDYAQKELGDLAYVELPEVGKEVSKGDVLCEIESVKAVSEVYAPVSGEVIEVNEALEDSPELLNEDPYENWIAKLKPTNLEEELKELMDAQAYAEYLRSL

SEQ ID NO: 683 - DNA, 384 bp, Ralstonia solanacearum
  CDS (1)..(384): transl_table=11
atgagcaacacgcccgtagagctgaagtacaccgaatcccacgagtgggtccgcacggaggccgacggcacgctgaccatcggcatcaccgacctggcgcaggagcagctcggcgacatcgtcttcctggagctgccggacaccggccgccaggtcaagcagggtgaagcgattgccgtggtggagtcggtcaaggccgcctccgacatctacgcgccggtgtcgggcgaagtgatcgccagcaacgccgatgccaccgagtcgcccgagtcggtcaatgaagacgcctatgacgcctggctgttcaagatcaagccggccaacgccgacgacgtgaacgccctgctgtcggccgaccagtaccaagccaaagccggggcgtaa

SEQ ID NO: 684 - protein, 127 aa, Ralstonia solanacearum
MSNTPVELKYTESHEWVRTEADGTLTIGITDLAQEQLGDIVFLELPDTGRQVKQGEAIAVVESVKAASDIYAPVSGEVIASNADATESPESVNEDAYDAWLFKIKPANADDVNALLSADQYQAKAGA

SEQ ID NO: 685 - DNA, 378 bp, Rhizobium loti
  CDS (1)..(378): transl_table=11
atgaacctcatggcaaagacctatttcacatcagatcacgaatggctccgcgttgagggcggcatcgccaccgtcggcatcaccgactacgcgcaggagcagctcggcgacctcgtcttcgtcgaactgccggaaacgggcaagaagctgaccaagggcgacaccgccgtcgtggtcgaatccgtcaaggcggcttccgacgtttacgcgccggtcgacggcgagatcaccgaggccaacggcacgctgtcttccgacccgtcgctggtcaactcggcggcaaccggcgccggctggctgtggaagatgaggcttgccgacgaaagccagctcgccggcctcatggatgaggccgcctacaaagcccatatcgcctga

SEQ ID NO: 686 - protein, 125 aa, Rhizobium loti
MNLMAKTYFTSDHEWLRVEGGIATVGITDYAQEQLGDLVFVELPETGKKLTKGDTAVVVESVKAASDVYAPVDGEITEANGTLSSDPSLVNSAATGAGWLWKMRLADESQLAGLMDEAAYKAHIA

SEQ ID NO: 687 - DNA, 363 bp, Rhizobium meliloti
  CDS (1)..(363): transl_table=11
atgctgaaattcaccgaggaacacgaatggctgaagatcgatggcgacgtcgcgaccgtcggcatcacggagcatgccgctggccagctcggcgatcttgtcttcgtggaactgccggaagcgggtgccagcttctccaagggcgactcggccgcgacggtcgagtccgtcaaggcggcttcggacgtctattgtccgcttgatggagaaatcgtcgaggtcaatcaggcgatcgtcgacgatccgtcgctcgtcaacagcgatccgcaaggcgcggcctggttcttcaagctgaagctcgccgatccggacgctgccaatgcgctcctggacgaagcggcctacaaggagttcgtcgcctga

SEQ ID NO: 688 - protein, 120 aa, Rhizobium meliloti
MLKFTEEHEWLKIDGDVATVGITEHAAGQLGDLVFVELPEAGASFSKGDSAATVESVKAASDVYCPLDGEIVEVNQAIVDDPSLVNSDPQGAAWFFKLKLADPDAANALLDEAAYKEFVA

SEQ ID NO: 689 - DNA, 399 bp, Rhodopirellula baltica
  CDS (1)..(399): transl_table=11
atggcacgagacccttcgaccctgcgttatgccgagacccatgagtgggtggacgttcaagaagaaggcggcgacaagttcgcaacgatcggtatctctgcctttgccgtcgaacagctcaacgacttggtctatatggaccttcccgaagttggacgcacactggaagttggcgaagaattcggtgaagtcgaatccgtgaaagcggttagtccgttgtacagcccggttgctggcgaagtcgtcgcagttcacaccgatctgccagacaacttggacaacttgaacgacgatgcgttcgattttggatggattctgaaagtgaaattgtcagcggatctgcctgagacgttgatggactttgccgcttatcaaaaacagtgttccgaagcaggttga

SEQ ID NO: 690 - protein, 132 aa, Rhodopirellula baltica
MARDPSTLRYAETHEWVDVQEEGGDKFATIGISAFAVEQLNDLVYMDLPEVGRTLEVGEEFGEVESVKAVSPLYSPVAGEVVAVHTDLPDNLDNLNDDAFDFGWILKVKLSADLPETLMDFAAYQKQCSEAG

SEQ ID NO: 691 - DNA, 381 bp, Rhodospirillum rubrum
  CDS (1)..(381): transl_table=11
atgagcaaactctatttcaccgaagatcacgaatgggtcagcgtcgatgacgatggcatcggcaccatcggcatcaccgattacgcccagaagcagcttggcgacgtggttttcgtcgaactgcccgaaatcggccgcgagatcgagcgcggcggcgacgccgccgtcgtcgaatcggtcaaggcggccagcgaggtctattcgccggtcagcggcgaggtggtcgaagccaatgacagcctgcccgaggcgccgggacaggtgaacaccgacgccctgggcgacggctggttcttcaaggtgcggctgagcgagccggccgagcttgacgagctgatggatcaagaagcctacgacgccttcgtcggcgagctcgattaa

SEQ ID NO: 692 - protein, 126 aa, Rhodospirillum rubrum
MSKLYFTEDHEWVSVDDDGIGTIGITDYAQKQLGDVVFVELPEIGREIERGGDAAVVESVKAASEVYSPVSGEVVEANDSLPEAPGQVNTDALGDGWFFKVRLSEPAELDELMDQEAYDAFVGELD

SEQ ID NO: 693 - DNA, 393 bp, Saccharophagus degradans
  CDS (1)..(393): transl_table=11
atgagcgaattgcgaagcgaattgaaatacctagagagtcacgagtgggctcgagttgaagaagacggtacggtaactattggtattaccgaccacgctcaagaagccttgggtgatgtagtgtttgtagaagtgccagaggtgggcagccaagtatctattggcgaagaagccggtgtggttgaatctgttaaagctgcttccgatatttactcgcccgtttctggtgaagtaattgccgttaacgaagccttggaagatgcccccgaaactgtaaacagctcgccttacgacgatggttggttctttaaagttaagccagatgatttagatgagctagaaaaagcgctttctatggaagattacaaagctgctattgaaagcgacgactaa

SEQ ID NO: 694 - protein, 130 aa, Saccharophagus degradans
MSELRSELKYLESHEWARVEEDGTVTIGITDHAQEALGDVVFVEVPEVGSQVSIGEEAGVVESVKAASDIYSPVSGEVIAVNEALEDAPETVNSSPYDDGWFFKVKPDDLDELEKALSMEDYKAAIESDD

SEQ ID NO: 695 - DNA, 390 bp, Salmonella arizonae
  CDS (1)..(390): transl_table=11
atgagcaacgtacccgcagaactgaaatacagtaaagaacacgaatggctgcgtaaagaagcggacggcacttacaccgtaggtattactgaacacgctcaggagctattgggcgatatggttttcgttgatctgccggaagtcggcgcaaccgtgagcgcgggcgacgactgcgccgtggcggagtccgtaaaagcggcgtccgacatttatgcgccggtaagcggcgagatcgtggcggtaaatgatgcgctgagcgactcccctgagttggtgaacagcgaaccgtatgccgacggctggatcttcaaaatcaaagccagcaatgaaagcgagctggaatccctgctggatgccaccgcctacgaagccctgctcgaagacgagtaa

SEQ ID NO: 696 - protein, 129 aa, Salmonella arizonae
MSNVPAELKYSKEHEWLRKEADGTYTVGITEHAQELLGDMVFVDLPEVGATVSAGDDCAVAESVKAASDIYAPVSGEIVAVNDALSDSPELVNSEPYADGWIFKIKASNESELESLLDATAYEALLEDE

SEQ ID NO: 697 - DNA, 390 bp, Salmonella choleraesuis
  CDS (1)..(390): transl_table=11
atgagcaacgtacccgcagaactgaaatacagcaaagaacacgaatggctgcgtaaagaagcggatggcacttacaccgttggcattactgaacacgctcaggagctgttgggcgatatggtttttgttgatctgccggaagtcggcgcgaccgtaagcgcgggcgacgactgcgccgtggcggagtccgtaaaagcggcgtccgacatttatgcgccggtaagcggcgagatcgtggcggtaaacgatgcgctgagcgactccccggagctggtgaacagcgaaccgtataccggtggctggatctttaaaatcaaagccagcgatgaaagcgaacttgaatcgctgctggatgccaccgcgtatgaggcattgttagaagacgaataa

SEQ ID NO: 698 - protein, 129 aa, Salmonella choleraesuis
MSNVPAELKYSKEHEWLRKEADGTYTVGITEHAQELLGDMVFVDLPEVGATVSAGDDCAVAESVKAASDIYAPVSGEIVAVNDALSDSPELVNSEPYTGGWIFKIKASDESELESLLDATAYEALLEDE

SEQ ID NO: 699 - DNA, 390 bp, Salmonella paratyphi B
  CDS (1)..(390): transl_table=11
atgagcaacgtacccgcagaactgaaatacagcaaagaacacgaatggctgcgtaaagaagcggatggcacttacaccgttggcattactgaacacgctcaggagctgttgggcgatatggtttttgttgatctgccggaagtcggcgcgaccgtaagcgcgggcgacgactgcgccgtggcggagtccgtaaaagcggcgtccgacatttatgcgccggtaagcggcgagatcgtggcggtaaacgatgcgctgagcgactccccggagctggtgaacagcgaaccgtatgtcggtggctggatctttaaaatcaaagccagcgatgaaagcgaacttgaatcgctgctggatgccaccgcgtatgaggcattgttagaagacgaataa

SEQ ID NO: 700 - protein, 129 aa, Salmonella paratyphi B
MSNVPAELKYSKEHEWLRKEADGTYTVGITEHAQELLGDMVFVDLPEVGATVSAGDDCAVAESVKAASDIYAPVSGEIVAVNDALSDSPELVNSEPYVGGWIFKIKASDESELESLLDATAYEALLEDE

SEQ ID NO: 701 - DNA, 510 bp, Schizosaccharomyces pombe
  CDS (1)..(510)
atgttagctcgttctgcccttcgctctggtttccttccctctcttacctcatctgtaaagaccggtttctgtttgaaggcagcagctcctactttatccatgaaatggagcgcggtaaaatattactcaactaaacactttactaaggaacatgaatgggttaaagtcgatggagatgttggaactgtaggaattacctcttatgctgcgaatgctcttggtgaagttgtattcgttgaattgccagaacctgagactaccgtgagtgtaggtgatggcatcggtgctgttgagtcagtcaagtcggctagtgatgtatattctccagtgtctggtacagttacttctatcaatgaatctcttggtgattcaccagataaggtgagctcgtctcccgaggaagaaggttggatttgcaaaatcaagttatcatcacctgacgaattgaaatcactattaaatgatgaaagttacgctcaattttgcaaggaagaagacgcgtcccattaa

SEQ ID NO: 702 - protein, 169 aa, Schizosaccharomyces pombe
MLARSALRSGFLPSLTSSVKTGFCLKAAAPTLSMKWSAVKYYSTKHFTKEHEWVKVDGDVGTVGITSYAANALGEVVFVELPEPETTVSVGDGIGAVESVKSASDVYSPVSGTVTSINESLGDSPDKVSSSPEEEGWICKIKLSSPDELKSLLNDESYAQFCKEEDASH

SEQ ID NO: 703 - DNA, 390 bp, Shewanella oneidensis
  CDS (1)..(390): transl_table=11
atgagcaatattccgacagaactgaaatacgcctcttcacacgaatggatccgcaaggaagaagacggtagctacactgtgggtatcactgagcacgctcaagagctgttaggtgacatggttttcgttgaactgccagaagtgggtgacactgtcacggcgggcgacgactgtgcagtggcggaatcagtgaaagcggcttctgacatctacgcgccaatctctggtgaagtgattgccgtgaacgaagcactggaagattctccagagctggtaaacagcgacgcttacggcgaaggctggttcttccgcgttatgccttctgacgaatcagaagttgacgcactgctcgatgcagaaggttaccaagctgttatcgacgaagaataa

SEQ ID NO: 704 - protein, 129 aa, Shewanella oneidensis
MSNIPTELKYASSHEWIRKEEDGSYTVGITEHAQELLGDMVFVELPEVGDTVTAGDDCAVAESVKAASDIYAPISGEVIAVNEALEDSPELVNSDAYGEGWFFRVMPSDESEVDALLDAEGYQAVIDEE

SEQ ID NO: 705 - DNA, 390 bp, Shewanella sp
  CDS (1)..(390): transl_table=11
atgagcaatattccgacagaactgaaatacgcctcttcacacgaatggatccgcaaggaagaagacggtagctacactgtgggtatcactgagcatgctcaagagctgttaggtgacatggttttcgttgagctgccagaagtgggcgacactgtcacggcgggcaacgactgtgcagtggctgaatcagtgaaagcggcttctgacatctacgcgccaatctctggtgaagtgattgccgtcaacgaagcactggaagattctccagagctcgtaaacagcgacgcttacggcgaaggctggttcttccgcgttatgccttctgatgaatcagaagttgacgctctgctcgatgcagaaggttaccaagctgtaatcgacgaggaataa

SEQ ID NO: 706 - protein, 129 aa, Shewanella sp
MSNIPTELKYASSHEWIRKEEDGSYTVGITEHAQELLGDMVFVELPEVGDTVTAGNDCAVAESVKAASDIYAPISGEVIAVNEALEDSPELVNSDAYGEGWFFRVMPSDESEVDALLDAEGYQAVIDEE

SEQ ID NO: 707 - DNA, 381 bp, Staphylococcus aureus
  CDS (1)..(381): transl_table=11
ttggcagtaccaaatgaattgaaatattcaaaagagcatgaatgggttaaagttgaaggtaatgtagcaacaattggaatcacagaatacgcacaaagcgagttaggtgatattgttttcgttgaattaccagaaacagatgatgaaattaatgaaggggatacgtttggtagcgtagaatcagttaaaactgtatcagaattatatgcaccaatctctggtaaagtagttgaagtcaacgaagaactagaagatagtcccgaatttgtaaatgaatctccatacgaaaaagcatggatggtaaaagtagaaattagtgatgaaagtcagattgaagctttattaacagctgaaaaatattcagaaatgattggtgaataa

SEQ ID NO: 708 - protein, 126 aa, Staphylococcus aureus
MAVPNELKYSKEHEWVKVEGNVATIGITEYAQSELGDIVFVELPETDDEINEGDTFGSVESVKTVSELYAPISGKVVEVNEELEDSPEFVNESPYEKAWMVKVEISDESQIEALLTAEKYSEMIGE

SEQ ID NO: 709 - DNA, 381 bp, Staphylococcus epidermidis
  CDS (1)..(381): transl_table=11
gtggcagtaccgagcgaatttaaatattctaaagagcatgagtgggttaaaattgaaaataatgtagcaacaattggtattacagaatacgcacaaaacgaattaggtgatatcgtatttgttgagctacctgaaactgacgatgaattaaatgaaggtgacacattcggtagtgtggaatcagtaaaaacagtatcagagttgtatgcgccaatttctgggaaaattgttgaagttaatgaagaattggaagatagcccagaatttgtaaatgaatcgccatacgaaaaagcatggatggttaaaattgaaattagtgacgatagtcaattagaagaattattatcagcagatcaatactcagaaatgattggtgaataa

SEQ ID NO: 710 - protein, 126 aa, Staphylococcus epidermidis
MAVPSEFKYSKEHEWVKIENNVATIGITEYAQNELGDIVFVELPETDDELNEGDTFGSVESVKTVSELYAPISGKIVEVNEELEDSPEFVNESPYEKAWMVKIEISDDSQLEELLSADQYSEMIGE

SEQ ID NO: 711 - DNA, 381 bp, Staphylococcus epidermidis
  CDS (1)..(381): transl_table=11
gtggcagtaccgagcgaatttaaatattctaaagagcatgagtgggttaaaattgaaaataatgtagcaacagttggtattacagaatacgcacaaaacgaattaggtgatatcgtatttgttgagctacctgaaactgacgatgaattaaatgaaggtgacacattcggtagtgtggaatcagtaaaaacagtatcagagttgtatgcgccaatttctgggaaaattgttgaagttaatgaagaattggaagatagcccagaatttgtaaatgaatcgccatacgaaaaagcatggatggttaaaattgaaattagtgacgatagtcaattagaagaattattatcagcagatcaatactcagaaatgattggtgaataa

SEQ ID NO: 712 - protein, 126 aa, Staphylococcus epidermidis
MAVPSEFKYSKEHEWVKIENNVATVGITEYAQNELGDIVFVELPETDDELNEGDTFGSVESVKTVSELYAPISGKIVEVNEELEDSPEFVNESPYEKAWMVKIEISDDSQLEELLSADQYSEMIGE

SEQ ID NO: 713 - DNA, 378 bp, Streptomyces avermitilis
  CDS (1)..(378): transl_table=11
atgagcaacccccagcagctgcgctacagcaaggagcacgagtggctgtcgggcgccgaggacggcgtctcgacggtcggcatcacggagcacgcggccaacgcgctcggcgatgtcgtgtacgtccagctcccggaggtcggtgacacggtgaccgcgggcgagacctgcggcgagctggagtcgaccaagtcggtcagcgacctgtactcccccgtgacgggcgaggtcgtcgaggccaaccaggacgtggtggacgacccgtcgctggtgaactccgctccgttcgagggtggctggctgttcaaggtacgcgtcgcggaggagccgaaggacctgctctccgcggacgagtacaccgagttctccggctcttaa

SEQ ID NO: 714 - protein, 125 aa, Streptomyces avermitilis
MSNPQQLRYSKEHEWLSGAEDGVSTVGITEHAANALGDVVYVQLPEVGDTVTAGETCGELESTKSVSDLYSPVTGEVVEANQDVVDDPSLVNSAPFEGGWLFKVRVAEEPKDLLSADEYTEFSGS

SEQ ID NO: 715 - DNA, 378 bp, Streptomyces coelicolor
  CDS (1)..(378): transl_table=11
atgagcaacccccagcagctgcgctacagcaaggagcacgagtggctgtcgggcgccgaggacggcgtctcgacggtcggcatcacggagcacgcggccaacgcgctcggtgacgtcgtcttcgtccagctccccgaggtcggcgactcggtgaccgcgggcgagacctgcggcgaactggagtcgaccaagtccgtctccgacctgtactcccccgtctccggtgagatcaccgaggtcaacgaggacgtcgtcaacgacccgtcgctggtgaacagcgcccccttcgagggcggctggctgttcaaggtgcggatcacggacgagccggccgacctgctctccgccgacgagtacaccgccttcgccggcgcctga

SEQ ID NO: 716 - protein, 125 aa, Streptomyces coelicolor
MSNPQQLRYSKEHEWLSGAEDGVSTVGITEHAANALGDVVFVQLPEVGDSVTAGETCGELESTKSVSDLYSPVSGEITEVNEDVVNDPSLVNSAPFEGGWLFKVRITDEPADLLSADEYTAFAGA

SEQ ID NO: 717 - DNA, 390 bp, Synechococcus sp
  CDS (1)..(390): transl_table=11
atggcgttcgcgttccccgactcttttcgcttcgccgacagccacgagtacgccaatgccgatggtgagctggtgcgagtgggcatcagtgccttcgccgttgatcagctgggcgacatcgtgtttgtggatctgccggatgtgggcgccagcctggcgaagggcaccagctttggctcggtggagtcagtgaaggctgtggaagacatgtatgcaccgattgctggtgaggtggtgcaacgcaatgaagcggtgctggccagtccggaggagctgcagaacgacccccacggtgagggctggctgctggtgctgcgtccgtcggaccccgccgagctcgacagcctgatgaccgctgaggcctacggcgccaaggtcaacgccggctga

SEQ ID NO: 718 - protein, 129 aa, Synechococcus sp
MAFAFPDSFRFADSHEYANADGELVRVGISAFAVDQLGDIVFVDLPDVGASLAKGTSFGSVESVKAVEDMYAPIAGEVVQRNEAVLASPEELQNDPHGEGWLLVLRPSDPAELDSLMTAEAYGAKVNAG

SEQ ID NO: 719 - DNA, 375 bp, Thermoplasma acidophilum
  CDS (1)..(375): transl_table=11
ttgatcatgacagaggtaccagagggtttgaactacacgaagacgcacgaatggtacagaaaggatggaaacacagcgaccataggaataactgattatgctcagtcccagatgacggatatagtctacgtcgatcttccaaaggttggggataagaagaaggccggagacgttcttctgacaatagaatccgtgaaatcagcagaggatgtttattccccaataacaggaacggtaaccgccgtaaacgaagaggtcgcaaagcatccggaatcaataaacaaggatccttacggcagctggctggtcaagatggccattgagagtgagggagaacacctgtctgcatcggagtacaggaagttaatacaatga

SEQ ID NO: 720 - protein, 124 aa, Thermoplasma acidophilum
MIMTEVPEGLNYTKTHEWYRKDGNTATIGITDYAQSQMTDIVYVDLPKVGDKKKAGDVLLTIESVKSAEDVYSPITGTVTAVNEEVAKHPESINKDPYGSWLVKMAIESEGEHLSASEYRKLIQ

SEQ ID NO: 721 - DNA, 381 bp, Thermobifida fusca
  CDS (1)..(381): transl_table=11
ttgagcgttcccgcggagctgggttacaccaaggagcacgagtgggtggcgatcaacgaagggatcgctaccgtcggcatcacagccttcgctgccgaagcgctgggagacattgtctacgtcgaaccgccggaagtcggttcgaccgtcaccgccggtgaaagctgcggtgagatcgaatctcacaagtcggtcagcgagctctattctccggttgacggtgaggttgtcgatgtcaaccaggctgcggtggacgaccccgagttgatcggctccgacccttacggccggggctggttgttcaaggtggagctcgctgaggagcccgccgatttgctcaccccggagcagtacacacagctcaccgaaggtgaaggttag

SEQ ID NO: 722 - protein, 126 aa, Thermobifida fusca
MSVPAELGYTKEHEWVAINEGIATVGITAFAAEALGDIVYVEPPEVGSTVTAGESCGEIESHKSVSELYSPVDGEVVDVNQAAVDDPELIGSDPYGRGWLFKVELAEEPADLLTPEQYTQLTEGEG

SEQ ID NO: 723 - DNA, 375 bp, Thermotoga maritima
  CDS (1)..(375): transl_table=11
ttgaagatgaaaaagtacacgaaaactcacgaatgggtgtcgattgaggacaaagtagcaacggttggaataacgaatcacgctcaggaacagctcggcgatgtggtctacgtggatcttcctgaagtcggcagagaggtgaagaaaggggaagttgtggcgagtatagagtctgtgaaagccgcagcggacgtgtacgctcctctcagtgggaagatcgtggaagtgaacgagaaactcgatactgaacctgaactcataaacaaggatccagaaggagaaggctggcttttcaaaatggaaatatccgatgaaggcgaactcgaagatcttctggatgaacaggcttatcaggaattctgtgctcaggagtag

SEQ ID NO: 724 - protein, 124 aa, Thermotoga maritima
MKMKKYTKTHEWVSIEDKVATVGITNHAQEQLGDVVYVDLPEVGREVKKGEVVASIESVKAAADVYAPLSGKIVEVNEKLDTEPELINKDPEGEGWLFKMEISDEGELEDLLDEQAYQEFCAQE

SEQ ID NO: 725 - DNA, 387 bp, Thermus thermophilus
  CDS (1)..(387): transl_table=11
atggacatacccaaggaccgcttctataccaagacccacgagtgggccctgcccgaaggcgacacggtgctcgtcggcatcaccgactacgcccaggacgccctcggcgacgtggtttacgtggagctacccgaggtgggccgggtggtggagaagggcgaggcggtggccgtggtggagagcgtgaagaccgcttccgacatctacgcccccgtggccggggagatcgtggaggtcaacctcgccctggagaagacccctgagctcgtcaaccaggacccctacggggagggctggatcttccgcctgaagcccagagacatgggcgacctggacgagctcttggacgccgagggctaccaggaggtcctggaaagcgaagcctag

SEQ ID NO: 726 - protein, 128 aa, Thermus thermophilus
MDIPKDRFYTKTHEWALPEGDTVLVGITDYAQDALGDVVYVELPEVGRVVEKGEAVAVVESVKTASDIYAPVAGEIVEVNLALEKTPELVNQDPYGEGWIFRLKPRDMGDLDELLDAEGYQEVLESEA

SEQ ID NO: 727 - DNA, 369 bp, Thermoplasma volcanium
  CDS (1)..(369): transl_table=11
atgaccaacgttcctgatggtttgaaatacacaaagacgcacgagtggtacaaggttgataacggtattgcgactgtaggaataacagattatgctcagtctcagatgactgatatagtttatgtcgatcttcctgaggtgggcgataagaagaaggttggtgatgtacttcttacaatagaatccgtaaaatcagcagaagatgtttactctcccctaacgggggagatcactgaggtgaatcaggaattaaccaagcatccagaaaatataaacaaggacccctatggaaactggctcgttaagatgaaagtcgagaaggagggggaatacctaactgctgaacagtacaggaaattgattcaatga

SEQ ID NO: 728 - protein, 122 aa, Thermoplasma volcanium
MTNVPDGLKYTKTHEWYKVDNGIATVGITDYAQSQMTDIVYVDLPEVGDKKKVGDVLLTIESVKSAEDVYSPLTGEITEVNQELTKHPENINKDPYGNWLVKMKVEKEGEYLTAEQYRKLIQ

SEQ ID NO: 729 - DNA, 390 bp, Thiobacillus denitrificans
  CDS (1)..(390): transl_table=11
atgtccatccccgcagacctcaaatacacgcagagccacgaatgggtacgcgccgaagccgacggcagcgtcacggtaggcatcacccaccacgcccaggacctcctcggcgacatggtgttcatcgagaacccggccgtcggccgcacgctcgccaagggcgaagagtgcgccgtcgtcgagtcggtgaaggccgcatccgacgtctatgcgccggtcgccggcgaagtaatcgccgccaacggcgaagtcgaatccagccccgagtcggtgaaccaggacgcctacaccgcgtggctgttcaagatcaagccggccaaccccgccgacgtcgacgcactgctcgacgccgcggcgtaccagaaggtggtcgagtcggaagcacattga

SEQ ID NO: 730 - protein, 129 aa, Thiobacillus denitrificans
MSIPADLKYTQSHEWVRAEADGSVTVGITHHAQDLLGDMVFIENPAVGRTLAKGEECAVVESVKAASDVYAPVAGEVIAANGEVESSPESVNQDAYTAWLFKIKPANPADVDALLDAAAYQKVVESEAH

SEQ ID NO: 731 - DNA, 369 bp, Treponema denticola
  CDS (1)..(369): transl_table=11
atggaaattaaagaagatgtaaaatacttggaatcacacgaatggttcaagaaagaaggaaacatcggtattatcggtatcagtgattatgcccaaagcgaaatgggagatgtcgtattcatcgagcttcctgaagtaggggatgaagttacagctgacaaggcctgtgctacggtagaatccgtaaaggcagttttcgaaatcatcagccccatgacaggaaaggttgttgaaataaacgaagagcttttagatgctcccgaaaaaatcaatgaagatgccttcggttcttggttctttaaggtagaacttaagggagaatcttcaaaattaatggatgcaggtaaatacaaaggtctctgcaaataa

SEQ ID NO: 732 - protein, 122 aa, Treponema denticola
MEIKEDVKYLESHEWFKKEGNIGIIGISDYAQSEMGDVVFIELPEVGDEVTADKACATVESVKAVFEIISPMTGKVVEINEELLDAPEKINEDAFGSWFFKVELKGESSKLMDAGKYKGLCK

SEQ ID NO: 733 - DNA, 396 bp, Trichodesmium erythraeum
  CDS (1)..(396): transl_table=11
atgacactagaatttccagatgaccttaaatattctgactcccatgaatatgtgaggatggatggggaaattgccactgttggtattagtgcctatgctatcgaccagttgggggatattgtatttatcgagcttccagaagtgggagacagtatagaaaaagaagaaccatttggcactattgaatctgtgaaagcagtggaagatcttaaagctcctgtcactggtacagtaatagagcgtaatgaagatatattagatgagcatgagaaattatcagaagacccatacatagaaggttggttattgaaagtgcgtgttaaagaccctgatgaattaaatggagatgatatttactctgctgatgattatcgtaaacttgtagaaggagagtaa

SEQ ID NO: 734 - protein, 131 aa, Trichodesmium erythraeum
MTLEFPDDLKYSDSHEYVRMDGEIATVGISAYAIDQLGDIVFIELPEVGDSIEKEEPFGTIESVKAVEDLKAPVTGTVIERNEDILDEHEKLSEDPYIEGWLLKVRVKDPDELNGDDIYSADDYRKLVEGE

SEQ ID NO: 735 - DNA, 366 bp, Tropheryma whipplei
  CDS (1)..(366): transl_table=11
gtgttcgatgaaagtgacctggtctacagcaaggaacatgagtgggtttttatcgatgatgatattgcctgggttggtattacaaaatatgccgtgaaaaaacttggcgatattgtctacattgaccttccatcgcaagatgctcttatagttcagggtgagtgtgttggggaaattgagtcaactaaatccgtcagcgaaatatactcgcctgtttccggaagggttatagcagttaatgaggatgttatttcgtcccccggattattgaactcagattcctctgtgtggcttttcaaagctgagtgtgaaaatattccagaattgatggactggggccagtacagcgaatacacgaaagaatag

SEQ ID NO: 736 - protein, 121 aa, Tropheryma whipplei
MFDESDLVYSKEHEWVFIDDDIAWVGITKYAVKKLGDIVYIDLPSQDALIVQGECVGEIESTKSVSEIYSPVSGRVIAVNEDVISSPGLLNSDSSVWLFKAECENIPELMDWGQYSEYTKE

SEQ ID NO: 737 - DNA, 381 bp, Vibrio parahaemolyticus
  CDS (1)..(381): transl_table=11
atggacaaaacactgaagtttacagatagccacgagtgggtacgtgacaacggtgacggcacagtgacaatcggtatttctgagcatgcgcaagaaatgttgggtgacgtagtattcgttgacctgccagacgtggaagacgaagtagaagctggcgaaagcttctctttggttgagtctgtaaaagcggcttcagacatctactcaccagtaaccggtgaagtagttgaaatcaacgaagagctagaagacagcccagagctaatcaacgaagaaccatacgaaggtggctggatcgtgaaagtgaaactttctgacccatctgagttggatgacttaaaagatgcggaagaatacctaagctctatcgaagaagagtaa

SEQ ID NO: 738 - protein, 126 aa, Vibrio parahaemolyticus
MDKTLKFTDSHEWVRDNGDGTVTIGISEHAQEMLGDVVFVDLPDVEDEVEAGESFSLVESVKAASDIYSPVTGEVVEINEELEDSPELINEEPYEGGWIVKVKLSDPSELDDLKDAEEYLSSIEEE

SEQ ID NO: 739 - DNA, 381 bp, Vibrio vulnificus
  CDS (1)..(381): transl_table=11
atggacaaaacactgaagtttacagaaagccacgagtgggttcgcgacaacggtgacggcactgtaactatcggtatctctgagcacgctcaagaaatgctgggtgatgtggtattcgtcgagctacctgagcttgaagcggaaatcgaagcaggtgaaagcttttcactggttgaatccgtaaaagcggcgtcagacatctacgcaccagtaaccggtgaagtcgttgaagtgaatgaagagctttctgatagcccagagctaatcaacgaggaaccgtacgaaggcggttggattgttaaggtgaaactgtctgatccttcagagcttgataatctgaaagatgcagaagagtacctaaactcaatcgaagaagattaa

SEQ ID NO: 740 - protein, 126 aa, Vibrio vulnificus
MDKTLKFTESHEWVRDNGDGTVTIGISEHAQEMLGDVVFVELPELEAEIEAGESFSLVESVKAASDIYAPVTGEVVEVNEELSDSPELINEEPYEGGWIVKVKLSDPSELDNLKDAEEYLNSIEED

SEQ ID NO: 741 - DNA, 396 bp, Xanthomonas axonopodis pv
  CDS (1)..(396): transl_table=11
atgagcgagatccctggcgacctcaagttcctcaaatcccacgagtgggcccgcgtcgagagcaacggtcgcgtgaccgtcggcatttccgaccacgcgcagggcttgctgggtgacctggtttacgtcgaattgccaggtgtcggcgacaccgtgcaggtcggcaacggcgctgcggtggtggaatcggtcaaggccgcctccgacgtctacagcccggtcagcggcaccgtcgtcgaggtcaacagcgcgttgagcgacaagccggaaaccatcaacgaagacgcctacggcgaaggctggatcttcgtcgtcgagatcgacgacaaggaacagctcaacgacctgttggacccggacgactatgccgagctgctcgaagacgacgatcactga

SEQ ID NO: 742 - protein, 131 aa, Xanthomonas axonopodis pv
MSEIPGDLKFLKSHEWARVESNGRVTVGISDHAQGLLGDLVYVELPGVGDTVQVGNGAAVVESVKAASDVYSPVSGTVVEVNSALSDKPETINEDAYGEGWIFVVEIDDKEQLNDLLDPDDYAELLEDDDH

SEQ ID NO: 743 - DNA, 435 bp, Xylella fastidiosa
  CDS (40)..(435): transl_table=11
ttggttaaactatctcctccttcccgatgtacttcttccatgagcgatatccctggcgacctcaagttcctcaaatcccacgaatgggtccggatcgaagacaacaatcgtgccatcgttggtatttccgaccatgcacaaaatctgctcggtgatctggtgtatgtcgaattacccaatattggcgatcacctggacgctggcaccaccgctgcagtcattgagtcggtcaaggcagcctcagatatctacagtccagtcaccggcaaagtgattgaagtcaatactacgttaagcgacaaacctgagacgatcaatgaagatccctacggtgaaggctggattatggtcattgagatgcaagcccctgaggagattagtgatctactttctcccgatgattacaccaaagtgctggaaagtgacgaacattga

SEQ ID NO: 744 - protein, 131 aa, Xylella fastidiosa
MSDIPGDLKFLKSHEWVRIEDNNRAIVGISDHAQNLLGDLVYVELPNIGDHLDAGTTAAVIESVKAASDIYSPVTGKVIEVNTTLSDKPETINEDPYGEGWIMVIEMQAPEEISDLLSPDDYTKVLESDEH

SEQ ID NO: 745 - DNA, 477 bp, Oryza sativa; identical to SEQ ID NO: 477
  CDS (1)..(477)

SEQ ID NO: 746 - protein, 158 aa, Oryza sativa
MAMAASRLLWASRAASYLKISTFPRAFSTVLKDLKYADTHEWVKVEGDSATVGITDHAQHHLGDVVYVELPEVGSSVSQGKNFGAVESVKATSDIYSPVSGEVVAVNDGLGDEPGLVNTSPYESGWIIKVKVSDSGELNSLMDDAKYSKFCEEEDSKH

SEQ ID NO: 747 - DNA, 483 bp, Oryza sativa
  CDS (1)..(483)
atggccgccgccgccgccgcctcaagggcgctctgggcttgccgcaccgcctcctaccttcggatctcctccttccccagggctttctccaccgtccttaaagatctaaaatatgctgatactcatgagtgggtgaaggttgagggtgattcagcaaccataggggtcacagaccatgctcaggaccatttgggtgatgttgtgtatgttgagcttccagaagttggttccacagtatcacaaggaacgaactttggtgcggttgaaagtgtgaaagcaaccagtgatatcaatgcaccagtatctggagagattattcaagtaaatgatgaactaagtgaaaaaccaggatttataaatggaagtccatatgagaagggatggatcatcaaggttaagataagtgatccaagtgagttaaactcgctgatggatgatgagaagtacaagaagttttgtgaggaagaagatggcaaacactga

SEQ ID NO: 748 - protein, 160 aa, Oryza sativa
MAAAAAASRALWACRTASYLRISSFPRAFSTVLKDLKYADTHEWVKVEGDSATIGVTDHAQDHLGDVVYVELPEVGSTVSQGTNFGAVESVKATSDINAPVSGEIIQVNDELSEKPGFINGSPYEKGWIIKVKISDPSELNSLMDDEKYKKFCEEEDGKH

SEQ ID NO: 749 - DNA, 495 bp, Oryza sativa
  CDS (1)..(495)
atggctctgaggctgtgggctagctcagctgccaatgccctcaagatctcatgcagtggagccaccagggctgcacctgcctactcaatctccagatacttctccactgttcttgatgggttgaagtacagctcctctcatgagtgggtcaagaatgatggctctgtggccacaattggaattacagaccatgctcagggccatctgggagaggtggtgttcgtggagctgccggaggcgggggcgaaggtgagccagggaggtgcattcggcaacgtggagagtgtgaaggccaccagcgacatcaactcccccatctccggtgaggtcgtcgaggttaacgacaagctctctgagacacccggcctgattaactcaagcccgtacgaggacgggtggatgatcaaggtgaagccgagcagcccgtcggagctggacgccctgctggacccggccaagtacaccaagcactgcgaggaggaagacgctcactag

SEQ ID NO: 750 - protein, 164 aa, Oryza sativa
MALRLWASSAANALKISCSGATRAAPAYSISRYFSTVLDGLKYSSSHEWVKNDGSVATIGITDHAQGHLGEVVFVELPEAGAKVSQGGAFGNVESVKATSDINSPISGEVVEVNDKLSETPGLINSSPYEDGWMIKVKPSSPSELDALLDPAKYTKHCEEEDAH

SEQ ID NO: 751 - DNA, 945 bp, Zea mays
  CDS (170)..(649)
gcacgaggttagttttgcgaattcggaggcgcagcgccaccaacttgcaccattttggcaaccccgcagggacaaaagaaaggcgaaacgaggccaccagctcaccgccgagcggaagcggcgccgagcaaccaacccctctcctcgtccgccgccgtctccccggaccatggccatggccgccgcctcctcccggctgttctgggcgtcccgcgccgccgcctacctcaggatctccaccttccccagggccttcgccaccgtgctgaaggatctgaagtatgctgacactcatgaatgggtgaaagttgagggtgattcagcaaccgtggggattactgaccatgcccaggatcatttgggtgatgttgtttttgtggagctaccagaagttggcatcagtgtatcccagggaaagaactttggtgctgttgagagtgtgaaggcaaccagcgatatcaattcaccagtgtctggagaggtggttgaagtgaacgagaaactaagtgaggagcctggattggttaatgcaagtccatatgagaagggatggattatcaaggtcaagctcagcaattcaggtgacctcaattcgctcatggatgatgataagtactcgaaattctgtgaagaagaagacaaccattgaagaaatcagagtgtcttctaaacaccaggacctgtttttcaagctttatcactggttatggtctggagaccagctgtgacaaattggcaaggttcatcgcaaggaataaatgttaggatttgccaatcctacaagggcatgggaaatccaagtttgtgttgtcaatgacgtggtcatatttgatatttctttgtagttgtaatctcgtgaattccttcttttttcttaaaaaaagtactctttttgattccttccaaaaaaaaaaaaaaaaaaaaaactcgagactagtctcgtgc

SEQ ID NO: 752 - protein, 159 aa, Zea mays
MAMAAASSRLFWASRAAAYLRISTFPRAFATVLKDLKYADTHEWVKVEGDSATVGITDHAQDHLGDVVFVELPEVGISVSQGKNFGAVESVKATSDINSPVSGEVVEVNEKLSEEPGLVNASPYEKGWIIKVKLSNSGDLNSLMDDDKYSKFCEEEDNH

SEQ ID NO: 753 - DNA, 959 bp, Zea mays
  CDS (147)..(629)
cattgggtacctcgaggccggccgggaaacaaggccacaccaccagctgaccgccgaacggaacgagcccggcgggcggaagggagagagcgcgccagagcggcgccgaacaaccctcgtccaccgcactctcctggaccgtggccatggccatggccgccgcgtcccgatcccgggcgctgtgggcgtcccgcgccgccgcctacctcaggatctccaccttccccagggccttctccaccgtgctgaaggatctgaaatatgctgacactcatgaatgggtgaaggttgagggcgattcagcaaccgtggggattactgaccatgcccaggatcatctgggtgatgttgtctacgtggagctgccagaagttggcgtcagtgtatcccaggggaagaacttcggtgctgtcgagagcgtgaaggcgaccagtgatatcaattcaccagtgtccggagaggtggttgaggtgaaccggaagctaagcgaggagcctgggttggtgaacgcaagcccgtacgagaaggggtggattatcaaggtcaagctcagcgattcaggcgagctcagttcgctcatggatggtgacaagtactcgaaattctgcgaggaagaagacggtcattgaagaaatcagagggtcttctgaacaccaaggacctgtgtctcaagctctatcactgctttctggtctggagacctgctgtgacaaatttaaattggcaaggttcattgcatggaataaattagttaggatttgccctattctaccagggcttgggaaatccgagcttgtgttgtgagtggcgtggtcaagtttgattatctctttttagttgtaatctcgtgatttccttcttttttttaaaaaaaaatatttatctttttgattccgtgctagtatgcaaatttcttggtccttttgcgaatggttcggcgttcattactgtgcgcggcc

SEQ ID NO: 754 - protein, 160 aa, Zea mays
MAMAAASRSRALWASRAAAYLRISTFPRAFSTVLKDLKYADTHEWVKVEGDSATVGITDHAQDHLGDVVYVELPEVGVSVSQGKNFGAVESVKATSDINSPVSGEVVEVNRKLSEEPGLVNASPYEKGWIIKVKLSDSGELSSLMDGDKYSKFCEEEDGH

SEQ ID NO: 755 - DNA, 471 bp, Brassica napus
  CDS (1)..(471)
atggctgctaggtttttgtgggcttctagggctgcttctcatctaaggatctccgttgcccagcgagggtttgcttccgtggtgttgaaggatttgaaatatgctgattcacatgaatgggtgaagattgatgggaataaagcgacgtttggtataacggatcacgcgcaggaccacttgggcgatgtggtctatgttgagcttcctgatctgggacgttcggtgtcacaaggtgagagctttggagcggttgaaagtgtgaaagcaactagtgatatcaattctccagtctctggtaaggtggttgaagtcaatgaggtgctgaccgagtcccctggattggtgaacacgagcccatatgaagaaggatggatcataaaggtggagctgagtgatgcgggcgaggtagagaagctgatggattcagacaagtactctaagttctgtgaagaagaggacgccaagcactga

SEQ ID NO: 756 - protein, 156 aa, Brassica napus
MAARFLWASRAASHLRISVAQRGFASVVLKDLKYADSHEWVKIDGNKATFGITDHAQDHLGDVVYVELPDLGRSVSQGESFGAVESVKATSDINSPVSGKVVEVNEVLTESPGLVNTSPYEEGWIIKVELSDAGEVEKLMDSDKYSKFCEEEDAKH

SEQ ID NO: 757 - DNA, 495 bp, Triticum aestivum
  CDS (1)..(495)
atggctcttaggctgtgggcaagctcagctgccaatgccctcaagatttcaagcagcggcgccagggctgctgccccggcttattcgatctccagatacttctccaccgttattgatggcttgaagtacacttcctcccacgagtgggtcaagaacgacggctccgtggccacgattggcatcagtgaccacgcccagggccatctcggggaggtggtgttcgtggagctgccggaggcaggcacgaaggtgagccagggcggagccttcggcaacgtggagagtgtgaaggccaccagcgacgtcaactcgcccatctccggcgaggtcgtcgacgtcaactcaaagctgtccgagacccccggcctgatcaactcgagcccgtacgaggatgggtggatgatcaaggtgaagccaagcagcccggcggagctggagggcctgctggactcggccaagtacaccaagcactgcgaggaggaggacgcccactag

SEQ ID NO: 758 - protein, 164 aa, Triticum aestivum
MALRLWASSAANALKISSSGARAAAPAYSISRYFSTVIDGLKYTSSHEWVKNDGSVATIGISDHAQGHLGEVVFVELPEAGTKVSQGGAFGNVESVKATSDVNSPISGEVVDVNSKLSETPGLINSSPYEDGWMIKVKPSSPAELEGLLDSAKYTKHCEEEDAH

SEQ ID NO: 759 - DNA, 495 bp, Zea mays
  CDS (1)..(495)
atggctctgaggatgtgggcgagctcagccgccaatgcgctcaagctctcggcgggcggcgccggagcccgggctgctgccttctctatctccaggttcttctccactgttcacgatgggttgaagtacactcagtctcacgaatgggtcaagacgacgggcgacgtcgccaccgttggcatcacggaccatgctcagggccacctgggagaggtggtgttcgtggagctgccggaacccggcacgaaggtggccgcgggaggacccttcggcaacgtggagagcgtgaaggccaccagcgacgtcaactccccgatctccggcgaggtcgtcgaggtcaatgccaaactgtcagagacgcccggcctgatcaacacgagcccgtacgaggacgggtggatgatcaaagtgaagccgagcagcccgggggaggcggacgccctgctggacgccgccaagtacaccaagcactgcgaggaggaagacgctcactag

SEQ ID NO: 760 - protein, 164 aa, Zea mays
MALRMWASSAANALKLSAGGAGARAAAFSISRFFSTVHDGLKYTQSHEWVKTTGDVATVGITDHAQGHLGEVVFVELPEPGTKVAAGGPFGNVESVKATSDVNSPISGEVVEVNAKLSETPGLINTSPYEDGWMIKVKPSSPGEADALLDAAKYTKHCEEEDAH

SEQ ID NO: 761 - DNA, 477 bp, Hordeum vulgare
  CDS (1)..(477)
atggccatggccgcctccagatcgctctgggcctcccgcgccgcctccttcctcaggatctccaccttccccagggccttctccaccgtgctgaaggacttgaagtatgctgacacccatgaatgggtgaaggttgagggtgattcggcaaccgttgggattacagaccatgcccaggaccatttgggtgatgttgtgtatgtggagctgccagaagtaggtgcttctgtaactcagggaacgaactttggtgccgtcgaaagtgtgaaggcaaccagtgatatcaactcaccggtgtctggagaggtcattgctgtgaatgatgaactactagagaaaccagcattggtcaatggagatccatatgagggcggctggataatcaaggtcaaggtcagcaatgcaggtgagctcaactcgctgatggatgacgagaagtactcgaaattctgcgaggaagaggacagcaagcattaa

SEQ ID NO: 762 - protein, 158 aa, Hordeum vulgare
MAMAASRSLWASRAASFLRISTFPRAFSTVLKDLKYADTHEWVKVEGDSATVGITDHAQDHLGDVVYVELPEVGASVTQGTNFGAVESVKATSDINSPVSGEVIAVNDELLEKPALVNGDPYEGGWIIKVKVSNAGELNSLMDDEKYSKFCEEEDSKH

SEQ ID NO: 763 - DNA, 468 bp, Helianthus annuus
  CDS (1)..(468)
atggcatcaagactctgggcatctaaagctgcttcatacctcaagatctctaccttcaacttcaacagaggctttgcttccgtggtgaaggatttgaagtatgctgagtctcacgaatgggtcaaagtagatggtaagtcagccaccgttggcatcacagaccatgcccaggatcacctaggagacgtggtctacgttgaattaccagaggttggagccgctgtgactcaaggcagcagttttggtgcggtggagagcgtaaaggccactagcgatattaattcccctgtttcaggaaaggttgttgaagtcaatgaagagctcactagctcacctggcttggttaatggaagcccgtatgagaatggttggatcataaaggtggagataagtgacactaatgaggtaaactcgttaatggactctgaacagtattcaaagttctgtgaagaagaagataatcactag

SEQ ID NO: 764 - protein, 155 aa, Helianthus annuus
MASRLWASKAASYLKISTFNFNRGFASVVKDLKYAESHEWVKVDGKSATVGITDHAQDHLGDVVYVELPEVGAAVTQGSSFGAVESVKATSDINSPVSGKVVEVNEELTSSPGLVNGSPYENGWIIKVEISDTNEVNSLMDSEQYSKFCEEEDNH

SEQ ID NO: 765 - DNA, 471 bp, Helianthus annuus
  CDS (1)..(471)
atggctatggcatcatcaaggttatgggcttccaaagctgcttcatacctcaggatctccactttcaacagaccttttgcaactcttgtgaaggatctaaagtatgctgactcacatgaatgggcaaaaatcgaaggtaactcagcaaccatcgggattacagaccatgcccaggatcacttgggtgatgtggtgtatgttgagttaccagaagttgggacagaagtaacccaaggcaacggttttggtgcagttgaaagcgttaaggctaccagtgatattaactcccctgtttctggcaaagtggtccaagtcaatgaagaactcaacacctcaccaggcttggtaaatggaagcccgtatgagaatggatggattataaaggtggagatgagcaatgtggatgaagtcaaatctctaatggacagtgaacagtattctaagttctgtgaagaagaagatgaccactga

SEQ ID NO: 766 - protein, 156 aa, Helianthus annuus
MAMASSRLWASKAASYLRISTFNRPFATLVKDLKYADSHEWAKIEGNSATIGITDHAQDHLGDVVYVELPEVGTEVTQGNGFGAVESVKATSDINSPVSGKVVQVNEELNTSPGLVNGSPYENGWIIKVEMSNVDEVKSLMDSEQYSKFCEEEDDH

SEQ ID NO: 767 - DNA, 471 bp, Brassica napus
  CDS (1)..(471)
atggctgcaagattcttgtgggcttccagagtcgcttctcatctaaggatctccatcgcccaacgagggtttgcgtcagtggttttgaaggatctgaagtatgctgagtcacatgaatgggtgaagattgatgggaacaaagcaacctttggtataacggatcacgcgcaggaccacttgggtgatgtggtctatgttgagttgcctgacttgggacgttccgtgtcacaaggtgagagctttggagcggttgagagtgtgaaagctaccagtgatatcaattctccagtctccggtaaggtggttgaagtcaatgaggtgctgagcgagtcccctggattggtgaacacgagcccgtatgaagatggatggatcataaaggtggagctgagtgatgcagaagaggcaaagaagctgatggattctgacaagtactccaagttctgcgaagaagaagacaccaagcactga

SEQ ID NO: 768 - protein, 156 aa, Brassica napus
MAARFLWASRVASHLRISIAQRGFASVVLKDLKYAESHEWVKIDGNKATFGITDHAQDHLGDVVYVELPDLGRSVSQGESFGAVESVKATSDINSPVSGKVVEVNEVLSESPGLVNTSPYEDGWIIKVELSDAEEAKKLMDSDKYSKFCEEEDTKH

SEQ ID NO: 769 - DNA, 501 bp, Brassica napus
  CDS (1)..(501)
atggcactgagaatgtgggcttcctctacagcaaacgctcttaagctctcttcttctacctccaaatctcatctccttcctgctttctccatctccagatgcttctcctcagtgttggaaggactcaagtatgcaaattcacacgagtgggtgaaacatgatggctcggtggctaccattggcatcactgaccatgcccaggaccatctaggagaagttgtgtttgtggagctgccagaagagaaaagctcagtgagcaaagaaaagaactttggagctgtggagagtgtgaaggccacaagtgagattctatctccaatctctggtgaagtcattgaggttaacacaaagctaaccgattcacctggtttgatcaactcaagcccctatgaagatggttggatgataaaggtgaaaccaagcaaccctgcagagttggaaaccttgatgggtccaaaggaatacaccaagttctgcgaagaggaagatgctgctcactag

SEQ ID NO: 770 - protein, 166 aa, Brassica napus
MALRMWASSTANALKLSSSTSKSHLLPAFSISRCFSSVLEGLKYANSHEWVKHDGSVATIGITDHAQDHLGEVVFVELPEEKSSVSKEKNFGAVESVKATSEILSPISGEVIEVNTKLTDSPGLINSSPYEDGWMIKVKPSNPAELETLMGPKEYTKFCEEEDAAH

SEQ ID NO: 771 - DNA, 471 bp, Brassica napus
  CDS (1)..(471)
atggctgctaggtttttgtgggcttctagggctgcttctcatctaaggatctccgttgcccagcgagggtttgcttccgtggtgttgaaggatttgaaatatgctgattcacatgaatgggtgaagattgatgggaataaagcgacgtttggtataacggatcacgcgcaggaccacttgggcgatgtggtctatgttgagcttcctgatctgggacgttcggtgtcacaaggtgagagctttggagcggttgaaagtgtgaaagcaactagtgatatcaattctccagtctctggtaaggtggttgaagtcaatgaggtgctgacggagtcccctggattggtgaacacgagcccatatgaagaaggatggatcataaaggtggagctgagtgatgcgggaaaggcaaaaaagctgatggattcagacaagtactctaagttctgtgaagaagaggacgccaagccctga

SEQ ID NO: 772 - protein, 156 aa, Brassica napus
MAARFLWASRAASHLRISVAQRGFASVVLKDLKYADSHEWVKIDGNKATFGITDHAQDHLGDVVYVELPDLGRSVSQGESFGAVESVKATSDINSPVSGKVVEVNEVLTESPGLVNTSPYEEGWIIKVELSDAGKAKKLMDSDKYSKFCEEEDAKP

SEQ ID NO: 773 - DNA, 471 bp, Brassica napus
  CDS (1)..(471)
atggctgcaagattcttgtgggcttccagggttgcttctcatctaaggatctccatcgcccaacgagggtttgcgtcagtggttttgaaggatctgaagtatgctgagtcacatgaatgggtgaagattgatgggaacaaagcaacctttggtataacggatcacgctcaggaccacttgggtgatgtggtctatgttgagttgcctgacttgggacgttccgtgtcacaaggtgagagctttggagcggttgagagtgtgaaagctaccagtgatatcaattctccagtctccggtaaggtggttgaagtcaatgaggtgctgagcgagtcccctggattggtgaacacgagcccgtatgaagatggatggatcataaaggtggagctgagtgatgcagaagaggcaaagaagctgatggattctgacaagtactccaagttctgcgaagaagaagacgccaagcactga

SEQ ID NO: 774 - protein, 156 aa, Brassica napus
MAARFLWASRVASHLRISIAQRGFASVVLKDLKYAESHEWVKIDGNKATFGITDHAQDHLGDVVYVELPDLGRSVSQGESFGAVESVKATSDINSPVSGKVVEVNEVLSESPGLVNTSPYEDGWIIKVELSDAEEAKKLMDSDKYSKFCEEEDAKH

SEQ ID NO: 775 - DNA, 501 bp, Brassica napus
  CDS (1)..(501)
atggcactgagaatgtgggcttcctctacagcaaacgctctcaagctctcttcttctgcctccaaatctcatctccttccagctttctccatctctagatgcttctcctcagtgttggaaggacttaaatatgcaaattcacatgagtgggtgaaacatgaaggctcagtggctactattggcatcagtgaccatgcccaggatcatttaggagaagttgtgtttgtggagctgcctgaagaaaaaagttcagtgaccaaagaaaaaaactttggagcagtggaaagtgtgaaggcaacaagtgagattatatctccaatctctggtgaagtcatcgaggttaacacaaagctcgctgattcacctggcttgattaactcaagcccttacgaagatggttggatgataaaggtgaaaccaagcaaccccgcagagctggaatccttgatgggtccaaaggaatacaccaagttctgcgaagaggaagatgctgctcactag

SEQ ID NO: 776 - protein, 166 aa, Brassica napus
MALRMWASSTANALKLSSSASKSHLLPAFSISRCFSSVLEGLKYANSHEWVKHEGSVATIGISDHAQDHLGEVVFVELPEEKSSVTKEKNFGAVESVKATSEIISPISGEVIEVNTKLADSPGLINSSPYEDGWMIKVKPSNPAELESLMGPKEYTKFCEEEDAAH

SEQ ID NO: 777 - DNA, 501 bp, Brassica napus
  CDS (1)..(501)
atggcactgagaatgtgggcttcttctacagcaaacgctctcaagctttcttcttctgtctccaagtctcagctctctcctgctttctccatctctagatgcttctcttcagtgctggagggattgaagtatgcaaattcacatgagtgggttaaacatgaaggctctgttgccactattggtattactgaccatgctcaggaccatttaggagaagtggtgtttgtggaactgccagaggaaaatggttcggtgagaaaagagaaaagctttggagctgtggagagtgtgaaggcgacaagtgagattttatctcccatctcaggtgaagtcattgaggttaacaagacgctctcagaagcaccaggcttgatcaactcaagcccctatgaagatggatggatgatcaaagtgaagccgagcaacccctcagagttagaatctttgatgggttcaaaggaatacaccaagttctgtgaagaggaagacgctgctcattag

SEQ ID NO: 778 - protein, 166 aa, Brassica napus
MALRMWASSTANALKLSSSVSKSQLSPAFSISRCFSSVLEGLKYANSHEWVKHEGSVATIGITDHAQDHLGEVVFVELPEENGSVRKEKSFGAVESVKATSEILSPISGEVIEVNKTLSEAPGLINSSPYEDGWMIKVKPSNPSELESLMGSKEYTKFCEEEDAAH

SEQ ID NO: 779 - DNA, 501 bp, Brassica napus
  CDS (1)..(501)
atggcactgagaatgtgggcttcctctacagcaaacgctcttaagctctcttcttctacctccaaatctcatctccttcctgctttctccatctccagatgcttctcctcagtgttggaaggactcaagtatgcaacttcacacgagtgggtgaaacatgatggctcggtggctaccattggcatcactgaccatgcccaggaccatctaggagaagttgtgtttgtggagctgccagaagagaaaagctcagtgagcaaagaaaagaactttggagctgtggagagtgtgaaggcaacaagtgagattctatctccaatctctggtgaagtcattgaggttaacacaaagctaaccgattcacctggtttgatcaactcaagcccctatgaagatggttggatgataaaggtgaaaccaagcaaccctgcagagttggaaaccttgatgggttcaaaggaatacaccaagttctgcgaagaggaagatgctgctcactag

SEQ ID NO: 780 - protein, 166 aa, Brassica napus
MALRMWASSTANALKLSSSTSKSHLLPAFSISRCFSSVLEGLKYATSHEWVKHDGSVATIGITDHAQDHLGEVVFVELPEEKSSVSKEKNFGAVESVKATSEILSPISGEVIEVNTKLTDSPGLINSSPYEDGWMIKVKPSNPAELETLMGSKEYTKFCEEEDAAH

SEQ ID NO: 781 - DNA, 501 bp, Brassica napus
  CDS (1)..(501)
atggcactgagaatgtgggcttcttccacagcaaacgctctcaagctctcctcttctgcttccaaatcccatctccttccagctttctccatctccagatgcttctcctcagtgttggaaggactcaagtatgcaaattcacatgagtgggtcaaacatgaaggctcagtggctaccattggcatcagtgaccatgcccaggaccatttaggagaagttgtgtttgtggagctgccagaagagaaaagttcagtgagcaaagaaaaaaactttggagcagtggagagtgtaaaggccacaagtgagattatatctccaatctctggtgaagtcattgaggttaacacaaagctcgccgattcacctggtttgattaactcaagcccctatgaagaaggttggatgataaaggtgaaaccaagcaacccagcagagttggaatccttgatgggtccaaaggaatacacaaagttctgcgaagaggaagacgcggctcactag

SEQ ID NO: 782 - protein, 166 aa, Brassica napus
MALRMWASSTANALKLSSSASKSHLLPAFSISRCFSSVLEGLKYANSHEWVKHEGSVATIGISDHAQDHLGEVVFVELPEEKSSVSKEKNFGAVESVKATSEIISPISGEVIEVNTKLADSPGLINSSPYEEGWMIKVKPSNPAELESLMGPKEYTKFCEEEDAAH

SEQ ID NO: 783 - DNA, 468 bp, Glycine max
  CDS (1)..(468)
atggcttgcagacagttgtgggcttcaagagctgcttcctacctcaggatctccgtgtttcacagaagcttctctaacgttttgaatgatctgaagtatgctgattctcatgagtgggtgaaggttgatggaaattctgcaactgttggcataactgatcatgcccaagatcatttgggtgaggttgtgtatgttgaattgcctgaagtgggagccaccgtgacacaaggagaaggttttggtgcagctgaaagtgtgaaggcaactagtgatattaactctcctgtttcaggaaaagtggtcgaagttaatgaaaaacttaccagttctcctgctttggtcaacacaagcccttacaaagatggatggataattaaagtggagatgagtgacagtggtgaactaaacaacctgatggattcagaaaagtactccaagttctgtgaagaagaagattccaaccattga

SEQ ID NO: 784 - protein, 155 aa, Glycine max
MACRQLWASRAASYLRISVFHRSFSNVLNDLKYADSHEWVKVDGNSATVGITDHAQDHLGEVVYVELPEVGATVTQGEGFGAAESVKATSDINSPVSGKVVEVNEKLTSSPALVNTSPYKDGWIIKVEMSDSGELNNLMDSEKYSKFCEEEDSNH

SEQ ID NO: 785 - DNA, 498 bp, Glycine max
  CDS (1)..(498)
atggcactcaggatgtgggcttcttccactgccaatgcactcaaactctcttctgtctccagacctcatctcttgcctcctttttctttctccagatgcttatcttccgtcttggatggacttaagtacgctgattcacatgaatgggtcaagcacgaaggctcagtcgccaccattggtatcactgaccatgcccaggaccatcttggagaggttgtgtatgtggagctgccagaaccaggtggcacagtttccaagaagtctggcttcggagccgttgaaagtgttaaagcaacaagtgatataaactctccaatctcgggggagatcgttgaggttaacaaaaagctcacagaaacgcctggcctggtcaactcaagcccatacgaagatggatggatgatcaaagtaaagccaagcgatccatctgaattagattccttgatgggtccaaaggagtacacaaaattttgtgaggaagaagatgcaagtcattaa

SEQ ID NO: 786 - protein, 165 aa, Glycine max
MALRMWASSTANALKLSSVSRPHLLPPFSFSRCLSSVLDGLKYADSHEWVKHEGSVATIGITDHAQDHLGEVVYVELPEPGGTVSKKSGFGAVESVKATSDINSPISGEIVEVNKKLTETPGLVNSSPYEDGWMIKVKPSDPSELDSLMGPKEYTKFCEEEDASH

SEQ ID NO: 787 - DNA, 468 bp, Glycine max
  CDS (1)..(468)
atggcttgcaggcaattgtgggcttcaagagctgcctcttacctgaggatctctgtgtttcacagaggcttttctaatgttgttaaagatttgaagtatgctgattctcatgagtgggtgaaagttgatgaaaattctgcaaccgtcggcataactgatcatgcccaagatcatttaggtgatgttgtatatgttgaattgccagaagtgggagcagctgtaacacaaggaggtagttttggtgcagttgaaagtgtgaaggcaactagtgacattaactctcctgtttcaggaaaagttgttgaagttaatgaagcgcttaacagctctcctgctttgatcaattcaagcccttataaagatggatggataattaaagttgaaataaatgacaatggtgaactaaacaacttgatggattcagatcaatactccaaattctgtgaagaagaagattccaagcactga

SEQ ID NO: 788 - protein, 155 aa, Glycine max
MACRQLWASRAASYLRISVFHRGFSNVVKDLKYADSHEWVKVDENSATVGITDHAQDHLGDVVYVELPEVGAAVTQGGSFGAVESVKATSDINSPVSGKVVEVNEALNSSPALINSSPYKDGWIIKVEINDNGELNNLMDSDQYSKFCEEEDSKH

SEQ ID NO: 789 - DNA, 498 bp, Glycine max
  CDS (1)..(498)
atggcactcaggatgtgggcttcttccactgccaatgcactcaaactctcttctgtctccagacctcatctcttgcctcctttttctttctccagatgcttatcttccgtcttggatggacttaagtacgctgattcacatgaatgggtcaagcacgaaggctcagtcgccaccattggtatcactgaccatgcccaggaccatcttggagaggttgtgtatgtggagctgccagaaccaggtggcacagtttccaagaagtctggcttcggagccgttgaaagtgttaaagcaacaagtgatataaactctccaatctcgggggagatcgttgaggttaacaaaaagctcacagaaacgcctggcctgatcaactcaagcccatacgaagatggatggatgatcaaagtaaagccaagcgatccatctgaattagattccttgatgggtccaaaggagtacacatcattttgtgaggaagaagatgcaagtcattaa

SEQ ID NO: 790 - protein, 165 aa, Glycine max
MALRMWASSTANALKLSSVSRPHLLPPFSFSRCLSSVLDGLKYADSHEWVKHEGSVATIGITDHAQDHLGEVVYVELPEPGGTVSKKSGFGAVESVKATSDINSPISGEIVEVNKKLTETPGLINSSPYEDGWMIKVKPSDPSELDSLMGPKEYTSFCEEEDASH

SEQ ID NO: 791 - DNA, 468 bp, Helianthus annuus
  CDS (1)..(468)
atggcatcaagactctgggcatctaaagctgcttcatacctcaagatctctaccttcaacttcaacagaggctttgcttccgtggtgaaggatttgaagtacgccgagtctcacgaatgggtcaaagtcgatggtaagtcagccaccgttggcatcacagaccatgcccaggatcacctaggagacgtggtctatgtcgaattaccggaggttggagccgctgtgacccaaggcagcagtttcggcgcagtcgagagtgtaaaggccaccagtgatattaattcccctgtttcaggaaaggttgttgaagtcaatgaagagctcagtagctcacctggcttggttaatggaagcccgtatgagaatggttggatcataaaggtggagataagtgacactaatgaggtaaactcgttaatggactcggaacagtattcaaagttctgtgaagaagaagataatcactag

SEQ ID NO: 792 - protein, 155 aa, Helianthus annuus
MASRLWASKAASYLKISTFNFNRGFASVVKDLKYAESHEWVKVDGKSATVGITDHAQDHLGDVVYVELPEVGAAVTQGSSFGAVESVKATSDINSPVSGKVVEVNEELSSSPGLVNGSPYENGWIIKVEISDTNEVNSLMDSEQYSKFCEEEDNH

SEQ ID NO: 793 - DNA, 495 bp, Hordeum vulgare
  CDS (1)..(495)
atggctctgaggctgtgggcgagctcagctgccaatgccctcaagatttcaagcagcggcgccagggccgctgcccccgcctactcgatctccagatacttctccactgttattgatggcttgaagtacacttcctcccacgagtgggtcaagaacgacggctccgtggccacgattggcatcagtgaccacgcccagggccatctcggggaggtggtgttcgtggagctgccggaggccggcacgaaggtgagccagggcggagccttcggcaacgtggagagtgtgaaggccaccagcgacgtcaactcgcccatctccggcgaggtcgtcgaggtcaactcgaagctgtccgaggcccccggcctgatcaactcgagcccgtacgaggaggggtggatgatcaaggtgaagccgagcagccccgcggagctggagggcctgctggactcggccaattacaccaagcactgcgaggaggaggacgcccactag

SEQ ID NO: 794 - protein, 164 aa, Hordeum vulgare
MALRLWASSAANALKISSSGARAAAPAYSISRYFSTVIDGLKYTSSHEWVKNDGSVATIGISDHAQGHLGEVVFVELPEAGTKVSQGGAFGNVESVKATSDVNSPISGEVVEVNSKLSEAPGLINSSPYEEGWMIKVKPSSPAELEGLLDSANYTKHCEEEDAH

SEQ ID NO: 795 - DNA, 495 bp, Hordeum vulgare
  CDS (1)..(495)
atggctctgaggctgtgggcgagctcagctgccaatgccctcaagatttcaagcagcggcgccagggccgctgcccccgcctactcgatctccagatacttctccactgttattgatggcttgaagtacacttcctcccacgagtgggtcaagaacgacggctccgtggccacgattggcatcagtgaccacgcccagggccatctcggggaggtggtgttcgtggagctgccggaggccggcacgaaggtgagccagggcggagccttcggcaacgtggagagtgtgaaggccaccagcgacgtcaactcgcccatctccggcgaggtcgtcgaggtcaactcgaagctgtccgaggcccccggcctgatcaactcgagcccgtacgaggaggggtggatgatcaaggtgaagccgagcagccccgcggagctggagggcctgctggactcggccaagtacaccaagcactgcgaggaggaggacgcccactag

SEQ ID NO: 796 - protein, 164 aa, Hordeum vulgare
MALRLWASSAANALKISSSGARAAAPAYSISRYFSTVIDGLKYTSSHEWVKNDGSVATIGISDHAQGHLGEVVFVELPEAGTKVSQGGAFGNVESVKATSDVNSPISGEVVEVNSKLSEAPGLINSSPYEEGWMIKVKPSSPAELEGLLDSAKYTKHCEEEDAH

SEQ ID NO: 797 - DNA, 492 bp, Linum usitatissimum
  CDS (1)..(492)
atggcactaagaatatgggcatcttcaactgctaatgctttgcgactctcagttgcctccaaagctcctgctttctcttccctctccagatgcttctccactgtaatggatggagttaagtacgcaaagtcacacgagtgggtgaagcatgatggttctgtggctcttgttggcatcactgatcacgctcaggatcatcttggggaagttgtgttcgtggagttgccggagagtgggagttcagtgagccaaggaggaagctttgctaacattgagagtgttaaagctaccagtgatgtcaactccccaatttcaggggacattgttgaagttaacaccaagctcactgaaaccccaggactggtgaactcaagcccatatgaagatgggtggatgataaaggtgaagccaagcaacccagcagagttggagagcttgatgggtccaaccgaatacaccaaattctgtgatgaagaagatgctgctcattga

SEQ ID NO: 798 - protein, 163 aa, Linum usitatissimum
MALRIWASSTANALRLSVASKAPAFSSLSRCFSTVMDGVKYAKSHEWVKHDGSVALVGITDHAQDHLGEVVFVELPESGSSVSQGGSFANIESVKATSDVNSPISGDIVEVNTKLTETPGLVNSSPYEDGWMIKVKPSNPAELESLMGPTEYTKFCDEEDAAH

SEQ ID NO: 799 - DNA, 495 bp, Triticum aestivum
  CDS (1)..(495)
atggctctgaggctgtgggcaagctcagctgccaatgccctcaagatttcaagcagcggcgccagggccgctgccccggcctactcgatctccagatacttctccaccgttattgatggcttgaagtacacttcctcccacgagtgggtcaagaacgacggctccgtggccacgattggcatcagtgaccacgcccagggccatctcggggaggtggtgttcgtggagctgccggagaccggcacgaaggtgagccagggtggggccttcggcaacgtggagagtgtgaaggccaccagcgacgtcaactcgcccatctccggcgaggtcgtcgaggtcaattcgaagctgtccgagaccccgggcctgatcaactcgagcccgtacgaggaggggtggatgatcaaggtgaagccgagcagcccggcggagctggagggcctgctggactcggccaagtacaccaagcactgcgaggaggaggacgcccactag

SEQ ID NO: 800 - protein, 164 aa, Triticum aestivum
MALRLWASSAANALKISSSGARAAAPAYSISRYFSTVIDGLKYTSSHEWVKNDGSVATIGISDHAQGHLGEVVFVELPETGTKVSQGGAFGNVESVKATSDVNSPISGEVVEVNSKLSETPGLINSSPYEEGWMIKVKPSSPAELEGLLDSAKYTKHCEEEDAH

SEQ ID NO: 801 - DNA, 477 bp, Triticum aestivum
  CDS (1)..(477)
atggccatggccgcctccagatcgctctgggcctcccgcgccgcctcctacctcaagatctccgccttccccagggccttctccaccgtgctgaaggatctgaagtatgctgaaacccatgaatgggtgaaggttgatggtgattccgcaaccgttgggattacagaccatgcccaggaccatttgggtgatgttgtgtatgtggagctgccagaagttggcgcctctgtatcccagggaacgaactttggtgctgttgaaagtgtgaaggcaaccagtgacatcaactcgccggtgtctggagaggtcattgcagtgaatgatgaactactagagaaaccagcattggtcaatggagatccatatgagggcggctggatcatcaaggtcaaggtcagcgatgcaggtgagctcaattcactgatggatgacaagaagtactcaaaattctgcgaggaagaggacagcaagcattaa

SEQ ID NO: 802 - protein, 158 aa, Triticum aestivum
MAMAASRSLWASRAASYLKISAFPRAFSTVLKDLKYAETHEWVKVDGDSATVGITDHAQDHLGDVVYVELPEVGASVSQGTNFGAVESVKATSDINSPVSGEVIAVNDELLEKPALVNGDPYEGGWIIKVKVSDAGELNSLMDDKKYSKFCEEEDSKH

SEQ ID NO: 803 - DNA, 495 bp, Triticum aestivum
  CDS (1)..(495)
atggctctgaggctgtgggcgagctcagctgccaatgccctcaagatttcaagcagcggcgccagggctgctgccccggcttattcgatctccagatacttctccaccgttattgatggcttgaagtacacttcctcccacgagtgggtcaagaacgacggctccgtggccacgattggcatcagtgaccacgcccagggccatctcggggaggtggtgttcgtggagctgccggaggccggcacgaaggtgagccagggcggagccttcggcaacgtggagagtgtgaaggccaccagcgacgtcaactcgcccatctccggcgaggtcgtcgaggtcaactcaaagctgtccgagacccccggcctgatcaactcgagcccgtacgaggaggggtggatgatcaaggtgaagccgagcagcccggcggagctggagggcctgctggactcggccaagtacaccaagcactgcgaggaggaggacgcccactag

SEQ ID NO: 804 - protein, 164 aa, Triticum aestivum
MALRLWASSAANALKISSSGARAAAPAYSISRYFSTVIDGLKYTSSHEWVKNDGSVATIGISDHAQGHLGEVVFVELPEAGTKVSQGGAFGNVESVKATSDVNSPISGEVVEVNSKLSETPGLINSSPYEEGWMIKVKPSSPAELEGLLDSAKYTKHCEEEDAH

SEQ ID NO: 805 - DNA, 477 bp, Triticum aestivum
  CDS (1)..(477)
atggccatggccgcctccagatcgctctgggcctcccgcgccgcctcctacctcaagatctccgccttccccagggccttctccaccgtgctgaaggatctgaagtatgctgaaacccatgaatgggtcaaggttgatggtgattccgcaatcgttgggattacagaccatgcccaggaccatttgggtgatgttgtgtatgtggagctgccagaagttggcgcctctgtctcccagggaaccaactttggtgctgttgaaagtgtgaaggcaaccagcgacatcaactcgccggtgtctggagaggtcattgcagtgaatgatgaactactagagaaaccagcattggtcaatggagatccatatgcgggcggctggatcatcaaggtcaaggtcagcgatgcaggtgagctcaactcactgatggaccacaagaagtactcgaaattctgcgaggaagaggacagcaagcattaa

SEQ ID NO: 806 - protein, 158 aa, Triticum aestivum
MAMAASRSLWASRAASYLKISAFPRAFSTVLKDLKYAETHEWVKVDGDSAIVGITDHAQDHLGDVVYVELPEVGASVSQGTNFGAVESVKATSDINSPVSGEVIAVNDELLEKPALVNGDPYAGGWIIKVKVSDAGELNSLMDHKKYSKFCEEEDSKH

SEQ ID NO: 807 - DNA, 495 bp, Triticum aestivum
  CDS (1)..(495)
atggctctgaggctgtgggcgagctcagctgtcaatgccctcaagatttcaagcaggggtgccagggctgttgccccggcctattcgatctccagatacttctccactgttattgatggcttgaagtacacttcctcccacgagtgggtcaagaacgacggctccgtggccacgattggcatcagtgaccacgcccagggccatctcggggaggtggtgttcgtggagctgccggaggccggcaccaaggtgagccagggcggaaccttcggcaacgtggacagtgtgaaggccaccatcgacgtctactcgcccatctccggcgaggtcgtcgaggtcaactcaaagctgtccgagacccccggccttatcaactcgagcccttacgaagaggggtggatgatcaaggtgaagccgatcagcccggcggagctggagggcctgctggactcggccaagtacaccaagcactgcgaggaggaggacgcccactag

SEQ ID NO: 808 - protein, 164 aa, Triticum aestivum
MALRLWASSAVNALKISSRGARAVAPAYSISRYFSTVIDGLKYTSSHEWVKNDGSVATIGISDHAQGHLGEVVFVELPEAGTKVSQGGTFGNVDSVKATIDVYSPISGEVVEVNSKLSETPGLINSSPYEEGWMIKVKPISPAELEGLLDSAKYTKHCEEEDAH

SEQ ID NO: 809 - DNA, 480 bp, Zea mays
  CDS (1)..(480)
atggccatggccgccgcctcctcccggctgctctgggcgtcccgcgccgccgcctacctcaggatctccaccttccccagggccttctccaccgtgctgaaggatctgaagtatgctgacactcatgaatgggtgaaagttgagggtgattcagcaaccgtggggattactgaccatgcccaggatcatttgggtgatgttgtttttgtggagctaccagaagttggcatcagtgtatcccagggaaagaactttggtgctgttgagagtgtgaaggcaaccagcgatatcaattcaccagtgtctggagaggtggttgaagtgaacgagaaactaagtgaggagcctggattggttaatgcaagtccatatgagaagggatggattatcaaggtcaagctcagcaattcaggtgacctcaattcgctcatggatgatgataagtactcgaaattctgtgaagaagaagacaaccattga

SEQ ID NO: 810 - protein, 159 aa, Zea mays
MAMAAASSRLLWASRAAAYLRISTFPRAFSTVLKDLKYADTHEWVKVEGDSATVGITDHAQDHLGDVVFVELPEVGISVSQGKNFGAVESVKATSDINSPVSGEVVEVNEKLSEEPGLVNASPYEKGWIIKVKLSNSGDLNSLMDDDKYSKFCEEEDNH

SEQ ID NO: 811 - DNA, 480 bp, Zea mays
  CDS (1)..(480)
atggccatggccgccgcctcctcccggctgctctgggcgtcccgcgccgccgcctacctcaggatctccaccttccccagggccttctccaccgtgctgaaggatctgaagtatgctgacactcatgaatgggtgaaagttgagggtgattcagcaaccgtggggattactgaccatgcccaggaccatttgggtgatgttgtttatgtggagctaccagaagctggcatcagtgtatcccagggaaagaactttggtgctgttgagagtgtgaaggcaaccagcgatatcaattcaccagtgtctggagaggtggttgaagtgaacgagaaactaagtgaggagcctggattggtgaatgcaagtccatatgagaagggatggattatcaaggtcaagctcagcaattcaggtgacctcaattcgctcatggatgatgataagtactcgaaattctgcgaggaagaagacggtcattga

SEQ ID NO: 812 - protein, 159 aa, Zea mays
MAMAAASSRLLWASRAAAYLRISTFPRAFSTVLKDLKYADTHEWVKVEGDSATVGITDHAQDHLGDVVYVELPEAGISVSQGKNFGAVESVKATSDINSPVSGEVVEVNEKLSEEPGLVNASPYEKGWIIKVKLSNSGDLNSLMDDDKYSKFCEEEDGH

SEQ ID NO: 813 - DNA, 507 bp, Zea mays
  CDS (1)..(507)
atggctctgaggatgtgggcgagctcagccgccaatgcgctcaagctctcggcgggcggcggcggagcccgggctgctgctgccggcccggccttctctatctccaggttcttctccactgttcacgatgggttgaagtacactcagtctcacgaatgggtcaagacgacgggcgacgtcgccaccgttggcatcacggaccatgctcagggccacctgggagaggtggtgttcgtggagctgccggaacccggcacgaaggtcgccgcgggaggacccttcggcaacgtggagagtgtcaaggccaccagcgacgtcaactccccgatctccggcgaggtcgtcgaggtcaatgccaaactgtcagagacgcccggcctgatcaacacgagcccgtacgaggacgggtggatgatcaaggtgaagccgagcagcccgggggaggcggacgccctgctggacgccgccaagtacaccaagcactgcgaggaggaagacgctcactag

SEQ ID NO: 814 - protein, 168 aa, Zea mays
MALRMWASSAANALKLSAGGGGARAAAAGPAFSISRFFSTVHDGLKYTQSHEWVKTTGDVATVGITDHAQGHLGEVVFVELPEPGTKVAAGGPFGNVESVKATSDVNSPISGEVVEVNAKLSETPGLINTSPYEDGWMIKVKPSSPGEADALLDAAKYTKHCEEEDAH

SEQ ID NO: 815 - DNA, 23 bp, Artificial sequence
  primer
atgagcaacgtaccagcagaact

SEQ ID NO: 816 - DNA, 22 bp, Artificial sequence
  primer
ttactcgtcttctaacaatgct

SEQ ID NO: 817 - protein, 164 aa, Artificial sequence
  consensus sequence
  Variant (2)..(4): Xaa in position 2 to 4 is any amino acid
  Variant (8)..(14): Xaa in position 8 to 14 is any amino acid
  Variant (15)..(21): Xaa in position 15 to 21 is any or no amino acid
  Variant (24)..(26): Xaa in position 24 to 26 is any amino acid
  Variant (29)..(30): Xaa in position 29 to 30 is any amino acid
  Variant (34)..(34): Xaa in position 34 is any amino acid
  Variant (36)..(36): Xaa in position 36 is any amino acid
  Variant (38)..(38): Xaa in position 38 is any amino acid
  Variant (41)..(41): Xaa in position 41 is any amino acid
  Variant (42)..(42): Xaa in position 42 is any or no amino acid
  Variant (44)..(54): Xaa in position 44 to 54 is any amino acid
  Variant (55)..(56): Xaa in position 55 to 56 is any or no amino acid
  Variant (61)..(62): Xaa in position 61 to 62 is any amino acid
  Variant (64)..(67): Xaa in position 64 to 67 is any amino acid
  Variant (69)..(70): Xaa in position 69 to 70 is any amino acid
  Variant (72)..(76): Xaa in position 72 to 76 is any amino acid
  Variant (78)..(79): Xaa in position 78 to 79 is any amino acid
  Variant (81)..(83): Xaa in position 81 to 83 is any amino acid
  Variant (85)..(90): Xaa in position 85 to 90 is any amino acid
  Variant (91)..(127): Xaa in position 91 to 127 is any or no amino acid
  Variant (129)..(131): Xaa in position 129 to 131 is any amino acid
  Variant (132)..(136): Xaa in position 132 to 136 is any or no amino acid
  Variant (138)..(148): Xaa in position 138 to 148 is any amino acid
  Variant (149)..(157): Xaa in position 149 to 157 is any or no amino acid
  Variant (159)..(163): Xaa in position 159 to 163 is any amino acid
YXXXHEWXXXXXXXXXXXXXXGIXXXAQXXLGDXVXVXLPXXGXXXXXXXXXXXXXESVKXXSXXXXPXXGXXXXXNXXLXXXPXXXXXXXXXXXXXXXXXXXXXXXXXXXXXXXXXXXXXXXXXXXPXXXXXXXXWXXXXXXXXXXXXXXXXXXXXLXXXXXY

SEQ ID NO: 818 - protein, 18 aa, Artificial sequence
  protein pattern
  Variant (2)..(2): Xaa in position 2 is Ser or Thr
  Variant (3)..(3): Xaa in position 3 is any amino acid
  Variant (4)..(4): Xaa in position 4 is Phe, His or Tyr
  Variant (6)..(8): Xaa in position 6 to 8 is any amino acid
  Variant (11)..(11): Xaa in position 11 is Asp or Glu
  Variant (12)..(12): Xaa in position 12 is Ile, Leu, Met or Val
  Variant (14)..(14): Xaa in position 14 is Phe or Tyr
  Variant (15)..(15): Xaa in position 15 is Ala, Ile, Leu or Val
  Variant (16)..(16): Xaa in position 16 is Asp, Glu, Gly, Gln or Ser
  Variant (17)..(17): Xaa in position 17 is any amino acid
IXXXAXXXLGXXVXXXXP

SEQ ID NO: 819 - protein, 23 aa, Artificial sequence
  protein pattern
  Variant (2)..(3): Xaa in position 2 to 3 is any or no amino acid
  Variant (7)..(7): Xaa in position 7 is Ala, Ser or Thr
  Variant (8)..(8): Xaa in position 8 is Ala, Thr or Val
  Variant (9)..(9): Xaa in position 9 is Ala, Glu or Ser
  Variant (10)..(10): Xaa in position 10 is Asp, Glu or Gly
  Variant (11)..(11): Xaa in position 11 is Phe, Ile, Leu, Met or Val
  Variant (12)..(13): Xaa in position 12 to 13 is any amino acid
  Variant (15)..(15): Xaa in position 15 is any amino acid
  Variant (16)..(16): Xaa in position 16 is Ala, Asp, Gly, Ser or Thr
  Variant (18)..(18): Xaa in position 18 is any amino acid
  Variant (19)..(19): Xaa in position 19 is Ala, Ile or Val
  Variant (20)..(22): Xaa in position 20 to 22 is any amino acid
EXXSVKXXXXXXXPXXGXXXXXN

SEQ ID NO: 820 - DNA, 1089 bp, Escherichia coli
  CDS (1)..(1089): transl_table=11
atggagaggattgtcgttactctcggggaacgtagttacccaattaccatcgcatctggtttgtttaatgaaccagcttcattcttaccgctgaaatcgggcgagcaggtcatgttggtcaccaacgaaaccctggctcctctgtatctcgataaggtccgcggcgtacttgaacaggcgggtgttaacgtcgatagcgttatcctccctgacggcgagcagtataaaagcctggctgtactcgataccgtctttacggcgttgttacaaaaaccgcatggtcgcgatactacgctggtggcgcttggcggcggcgtagtgggcgatctgaccggcttcgcggcggcgagttatcagcgcggtgtccgtttcattcaagtcccgacgacgttactgtcgcaggtcgattcctccgttggcggcaaaactgcggtcaaccatcccctcggtaaaaacatgattggcgcgttctaccaacctgcttcagtggtggtggatctcgactgtctgaaaacgcttcccccgcgtgagttagcgtcggggctggcagaagtcatcaaatacggcattattcttgacggtgcgttttttaactggctggaagagaatctggatgcgttgttgcgtctggacggtccggcaatggcgtactgtattcgccgttgttgtgaactgaaggcagaagttgtcgccgccgacgagcgcgaaaccgggttacgtgctttactgaatctgggacacacctttggtcatgccattgaagctgaaatggggtatggcaattggttacatggtgaagcggtcgctgcgggtatggtgatggcggcgcggacgtcggaacgtctcgggcagtttagttctgccgaaacgcagcgtattataaccctgctcaagcgggctgggttaccggtcaatgggccgcgcgaaatgtccgcgcaggcgtatttaccgcatatgctgcgtgacaagaaagtccttgcgggagagatgcgcttaattcttccgttggcaattggtaagagtgaagttcgcagcggcgtttcgcacgagcttgttcttaacgccattgccgattgtcaatcagcgtaa

SEQ ID NO: 821 - protein, 362 aa, Escherichia coli
MERIVVTLGERSYPITIASGLFNEPASFLPLKSGEQVMLVTNETLAPLYLDKVRGVLEQAGVNVDSVILPDGEQYKSLAVLDTVFTALLQKPHGRDTTLVALGGGVVGDLTGFAAASYQRGVRFIQVPTTLLSQVDSSVGGKTAVNHPLGKNMIGAFYQPASVVVDLDCLKTLPPRELASGLAEVIKYGIILDGAFFNWLEENLDALLRLDGPAMAYCIRRCCELKAEVVAADERETGLRALLNLGHTFGHAIEAEMGYGNWLHGEAVAAGMVMAARTSERLGQFSSAETQRIITLLKRAGLPVNGPREMSAQAYLPHMLRDKKVLAGEMRLILPLAIGKSEVRSGVSHELVLNAIADCQSA

SEQ ID NO: 822 - DNA, 1622 bp, Glycine max
  CDS (119)..(1429)
cccgagtcatgcttgtgttcaacgaagacagccacaggcgcagcatgttattgatggcttcctcactcaccaaccaccaaaccacaccgtcgcacccattccatcgctgattcctccaatggcttccactaccaccactttctctctttctctccgcaccaaccaacaaactccattccccaaaccctctttcttctccaataacaaccatctgcatttcaactctaataattgggcctggacctctgtttccactgctcgcaagtcaaggatatgcgtcacttcctctcaagttttggattccttagcagcaaaatccgaacccgctcttcccaccaccgtcgaagtcgatttgggtaatcggagctatcccatttacatcggatccgggttactaaaccaacccgactatctccagaggcacgtgcatggaaagagggtcctagttgtaactaacaaaacggttgcgccactttatctagacaaggttgttgatgctttgacaaggggaaaccccaatgtttctgtggagagtgtaattttacctgatggtgagcagtacaaggacatggatactcttatgaaagtctttgacaaggccattgagttgcgactagaccggcgttgtacgtttgtcgctcttggtggtggtgtgattggcgacatgtgtggctgtgctgctgctttgttcctacgtggtgttaattttattcagattcctaccactgtgatggcccaggtcgattcttcagttggtggcaaaactgggatcaatcaccgccttgggaagaacctgattggtgccttttaccaacctcagtgtgtgctaatagacacggacacattaaatacgttgccggatagggaactggcatcagggcttgcagaggttataaagtatgggctcattagggatgcagagttttttgagtggcaagagaaaaatatgcacttattactggcaagagatcctagtgcaatggcatatgctataaagcgatcttgtgaaaacaaggctgaggttgtgtccttagatgagaaggaaagtggactgagggcaacattgaacttgggtcatacatttggtcatgcaatagaaactggggttggctatgggcagtggcttcatggagaggctgttgcagctggcacggtaatggctgttgacatgtcatatcgcctaggttggattgatgattctctagtgaagagagttggagatattttaaaacaggctaagttaccttcagcccctcctgagaccgtgactgtggacatgtttaaatctgtcatggcagtggataagaaggtagcagatgggttgctaaggcttatccttctaaagggccctctaggcaattgcgttttcacaggggattatgacagaaaggctctagacgatacgcttcgtgcattctgtaaatcctgatctttgtgctccatgtttctattgcagctttatccaattccttttagtgagtttttgtatgttgtgataacctcacttgtatttttcttatgtactttggatgccaaccatgtccccattatatacgcaagagtctattacaaagttgtattattagaaattgaggcatgatcaataattatcatttgagcat

SEQ ID NO: 823 - protein, 436 aa, Glycine max
MASTTTTFSLSLRTNQQTPFPKPSFFSNNNHLHFNSNNWAWTSVSTARKSRICVTSSQVLDSLAAKSEPALPTTVEVDLGNRSYPIYIGSGLLNQPDYLQRHVHGKRVLVVTNKTVAPLYLDKVVDALTRGNPNVSVESVILPDGEQYKDMDTLMKVFDKAIELRLDRRCTFVALGGGVIGDMCGCAAALFLRGVNFIQIPTTVMAQVDSSVGGKTGINHRLGKNLIGAFYQPQCVLIDTDTLNTLPDRELASGLAEVIKYGLIRDAEFFEWQEKNMHLLLARDPSAMAYAIKRSCENKAEVVSLDEKESGLRATLNLGHTFGHAIETGVGYGQWLHGEAVAAGTVMAVDMSYRLGWIDDSLVKRVGDILKQAKLPSAPPETVTVDMFKSVMAVDKKVADGLLRLILLKGPLGNCVFTGDYDRKALDDTLRAFCKS

SEQ ID NO: 824 - DNA, 1137 bp, Xanthomonas campestris pv. campestris
  CDS (1)..(1137): transl_table=11
atggcgcatgtcgagtacccctgcatgactcttcccccctccttgcgcagcgtcgaagtcgacggcgcgcagccgtacaccatctccattgcgccgggcctgctggccgacggcgcgcgcctggcccgccacgtgcgcggccgccacgtgctgctactcagcgacacccaggtggcgccgcactatgccgccggcgtgcgcgctgcactgttgcaggcgcacccggacctgcagcttggcgaactggtcatcgccgccggcgaagcctccaagaccctggacaacttctccctggcgatcaccgcactggccgaactgggcgccacccgcgatgcctgtgtgttcgcgctcggcggcggcgtagtgggggatctggccggctttgctgccgcctgctggatgcgcggggtggattgcgtgcaactgcccaccagcctgctggcgatggtggattcctcggtcggtggcaagaccgcggtggacatcccgcagggcaagaacctggtgggggcattccacccgccacgcgcggtgattgccgataccgacaccttgcgcaccctgcccacgcgcgagctgcgcgccggcctggcggaggtaatcaagtacggcgccatcggcgacccgttgttcttccagtggctgcatgccgaacgccgcgcgctgctggacggcgacccagccgcgctggcgcaggcgattgcacgcagttgcgagcacaaggccgacatcgtggcgcgcgacccgctggaaaaaggcgagcgcgccctgctcaacctgggccacaccttcggccacgccatcgagacagaacagggctacggcgcgccgggtaacgacaacctcaaccatggcgaagcggtggcagtgggcatggtgctggcagcgcggctctcggccgcactgggcatggccgacgcccaggacaccgaggcactgcgcaccctgctgcatgaattcggcctgcccacccagatcccgaccggcctggcaccggaagccctgctcggccgcatgcggctggacaagaaaaacatcgccggccgcctgcgcctggtgctgtggcgcgggatcggcaaggccgaagtcgtccccgacgtggacgaagctgcggtgctggagattctggccggctga

SEQ ID NO: 825 - protein, 378 aa, Xanthomonas campestris pv. campestris
MAHVEYPCMTLPPSLRSVEVDGAQPYTISIAPGLLADGARLARHVRGRHVLLLSDTQVAPHYAAGVRAALLQAHPDLQLGELVIAAGEASKTLDNFSLAITALAELGATRDACVFALGGGVVGDLAGFAAACWMRGVDCVQLPTSLLAMVDSSVGGKTAVDIPQGKNLVGAFHPPRAVIADTDTLRTLPTRELRAGLAEVIKYGAIGDPLFFQWLHAERRALLDGDPAALAQAIARSCEHKADIVARDPLEKGERALLNLGHTFGHAIETEQGYGAPGNDNLNHGEAVAVGMVLAARLSAALGMADAQDTEALRTLLHEFGLPTQIPTGLAPEALLGRMRLDKKNIAGRLRLVLWRGIGKAEVVPDVDEAAVLEILAG

SEQ ID NO: 826 - DNA, 1089 bp, Escherichia coli O157:H7 EDL933
  CDS (1)..(1089): transl_table=11
  misc_feature (344)..(344): s is g or c
atggagaggattgtcgttactctcggggaacgtagttacccaattaccatcgcatctggtttgtttaatgaaccagcttcattcttaccgctgaaatcgggcgagcaggtcatgttggtcaccaacgaaaccctggctcctctgtatctcgataaggtccgcggcgtacttgaacaggcgggtgttaacgtcgatagcgttatccttcctgacggcgagcagtataaaagcctggctgtactcgataccgtctttacggcgttgttacaaaagccgcatggtcgcgatactacgctggtggcgcttggcggcggcgtagtgggcgatctgaccggcttcgcggsggcgagttatcagcgcggtgttcgtttcattcaagtcccgacgacgttactgtcgcaggtcgattcctccgttggcggcaaaactgcggtcaaccatcccctcggtaaaaacatgattggcgcgttctaccagcctgcttcagtggtggtggatctcgactgtctgaaaacgcttcccccgcgtgagttagcgtcggggctggcagaagtcatcaaatacggcattattcttgacggtacgttttttaactggctggaagagaatctggatgcgttgttgcgtctggacggtccggcaatggcgtactgtattcgccgttgttgtgaactgaaggcagaagttgtcgccgccgacgagcgcgaaaccgggttacgtgctttactgaatctgggacacacctttggtcatgccattgaagctgaaatggggtatggcaattggttacatggtgaagcggtcgctgcgggtatggtgatggcggcgcggacgtcggaacgtctcgggcagtttagttctgccgaaacgcagcgtattataactctgctcacgcgggctgggttaccggtcaatgggccgcgcgaaatgtccgcgcaggcgtatttaccgcatatgctgcgtgacaagaaagtccttgcgggagagatgcgcttaattcttccgttggcaattggtaagagtgaagttcgcagcggcgtttcgcacgagcttgttcttaacgccattgccgattgtcaatcagcgtaa

SEQ ID NO: 827 - protein, 362 aa, Escherichia coli O157:H7 EDL933
  misc_feature (115)..(115): The Xaa at location 115 stands for Ala, or Gly.
MERIVVTLGERSYPITIASGLFNEPASFLPLKSGEQVMLVTNETLAPLYLDKVRGVLEQAGVNVDSVILPDGEQYKSLAVLDTVFTALLQKPHGRDTTLVALGGGVVGDLTGFAXASYQRGVRFIQVPTTLLSQVDSSVGGKTAVNHPLGKNMIGAFYQPASVVVDLDCLKTLPPRELASGLAEVIKYGIILDGTFFNWLEENLDALLRLDGPAMAYCIRRCCELKAEVVAADERETGLRALLNLGHTFGHAIEAEMGYGNWLHGEAVAAGMVMAARTSERLGQFSSAETQRIITLLTRAGLPVNGPREMSAQAYLPHMLRDKKVLAGEMRLILPLAIGKSEVRSGVSHELVLNAIADCQSA

SEQ ID NO: 828 - DNA, 1329 bp, Arabidopsis thaliana
  CDS (1)..(1329)
atggcagccaacaccatttctctttccaacgtcgccgcctccaagaatctcaactcctttcaaagccgtgcctttattgctccaccaactatttttttccctgtggcttctgcaaagtctaaacctggggaactttctttatcttccacgactctttccaggtctcgtgtgcgcgccggtgctagccagctcatgaacgaaccgcttaacgatcaacgctccatctcttctcccactgtcgtcgaggttgatcttggtgaccggagttatccgatctatatcggcgccggcttgcttgatcactcagaacttcttcaaaggcatgttcacggaaagagagtgcttgtggtcaccaatgatcgagttgctcctctctacctggacaagactatagatgctttaaccagaggaaatccaaacgtgacagtggaaagtgtaattttgcctgatggagagaaatacaaagacatggatactctcatgaaagtcttcgacaaggccattgagtctcgcctagatagacgatgtacatttgttgcccttggaggcggtgtgataggcgatatgtgtggatatgctgctgcatcgtacctacgtggtgtcaatttcatccaaattcctaccactgttatggcacaggttgattcttctgtaggtggcaaaacaggcataaatcatcgtcttggaaagaatttgatcggtgcattttaccaaccacagtgtgtgctagtagacactgacacgttgaacacattgccagatagggagatggcatcaggcctagctgaagtgatcaagtacgggcttatcagggatgccgagttctttgaatggcaggagaagaacattgaggcattgctggcaagggatccagctgcattagcttttgctataaagcgatcatgtgaaaacaaggcagacgttgtatcacaagatgagaaagaaagcggcttgcgagcaaccttaaatttgggtcatacctttggccatgccatagaaactggctttggttatggagagtggctccatggagaagctgttgcagctggcacggtaatggcagtggacatgtcatatcgtcttggttggatcgatgaatcgattgttaagagagtgaacaagatcctagtacgggcgaaattgcctacaactccgccagagagcatgaccgtcagcatgttcaagtccataatggcggtggacaagaaagtggcagatggactgctgaggctgattcttctcaaaggcccgctgggaaactgcgtgttcactggagattatgatcgggaagcgttggatgccacgcttcgtgcattctccaaatcctga

SEQ ID NO: 829 - protein, 442 aa, Arabidopsis thaliana
MAANTISLSNVAASKNLNSFQSRAFIAPPTIFFPVASAKSKPGELSLSSTTLSRSRVRAGASQLMNEPLNDQRSISSPTVVEVDLGDRSYPIYIGAGLLDHSELLQRHVHGKRVLVVTNDRVAPLYLDKTIDALTRGNPNVTVESVILPDGEKYKDMDTLMKVFDKAIESRLDRRCTFVALGGGVIGDMCGYAAASYLRGVNFIQIPTTVMAQVDSSVGGKTGINHRLGKNLIGAFYQPQCVLVDTDTLNTLPDREMASGLAEVIKYGLIRDAEFFEWQEKNIEALLARDPAALAFAIKRSCENKADVVSQDEKESGLRATLNLGHTFGHAIETGFGYGEWLHGEAVAAGTVMAVDMSYRLGWIDESIVKRVNKILVRAKLPTTPPESMTVSMFKSIMAVDKKVADGLLRLILLKGPLGNCVFTGDYDREALDATLRAFSKS

SEQ ID NO: 830 - DNA, 1062 bp, Bacteroides thetaiotaomicron VPI-5482
  CDS (1)..(1062): transl_table=11
atgagtaaacaagaagtcattctctgcgaaagcttggaaacaagcctcggtcgtgccattgaaaggtgtccgcatgacaagttattcatcctcacagacgaacatacccagcgtctttgtctgccctcattgaaagaggtatcgtttctgaaagacgcagtcgaaatctgtatcggagccgaagatgtgcataagacactggagactctggcctccgtatggatggcactgagtcagcaaggggctacacgtcactcattgctcatcaaccttggtgggggcatggtaacagatttgggaggctttgccgccgctaccttcaaacgggggatttcttatatcaatatacccactacactgttggctatggtcgacgcatccgtcggcggtaagacaggtatcaacttcaacggactgaaaaacgagataggctcgtttgctccggcagacagtgtgctgattgaaactgaattcctgcgcagcctcgatgcacagaatttcttctccggttatgctgaaatgttaaagcacggattaatcagcaataccgcacactgggtcgaattactggatttcaataccaataacattgattatgcatatctcaaaaatatggtgggacgatcggtacaggtgaaggaagacattgtggagcaagaccccttcgagcatggcatccgtaaagcactgaacctgggacatacagcaggacatgccttcgaaagtctggcattggctgagaatcgccccgtgctgcatggctatgccgtagcatggggaatcgtatgcgagctttacctgtcacacctcaaagtcggctttccgaaagacaagatgcgacagaccatccaattcatcaaagagaattatggttcattcgcattcgactgtaagcagtacgaacaactctacgcatttatgcaacatgataagaaaaatacctcaggaacggtcaattttactttactgaaagagatcggagatatttgcatcaaccagacagctgataaagacacaatttttgaaatgcttgacttctatcgcgaatgtatgggagtctga

SEQ ID NO: 831 - protein, 353 aa, Bacteroides thetaiotaomicron VPI-5482
MSKQEVILCESLETSLGRAIERCPHDKLFILTDEHTQRLCLPSLKEVSFLKDAVEICIGAEDVHKTLETLASVWMALSQQGATRHSLLINLGGGMVTDLGGFAAATFKRGISYINIPTTLLAMVDASVGGKTGINFNGLKNEIGSFAPADSVLIETEFLRSLDAQNFFSGYAEMLKHGLISNTAHWVELLDFNTNNIDYAYLKNMVGRSVQVKEDIVEQDPFEHGIRKALNLGHTAGHAFESLALAENRPVLHGYAVAWGIVCELYLSHLKVGFPKDKMRQTIQFIKENYGSFAFDCKQYEQLYAFMQHDKKNTSGTVNFTLLKEIGDICINQTADKDTIFEMLDFYRECMGV

SEQ ID NO: 832 - DNA, 1089 bp, Shigella flexneri 2a str. 2457T
  CDS (1)..(1089): transl_table=11
atggagaggattgtcgttactctcggggaacgtagttacccaattaccatcgcatctggtttgtttaatgaaccagcttcattcttaccgctgaaatcgggcgagcaggtcatgttggtcaccagcgaaaccctggctcctctgtatctcgataaggtccgcggcgtacttgaacaggcgggtgttaacgtcgatagcgttatcctccctgacggcgagcagtataaaagcctagctgtactcgataccgtctttacggcgttgttacaaaagccgcatggtcgcgatactacgctggtggcgcttggcggcggcgtagtgggcgatctgaccggcttcgcggcggcgagttatcagcgcggtgttcgtttcattcaagtcccgacgacgttactgtcgcaggtcgattcctccgttggcggcaaaactgcggtcaaccatcccctcggtaaaaacatgattggcgcgttctaccagcctgcttcagtggtggtggatctcgactgtctgaaaacgcttcccccgcgtgagttagcgtcggggctggcagaagtcatcaaatacggcattattcttgacggtgcgttttttaactggctggaagagaatctggatgcgttgttgcgtctggacggtccggcaatggcgtactgtattcgccgttgttgtgaactgaaggcagaagttgtcgccgccgacgagcgcgaaaccgggttacgtgctttactgaatctgggacacacctttggtcatgccattgaagctgaaatggggtatggcaattggttacatggtgaagcggtcgctgcgggtatggtgatggcggcgcggacgtcggaacgtctcgggcagtttagttctgccgaaacgcagcgtattataaccctgctcacgcgggctgggttaccggtcaatgggccgcgcgaaatgtccgcgcaggcgtatttaccgcatatgctgcgtgacaagaaagtccttgcgggagagatgcgcttaattcttccgttggcaattggtaagagtgaagttcgcagcggcgtttcgcacgagcttgttcttaacgccattgccgattgtcaatcagcgtaa

SEQ ID NO: 833 - protein, 362 aa, Shigella flexneri 2a str. 2457T
MERIVVTLGERSYPITIASGLFNEPASFLPLKSGEQVMLVTSETLAPLYLDKVRGVLEQAGVNVDSVILPDGEQYKSLAVLDTVFTALLQKPHGRDTTLVALGGGVVGDLTGFAAASYQRGVRFIQVPTTLLSQVDSSVGGKTAVNHPLGKNMIGAFYQPASVVVDLDCLKTLPPRELASGLAEVIKYGIILDGAFFNWLEENLDALLRLDGPAMAYCIRRCCELKAEVVAADERETGLRALLNLGHTFGHAIEAEMGYGNWLHGEAVAAGMVMAARTSERLGQFSSAETQRIITLLTRAGLPVNGPREMSAQAYLPHMLRDKKVLAGEMRLILPLAIGKSEVRSGVSHELVLNAIADCQSA

SEQ ID NO: 834 - DNA, 1017 bp, Arabidopsis thaliana
  CDS (1)..(1017)
atgtttaggcatgttcacggaaagagagtgcttgtggtcaccaatgatcgagttgctcctctctacctggacaagactatagatgctttaaccagaggaaatccaaacgtgacagtggaaagtgtaattttgcctgatggagagaaatacaaagacatggatactctcatgaaagtcttcgacaaggccattgagtctcgcctagatagacgatgtacatttgttgcccttggaggcggtgtgataggcgatatgtgtggatatgctgctgcatcgtacctacgtggtgtcaatttcatccaaattcctaccactgttatggcacaggttgattcttctgtaggtggcaaaacaggcataaatcatcgtcttggaaagaatttgatcggtgcattttaccaaccacagtgtgtgctagtagacactgacacgttgaacacattgccagatagggagatggcatcaggcctagctgaagtgatcaagtacgggcttatcagggatgccgagttctttgaatggcaggagaagaacattgaggcattgctggcaagggatccagctgcattagcttttgctataaagcgatcatgtgaaaacaaggcagacgttgtatcacaagatgagaaagaaagcggcttgcgagcaaccttaaatttgggtcatacctttggccatgccatagaaactggctttggttatggagagtggctccatggagaagctgttgcagctggcacggtaatggcagtggacatgtcatatcgtcttggttggatcgatgaatcgattgttaagagagtgaacaagatcctagtacgggcgaaattgcctacaactccgccagagagcatgaccgtcagcatgttcaagtccataatggcggtggacaagaaagtggcagatggactgctgaggctgattcttctcaaaggcccgctgggaaactgcgtgttcactggagattatgatcgggaagcgttggatgccacgcttcgtgcattctccaaatcctga

SEQ ID NO: 835 - protein, 338 aa, Arabidopsis thaliana
MFRHVHGKRVLVVTNDRVAPLYLDKTIDALTRGNPNVTVESVILPDGEKYKDMDTLMKVFDKAIESRLDRRCTFVALGGGVIGDMCGYAAASYLRGVNFIQIPTTVMAQVDSSVGGKTGINHRLGKNLIGAFYQPQCVLVDTDTLNTLPDREMASGLAEVIKYGLIRDAEFFEWQEKNIEALLARDPAALAFAIKRSCENKADVVSQDEKESGLRATLNLGHTFGHAIETGFGYGEWLHGEAVAAGTVMAVDMSYRLGWIDESIVKRVNKILVRAKLPTTPPESMTVSMFKSIMAVDKKVADGLLRLILLKGPLGNCVFTGDYDREALDATLRAFSKS

SEQ ID NO: 836 - DNA, 1287 bp, Rhodopirellula baltica SH 1
  CDS (1)..(1287): transl_table=11
ttggaagtggcaaaagtgcggtggttagatcgaaacgccggactcgattgggtttcgctggaccgcggccgggtgggccaccgaggcatgccgcaaaaacaggccaacggctacactatcctaaccgtgcaaccaactttgccccaacccatcgacctcatgaccgaaccgattgaatcaatcgaagtctcacttggtgatcgcagctatccgatttggatctccactggattgaccgaatccgccgagcaacctcatttcgcgaaacactttcaagctgccgttggcgactgcactcacgtcgtgctaatacacgatgccgcggtgtcaaatacgatcgctagccgagtggaaaaacaactcgagcaggccggcattcgcatcaccagcatctcgattccttcgggggaaacgagcaaatcggtttcaaaactcgagtcgatttggaacgtgatgttggaatcggggacagatcgtcgcagcgtcgtcgtcgcggtcggtggcggagtcgtgggtgacttggccgggttcgccgcggcatccttcacacgtggattgaggttcgtgcaggttcccaccactttactttcgatggttgacagcagcgtcggtggcaagacgggaatcaacctgcccggcggcaagaacatggttggcagtttctggcagcctcagatggtttggatcgacacgcagtcgctttcgacgttgcccgatcgcgattttatcagcggcatggcggaagtgatcaagtacggcgtgatcgaagacgccgagttcttctgctggttgcaagacaaagccgccaggttgattgagaaggatcctgaaactcttcggtacgcgattcgaaaaagttgtgaatcgaaagctcgtgttgtcgccgaggatgagcgtgaaacatcagggcgtcgagcgatcctgaattatggtcacacgttcgctcacgcaatcgaagcgaccgcaggatatggagtttgtctgcacggtgaggcggtgtcgatcggaatgcagatggcggctcatttggccatcgacatggaactgtgcgaccgatctttgctagaagaacaaaccgcggtgctgtccgccgcgaaattgccgctggcatggaaggatgcggatcccgaaaagatgcttcctgtcatgtcgcacgacaaaaaagtttcacacgggaagctgaggtttgtgttgcccgaccgaatcggacacgttgccatggttggtgatgttccctccgagaaagtcattgcggcgatccttgcctgccgcgacgagcccaactga

SEQ ID NO: 837 - protein, 428 aa, Rhodopirellula baltica SH 1
MEVAKVRWLDRNAGLDWVSLDRGRVGHRGMPQKQANGYTILTVQPTLPQPIDLMTEPIESIEVSLGDRSYPIWISTGLTESAEQPHFAKHFQAAVGDCTHVVLIHDAAVSNTIASRVEKQLEQAGIRITSISIPSGETSKSVSKLESIWNVMLESGTDRRSVVVAVGGGVVGDLAGFAAASFTRGLRFVQVPTTLLSMVDSSVGGKTGINLPGGKNMVGSFWQPQMVWIDTQSLSTLPDRDFISGMAEVIKYGVIEDAEFFCWLQDKAARLIEKDPETLRYAIRKSCESKARVVAEDERETSGRRAILNYGHTFAHAIEATAGYGVCLHGEAVSIGMQMAAHLAIDMELCDRSLLEEQTAVLSAAKLPLAWKDADPEKMLPVMSHDKKVSHGKLRFVLPDRIGHVAMVGDVPSEKVIAAILACRDEPN

SEQ ID NO: 838 - DNA, 1062 bp, Porphyromonas gingivalis W83
  CDS (1)..(1062): transl_table=11
gtggtcatcgtcggaacagatattatcggtcgtaagctggtacctgcactgtcgggtatggcttgcgaccgattgtttgttttgtgcgacgaggcagtggcaacgctgcatgccgagcgaattgctgcaatcagagcactaacggccgcggatgattggtatttgctctccggaggggaaacgatcaaacagtggggaaactgcctgcccctatggcgatggctgagcgaaagaggtgcttcgcgccactctctattattgaatataggaggcggtacgattacggacttgggcggcttcgtcgcttcggtctataagcgaggtatccggacggtaaatctcagcacaaccctaatgggaatggtagatgcttcggtcggagggaaaacaggcatagacttcgaaggcgtcaaaaacgagataggcactttccatctgccgaaagcggtcttctgtgactgtgctttcctgtccaccctaaccgaccgtgaactgctgtcgggacatgccgaattggtaaagcacgctcttctcatgggagcggatgaatggaaagaagttatttctttcgatccgttcggtaataatatggaggcatgggaagagatcgtccggcatagcgtaactttcaaggagtcgatagtaaatcgggacttgcacgaatccggacttagaagcatgctcaatctgggtcataccgtcgggcatgcgatggaaagcttttcatacactttgcctggaaatgtaggcctttcgcatggccatgcagtcataatcggccttatctgcgaactctattattcggtggtggcacatggtttccctcgagagatcctctactcgctggtcgcatggtccaaagaatactactcacccttctttttcacctgcaagcaatatccgtctctgacggctttttgcatgaaagacaagaagaatctggggagcaaaatcaggcttattccacttaaagggataggcttaccggcagaaccatgtgagataacggagaaaatgttgcacgaatgtttcgatttttatcgcgaaactcttggagggtaa

SEQ ID NO: 839 - protein, 353 aa, Porphyromonas gingivalis W83
MVIVGTDIIGRKLVPALSGMACDRLFVLCDEAVATLHAERIAAIRALTAADDWYLLSGGETIKQWGNCLPLWRWLSERGASRHSLLLNIGGGTITDLGGFVASVYKRGIRTVNLSTTLMGMVDASVGGKTGIDFEGVKNEIGTFHLPKAVFCDCAFLSTLTDRELLSGHAELVKHALLMGADEWKEVISFDPFGNNMEAWEEIVRHSVTFKESIVNRDLHESGLRSMLNLGHTVGHAMESFSYTLPGNVGLSHGHAVIIGLICELYYSVVAHGFPREILYSLVAWSKEYYSPFFFTCKQYPSLTAFCMKDKKNLGSKIRLIPLKGIGLPAEPCEITEKMLHECFDFYRETLGG

SEQ ID NO: 840 - DNA, 1431 bp, Chlamydomonas reinhardtii
  CDS (1)..(1431)
atgcccggtcatacatcgctgctgtttaaggccaatatcaagggcggctcctactcggcgcgcccgatcgggcaaagggcgcctcgcgtgcatgctctcgcggacgcttctgccatcacctcggccagcaccagcgccccctccagcaacagcagcgagtcgtctacctctcgtgcttctgtgtgcgctggatacaacaggaggcttgtgcagcgtatgcgggagcagaaggtggacctgtcggcagccagccggcgtcattccttcgcgctgcacgcggttgccgctcctgagcgcactgcctcggcgatgaagaccgtagaagtggacctgggcgatcgatcctaccccatttatatcggtgcgggcctgctgaaccagggcgagctgctgcggaagcacattcccggcaagcgcgtgcttatcgtgaccaacgagaccatcgcacctctttaccttgagcgcgtgcgcgcggcgctgctggagggcggcaagctgcaggtggacgaggtggtgctgccggacggcgaggagtacaagagcatggaggtgctgggcaaggtgtgggacaaggctctggagagccgcatggaccgcggcgtaacctttctggcgctgggcggcggcgtggtgggcgacatgacgggcttcgcggcctcgtgctaccagcgcggcgtgcacttcgtgcaggtgcccaccacggtcatggcccaggtggacagcagtgtgggcggcaagaccggcgtcaaccacccgctgggaaagaacatgatcggcgccttctaccagccccgtgtggtgctggtggacacggacacgctggccacgctgccggaccgcgagctggccagcggcatcagcgaggtcatcaagtacgggctcatccgcgacgcgcccttcttcgagtggctggaggccaacatggaccgactgctggcgcgcgacccggaggccatcgcgtacgcagtggagcgctcctgcatcaacaaggctgaggtggtggctgccgacgagcgtgagagctccgagggcgtgcgcgccacgctcaacctgggccacacctttggccacgccatcgagacgggcaccggctacggcgtgtggctgcacggcgaggcggtggcggccggcaccgtcatggcggcggacctgtcctaccgcctgggctggatcgaccagtcgctgcacgaccgcattgtggcgctgatgcagcgcgcgcgcctgcccatcctgccgccgccctccatgaccactgagcagttccgctcgctcatggcggtggacaagaaggtgctggcgggcaagctgcgcctgatcctgctgcgcgggccgctgggcaactgcgtggttacgggcgacttcgacccggccaagctggaggagacgctggtgcacttcaccaccgccgcccaggcccagaccaagcactga

SEQ ID NO: 841 - protein, 476 aa, Chlamydomonas reinhardtii
MPGHTSLLFKANIKGGSYSARPIGQRAPRVHALADASAITSASTSAPSSNSSESSTSRASVCAGYNRRLVQRMREQKVDLSAASRRHSFALHAVAAPERTASAMKTVEVDLGDRSYPIYIGAGLLNQGELLRKHIPGKRVLIVTNETIAPLYLERVRAALLEGGKLQVDEVVLPDGEEYKSMEVLGKVWDKALESRMDRGVTFLALGGGVVGDMTGFAASCYQRGVHFVQVPTTVMAQVDSSVGGKTGVNHPLGKNMIGAFYQPRVVLVDTDTLATLPDRELASGISEVIKYGLIRDAPFFEWLEANMDRLLARDPEAIAYAVERSCINKAEVVAADERESSEGVRATLNLGHTFGHAIETGTGYGVWLHGEAVAAGTVMAADLSYRLGWIDQSLHDRIVALMQRARLPILPPPSMTTEQFRSLMAVDKKVLAGKLRLILLRGPLGNCVVTGDFDPAKLEETLVHFTTAAQAQTKH

SEQ ID NO: 842 - DNA, 1131 bp, Physcomitrella patens subsp. patens
  CDS (1)..(1131)
atggagagcgcgcctcctgccacgcgcgaggatcctgtcatcgtgaatgtggacctcggtgaccgaagttaccctatctacatcggcgcgggtttgctcgaccggtctgagcttctccagaagcacgtcaaaggcaagaaggtactgattgtgacaaatgagactgttgccccaatctatttagacaggacgatcgcagcgttgaaacatggaggcttcgatgtggagattgaaagtgtgatacttccagatggagaaaaatacaaggatcttccaacgctgatgaaggtttacgacaaggccattgagacacggatggacaggcggtgcacttttgttgcattgggaggtggagtaatcggggacatgtgtggttatgctgctgcttcttatcttcgtggtgtcaattttatccagattcctacgaccctcatggcacaggtagattcttctgttggtggaaagactggtgtcaaccatccacttggaaagaatatgataggggctttctatcaacctcagtgtgtccttgtggacaccgacaccctcaacacgcttcctgatagagagcttgcctctggcattgctgaggttaccaaatacggacttatccgcgatgctgaattctttgaatggcaagaggagaacatggaagcattgctaagccgcgaccccaaggctctcgcatttgcagtaaagaggtcctgtgagaacaaggcagaagtggtaaccctggacgagagagaaggtgggcttcgggcaaccttgaatcttggacatacatttgggcacgcaattgaggcaggtattggttacggtggttggttacatggtgaggcggtagcagctgggactgtcatggctgctgacatgtccttgagactcggctggatcgatgagaccctgttcaaccgaattgtcaatctgttaaagcgtgcgaacgttcctatttctcctccggagtctatggatgtgcagacttttaaaacaattatggctgttgataaaaaggttgctgatggcttgttgaggctcattctcctgaagggacctcttggtaactgtgtgtttactggggaatatgatcggaaagctctcgacgagaccttggaagagttctgcaaatcctag

SEQ ID NO: 843 - protein, 376 aa, Physcomitrella patens subsp. patens
MESAPPATREDPVIVNVDLGDRSYPIYIGAGLLDRSELLQKHVKGKKVLIVTNETVAPIYLDRTIAALKHGGFDVEIESVILPDGEKYKDLPTLMKVYDKAIETRMDRRCTFVALGGGVIGDMCGYAAASYLRGVNFIQIPTTLMAQVDSSVGGKTGVNHPLGKNMIGAFYQPQCVLVDTDTLNTLPDRELASGIAEVTKYGLIRDAEFFEWQEENMEALLSRDPKALAFAVKRSCENKAEVVTLDEREGGLRATLNLGHTFGHAIEAGIGYGGWLHGEAVAAGTVMAADMSLRLGWIDETLFNRIVNLLKRANVPISPPESMDVQTFKTIMAVDKKVADGLLRLILLKGPLGNCVFTGEYDRKALDETLEEFCKS

SEQ ID NO: 844 - DNA, 1212 bp, Aspergillus nidulans FGSC A4
  CDS (1)..(1212)
atgtcgaaccctacaaaaatcagcatccttggccgggaaagcatcatcgctgatttcgggctttggcgaaactatgtggctaaagacctgatcagtgactgctcctctaccacctacgtccttgtcactgatacgaatatcggatcgatctacacccccagctttgaagaagcttttcgaaaagctgccgccgagattactccctccccacgcctccttatttataatgctccccccggagaagtttccaagtcccgacagacgaaggccgatattgaggattggatgttgagtcagaaccctccatgtggccgcgataccgttgtaattgcattgggtggaggagtcatcggagatctgacaggattcgtcgcttccacctacatgcgcggtgtccgttatgtgcaggttcccactactcttctggccatggtagattcatcgatcggcgggaaaactgccatcgacactccgctgggtaagaacctgatcggcgcaatctggcaaccgacgaaaatctacattgaccttgagttcttggagacgctgccggtgagagagttcatcaatggtatggcagaggtcatcaagacggcagcaatctctagcgaagaagagtttacagctttagaagagaacgcggagacaatcttgaaggcggtccgtcgcgaggtcaggccaggagaacatcggtttgagggcatagaagagattctgaaggcccgaattctggcatctgcgcggcacaaggcgtatgttgtctcagcagacgaacgtgaggggggtctccggaaccttttgaactggggtcactctattggccatgccattgaagccattctgacgccgcaaattctccacggagagtgtgtcgcaatcggcatggtgaaggaagcagaactggcccgtcatctcggtatcctgaagggcgttgcagtctcccgcattgtcaaatgtctcgctgcttacggactgcccacctcgctgaaggacgctcgcatccggaaattgaccgccggcaagcactgctcggtcgaccagttgatgtttaacatggctcttgacaagaagaacgatggtcccaagaagaaaattgtcctcctttccgccattggaactccatatgagacccgcgccagcgttgttgccaatgaggatattcgcgtggtccttgctcccagcattgagaggaaggtgaagttctggtggtga

SEQ ID NO: 845 - protein, 403 aa, Aspergillus nidulans FGSC A4
MSNPTKISILGRESIIADFGLWRNYVAKDLISDCSSTTYVLVTDTNIGSIYTPSFEEAFRKAAAEITPSPRLLIYNAPPGEVSKSRQTKADIEDWMLSQNPPCGRDTVVIALGGGVIGDLTGFVASTYMRGVRYVQVPTTLLAMVDSSIGGKTAIDTPLGKNLIGAIWQPTKIYIDLEFLETLPVREFINGMAEVIKTAAISSEEEFTALEENAETILKAVRREVRPGEHRFEGIEEILKARILASARHKAYVVSADEREGGLRNLLNWGHSIGHAIEAILTPQILHGECVAIGMVKEAELARHLGILKGVAVSRIVKCLAAYGLPTSLKDARIRKLTAGKHCSVDQLMFNMALDKKNDGPKKKIVLLSAIGTPYETRASVVANEDIRVVLAPSIERKVKFWW

SEQ ID NO: 846 - DNA, 1119 bp, Prochlorococcus marinus str. MIT 9303
  CDS (1)..(1119): transl_table=11
atgtccgctttcgtgaatatcgacgcccaacgcatccccgtagcactgagccaccagccctacgaggtggtcattgggggtgaaggcttgcggggtgttgggaaggagcttcgccgtgctgggctgaaagagggcatcaaggtattggttgtaagcaatgctgatgttgctgaaccatatggtgatctttgcctccaaagccttagtgacagcgggtacaggcccactctgctggtgatcgaggccggagaagatcaaaagacgccagtgagcgtggcgttaattcacgatgcagcctatgaagcaaagctagaaagaggatccttgatggttgctcttggcggtggggtcgtgggcgacatgactggatttgcagcagccacttggctaagaggtatctcggtggtgcaacttcctacaacccttctggcaatggtggatgccgcgattggtggcaagacaggcgttaatcacccgggcgggaaaaatctgatcggagcatttcaccaaccaaggcttgtattaatcgatccctcaactctgaatacattgccggaacgtgaattccgggcagggatggccgaggtgatcaaatacggggtgatcggtgatgcagcactttttcaactcctagaaggcattccagaactgaacacaccatcacaactccatgcagacctactggagaaaattctcgaacgttcagcactcgcgaagtcgagagtggtgagctcagatgaacgagagggcgggctgcgcgccatccttaactacgggcacaccttcgggcatgtggtggaaaccctctgcggctatggaacctggctgcatggtgaagctgtcgccatcggcatggtggctgttggggagctggcggtgttgcgacagagctggaacagggatgatgccaacaggcaaaagtctctgatcgcaaaggcagggctgccgattgcttggcccaagcttgatccagaggaggtgctgtataccctgcaaggggataaaaaggtcaaagatggaaagcttcgctttgtgattcccaccggcattggcaacgtcgaaatcaaaaatgacgtaagcagagaagaaatccgaaaatgcctatcagagctcagctaa

SEQ ID NO: 847 - protein, 372 aa, Prochlorococcus marinus str. MIT 9303
MSAFVNIDAQRIPVALSHQPYEVVIGGEGLRGVGKELRRAGLKEGIKVLVVSNADVAEPYGDLCLQSLSDSGYRPTLLVIEAGEDQKTPVSVALIHDAAYEAKLERGSLMVALGGGVVGDMTGFAAATWLRGISVVQLPTTLLAMVDAAIGGKTGVNHPGGKNLIGAFHQPRLVLIDPSTLNTLPEREFRAGMAEVIKYGVIGDAALFQLLEGIPELNTPSQLHADLLEKILERSALAKSRVVSSDEREGGLRAILNYGHTFGHVVETLCGYGTWLHGEAVAIGMVAVGELAVLRQSWNRDDANRQKSLIAKAGLPIAWPKLDPEEVLYTLQGDKKVKDGKLRFVIPTGIGNVEIKNDVSREEIRKCLSELS

SEQ ID NO: 848 - DNA, 1065 bp, Clostridium difficile 630
  CDS (1)..(1065): transl_table=11
gtggaagaaaaactattagtaaatttaaaagaaaatagctacaatatatttattaaaaaaaatatactaaagaatataggagaagaaataaaaaaaatatattttggaaataagatttttattgtaactgatgaaaatatagcaaaattatacttggataaagtaaaaaataatttaagtgaatctggatttgaaattaaatctttaatattaaaatctggtgaagaaacaaaatcatttaatactcttcctaaaatatacgatagtttacttgactttaagttaactagaaaagatttgattattactttaggaggaggggtaataggtgatttaggtggatttgcagcagcaacttttttaagaggtataagttttattcaaattccaacatctttattagcacaagttgatagttctgtaggtggaaaagttggagttgaccttgagagaggcaaaaacttagtgggaagcttttaccaaccaaaggctgtgtttatcgacccaaatgtattattatcacttccagaaaaattctatagagatggaatggcagaagttataaaatatggatgtataaaagacaaaacttttttcaataaacttttaagtttaaaaaatagagaagaagtaatgcaacatatagaatacattatacataaatgttgctttattaaaaaaactgtagttgaagctgatgaaaaagactttggagatagaatgcttctaaactttggccatacattaggtcatgctattgagaaatactacaattttacgggttatacccatggagaagctgttgccataggaatgtataagataactttagaaagtgaaaagataggaattacaaaaaaagggacatcagaacttataaaatcaattttaatgaattataatttgccttatgagattgaattaagagataataaatctatagtagatgctatatctcttgataaaaaaaatctaggtgatacattaaaaataatacttttaaaagatattggagagagtattatatataatactacttctaaattttttcaggaggtaagataa

SEQ ID NO: 849 - protein, 354 aa, Clostridium difficile 630
MEEKLLVNLKENSYNIFIKKNILKNIGEEIKKIYFGNKIFIVTDENIAKLYLDKVKNNLSESGFEIKSLILKSGEETKSFNTLPKIYDSLLDFKLTRKDLIITLGGGVIGDLGGFAAATFLRGISFIQIPTSLLAQVDSSVGGKVGVDLERGKNLVGSFYQPKAVFIDPNVLLSLPEKFYRDGMAEVIKYGCIKDKTFFNKLLSLKNREEVMQHIEYIIHKCCFIKKTVVEADEKDFGDRMLLNFGHTLGHAIEKYYNFTGYTHGEAVAIGMYKITLESEKIGITKKGTSELIKSILMNYNLPYEIELRDNKSIVDAISLDKKNLGDTLKIILLKDIGESIIYNTTSKFFQEVR

SEQ ID NO: 850 - DNA, 1665 bp, Herminiimonas arsenicoxydans
  CDS (1)..(1665): transl_table=11
gtgggtggaaatatttttctggtcggcctgatgggtgccggcaaaacgacggtcggtcgcgcgctggcaaaaaggctgaacaagcagttcatcgattccgaccacgaaatcgaggcgcgcaccggcgcagctatccccttgatctttgaaattgagggtgaagccagttttcggcagcgtgaagcggaagtcattcgcgatctgaccgcgcaacaggatatcgtgctcgctaccggcggtggcgcagtcctgaatgcggaaaatcgcgcttatctcaagtcgcggggtaccgtcatttatctgcgtgccagcgtcaacaaccttttgcagcgcaccagccacgacaagaaccgtccgctgctgcagaccggcgatccacgcaagactctcgaggaattgtcgcgtatccgcgaaccgctctacaatgaaatcgccgacatcgtgatcgataccggtcggcctaacgtacaatttttgatgcaatcgatcctggcgcagttggggccggagcatacgcagagcgctacggctgtatcattgcaacaagatttattatcaaagcaccccatgccacagctttccgcttctcataccctgtacgttgatttaggcgcacgcagttatcccatcagcatcgggcaggctctgctcgacgaccaaacggtagttgccgcgcacatcccgggcgcgcgcgtcgccattgtcaccaacacagttgttgcgcccctgtatctcgaccgtttgactgccacgctggaagcggccggcaagcacgttacgcagattgttttgccggatggcgaggaagaaaaaaactgggccaatctgatgaaagtgtttgatgtcctgctggcagaaaaatgcgatcggaaaactacgctgattgctttgggcggcggtgtgatcggagatatgaccgggtttgccgcagcagcgtacatgcgcggcgtgccatttatccaggtgcccaccaccttgctgtcgcaagtcgattcatccgtcggcggaaaaaccgggatcaatcatccgctcggcaagaatatgatcggcgctttttatcagccgcaagcggtgatcgccgatacctcgaccttgaataccttgccggcacgtgaattgtcggccggcttgtcggaagtgatcaagcatggtgcgatcatcgatgcgccattcttcgactggatagaagcgaatatcgcgaaactcgttgcaaaagatgcagatgctttggcatatgcgatcaagcgttcgtgcgaaatcaaggctgatgtagtgcgccaggacgagcgcgaaggcggcttgcgcgcgatcctgaatttcggccacaccttcggccacgcgattgaagccggcatgggctacggcgtctggctgcatggcgaagcggtcggttgcggcatggtgatggcagcggatctgtcgcagcgcctgggctttatcgatgctcgctcaaaagagcgcatcgtcgcggtcgtgaaggcggcaggattgcctacggttgcgccggatctgggcgttgcgcgctggctggagttgatggaagtcgacaagaaaaacgaaggcggcgccatcaagttcatactgctcaagcccttgggaacatccatcatcatgtccgtgccgcaagacttgctgctgcaaacattgaatgcatgcgtcgcctga

SEQ ID NO: 851 - protein, 554 aa, Herminiimonas arsenicoxydans
MGGNIFLVGLMGAGKTTVGRALAKRLNKQFIDSDHEIEARTGAAIPLIFEIEGEASFRQREAEVIRDLTAQQDIVLATGGGAVLNAENRAYLKSRGTVIYLRASVNNLLQRTSHDKNRPLLQTGDPRKTLEELSRIREPLYNEIADIVIDTGRPNVQFLMQSILAQLGPEHTQSATAVSLQQDLLSKHPMPQLSASHTLYVDLGARSYPISIGQALLDDQTVVAAHIPGARVAIVTNTVVAPLYLDRLTATLEAAGKHVTQIVLPDGEEEKNWANLMKVFDVLLAEKCDRKTTLIALGGGVIGDMTGFAAAAYMRGVPFIQVPTTLLSQVDSSVGGKTGINHPLGKNMIGAFYQPQAVIADTSTLNTLPARELSAGLSEVIKHGAIIDAPFFDWIEANIAKLVAKDADALAYAIKRSCEIKADVVRQDEREGGLRAILNFGHTFGHAIEAGMGYGVWLHGEAVGCGMVMAADLSQRLGFIDARSKERIVAVVKAAGLPTVAPDLGVARWLELMEVDKKNEGGAIKFILLKPLGTSIIMSVPQDLLLQTLNACVA

SEQ ID NO: 852 - DNA, 1080 bp, Burkholderia vietnamiensis G4
  CDS (1)..(1080): transl_table=11
atgattaccgtcaacgtcgatctgggcgaccgcgcctacccgattcacattggtgccggcctgattggccgcaccgagctgttcgctcctcacatcaacggttcgtcggtgacgatcgtcacgaacacgaccgtcgatccgctgtacggcgatgcgctgcgcgccgcgctcgcgccgctcggcaagcgcgtgtccaccgtcgtcctgccggacggcgaggcctacaagaactgggaaacgctcaacctgatcttcgacgggctgctcaccgagcgtgccgatcgcaagacgacgctgatcgcactcggcggcggcgtgatcggtgacatgaccggtttcgcggctgcctgctacatgcgcggcgtgccgttcatccaggtgcccacgacgctgctgtcgcaggtcgattcgtcggtcggcggcaagacgggcatcaatcatccgctcggcaagaacatgatcggcgcgttctaccagccgcaggcggtcgtcgccgatatcggcgcgctggcgacgctgcccgatcgcgagctggcggccggcatcgccgaggtcatcaagaccggcgcgatcgccgatgccgaattcttcgactggatcgaggccaacgtggacgcgctgaaccgccgcgagccggccgtgctcgtgcatgcggtgaagcgctcgtgcgagatcaaggcgagcgtggtcgccgccgacgagcgcgaaggcggcctgcgcgcgatcctgaacttcggccatacgttcggtcatgcgatcgaggccgggctcggctacggcgaatggctgcacggcgaggcggtcggctgcgggatggtgatggcgggcgatctgtccgtgcggctcggcctgctcgacgaagcatcgcggcagcggctcgatgcggtgatcgccgcggcccgtctgccggtgagcgggccggcgctcggcgaggcgcgctatatggacctgatgcgcgtcgacaagaaggccgaggccggcgcgatcaagttcatcctgctgaagcgattcggcgatacgctgatcgcgccggcacccgacgaagccgtgttcgccacgctggcgaagaccacccggtaa

SEQ ID NO: 853 - protein, 359 aa, Burkholderia vietnamiensis G4
MITVNVDLGDRAYPIHIGAGLIGRTELFAPHINGSSVTIVTNTTVDPLYGDALRAALAPLGKRVSTVVLPDGEAYKNWETLNLIFDGLLTERADRKTTLIALGGGVIGDMTGFAAACYMRGVPFIQVPTTLLSQVDSSVGGKTGINHPLGKNMIGAFYQPQAVVADIGALATLPDRELAAGIAEVIKTGAIADAEFFDWIEANVDALNRREPAVLVHAVKRSCEIKASVVAADEREGGLRAILNFGHTFGHAIEAGLGYGEWLHGEAVGCGMVMAGDLSVRLGLLDEASRQRLDAVIAAARLPVSGPALGEARYMDLMRVDKKAEAGAIKFILLKRFGDTLIAPAPDEAVFATLAKTTR

SEQ ID NO: 854 - DNA, 1110 bp, Dichelobacter nodosus VCS1703A
  CDS (1)..(1110): transl_table=11
atgaaacggctaacggttcatactgcggaaaaggcgcagcaatatcccattttgatcgcgcccgatctcattaaaaacgcgtcattatggcatctttattgttcagcgccgcacattgccattatcactaatgaaactgtcgcaccgctttatttatcgtcattaaaagcggcgttaacggataaaaaagtgatagatatcattttattagatggtgaatgtcataaaaatttagctacttatcagcatattttgaccactttattggaagcgcatttggggcgcgatggtttattaatcgctttaggcggtggcgtaatcaacgatattacaggatttgtggcagcgacttatcagcgtggaatttgttggataacgtttcctacaacattattggcgcaagttgatgctgctgttggcggtaaaaccggcgttaatcatgcttgcggaaaaaatatgatcggtgctttttatcccccgcaagcggttttgatggatacggcaacattatctacgcttccgccgcgcgaattttcggcaggactggcggaagtgattaaatacgcgctcatttatgatatttcttttttgtcgtggctcgaacaacatatggacgccgttttacgaaaagaaaaaatatctttagaaaacatgattatgaattgttgccgttataaatctgaaatcgtttgcgctgatgaacgcgaacaaggaatgcgcgctttgctgaattttgggcatacgtttggacatgcgttggaaacgatcaccgcttatcgccattggttgcacggcgaagcggtggcaatcggcatgcgtatggcagcggaattatcagaaatgcgcggtttgatttcggctgatgaaaaagcgcgcgtgattagtttattgcagcgcgctcatttgccaacggcaatcgatatccaattgaattgtgaggatatttatcaaacattatttttggataaaaaagtgcgcgcggggcaattgcgttttgtgctgttatcgggtttggggcaagcgcacgtggttgatgatgttaccgaaacggaaatttttgcagtgattgcggcgagtcgatctgaaaatgaatcatttgcgcgtttttaa

SEQ ID NO: 855 - protein, 369 aa, Dichelobacter nodosus VCS1703A
MKRLTVHTAEKAQQYPILIAPDLIKNASLWHLYCSAPHIAIITNETVAPLYLSSLKAALTDKKVIDIILLDGECHKNLATYQHILTTLLEAHLGRDGLLIALGGGVINDITGFVAATYQRGICWITFPTTLLAQVDAAVGGKTGVNHACGKNMIGAFYPPQAVLMDTATLSTLPPREFSAGLAEVIKYALIYDISFLSWLEQHMDAVLRKEKISLENMIMNCCRYKSEIVCADEREQGMRALLNFGHTFGHALETITAYRHWLHGEAVAIGMRMAAELSEMRGLISADEKARVISLLQRAHLPTAIDIQLNCEDIYQTLFLDKKVRAGQLRFVLLSGLGQAHVVDDVTETEIFAVIAASRSENESFARF

SEQ ID NO: 856 - DNA, 1080 bp, Dehalococcoides sp. BAV1
  CDS (1)..(1080): transl_table=11
ttgaaaagtattgggcttaatctaagtgggcgtgaatacaagatattgataggaagtgatttactgtctgaaacagccactctcctaagggaagctatcccttgtgacagagtggtagtcatcaccaatatagatataaacaggatttacggtaaaaagctgaaaaaacaccttgaatcaaagggcattgaaagcttgtttctggaacttcctgagggcgaaatacacaagactctggatatggccgcccatatctatccccagctaataaaccactttgccgaaaggaataccccgatactggctttgggcggcggggtaattggcgacctgagcgggtttgtagccgctacttaccagcggggtgtcccgcttatccacttgcctaccagcctgctgtcacaggtagattccagcatcggcggcaaagtggcggtaaaccatggcggggtcaagaatattgtaggcagtttttaccagccaaggttagtcattgccgataccggctgcttgaaaaccctgcccgaaaaagaatttgcctgcggcatggccgaaataataaagagtgccgccattggcagcagtgagttgttcagaatgctggaaacaaatacccaagcagtcaaagaccgttctccggaagttatggaagatattatcagccagactgccgccatcaaagccggcatagtctgtcaggacgaaactgaccgcggcatcagaaatatactgaatttcgggcacactctggggcacgcactggaaagcacctcgtctttcagccaaagccacggggcagcggtagctatcggcatgtgttttgccgccagactctcggtcaggctgggtttatgcgaaaatgaaactgccttgcggctggaaaaactgatagccgatttcgggctacccaccaaccccaaggatatagacccggacaaaattattgaagccatgcatcatgataaaaaggtatcagacggacgtatccgctttatactcttaaaaagaccaggggaggctttgatagctgaaaatatacttaagccggatgttctttccgtactggaggaaatgaaatga

SEQ ID NO: 857 - protein, 359 aa, Dehalococcoides sp. BAV1
MKSIGLNLSGREYKILIGSDLLSETATLLREAIPCDRVVVITNIDINRIYGKKLKKHLESKGIESLFLELPEGEIHKTLDMAAHIYPQLINHFAERNTPILALGGGVIGDLSGFVAATYQRGVPLIHLPTSLLSQVDSSIGGKVAVNHGGVKNIVGSFYQPRLVIADTGCLKTLPEKEFACGMAEIIKSAAIGSSELFRMLETNTQAVKDRSPEVMEDIISQTAAIKAGIVCQDETDRGIRNILNFGHTLGHALESTSSFSQSHGAAVAIGMCFAARLSVRLGLCENETALRLEKLIADFGLPTNPKDIDPDKIIEAMHHDKKVSDGRIRFILLKRPGEALIAENILKPDVLSVLEEMK

SEQ ID NO: 858 - DNA, 1095 bp, Klebsiella pneumoniae subsp. pneumoniae MGH 78578
  CDS (1)..(1095): transl_table=11
atggagaggcttactgttaccctcggggaacgtagttacccgattaccatcgcggctggtttgtttaacgatccagcttccttcctgccactcaagtcgggcgaccaggctatgctggtcaccaacgaaacgctggcgccgctttatctggataccgtccgctctgtgctggagcagtcaggggtcaacgttgacagcgtcattctgccagacggcgagcaatacaaaagcctggcggtgatggataccgtgtttactgcgctgttgcaaaaaccacatggccgcgacaccactctggtggcgcttggcgggggggtgatcggtgatttaaccggtttcgccgcggcaagctatcagcgcggcgtgcgtttcatccaggtccctaccaccctgttgtcgcaggtcgactcgtcggtcggcggcaaaaccgcagtgaaccaccctctcggcaaaaacatgattggcgccttctggcagccggtttccgtggtagttgatcttaactgtctgaaaactctgccgaagcgcgagctcgcttccggactggctgaggtcatcaagtacggggtgatcctggatggtgaattcttcagctggctggaaaacaacattgatgcgctgctggcgctggacgataccgccatggcgtactgcattcgccgctgctgtgaactgaaagcggaggttgtggcagccgacgagcgtgaaaccgggttacgtgctttactcaatcttggacataccttcggccatgctatcgaagcggaaatgggctacggtaactggctgcatggcgaagcggtggcggcaggtatggtgatggcggcacgcacgtccgaacggctggggcagttccgcgcgcaggatactcagcgcattatcgatctgctcaagcgtgcaggcttaccggtacgcggcccgcaggaaatgagtgcgcaggcgtatttgccccatatgatgcgcgataaaaaggtactggctggcgaaatgcggctggtgctcccgctcgcaataggaagcagcgagctgcgcggcggagtgccgcacgatgtggttcttggcgcgattgctgatactcagcaggcgcaacaataa

SEQ ID NO: 859 - protein, 364 aa, Klebsiella pneumoniae subsp. pneumoniae MGH 78578
MERLTVTLGERSYPITIAAGLFNDPASFLPLKSGDQAMLVTNETLAPLYLDTVRSVLEQSGVNVDSVILPDGEQYKSLAVMDTVFTALLQKPHGRDTTLVALGGGVIGDLTGFAAASYQRGVRFIQVPTTLLSQVDSSVGGKTAVNHPLGKNMIGAFWQPVSVVVDLNCLKTLPKRELASGLAEVIKYGVILDGEFFSWLENNIDALLALDDTAMAYCIRRCCELKAEVVAADERETGLRALLNLGHTFGHAIEAEMGYGNWLHGEAVAAGMVMAARTSERLGQFRAQDTQRIIDLLKRAGLPVRGPQEMSAQAYLPHMMRDKKVLAGEMRLVLPLAIGSSELRGGVPHDVVLGAIADTQQAQQ

SEQ ID NO: 860 - DNA, 1101 bp, Kineococcus radiotolerans SRS30216
  CDS (1)..(1101): transl_table=11
atgaccaccccgaccacgaaccctggacccgtccgcatcgccgtcgacggggaagccccctacgacgtcctcatcggccgcggcctgctgggggaactgcgcgggatgctgggcccgagggtcgcgaaggtcctcatcgtgcacccgcgggcgctgcgcagcaccggcgaggcggtgcgcgacgacctgatcgctcagggtctcgaagcgatcctggccgaggtccccgacggcgaggaggcgaagtcagcggaggtcgccgcgttctgctggacggtgctggggcagtcggacttcacccgctccgatgccgtcgtcggggtcggcgggggggcggtcaccgacctcgccgggttcgtggcggccacctggctgcggggggtccgcgtggtccaggtcccgacgacgctgctggcgatggtcgacgcggccgtcggcggcaagacgggcatcaacacggcggagggcaagaaccttgtcggctcgttccacccgccggcgggggtgctctgcgacctcgacgccctcgacaccctgccgctgcacgacctgcgggccgggctggctgaggtcgtgaagtgcggtttcatcgccgacccgcggatcctcgagctcgtcgaggccgacgtcgccgcggccaccgaccctcgctcgccggtgctggccgagctcgtcgagcgcgccgtgcgcgtgaaggcccgggtggtgggggaggacctcaaggagtccgacctgcgcgagatcctcaactacgggcacaccttcgcccacgccgtggagctcgtcgagcgctaccagtggcgccacggcgcggccgtcagcgtcggcctcgtctacgtcgccgagctggcccggatggccgggcggctgtccgacgcggacgccgaccggcaccggtccgtcctgcggtccctgggcctgcccacgacctaccgcggggaccggtggccgcagctgctcgacgcgatgaagcgggacaagaaggcccggggcgcgctgctgcggttcgtcgtcctcgacgggatcggcaagccctcccgcttggagggccccgaccccgcgatgctgcaggccgcctacgccgagatcagcgcggagtga

SEQ ID NO: 861 - protein, 366 aa, Kineococcus radiotolerans SRS30216
MTTPTTNPGPVRIAVDGEAPYDVLIGRGLLGELRGMLGPRVAKVLIVHPRALRSTGEAVRDDLIAQGLEAILAEVPDGEEAKSAEVAAFCWTVLGQSDFTRSDAVVGVGGGAVTDLAGFVAATWLRGVRVVQVPTTLLAMVDAAVGGKTGINTAEGKNLVGSFHPPAGVLCDLDALDTLPLHDLRAGLAEVVKCGFIADPRILELVEADVAAATDPRSPVLAELVERAVRVKARVVGEDLKESDLREILNYGHTFAHAVELVERYQWRHGAAVSVGLVYVAELARMAGRLSDADADRHRSVLRSLGLPTTYRGDRWPQLLDAMKRDKKARGALLRFVVLDGIGKPSRLEGPDPAMLQAAYAEISAE

SEQ ID NO: 862 - DNA, 1785 bp, Xanthobacter autotrophicus Py2
  CDS (1)..(1785): transl_table=11
gtgacgcctgccccggtgacacctgctccggtgacgcctgccgacatggtccgccgcctcgggcgccgctccatcgtgctggtgggcatgccgggggccggcaagtcgtcggtgggccgcaggctcgccaagcggctcggcctgcccttcgtggatgccgacgaggagatcgagcgcgccgcctgcatgagcattccggaaatcttcgcccgccgtggcgaggtggagttccgcgagggcgagaagcgggtagtggcgcggctgctccagtccggccccagcgtgctcgccaccggcggcggcgccttcatgaacagtgagacccgcgacgcggtggcccgccagggcgtctcggtctggctgcgtgccgacctccacaccctgctcaggcgtgtgaagaagcgcaccgaccgccccctccttgcccagggcgacccggcggcgaagctcgccaccctgctgcagcagcgcggcgacacctacgccctcgccgacgtgatcgtggacagccgcgacgtggtgcacgagatggtggtggaagaggtgatcggcgccgtgcaccgccatctcatccagtatcccgaagggacccgttccatgtccgcccctattggtcccgccgccctcggccccgccgatctggcccatgccgagcccgagcccctgcccgtcggcgacatcacccgcagcaccgtgcgcgtggatctggccgggcggccctatgacatctatatcggccccggcctgctggccgaggcgggcacccatgtgaccgtgctgcgcaagggcgcgcgggtcgccatcgtcaccgacgccaacgtggcggccgccgggcacctgaagacggttcaggactcgctatccgccgccggcatcgaccatacggccatcgtggtggagccgggcgagaagaccaagggctggcccggcctccagcaggtggtggaaggcctgatttccgcccgcattgagcggcgcgacctggtgctggcgctgggtggcggcgtggtgggcgacctcgcgggcttcgccgcctcggtgctgcggcgcggggtggacgtggtgcaggcgccgaccaccctgctcagccaggtggactcttccgtcggcggtaagaccggcatcaactcgccccagggcaagaacctggtcggcgccttccaccagccggtgctggtgttggccgataccgcagcgctggacaccctgcccgtgcgcgaggtgcgcgccggctatgcggaagtggtgaaatacggcctgctcggcgaccgcgccctgttcgacacgctggagcgcgacttcgccggcgtcatcaatggcgggccggagcgcatctcggccgtggcggcgagctgcatggccaaggccgccatcgtcgcccgcgacgagaaggagaccggcgaccgggcgcttctcaacctcggccacaccttcggccacgcgctggaggcgggcgccggctattccagccgcctgctgcacggcgagggcgtcgccatcggcatggcgctggccttcgccttctcggcgcgactcggcctgtgcccgggacaggacgtgacgcgggcggtgcggcacctggaagccgccggcctgcccacgaagatttccgacgtgccgggcgaattgccggacacggacgggctgatggccctcatcgcccaggacaagaaggtcagccgcggcgcactcaccttcatcctggtgcgcggcatcggcgaggccttcgtggccaaggacgtgaacccggacgaggtgcgcgccttcctggcggagatgcgctga

SEQ ID NO: 863 - protein, 594 aa, Xanthobacter autotrophicus Py2
MTPAPVTPAPVTPADMVRRLGRRSIVLVGMPGAGKSSVGRRLAKRLGLPFVDADEEIERAACMSIPEIFARRGEVEFREGEKRVVARLLQSGPSVLATGGGAFMNSETRDAVARQGVSVWLRADLHTLLRRVKKRTDRPLLAQGDPAAKLATLLQQRGDTYALADVIVDSRDVVHEMVVEEVIGAVHRHLIQYPEGTRSMSAPIGPAALGPADLAHAEPEPLPVGDITRSTVRVDLAGRPYDIYIGPGLLAEAGTHVTVLRKGARVAIVTDANVAAAGHLKTVQDSLSAAGIDHTAIVVEPGEKTKGWPGLQQVVEGLISARIERRDLVLALGGGVVGDLAGFAASVLRRGVDVVQAPTTLLSQVDSSVGGKTGINSPQGKNLVGAFHQPVLVLADTAALDTLPVREVRAGYAEVVKYGLLGDRALFDTLERDFAGVINGGPERISAVAASCMAKAAIVARDEKETGDRALLNLGHTFGHALEAGAGYSSRLLHGEGVAIGMALAFAFSARLGLCPGQDVTRAVRHLEAAGLPTKISDVPGELPDTDGLMALIAQDKKVSRGALTFILVRGIGEAFVAKDVNPDEVRAFLAEMR

SEQ ID NO: 864 - DNA, 1092 bp, Prochlorococcus marinus str. MIT 9215
  CDS (1)..(1092): transl_table=11
gtgaataagagaaaaatattagtcccattaggtgaaaagtcatacgaagtaactctagaagcagggatactgaataatatcagcgaagaactcttaaaaattggaataacaaagaaaagaaaaatacttgtgatttcaaatgaagaaatatcaaatttgtatggtaaaaaattcttaaataatttaaaagataataaatttcaggccaaaatgttccttatcaaggctggagaatcatataaaaacttaaaaaccttaagtgaaatatatgatgtagcatttgaatttggcttagatagaaattcaataattattgcccttggaggaggaattgttggagatgtaagtggttttgctgctgcgacttggctgagaggtatcgaatatattcagattccaacaacattattatcaatggttgattcatctgtgggaggaaaaacaggcgtaaatcatccaaaaggaaaaaatttaattggagcttttaatcaacctaaagcagtttttattgacccagaaaccttaaaaagtttacccaaaagagaatttagtgctggtatggctgaagtaataaaatacggagtaataagagataaagagcttttcgaatacctagaaattgataaaaacaaaaatgaactgataaatctcaaaaatgaatatttaattaaaataattaatagttcaattaaaacaaagtctcatgttgtttctcaagacgaacatgaaaatggtgttagagcaatattgaattatggtcattcttttggtcacgttattgaaaatttatgtggatacggcaaatttctgcatggtgaggcgatatcaattggtatgaatattgcggggaaaatagcaattgaaaaagggttatggtctaaagaagaattagagagacagcgagttctcttagagagttatgatcttcctaccgagatcccaaaaataaataaagaagacgttctaacaatacttatgggtgataaaaaagttcgtgatggcaaaatgagatttatattaccgaaagaaattggtgctgttgatatatatgatgacgtagaagattcattatttttaaagtttttttcttaa

SEQ ID NO: 865 - protein, 363 aa, Prochlorococcus marinus str. MIT 9215
MNKRKILVPLGEKSYEVTLEAGILNNISEELLKIGITKKRKILVISNEEISNLYGKKFLNNLKDNKFQAKMFLIKAGESYKNLKTLSEIYDVAFEFGLDRNSIIIALGGGIVGDVSGFAAATWLRGIEYIQIPTTLLSMVDSSVGGKTGVNHPKGKNLIGAFNQPKAVFIDPETLKSLPKREFSAGMAEVIKYGVIRDKELFEYLEIDKNKNELINLKNEYLIKIINSSIKTKSHVVSQDEHENGVRAILNYGHSFGHVIENLCGYGKFLHGEAISIGMNIAGKIAIEKGLWSKEELERQRVLLESYDLPTEIPKINKEDVLTILMGDKKVRDGKMRFILPKEIGAVDIYDDVEDSLFLKFFS

SEQ ID NO: 866 - DNA, 1113 bp, Prochlorococcus marinus str. MIT 9211
  CDS (1)..(1113): transl_table=11
gtgaaccaaaactcaatccgaataaaaataaaattagctcacaacccatatgaagttgtaattaagaaaaatggtttagcgcgaataggcgaagagttaaaaaaaataggcttcaagaaagcaacaaaagttcttgtagttaccaataaagatgtttcagtccactatggaaaagagtttattcacaacctaagtgacaatggcttcaacccaaccttaattgagataaaagcaggggaagaaagaaagaatctcgcaaccatatctgatattcacaatgctgcttacacatcaagacttgaaaggggttcattaatgattgcccttgggggtggagttattggcgatatgacaggctttgcagctgctacctggctaagaggagtttcttttgtacaagttcctacaactttactagccatggttgatgcctctgttggaggcaaaacgggagtcaaccatcccaaagggaagaacctaataggtgcgtttcatcagccaaaactagttctgattgatccaataacattaaaaaccctgcccgaacgtgaattcaaagctgggatggcagaagtcatcaaatatggtgttattagtgacaaaaagttattccggaaactggaagatgcaccaagacttgacaagctagaaacacttactgacagatttttattggagataatccaaaggtccgttcaaactaaagcacatatcgtagaactagatgagcgagagggtggcatacgagctgtacttaattatggtcatacatttggacatgcgattgaagctttatgtggctatggtacatggcttcacggtgaagctgtttctatgggcatgatcgccataggtcaactagctttagagcgaaacatatggaatattagcgacctagaaagacaacgtaaggttctgtgtcaagcagggttgcctacaatttggccaagggtttgtgctgaagatgttatagaaatacttaaaagtgataaaaaagttaaagatggtgagatcaactttatcgttccaactgaaattgggaaagtagaaattattaaaaattttaccgtcaatgaaatcaaacaagcacttcagaagttagcatccaaataa

SEQ ID NO: 867 - protein, 370 aa, Prochlorococcus marinus str. MIT 9211
MNQNSIRIKIKLAHNPYEVVIKKNGLARIGEELKKIGFKKATKVLVVTNKDVSVHYGKEFIHNLSDNGFNPTLIEIKAGEERKNLATISDIHNAAYTSRLERGSLMIALGGGVIGDMTGFAAATWLRGVSFVQVPTTLLAMVDASVGGKTGVNHPKGKNLIGAFHQPKLVLIDPITLKTLPEREFKAGMAEVIKYGVISDKKLFRKLEDAPRLDKLETLTDRFLLEIIQRSVQTKAHIVELDEREGGIRAVLNYGHTFGHAIEALCGYGTWLHGEAVSMGMIAIGQLALERNIWNISDLERQRKVLCQAGLPTIWPRVCAEDVIEILKSDKKVKDGEINFIVPTEIGKVEIIKNFTVNEIKQALQKLASK

SEQ ID NO: 868 - DNA, 1089 bp, Salmonella enterica subsp. arizonae serovar 62:z4,z23:--
  CDS (1)..(1089): transl_table=11
atggagaggattacagtcactctcggggaacgtagttacccgatcaccatcgcggctggtttgtttaacgaaccagcttcattcttgccgctgaaatcgggcgatcaggtcatgttagtgaccaatgaaaccttggcgccgctttatctggataaggttcgcggcgtactccaacgggcgggcgttaacgtagacagcgtgattctccctgacggcgagcggtataaaagcctgacagtgctggatacggtgtttacggcgttactgaaaaaaccgcatggtcgtgataccacgctggtcgcgcttggcggcggcgtgattggcgatctcaccggttttgcggcggccagctaccagcgaggcgttcgttttatccaggtgccgactaccctactgtcgcaggttgactcctccgttggcgggaagaccgctgtcaaccatccccttggcaaaaacatgattggcgcgttttaccaacccgcttctgtggtcgtcgatcttgattgcctgaaaacccttcccgcacgcgaactggcatcagggctggcagaggtgatcaaatacggcatcatactcgacgcggacttcttcacctggcttgagggtaatctggatgcgttattgcgtctggacggcccggcgatggcgtactgtattcgtcgttgttgtgagctgaaagcggaagttgttgccgccgacgagcgtgaagctggcttacgtgctttactgaatcttggacatacttttggccatgccattgaagcggaaatgggatatggcaattggttacatggcgaagccgtagccgcaggtatggtgatggctgcgtgcacctccgaacgtctgggacagttcagttctgctgatacgcagcgcattatcgctctgctcagacgggctgggttgcctgtcaacggccctcgcgagatgtccgctcaggcctatttgccgcacatgctgcgagataaaaaagtgttggcgggagagctgcgtttagtgcttccgctggccatagggaaaagtgaagtacgcggcggagtgtcgcacgaagtcgttcttagcgcgattgctgattgtcagcaggcgtaa

SEQ ID NO: 869 - protein, 362 aa, Salmonella enterica subsp. arizonae serovar 62:z4,z23:--
MERITVTLGERSYPITIAAGLFNEPASFLPLKSGDQVMLVTNETLAPLYLDKVRGVLQRAGVNVDSVILPDGERYKSLTVLDTVFTALLKKPHGRDTTLVALGGGVIGDLTGFAAASYQRGVRFIQVPTTLLSQVDSSVGGKTAVNHPLGKNMIGAFYQPASVVVDLDCLKTLPARELASGLAEVIKYGIILDADFFTWLEGNLDALLRLDGPAMAYCIRRCCELKAEVVAADEREAGLRALLNLGHTFGHAIEAEMGYGNWLHGEAVAAGMVMAACTSERLGQFSSADTQRIIALLRRAGLPVNGPREMSAQAYLPHMLRDKKVLAGELRLVLPLAIGKSEVRGGVSHEVVLSAIADCQQA

SEQ ID NO: 870 - DNA, 1131 bp, Pseudomonas putida GB-1
  CDS (1)..(1131): transl_table=11
atggcgccgcgcccaagtacattgtggggatacatgcagacactaaaggtcgacctgggcgagcgtagctacccgatctacattggcgaaggcctgctggaccagcccgaactgctggcgccgcacattgccggccggcaggttgccatcgtttccaacgagaccgtcgcccccctgtatctcgaacgcctgagcaagaccctgggtgcctactcggtactgccggtggtgttgcccgatggcgaagcccacaagaattgggaaaccctgcaactgattttcgatggcttgctgacagcccgccatgatcgtcgcaccaccgtggtcgccctgggcggcggcgtgatcggcgacatggccggcttcgctgccgcttgctaccagcgcggtgtcgacttcatccaggtgccgaccaccctgttgtcccaggtcgactcttcggtgggcggcaagaccggcatcaatcacccgctgggcaagaacatggtcggtgccttctatcagcccaatgcggtactgatcgataccaccagcctcaagaccctgcccgcgcgcgaactgtccgcaggcctggccgaagtgatcaagtacggcctgatttgcgacaaaccgttcctcgcctggctcgaagacaatatgcaggccctgcgcgcccttgactcggcagccctgaccgaggccatccgccgctcctgcgcggccaaggccgcagtagtgggggccgacgagcgcgagtcgggcgtacgggccacgctgaacctggggcataccttcgggcatgccatcgaaacccacatgggctatggcgtgtggttgcacggcgaggccgtggcggcgggcacggtgatggccctggaaatgtccatgcgtcttggctggatcgaccaggccgagcgcgatcgcggtatccgcctgttgcaggatgcaggtttgccggtggtgccaccacaggaaatgaccccggcgcatttcatggagcacatggcggtcgacaagaaggtgctcgacggtcgtctgcgtctggtgctgctgcgccagatgggcgaggccgtagtgaccgacgactattcgaaagagattctacaggccacgctgtcggcggattaccgcgcgatcgtggcccagctttga

SEQ ID NO: 871 - protein, 376 aa, Pseudomonas putida GB-1
MAPRPSTLWGYMQTLKVDLGERSYPIYIGEGLLDQPELLAPHIAGRQVAIVSNETVAPLYLERLSKTLGAYSVLPVVLPDGEAHKNWETLQLIFDGLLTARHDRRTTVVALGGGVIGDMAGFAAACYQRGVDFIQVPTTLLSQVDSSVGGKTGINHPLGKNMVGAFYQPNAVLIDTTSLKTLPARELSAGLAEVIKYGLICDKPFLAWLEDNMQALRALDSAALTEAIRRSCAAKAAVVGADERESGVRATLNLGHTFGHAIETHMGYGVWLHGEAVAAGTVMALEMSMRLGWIDQAERDRGIRLLQDAGLPVVPPQEMTPAHFMEHMAVDKKVLDGRLRLVLLRQMGEAVVTDDYSKEILQATLSADYRAIVAQL

SEQ ID NO: 872 - DNA, 1131 bp, Clavibacter michiganensis subsp. sepedonicus
  CDS (1)..(1131): transl_table=11
atgaccgaccagaacgcccccgcacccgactccgtggaccgtgccgccgccgagcccgacgcgcccaccgtgatccgcgtctccggcacgcccggctacgacgtcaccgtgggtcgcggcctcgtccagggcgtgggcgcgctgctcggcccgcgcgtgcgcaaggtgctcatcgtgcacgcgcccgccctcgcagaggaggcatcgcggctgcgcgagcggctgcagggcgacgtggaggtgtacctcgcggaggtgcccgacgcggagggtgccaagcgcgtcgaggtcgccgcgttctgctggaagatcatgggcaccaccgacttcacgcgctcggacgccgtcatcacgctcggtggcggcgccacgaccgacctcggcggattcgtcgcggcgacgtggctgcgcggcgtcatgctcatccagatcccgacgacggtgctcgccatggtcgacgccgccgtgggcggcaagaccggcatcaacacgtccgagggcaagaacctcgtcggcgccttctacgcgccgaccgccgtgatcgtcgacctcgacctgctcgcgaccctgccgcggaacgagatcgtcacgggcttcgccgagatcgtgaaggccggcttcatcgcggtgcccgagatcctcgacatcatcgagcgcgacgtcgcgcgcgtcacggaccccaccagcccggagttccgccgggtcgtcgagctgtccatcgcgatgaaggccgaggtcgtgggggaggacttcacggagaagggccgtcgcgagatcctcaactacgggcacacgctcggccacgccatcgagcacgccgagcgctaccgctggcggcacggcgcggccgtcgcggtgggcatggtcttcgcggccgagctctcgcgcctcacccgctcgctgtccgacgaggccgtcgaccggcaccggcggatcctcgactcgctcgacctgccgaccagctaccccgtcggccgctggcccacgctcgtcgcgagcatgaagcgcgacaagaaggcccgcggcgacatgatgcgcttcatcgtgctcgacggcgtcggccgtgcgagcgtgctcaacgggcccgaggaggcgctgctgttcgcggcataccaggagatcggctcgtga

SEQ ID NO: 873 - protein, 376 aa, Clavibacter michiganensis subsp. sepedonicus
MTDQNAPAPDSVDRAAAEPDAPTVIRVSGTPGYDVTVGRGLVQGVGALLGPRVRKVLIVHAPALAEEASRLRERLQGDVEVYLAEVPDAEGAKRVEVAAFCWKIMGTTDFTRSDAVITLGGGATTDLGGFVAATWLRGVMLIQIPTTVLAMVDAAVGGKTGINTSEGKNLVGAFYAPTAVIVDLDLLATLPRNEIVTGFAEIVKAGFIAVPEILDIIERDVARVTDPTSPEFRRVVELSIAMKAEVVGEDFTEKGRREILNYGHTLGHAIEHAERYRWRHGAAVAVGMVFAAELSRLTRSLSDEAVDRHRRILDSLDLPTSYPVGRWPTLVASMKRDKKARGDMMRFIVLDGVGRASVLNGPEEALLFAAYQEIGS

SEQ ID NO: 874 - DNA, 1098 bp, Synechococcus sp. PCC 7002
  CDS (1)..(1098): transl_table=11
atggacgcaacaacgcgggtagaactgggagaaaatagctacgatattgcgatcgccaaagaaagcctccaacaaatcgggacttttctccgtcccctcgacttgggtcagaaggtcttaatcgtctccaacccggaaatttacggccactacggcgaaacggtggtgaattctctccaggccgctggctttagcgttgatacccacctaatccctgctggagaacaatataaaaatctggcctccatcgaaaaaatttacgacacagcctttaaaaatcgccttgaacgctcctcgacactgctcgcccttgggggtggtgtgatcggcgacatgactgggtttgcagcggccacctggctccggggcattaactttgtgcaggtgcccacaactctattggcgatggtcgatgcgtccgttggcggtaaaacaggggtcaatcatccccaaggcaagaatttaatcggggcgttctaccagccgaaatttgtcctcatcgacccgacggtactcaagactttgccggtgcgagaattccgggcgggcatggcggaagtgattaagtacggtgtgatttgggacgccgatctctttacgaaactcgaagccgctgagcagattgatagctacgcaaccattgaccccgatttgctggatctcatcctcgaacgttcttgccgggcgaaggcagaagtcgtcagtcaagatgagcgggaatcgggtttgcgggccattttgaactacggccacaccctcggtcatgccgtcgaaagtttgacccactacgaaacctttgtccatggggaaggggttgccattgggatggccctggcaggggcgatcgccacccggatgaatctctggacgacggctgagacccaacgccaagatgccttgattaaaaaagcgggtcttcccaccgaatgccccaataatttagcgattgaagcgattctggagaccctccagagcgataaaaaagtgaagtcggggaaagtgcggtttgtcctcccgaccaaaattggggaggtcttaatcaccgatcaagtcagcgccgacctgatcaccgacgttttagcacccgccctctgctag

SEQ ID NO: 875 - protein, 365 aa, Synechococcus sp. PCC 7002
MDATTRVELGENSYDIAIAKESLQQIGTFLRPLDLGQKVLIVSNPEIYGHYGETVVNSLQAAGFSVDTHLIPAGEQYKNLASIEKIYDTAFKNRLERSSTLLALGGGVIGDMTGFAAATWLRGINFVQVPTTLLAMVDASVGGKTGVNHPQGKNLIGAFYQPKFVLIDPTVLKTLPVREFRAGMAEVIKYGVIWDADLFTKLEAAEQIDSYATIDPDLLDLILERSCRAKAEVVSQDERESGLRAILNYGHTLGHAVESLTHYETFVHGEGVAIGMALAGAIATRMNLWTTAETQRQDALIKKAGLPTECPNNLAIEAILETLQSDKKVKSGKVRFVLPTKIGEVLITDQVSADLITDVLAPALC

SEQ ID NO: 876 - DNA, 1089 bp, Haemophilus somnus 2336
  CDS (1)..(1089): transl_table=11
atgctgtgtgtaaatgtagaactaagggaacgtagttatcctatccatatcggaatggggttattatccgaaccacaagtttatccgctaaaaaaaggcgataaggtgatgattgtaactaaccctacagttgcacagtattatttatcctctataacagacaccttagaaaaaattggttgctcggtagagaatgtgcaactcccagaaggtgaacaatacaaaactttagaatctctagacttaatttttaccgcacttttaaaagctaatcatggacgagatacctctattattgcactgggtggcggtgtgatcggtgatattgccggatatgcagcggcaagctatcaacgtggtgtccgttttattcaaattccaaccactttacttgctcaagtagattcttccgttgggggaaaaacggctgtcaatcacaaattaggaaaaaacatgatcggtgctttttatcaaccttgtgccgttattattgatacgctaacgctaactactttacctaaaagggaaattcacgcaggtttagctgaagtcattaaatatggtgctattttagatgatgaattttttacatggctagaaaaacatataactaatttagttgctttagaacaacaatatttacagcagtgcattgctcgctgttgtcaaattaaagcagatgtggttactcgtgatgaaactgaaaaaggagagcgtgcgttattaaatttaggtcatactttcgggcatgctatcgaaactcaccttggatatggaaattggttacatggagaagcagtcgcaaccggaatgatgatagctgcggtcttgtctaataaattaggtgatttatcacttaacgatgtaacgagactggagaaacttttaactcaagcagatttacctacagcctcgcctgatacaatgaaagctgaagattatctaccacatatgatgcgtgataaaaaggttcttgctggaaaattacgcctagtcttactaaaatcacttggtcaagcctacgttgcaacagatacggacaaagaatacgtgcttgatgcaattcgtacctgttcaaaaaaaagttaa

SEQ ID NO: 877 - protein, 362 aa, Haemophilus somnus 2336
MLCVNVELRERSYPIHIGMGLLSEPQVYPLKKGDKVMIVTNPTVAQYYLSSITDTLEKIGCSVENVQLPEGEQYKTLESLDLIFTALLKANHGRDTSIIALGGGVIGDIAGYAAASYQRGVRFIQIPTTLLAQVDSSVGGKTAVNHKLGKNMIGAFYQPCAVIIDTLTLTTLPKREIHAGLAEVIKYGAILDDEFFTWLEKHITNLVALEQQYLQQCIARCCQIKADVVTRDETEKGERALLNLGHTFGHAIETHLGYGNWLHGEAVATGMMIAAVLSNKLGDLSLNDVTRLEKLLTQADLPTASPDTMKAEDYLPHMMRDKKVLAGKLRLVLLKSLGQAYVATDTDKEYVLDAIRTCSKKS

SEQ ID NO: 878 - DNA, 1098 bp, Cyanothece sp. ATCC 51142
  CDS (1)..(1098): transl_table=11
atgtcctctgtcattcaagttaatttaccccagacaagctacaatatcattatttctcccaacagtttagggagtgtaggcagacatctaacctcactgaacttagagcaaaaaattttggtgatttctaacccagaaatttttgattactatggagaaatagtcattaattcactcaagcaagcagggttcaaagtattttcccatgtcattccagcaggagaaacttataaaactttagacagtatttctaagatttatgatactgctttaaaacatcgtttagaaagagcatcgaccttattagccttgggaggtggagtcatcggagatatgacagggtttgctgcagcaacttggttaagaggcattaattttattcaagttcctacctctttattggcaatggtagacgcatctattggaggaaaaacaggggtcaatcaccctcaaggaaaaaatttaattggtgctttttatcaaccccgtttagtgttgatcgatccgatagttttaaaaacattacctgtcagagaatttagagcaggaatggccgaagtgattaaatatggagtaatttggaaccaaggtttatttaatcagttagaaagacaaaaaaaattagatagtttagatagtattaatttagaaacaatacaaacaattattacccagtcttgtcaagcaaaagttgatgtcgtgagtcaagacgaaaaagaagcagggcttagagccattttaaactatggccatacgattggtcatgctttagaaagtttaaccggctatcgtgaaattaatcatggagaagccgtggcactcggcatggtagcagcagggaaaatagcagtaaaattaggaatgtggaaagaagaaatgagccaaaggcaaaaaaatatcattcaaaaagctgctttaccggtaatagttgattaccccttgaaatctcaagctattctagaaagtttacaactagataaaaaagtaaaagcaggaaaagttcgctttattttaccgacggatatcggccaggtagaaattagggaaggggttccctccgaagtgattacaagagtattagaagaaataaaaatgtaa

SEQ ID NO: 879 - protein, 365 aa, Cyanothece sp. ATCC 51142
MSSVIQVNLPQTSYNIIISPNSLGSVGRHLTSLNLEQKILVISNPEIFDYYGEIVINSLKQAGFKVFSHVIPAGETYKTLDSISKIYDTALKHRLERASTLLALGGGVIGDMTGFAAATWLRGINFIQVPTSLLAMVDASIGGKTGVNHPQGKNLIGAFYQPRLVLIDPIVLKTLPVREFRAGMAEVIKYGVIWNQGLFNQLERQKKLDSLDSINLETIQTIITQSCQAKVDVVSQDEKEAGLRAILNYGHTIGHALESLTGYREINHGEAVALGMVAAGKIAVKLGMWKEEMSQRQKNIIQKAALPVIVDYPLKSQAILESLQLDKKVKAGKVRFILPTDIGQVEIREGVPSEVITRVLEEIKM

SEQ ID NO: 880 - DNA, 1092 bp, Nostoc punctiforme PCC 73102
  CDS (1)..(1092): transl_table=11
atgacttctttaattaatgtaaatttaccagagcagtcttatgagattgcgatcgcaccatcaaatttagatcaactgggtcaacagatggccaatctgaagctaggcaagaaggtattgctagtttctaatccgacgatttttaagcattatggggaaagagcaattacatccctgaaatctgcgggatttgaagttgctagctgcaccttaccacctggtgaacgctacaaaaaccttaattccatccaaaaactctacgatgtcgccttagaaaaccgcttagaacgttctgctactatggtggctttgggcggaggtgtaattggcgatatgactggctttgccgccgcaacctggctgcgcggcattaatgttgtccaagtacctacaactctcttggcgatggtagattcggcaattggtggcaaaactggcgtaaatcatccccacggtaaaaacttgattggggcattccatcagccgcgcttggttttgattgacccagatgttttaaaaacccttccgatgcgcgaatttcgggcaggaatggcagaagttattaagtacggtgtaatttgggatgctgaattgtttgcccagttggaagcaagtaaacggctcgaccaactccgctatgtaaaacctgagctaatagacagcatcttaacgcgctcttgtcaagccaaagctgacgttgttggcaaagatgagaaagaaggcggattacgcgcaattctcaactatggacataccatcggtcatgcagtggaaagcttgactggttatcgtttagtgaatcacggtgaagccgtagccattggtatggtagcagccggccaaattgctgtggaattgggaatgtggcaaaaagaagatacagaacgtcaaaatgctttaattcaaaaaacgggtttaccgactcagttaccatctggggtagatattgaagcaattattgatgcgttgcaactagataaaaaagtcaaagcaggaaaagtacggtttgttttaccaacagagattggtgtagttacagttaccgatgaagtgccatcagatatcattcggcaagtcttgcagggaatgtga

SEQ ID NO: 881 - protein, 363 aa, Nostoc punctiforme PCC 73102
MTSLINVNLPEQSYEIAIAPSNLDQLGQQMANLKLGKKVLLVSNPTIFKHYGERAITSLKSAGFEVASCTLPPGERYKNLNSIQKLYDVALENRLERSATMVALGGGVIGDMTGFAAATWLRGINVVQVPTTLLAMVDSAIGGKTGVNHPHGKNLIGAFHQPRLVLIDPDVLKTLPMREFRAGMAEVIKYGVIWDAELFAQLEASKRLDQLRYVKPELIDSILTRSCQAKADVVGKDEKEGGLRAILNYGHTIGHAVESLTGYRLVNHGEAVAIGMVAAGQIAVELGMWQKEDTERQNALIQKTGLPTQLPSGVDIEAIIDALQLDKKVKAGKVRFVLPTEIGVVTVTDEVPSDIIRQVLQGM

SEQ ID NO: 882 - DNA, 1116 bp, Synechococcus sp. CC9605
  CDS (1)..(1116): transl_table=11
atgaccacaatcaccccgttgcatcacatccgcgttgcgctggagcgcaatccctacgaggtggtgattggaaacggcggccttgccagacttggtcagcagatgctggacgctggtgtgcaggctgatcggcgtgtgctggtggtcagcaatcccgatgtcgccaacccctatggcgatgcctgccttaacagcctcagagaggcaggtttcagcgtggagcttttggtgattgacgccggcgaacaccagaagacgcccgccacggtggcggagatccacgacgcggcttacagcgccaagctcgaacgcagctccttgatggtggcccttggcggaggcgttgtgggggacatgaccggttttgcagcagccacctggctgcggggcatccaggtggtgcaagtgcccacaaccctgctggccatggtggatgcgtcgatcgggggtaagaccggggtcaaccatccccgcggcaaaaacctgatcggtgcctttcaccagccgcggctggtgctgatcgatccatcgaccctcaacactctgcccgaacgcgagttccgggccggcatggccgaagtaatcaagtatggaatcctcggcgatacggcgctgttcgaagaactggaagcttgccccgacccgagcacgcctgcgggtcttggtgcggaacgcctgagctcgattctgcagcgatcggccgcggccaaggcacgggtggtggccgccgacgaaaaagaaggtagcctgcgggcgatcctcaactacggccataccttcggccatgtggtggagaccctctgcggctatggcacctggctccatggtgaagcggtcgccattggcatggtggcggtgggcgaacttgcggtacttcggggcagctggagccgcgatgatgctgagcgccaacgccgactgatcgagagcgccggactccccaccgcctggccggatctctccgctgatgcggttttaaacagcctgcagggggacaaaaaggtgcgtgacggccgcctgcgcttcgtgatgcccaccggcatcggatccgttgagatccgcgatgacgtcagtcgtgaggaaattctgagctgcctggagcgcctgaaaggctga

SEQ ID NO: 883 - protein, 371 aa, Synechococcus sp. CC9605
MTTITPLHHIRVALERNPYEVVIGNGGLARLGQQMLDAGVQADRRVLVVSNPDVANPYGDACLNSLREAGFSVELLVIDAGEHQKTPATVAEIHDAAYSAKLERSSLMVALGGGVVGDMTGFAAATWLRGIQVVQVPTTLLAMVDASIGGKTGVNHPRGKNLIGAFHQPRLVLIDPSTLNTLPEREFRAGMAEVIKYGILGDTALFEELEACPDPSTPAGLGAERLSSILQRSAAAKARVVAADEKEGSLRAILNYGHTFGHVVETLCGYGTWLHGEAVAIGMVAVGELAVLRGSWSRDDAERQRRLIESAGLPTAWPDLSADAVLNSLQGDKKVRDGRLRFVMPTGIGSVEIRDDVSREEILSCLERLKG

SEQ ID NO: 884 - DNA, 1095 bp, Moorella thermoacetica ATCC 39073
  CDS (1)..(1095): transl_table=11
gtggctggagagcttaacgtagacctgggcgagcgaacttataaaatccactgcggctccggattgctgccggtggcaggttccatcttgcgtaatcttaatctggcagccccctgcctggtggtaagcaatgccactgtggccgggctctactggcctgtgctggaatccagcctgaaggccggaggctttaacccccacctggccctggtacccgatggagaagaggccaaaacccttcaggtggcagctagcctctacgactccgccctggccgccgggatcgagcgccaggccgccgtcatcgccctgggcggcggagtggtgggcgatgtctccgggtttatagccgccacctggctgcggggggttcctttcatccaggtgcccaccaccctcctggcccaggtggattccagcgtcggcggcaaggtggccgtcaaccaccccggcggcaaaaacctcatcggcgccttttaccagccgctggccgttatcgccgatctggataccctgaccaccctgccgccgcgggagatccgggccggcctggctgaggtcatcaagtacggggtaatcggcgacgccagcttttttgcttatttagaagagcacctggagggagccctggccggggataaggaagtcctggaaaccatcgtcctgcgtagctgcgccatgaaggcggcggtggtggccagggacgagcgggaaagcggcctgcgggccgtcctgaacttcgggcatacagtcggtcatgccgttgaggccgttaccggttttaccgcctaccgccacggtgaggcggtggccatgggtatggtggccgccgcccgcctggccgtccggcggggtatgttttctatggaagagaccgggcggctggtgcgccttttagcaagggccggcctgccggtgaccctgccggacctcgatccggcaaccttccgggcggccctgggccacgacaaaaagatccgccagggccagctgcggatggtcctgccggaaagcctgggccgggtgcgtcttgtccccgtcagtatcgaggaaatcgcggcggtggttgaaaacggtgcggcagcggaggggtga

SEQ ID NO: 885 - protein, 364 aa, Moorella thermoacetica ATCC 39073
MAGELNVDLGERTYKIHCGSGLLPVAGSILRNLNLAAPCLVVSNATVAGLYWPVLESSLKAGGFNPHLALVPDGEEAKTLQVAASLYDSALAAGIERQAAVIALGGGVVGDVSGFIAATWLRGVPFIQVPTTLLAQVDSSVGGKVAVNHPGGKNLIGAFYQPLAVIADLDTLTTLPPREIRAGLAEVIKYGVIGDASFFAYLEEHLEGALAGDKEVLETIVLRSCAMKAAVVARDERESGLRAVLNFGHTVGHAVEAVTGFTAYRHGEAVAMGMVAAARLAVRRGMFSMEETGRLVRLLARAGLPVTLPDLDPATFRAALGHDKKIRQGQLRMVLPESLGRVRLVPVSIEEIAAVVENGAAAEG

SEQ ID NO: 886 - DNA, 1077 bp, Burkholderia thailandensis E264
  CDS (1)..(1077): transl_table=11
atgaccgtcaacgtcgacctgggcgagcgcgcctatccgatccacatcggccccgatctgatccgccgcaccgagcttttcgcgccgcacatcgcgggcgcgtccgccacgatcgtcacgaacaccaccgtcgatccgctctacggcgacacgctgcgcgcggcgctcgcgccgctcggcaagcgcgtgtcgaccgtcgtcctgcccgacggcgaggcgtacaagaactgggaaaccctcaatctgatcttcgacggcctgctcgagcagcacgccgatcgcaagacgacgctgatcgcgctcggtggcggcgtgatcggcgacatgacgggcttcgccgccgcatgctacatgcgcggcgtgccgttcatccaggtgccgacgacgctcctgtcgcaggtcgactcgtcagtcggcggcaagacgggcatcaaccacccgctcggcaagaacatgatcggcgcgttctatcagccgcaggcggtgatcgccgacattggcgcgctgtcgacgctgcccgaccgcgagcttgccgcgggcgtcgccgagatcatcaagacgggcgcgatcgccgacgccgcattcttcgactggatcgaggcgaacatgggggcgctcaatcgccgcgatcccgatgcgctcgcgcatgcggtcaagcgctcgtgcgagatcaaggcgggtgtcgtggcggcggacgagcgcgagggcggcctgcgcgcgatcctcaacttcggccatacgttcgggcacgcgatcgaagcggggctcggctacggcgagtggctgcatggcgaggcggtcggctgcgggatggtgatggcggccgatctgtcggtgcgaaccggccatctggacgaggcgtcgcgcgagcggctgcgccgcgtcgtcgaggccgcgcacctgccgacgcgcgcgccggcactcggcgatgcgcgctatgtcgagctgatgcgcgtcgacaagaaggccgaagccggcgcgatcaagttcattctgctcaagcgcttcggcgagacgatcattaccccggcgccggacgacgccgtctccgcgacactggcggcaaccacccggtaa

SEQ ID NO: 887 - protein, 358 aa, Burkholderia thailandensis E264
MTVNVDLGERAYPIHIGPDLIRRTELFAPHIAGASATIVTNTTVDPLYGDTLRAALAPLGKRVSTVVLPDGEAYKNWETLNLIFDGLLEQHADRKTTLIALGGGVIGDMTGFAAACYMRGVPFIQVPTTLLSQVDSSVGGKTGINHPLGKNMIGAFYQPQAVIADIGALSTLPDRELAAGVAEIIKTGAIADAAFFDWIEANMGALNRRDPDALAHAVKRSCEIKAGVVAADEREGGLRAILNFGHTFGHAIEAGLGYGEWLHGEAVGCGMVMAADLSVRTGHLDEASRERLRRVVEAAHLPTRAPALGDARYVELMRVDKKAEAGAIKFILLKRFGETIITPAPDDAVSATLAATTR

SEQ ID NO: 888 - DNA, 1095 bp, Syntrophus aciditrophicus SB
  CDS (1)..(1095): transl_table=11
atgaagaggatcaaggttcatctggacaaacgcctctccgagactcatgaaatttgtatcggttatgatttccaggatcgcatcggtcttttgatcgcgaaagagcatccggcaaaccgttacgtcatcgttaccgattccaatgtatccggactgtatggtaagacgtttctcgaaaagctcagggaattgggactgccggctgaactcctcgaatttcccgccggcgaaggctcgaaaaccatggataccgtccttgcccttacctcccggcttctggagcggggagtcgatcgtcattctctgctgcttgcccttggcggcggagtggtgggcgatctgacagggtttgtcgcctcaatttacatgcgttccgttccttttattcagatacccacgacgctgatggcacaggtggacagcagcatcggcggaaaaacggctgtcaatctgccgcaggggaagaacctcctgggaaccttctatcagccgaagcggatttttaccgacctgaaattcctggaaactctttccgatgatgaatatctcaacggtgtggcggaaatcgtaaaatacggggtgatcgacgaaccgggattctttgagctgctcgaaagggaagttccggctatacgagaaagaaacctggaggtactgaaaaaggtcattgaacagtcctgtcggattaaaaaaggggtcgtggaaatcgatgagcaggaatcgggatttcgccgcatcctcaattatggtcataccatcggccatgccctggaggcctcctcgaattttacccttgctcacggaaaggctgtcgccctgggcatgatcgctgcttcaggcatttcagtccagtccggttatctgtctttggaggaaagagatcgaatcgaaaacatgattcgcgacctcggccttcctgttcgcattccggaaagttttccgcaatcaaatgtgctggagcgtctccagatggacaaaaagaaggaagggagcgaactgcccttcgtgctgttgaaaaaaatcggcataccctttatcactaagggcgtcgaaaaatctcatctggaaaaagttctggaggaaatgaaagcatga

SEQ ID NO: 889 - protein, 364 aa, Syntrophus aciditrophicus SB
MKRIKVHLDKRLSETHEICIGYDFQDRIGLLIAKEHPANRYVIVTDSNVSGLYGKTFLEKLRELGLPAELLEFPAGEGSKTMDTVLALTSRLLERGVDRHSLLLALGGGVVGDLTGFVASIYMRSVPFIQIPTTLMAQVDSSIGGKTAVNLPQGKNLLGTFYQPKRIFTDLKFLETLSDDEYLNGVAEIVKYGVIDEPGFFELLEREVPAIRERNLEVLKKVIEQSCRIKKGVVEIDEQESGFRRILNYGHTIGHALEASSNFTLAHGKAVALGMIAASGISVQSGYLSLEERDRIENMIRDLGLPVRIPESFPQSNVLERLQMDKKKEGSELPFVLLKKIGIPFITKGVEKSHLEKVLEEMKA

SEQ ID NO: 890 - DNA, 1110 bp, Novosphingobium aromaticivorans DSM 12444
  CDS (1)..(1110): transl_table=11
atggctgtaatccccgtcgccatcgccggagcgccctatgaagtgcggatcgaggccggcgttctggcccgtgcgggcgaacattgccgcccctttctgcgcaaggaccgcgtggctatcgtcaccgacgagcacgtcgccgcagagtggcgggaaaccgtcactgcctcgttcgacagcgtcggcgtgcgcagcgaatggctcgttctccccgctggcgagagcaccaagagctgggaacacctcgcccgcctggtcgactggctgctggaacaggaagtcgagcgcaaggaccgtattgtcgcgctcggcggaggcgtgatcggcgatctcaccgggtttgccgcctcgatcgtcaagcgtggctgcggtttcatccagatcccgacgaccctcctggcgcaggtcgattccagcgtcggcggaaagaccgcgatcaacacgcccgctggcaagaacctcgtcggcgcgtttcaccagcctgcgctggtcctcgccgatccgctcgcgctcgacacgctgccgctgcgcgatgtgcgggccgggtacgccgaagtggtgaaatatggcctgatcgacgatgcgcccttcttcgagtggtgtgaggcgaacggcgcaaagctcctcgcaggcgacctggcagcgcgcgagacggccatcgcacacagcgtcgcggcaaaggcgcggatcgtggcggcggacgagaaggaaatcgccggcatccgtgcgctactcaatctcgggcacactttcgggcacgcgctcgaggccgagaccggctttaccgatcgcctgcaccatggcgaaggcgtggcgctggggatggtgctggcggcacgattctcggcgcggcaggggctgatgtcgaggcaggatgccgaacgcgtggctcgccatgtcgaagcggtgggcctgcctgccacgctccgcgagcttgggctttcctgcgacggccgccgccttgccgatcacatgcttcacgacaagaagatggacgcgggcacattgcccttccttctcatgcgcgggatcgggcagaccttcctggcaaaggacgtcgatctgacggaagtggccgctttcctcgacgaggaactcgccagaacctga

SEQ ID NO: 891 - protein, 369 aa, Novosphingobium aromaticivorans DSM 12444
MAVIPVAIAGAPYEVRIEAGVLARAGEHCRPFLRKDRVAIVTDEHVAAEWRETVTASFDSVGVRSEWLVLPAGESTKSWEHLARLVDWLLEQEVERKDRIVALGGGVIGDLTGFAASIVKRGCGFIQIPTTLLAQVDSSVGGKTAINTPAGKNLVGAFHQPALVLADPLALDTLPLRDVRAGYAEVVKYGLIDDAPFFEWCEANGAKLLAGDLAARETAIAHSVAAKARIVAADEKEIAGIRALLNLGHTFGHALEAETGFTDRLHHGEGVALGMVLAARFSARQGLMSRQDAERVARHVEAVGLPATLRELGLSCDGRRLADHMLHDKKMDAGTLPFLLMRGIGQTFLAKDVDLTEVAAFLDEELART

SEQ ID NO: 892 - DNA, 1083 bp, Desulfitobacterium hafniense Y51
  CDS (1)..(1083): transl_table=11
atgcaaggacagaggattgatgttgtctccgtgaagccctaccctgttttcctgggagccaggctggaggagctgggtgactatctgaccacccgcatcggagctggggaacatcttctggtgattactcaccctaatgtcggcgattactatctggatactttgcaaaaagggctaggctcctttatggtcaataccctgattgtacctcagggtgaggatgagaaatccctggaccgcctcagcgatttaaccagtgaagccattgcctgcggcgcggatcgcaagaccgtggtcctggctttggggggaggggttattggagatttggccggcttcttcgccagtgtctttatgcggggaatgcgttatgtccaaattcccaccacccttctggcgatggtggatagcagcatcggcggtaaagttgcagtaaatcatgctgcaggcaagaacctgctgggagatttttacccgcctctggctgtatggacagattttagtacattagagaccctgccctgggaagaaatgcttaatggtctggcagagactatcaagcatgctgttattgccgatgaagagcttctctcttttatcgaaaaacaccaggaagaaatcatggcgcggaagcctgagctatacaaggagctgtcttcccgctcttcggcagttaaagtcaggctggtctctgaggacgagacggaacagggcaagaggatgtttcttaattatgggcatagctttggtcatgctcttgaggctgaggtggcctaccaagggattacccatggacagggtgtcagcatcggcatggtagcagccgcccatctggcccaagaacggggactgatgagcagtggagaagtggaacgcttgattaagcttcttaaaggtttcggtttgccggtaactgtcagagctaagaatccccgagtgttaaccgatcttatgggagcagataaaaagaattataaagggcaaaaagttttggtcttgcctaaagggataggacaggggatcgtgattcgtgacgccaacgatgaggaaattctaagagcttgggataaggttattgagtga

SEQ ID NO: 893 - protein, 360 aa, Desulfitobacterium hafniense Y51
MQGQRIDVVSVKPYPVFLGARLEELGDYLTTRIGAGEHLLVITHPNVGDYYLDTLQKGLGSFMVNTLIVPQGEDEKSLDRLSDLTSEAIACGADRKTVVLALGGGVIGDLAGFFASVFMRGMRYVQIPTTLLAMVDSSIGGKVAVNHAAGKNLLGDFYPPLAVWTDFSTLETLPWEEMLNGLAETIKHAVIADEELLSFIEKHQEEIMARKPELYKELSSRSSAVKVRLVSEDETEQGKRMFLNYGHSFGHALEAEVAYQGITHGQGVSIGMVAAAHLAQERGLMSSGEVERLIKLLKGFGLPVTVRAKNPRVLTDLMGADKKNYKGQKVLVLPKGIGQGIVIRDANDEEILRAWDKVIE

SEQ ID NO: 894 - DNA, 1089 bp, Saccharophagus degradans 2-40
  CDS (1)..(1089): transl_table=11
atgaagaccttacatgtagacttgggggataggagctatccgatttttattggcgctggcctgttagctaaccctgaaaagtttttaccttatttggcggcgaaacaggtgctggttgttacaaatacaacgatcgatgcgctgtatggcgacagttttttctcgttgttcgaggggatggataaagcgcataaggttgtattgcctgatggggagtcttataaaaatttagaagcgctaaaccaaatatttgatgctttgctagaagggaagcacaatcgtaagaccacattggtggctttagggggtggtgttgtaggtgatatgaccggctttgctgctgcagcttatcagcgtggtgttggttttattcaagtgccaaccacactgctgtctcaggttgactcttctgtgggggggaagaccggcgtgaaccatccgcttggcaagaatatgattggtgctttccatcagccgaatgtggtggttattgataccgatgtattaaaaacattgcctgatagagagctgtctgccggaatggcagaggttatcaaatatggtcttattgcagattatgaatttttctgctggttagagtctaatgtaaaggcattgatggcaagggatgttgatgcactcgagtacgcaattgagcggtcttgccaaattaaagccgatgttgttgctcaagatgagaccgagtcaggtattcgcgcgatattgaatcttgggcatacgtttggccatgcgattgagagtgatcaaggttatggtaattggctgcatggtgaagcggtgggcgccggtatggtgatggcctgtgaattgtcttgtcggatgggatggatagataagccgttttgtgagcgtgcagtagcgctgattgctgctgcaggtttgcctattgcgccgccggaatcgatgtcgccagaagattttatgaagtacatggctgtggataaaaaggtcttggatggtggtttgcgcttggtgttaccaaataaaccgggttcttccattgtgaccgattcatttgatgctgacgcgctagctgcgactttgggtcgtactgggcagctgggttag

SEQ ID NO: 895 - protein, 362 aa, Saccharophagus degradans 2-40
MKTLHVDLGDRSYPIFIGAGLLANPEKFLPYLAAKQVLVVTNTTIDALYGDSFFSLFEGMDKAHKVVLPDGESYKNLEALNQIFDALLEGKHNRKTTLVALGGGVVGDMTGFAAAAYQRGVGFIQVPTTLLSQVDSSVGGKTGVNHPLGKNMIGAFHQPNVVVIDTDVLKTLPDRELSAGMAEVIKYGLIADYEFFCWLESNVKALMARDVDALEYAIERSCQIKADVVAQDETESGIRAILNLGHTFGHAIESDQGYGNWLHGEAVGAGMVMACELSCRMGWIDKPFCERAVALIAAAGLPIAPPESMSPEDFMKYMAVDKKVLDGGLRLVLPNKPGSSIVTDSFDADALAATLGRTGQLG

SEQ ID NO: 896 - DNA, 1086 bp, Methylobacillus flagellatus KT
  CDS (1)..(1086): transl_table=11
atgaccatgcaaacactacatgtagagctgggagaacgctcttaccctatccatatcggacgcggcctgctgacccagccggaactgatcctgcagcacctcaagcgcaagcaggtggcaatcgtcaccaacaccaccgtagcgccgttgtatctggaaaagctggcacagccattgcgtgatgctggcgtcaatgtcattcccatcgtgctgcccgatggcgaggcctacaagaatgccgctaccctcaacctcatctacgatgccctgctggaaaaccgctgcgagcgcagcaccaccatcattgcactcggcggtggcgtaattggcgacctggctggttacgcagcggcaacctacctgcggggtgtgccgttcatccaggtgccgacgacgctgctatcccaggtggactcttccgtgggcggcaagaccggtatcaaccatccgctcggcaagaacatgatcggggccttctaccagccacaagtcgtactggcggatatcgacaccttgtccaccctgccggaacgtgaactctctgccggcctggcggaagtgatcaaatacggcctgattcgtgacgaggcatttttcgtctggcaggaagccaacatgcaaaaactgctggcgctggataccgaagccatgagctatgccatttacagatcctgtgagaacaaggcagaagtcgtggccgctgacgagcgcgagtcgggcgaacgtgccttgctcaacctgggccacactttcggccatgccatcgagaatgccatgggttatggcgtctggctgcacggcgaagccgtggcggcaggcaccatgctcgcggctgacctgtcgcgccgcctcggttggctgacggatgccgagatcagccgcatcaaggctatcttcaaggcagcaaggctgccaatagaggcgccggcactgggcgtggaacgctatctcggcctcatggggctggacaagaaagtcgtcgatggtcagatacgcctggtcctgcagcaaggcataggcaaatctctggtgaccagcgactatgatgccgctctgttgaaagaaaccctggccatcgccgcatga

SEQ ID NO: 897 - protein, 361 aa, Methylobacillus flagellatus KT
MTMQTLHVELGERSYPIHIGRGLLTQPELILQHLKRKQVAIVTNTTVAPLYLEKLAQPLRDAGVNVIPIVLPDGEAYKNAATLNLIYDALLENRCERSTTIIALGGGVIGDLAGYAAATYLRGVPFIQVPTTLLSQVDSSVGGKTGINHPLGKNMIGAFYQPQVVLADIDTLSTLPERELSAGLAEVIKYGLIRDEAFFVWQEANMQKLLALDTEAMSYAIYRSCENKAEVVAADERESGERALLNLGHTFGHAIENAMGYGVWLHGEAVAAGTMLAADLSRRLGWLTDAEISRIKAIFKAARLPIEAPALGVERYLGLMGLDKKVVDGQIRLVLQQGIGKSLVTSDYDAALLKETLAIAA

SEQ ID NO: 898 - DNA, 1086 bp, Burkholderia xenovorans LB400
  CDS (1)..(1086): transl_table=11
atggaccgtatgattaccgtcaatgtcgaactgggcgaacgcgcctaccccatccatatcggtgccgatctgatcggccagaccgcgttgttcgcgccgcatatcgccggcagttcggtcaccatcgttaccaataccactgtcgacccgctgtacggcgacaagctgcgcgccgtgctggcgccgctcggcaagcaggtgtccacggtcgtgttgccggatggcgaggcgtacaagaacctcgaaaccctgaacctgattttcgacgcgctgctcggtgcgcgggccgatcgcaagaccacgctgatcgccctgggcggcggcgtgatcggcgacatgacgggttttgcggcggcctgctatatgcgtggcgtgcccttcatccaggtgccgaccacgttgctgtcgcaggtggattcatcggtgggcggcaagacgggcatcaatcacccgctcggcaagaacatgatcggtgcgttctaccagccgcaggccgtgattgccgatatcggcgcgctgcatacgctgccggcgcgtgaactggcggcgggcgtcgccgaagtgatcaagaccggcgccattgccgacgcgggtttcttcaactggatcgaagccaatatcgaggcattgaatcgctgcgagcccgccgcactcgccgaggcggtcaagcggtcgtgcgagatcaaggcgtcggtggttgcgcaggacgagcgtgaaggcggacttcgcgccatcctcaatttcggccacaccttcggccatgcgatcgaagccggtctcggctacggcgagtggctgcatggcgaggcggtcggctgcggcatggtgatggcggcggatctgtccgtgcgcatgggttatctcgacgaagccgcgcgcaagcgtctggtcgacgtgatcgtcgccgcccatttgccgacccgggcgcccgcgctcggcgactcgcgctatgtcgaactcatgcgggtcgacaagaaggcggaagccggcgcgatcaaattcattctgctgaagcgtttcggtgagacgctgatcacccaggcgcccgatgccgaggtgcacgccacgctggccgctgccgtctga

SEQ ID NO: 899 - protein, 361 aa, Burkholderia xenovorans LB400
MDRMITVNVELGERAYPIHIGADLIGQTALFAPHIAGSSVTIVTNTTVDPLYGDKLRAVLAPLGKQVSTVVLPDGEAYKNLETLNLIFDALLGARADRKTTLIALGGGVIGDMTGFAAACYMRGVPFIQVPTTLLSQVDSSVGGKTGINHPLGKNMIGAFYQPQAVIADIGALHTLPARELAAGVAEVIKTGAIADAGFFNWIEANIEALNRCEPAALAEAVKRSCEIKASVVAQDEREGGLRAILNFGHTFGHAIEAGLGYGEWLHGEAVGCGMVMAADLSVRMGYLDEAARKRLVDVIVAAHLPTRAPALGDSRYVELMRVDKKAEAGAIKFILLKRFGETLITQAPDAEVHATLAAAV

SEQ ID NO: 900 - DNA, 1107 bp, Ralstonia metallidurans CH34
  CDS (1)..(1107): transl_table=11
atgatcacgcttgaagtcgatctcgggacgcgtagttacccgatccacattggcagcggcctgctggaccgcgccgacctgctggccccgcatgtacgcggccagcatgccgtcattgtcaccaacgagaccgtgggcccgctgtacgcggcgcgcgtcgaagctgtgcttgccggccttggcaagaccgtgcgcaccgtggtgctgccggacggcgagcgcttcaagcactgggaaacgctgaacctgattttcgatgcgctgctccaggcaggggccgaccgcaagaccacgctgatcgcgctgggcggcggggtggtgggagacatgaccgggtttgccgccgcatgctacatgcgtggcgtgccgttcgtgcagatgccgaccacgttgctggcgcaagtcgattcgtcggtgggcggcaagaccggcatcaatcatccgctcggcaagaacatgatcggcgcgttccaccagcccaacgcggtgatcgccgacattgacacgctgcgcacgttgcccccgcgcgaactggcggcgggcatggccgaggtcatcaagcacggggcaatcgccgacgccgactacttcgcttggatcgaggaccatatcgccgggctgaacgcctgcgacaccggcctgatggccgaagcggtgcgacgctcctgcgagatcaaggcgtccgtggtggcccaggacgaacgcgaaggcggcttgcgcgcgattctcaatttcggccatacgtttggtcacgcgatcgaagctggcatgggctatggcgaatggctgcatggcgaggccgtgggctgtggcatggtgatggccgcggacctctcgcatcggctcggttttatcgacgtcgagacgcgcgcccgcattcgcacgctgacgcaggcggcgatgctgccggtggtggcgccggatctgggtatcgatcgctatatcgagttgatgaaggtggacaagaaggccgaagcgggcagcatcaagttcatcctgctgcgcaagctgggttctgccttcatcaccaccgtgccggacgcggacctgcgcgagacgctgcgtcacgcgatattgaaacctcccaccgaggccccggtcgcctga

SEQ ID NO: 901 - protein, 368 aa, Ralstonia metallidurans CH34
MITLEVDLGTRSYPIHIGSGLLDRADLLAPHVRGQHAVIVTNETVGPLYAARVEAVLAGLGKTVRTVVLPDGERFKHWETLNLIFDALLQAGADRKTTLIALGGGVVGDMTGFAAACYMRGVPFVQMPTTLLAQVDSSVGGKTGINHPLGKNMIGAFHQPNAVIADIDTLRTLPPRELAAGMAEVIKHGAIADADYFAWIEDHIAGLNACDTGLMAEAVRRSCEIKASVVAQDEREGGLRAILNFGHTFGHAIEAGMGYGEWLHGEAVGCGMVMAADLSHRLGFIDVETRARIRTLTQAAMLPVVAPDLGIDRYIELMKVDKKAEAGSIKFILLRKLGSAFITTVPDADLRETLRHAILKPPTEAPVA

SEQ ID NO: 902 - DNA, 1101 bp, Acidobacteria bacterium Ellin345
  CDS (1)..(1101): transl_table=11
ttgaaccgcgttccggtcacaacatcgagccgcacctacgacgtgctcatcggccacgagatcctgcgtgacgctggcaagcacatccgcgtcgtgctgcccaaagcgaagcgtgcatttgtaatcacctcggcgccggtgcggaaacattgggccggaatcgttacggacgctctcactgccgagggtttcgaagtcatcttcctcgagatggaagatggcgagcgcgccaagaacatggcgtcggtagaggacctggcgttgaagatgatggcgaagggcgctgaccgtcaatccatcatttgcgcgctgggtggcggagtggtgggagacgtcgcaggctttgtcgcgtcggtcttcatgcgcggcattcccgttatccagatgccgacgacgttcctggcccaggtggattcatccatcggcggcaagaccggtgtgaatttgaaggcggggaagaacctcgttggcacgttctaccagccctggctggtgctggccgatcccggcgttttcagcacgctaccggaacgcgaatttcgttcgggattgtacgagtcgttgaagtgtggcgtgattcgtcgtccggatttgttcgaccggatggaacgcgaccgccagcgcattgtggagcgcgaccctgggttgatcgagtggctgatcaccgagagcgttcgcgtgaaggccgatgtggtgggcgctgacgagcatgagagtggtgagcgccgcattttgaattttggtcataccatcgggcacgcgctcgaagcggagacggcctataagtatttcctgcacggcgaggctgttgcgtgggggatgatcgcggtcaccatgatcgccgccggccttcaacgaactgattcggcgaccgcacaacgcatcatttctttgtgcctggcgtacgctccgctgccgaagattgaagtgaacgcgaagaaaaccgccaatcgcgtgaagggcgataagaagacggtgcacggagtcacgcatttcatcctgccgcgcgagatcggaaaggtcgaagtcgctatcgacgtcaccgaccgtgccgtggtgcaggccatcgaagaactgaagtacctgtcgtttgtcggatga

SEQ ID NO: 903 - protein, 366 aa, Acidobacteria bacterium Ellin345
MNRVPVTTSSRTYDVLIGHEILRDAGKHIRVVLPKAKRAFVITSAPVRKHWAGIVTDALTAEGFEVIFLEMEDGERAKNMASVEDLALKMMAKGADRQSIICALGGGVVGDVAGFVASVFMRGIPVIQMPTTFLAQVDSSIGGKTGVNLKAGKNLVGTFYQPWLVLADPGVFSTLPEREFRSGLYESLKCGVIRRPDLFDRMERDRQRIVERDPGLIEWLITESVRVKADVVGADEHESGERRILNFGHTIGHALEAETAYKYFLHGEAVAWGMIAVTMIAAGLQRTDSATAQRIISLCLAYAPLPKIEVNAKKTANRVKGDKKTVHGVTHFILPREIGKVEVAIDVTDRAVVQAIEELKYLSFVG

SEQ ID NO: 904 - DNA, 1122 bp, Silicibacter sp. TM1040
  CDS (1)..(1122): transl_table=11
atggaacaaaccgttcacgttccccttggcgcgcgcgcctatgatgtggtgatcggccccgatcttgttgcacaggcgggccagcgtattgcgcccctcctgcgccgcaagacagtggctgtgctcacggatgagaccgtggccgcgcttcatcttgaggctctgcgcgcgggactcgcagccgacggcatcgagatggaagcacttgccttgccgcccggcgaggccactaaaggctggccccagttcacccgcgcggtggagtggctcttggacaagaaagtcgagcgcggcgacatcgtcattgcctttggcgggggcgtcatcggcgatctggcgggttttgccgcagccgtgctgcgccggggcgttcgttttgtccagatccccacatccctgctggcgcaggtcgacagttccgtcgggggcaaaaccggcatcaacgctccgcaaggcaagaacctgatcggcgccttccaccagcccagcctggtactggccgatacagcggttcttggcacgctcacagagcgcgattttcttgccggctacggtgaggtggtgaaatacgggctcttgggcgatgcggccttttttgactggctcgaagaaaatgccccggcaatggcggcaggtgacatggcgctgcgggtcgaagccgtggcgcgttcggttcagatgaaagccgacatcgtggcccgcgacgaaaccgaacaaggcgaccgggcgctgttgaaccttggtcataccttctgtcacgcgctggaagcggcgaccggctacagcgaccggttgctgcatggcgaaggcgtggcgatcggctgtgcgttggcctttgagctctcagcccgcctcggcctctgcagtcaggaagatcccagccgcgtgcgcgcgcacctcaaggcgatgggcatgaaaacagacctctcggacattcccggcgatcttccccccgcccaagagcttctggatctcatggcgcaggacaagaaggtcgtggatggtcagctgcgcttcatcctcgcgcgcggcatcggagcggcctttgtcaccgccgatgtgccctctgaaaaggtgcttgaggtgctgcaagaggcgctggcgcatacacaacccgcctga

SEQ ID NO: 905 - protein, 373 aa, Silicibacter sp. TM1040
MEQTVHVPLGARAYDVVIGPDLVAQAGQRIAPLLRRKTVAVLTDETVAALHLEALRAGLAADGIEMEALALPPGEATKGWPQFTRAVEWLLDKKVERGDIVIAFGGGVIGDLAGFAAAVLRRGVRFVQIPTSLLAQVDSSVGGKTGINAPQGKNLIGAFHQPSLVLADTAVLGTLTERDFLAGYGEVVKYGLLGDAAFFDWLEENAPAMAAGDMALRVEAVARSVQMKADIVARDETEQGDRALLNLGHTFCHALEAATGYSDRLLHGEGVAIGCALAFELSARLGLCSQEDPSRVRAHLKAMGMKTDLSDIPGDLPPAQELLDLMAQDKKVVDGQLRFILARGIGAAFVTADVPSEKVLEVLQEALAHTQPA

SEQ ID NO: 906 - DNA, 1059 bp, Rubrobacter xylanophilus DSM 9941
  CDS (1)..(1059): transl_table=11
gtgcgcgccggggaggcctacccggtcgaggtgggctgcgggctggacgtgggggcgctcgcggccgcggcgctggaggtgggggactgcgccctgctcaccgactccaccgtggggccgctctacgccgggagggttcgccgctcgctgcgggcggccggctggcgggtgctcgagaccgtggaggtccccgccggcgagggctccaagagcctcgccgtctacggcgaggtgctgcggcgtctcgcgcgggcgggcctcatgcgcgacggcgccctcttcgccctgggcggcggggtggtgggggacctcggggggttcgtcgcggcgagctacatgcgcggcatctccctcgtcatgctgcccacgaccctgctcgccatggtcgacagctccgtcggcggcaagacggggttggatcttccggaggggaagaacctggtcggggccttcctgcagccccggctggtggcggccgacctcggctttctggagagcctgccgcggcgggagctctccatggggctcgccgaggtcgtcaagatgggccttctggccggcgggaggctcttcggggccctgcagcggctcgcggaggccctggcgggggacgcgggggcgctcgaggagctcgtcctcctctccgtctccttcaaggccggggtggtcgccgaggacgagcgcgagcgggggcggcgcgccatcctcaactacggccacaccgtgggccacgggctcgaggccgcctccgggtacggcctggcgcacggggaggcggtcgcggcggggatggtcgccgaggccctgctctcccgcagggtcttcgggacggacctcgtcggcctgcacgagcggctgctccgggaggccggccttcccgtgcgcgtccgggggctcgaggccgcggaggtgctcggggccatgaggcgggacaaaaagcgccggggcggggagcaccggttcgtgctgctccgggaggtcgggcgccccgtgtggggggtggaggtcggggaggaggaggccctgagcgccgtggaggccgtcctcgaggcggcgtag

SEQ ID NO: 907 - protein, 352 aa, Rubrobacter xylanophilus DSM 9941
MRAGEAYPVEVGCGLDVGALAAAALEVGDCALLTDSTVGPLYAGRVRRSLRAAGWRVLETVEVPAGEGSKSLAVYGEVLRRLARAGLMRDGALFALGGGVVGDLGGFVAASYMRGISLVMLPTTLLAMVDSSVGGKTGLDLPEGKNLVGAFLQPRLVAADLGFLESLPRRELSMGLAEVVKMGLLAGGRLFGALQRLAEALAGDAGALEELVLLSVSFKAGVVAEDERERGRRAILNYGHTVGHGLEAASGYGLAHGEAVAAGMVAEALLSRRVFGTDLVGLHERLLREAGLPVRVRGLEAAEVLGAMRRDKKRRGGEHRFVLLREVGRPVWGVEVGEEEALSAVEAVLEAA

SEQ ID NO: 908 - DNA, 1128 bp, Mesorhizobium sp. BNC1
  CDS (1)..(1128): transl_table=11
atgagccgcaccaccggcgacgccgttaccgtcaccgtggggctcggagagcgcgcctacgatattctcatcggtccaggcctcaccgcatctgctggagaagagctttccgcgcgcttgcccggcagccgggccgcgattgtcacggatgacaatgtcgccgccgcgcatttggaagcgtttgaagccagtcttgcggctgccggcatcgaatgcgtcgcggtgcgcctgaggcctggcgaacgcagcaaaagcttcgaatcactggaagagacggtcgacgctattctcgccgcaaagctggagcggcgagatgcggtcatcgccttgggcggcggcgtcgtgggcgaccttgcgggctttgccgcgggaattgtccgccgcggaatgaatttcgtccaggtgccgacgtcgctcctggcgcaagtcgattcctcggtgggcggcaagaccggcatcaacaccccgcgcggcaaaaacctcgtgggcgtgttctaccagccgaaactggtgctggcagacacgagcgtgctcgacacgctgcctgtgcgcgagttccgcgccggctacgcggaagttgccaaatacgggctcatcgaccgacccgctttctttgcctggctggaagcgaactggcgggagatcttttccggcggcagcgcacgcatcgaagcaatcgcagaatgctgccgcgccaaggccgagatcgtggagagggatgagcgcgagacgggcgaccgcgccctgctcaatcttggccacactttcggccacgcgcttgaagcggccaccgggtatgacggcgggcgtcttgttcacggtgaagccgtcgcgatcggaatggtgctggcgcacaaattttccacgcgcatgaatctcgcgagcgcggatgattccgcccgtgtggaggcgcatctgagcgcggtagggctgccgacccggaccgaccagatccccggcggactgccggatgctgaaacgctgctttcattcatcgcgcaggacaagaaggtgtcgcgtggcgcgctcaccttcatcctcacgcatggcatcgggcaatccttcatcgccaaggatgtgcccgcttcagaagtgcttgcctttctcaaggacgttgtaccgaaatga

SEQ ID NO: 909 - protein, 375 aa, Mesorhizobium sp. BNC1
MSRTTGDAVTVTVGLGERAYDILIGPGLTASAGEELSARLPGSRAAIVTDDNVAAAHLEAFEASLAAAGIECVAVRLRPGERSKSFESLEETVDAILAAKLERRDAVIALGGGVVGDLAGFAAGIVRRGMNFVQVPTSLLAQVDSSVGGKTGINTPRGKNLVGVFYQPKLVLADTSVLDTLPVREFRAGYAEVAKYGLIDRPAFFAWLEANWREIFSGGSARIEAIAECCRAKAEIVERDERETGDRALLNLGHTFGHALEAATGYDGGRLVHGEAVAIGMVLAHKFSTRMNLASADDSARVEAHLSAVGLPTRTDQIPGGLPDAETLLSFIAQDKKVSRGALTFILTHGIGQSFIAKDVPASEVLAFLKDVVPK

SEQ ID NO: 910 - DNA, 1182 bp, Rhodococcus sp. RHA1
  CDS (1)..(1182): transl_table=11
gtgatcggcggccccggcggaacagagacatccgagaatctcggacaagacggagcggagcagcagacagtgaccgaaccggtacgcgtacaggtgcagacggcgaacccctacccggtcatcatcgggcgcggattgctcggcgagctggtggacgaactcaccggcacgaggacggtggcgatcttccatcagccgccgctggccgagacggcggaggcggtgcgcgcggcgctcgccgaaaagggaatcgatgcgcaccgcatcgagattccggacgcggaggacggcaaggatctggccgtggccggattctgctgggaggtcctcggccgtatcgggctgacccgcagcgacgccgtggtcagcctgggcggtggcgcggccaccgacctcgccgggttcgtcgcggcgacgtggatgcgcggtgtgcgcgtgatccacgtgcccacgacgttgctcgcgatggtggatgcggcggtcggcggcaagaccggcatcaacaccgaggccggcaagaacctggtgggctcgttccacgagccgtcggcggtgctgatcgacctggcgacgctggagacggtgccccgcaacgagatcgtcgccggaatggcggaggtcgtgaagaccggcttcatcgccgacccggtgatcctggacctcatcgagaaggatcccgaggccgccctggacccgacgggaaccgttctgcccgaactgatccggcggtccgtggaggtcaaggccaaggtcgtggccgccgatctgcgcgagtccgatctgcgggagatcctgaactacgggcacaccctcgggcacgcgatcgagcggcgtgagcgttaccgctggcgccacggtgcggcggtcgccgtcgggctcgtgttcgcggcggagctggggcgtctggcggggcgcctggacgatgtgacggcggaccggcaccgcaccatcctggaactggtgggtctgcccaccacgtacgacgcggacgcgttcggccagttggtcgaggggatgcagaccgacaagaagaaccgggcgggcgttctgcggttcgtcgtgctcgacgggctcgcgaagccggggcggctcgagggcccggacccgtctctgctcgtggccgcgtactccgcggtggcgcgggaggagaagccgggcaccggtggtgccgtcctgctgtga

SEQ ID NO: 911 - protein, 393 aa, Rhodococcus sp. RHA1
MIGGPGGTETSENLGQDGAEQQTVTEPVRVQVQTANPYPVIIGRGLLGELVDELTGTRTVAIFHQPPLAETAEAVRAALAEKGIDAHRIEIPDAEDGKDLAVAGFCWEVLGRIGLTRSDAVVSLGGGAATDLAGFVAATWMRGVRVIHVPTTLLAMVDAAVGGKTGINTEAGKNLVGSFHEPSAVLIDLATLETVPRNEIVAGMAEVVKTGFIADPVILDLIEKDPEAALDPTGTVLPELIRRSVEVKAKVVAADLRESDLREILNYGHTLGHAIERRERYRWRHGAAVAVGLVFAAELGRLAGRLDDVTADRHRTILELVGLPTTYDADAFGQLVEGMQTDKKNRAGVLRFVVLDGLAKPGRLEGPDPSLLVAAYSAVAREEKPGTGGAVLL

SEQ ID NO: 912 - DNA, 1089 bp, Haemophilus somnus 129PT
  CDS (1)..(1089): transl_table=11
atgctgtgtgtaaatgtagaactaagggaacgcagttatcctatccatatcggaatggggttgttatccgaagcacaagtttatccgctaaaaaaaggcgataaagtgatgattgtaactaaccctacaattgcacagtattatttatcctctgtaacagacaccttagaaaaaattggttgctcggtagagaatgtgcaactcccagaaggtgaacaatacaaaactttagaatctctagacttaatttttaccgcacttttaaaagctaatcatggacgagatacctctattattgcactgggtggcggtgtgatcggtgatattgccggatatgcagcggcaagctatcaacgtggtgtccgttttattcaaattccaaccacattacttgctcaagtagattcttccgttgggggaaaaacggctgtcaatcacaaattaggaaaaaacatgatcggtgctttttatcaaccttgtgccgttattattgatacgctaacgctaactactttacctaaaagggaaattcacgcaggtttagctgaagtcattaaatatggtgctattttagatgatgaattttttacatggctagaaaaacatataactaatttagttgctttagaacaacaatatttacagcagtgcattgctcgctgttgtcaaattaaagcagatgtggttactcgtgatgaaactgaaaaaggagagcgtgcgttattaaatttaggtcatactttcgggcatgctatcgaaactcaccttggatatggaaattggttacatggagaagcagtcgcaaccggaatgatgatagctgcgatcttgtctaataaattaggtgatttatcacttaacgatgtaacgagactggagaaacttttaattcaagcagatttacctacagcctcacctgatacaatgaaagctgaagattatctaccacatatgatgcgtgataaaaaggttcttgctggaaaattacgcctagtcttactaaaatcacttggtcaagcctacgttgcaacagatacagacaaagaatacgtgcttgatgcaattcgtacctgttcaaaaaaaagttaa

SEQ ID NO: 913 - protein, 362 aa, Haemophilus somnus 129PT
MLCVNVELRERSYPIHIGMGLLSEAQVYPLKKGDKVMIVTNPTIAQYYLSSVTDTLEKIGCSVENVQLPEGEQYKTLESLDLIFTALLKANHGRDTSIIALGGGVIGDIAGYAAASYQRGVRFIQIPTTLLAQVDSSVGGKTAVNHKLGKNMIGAFYQPCAVIIDTLTLTTLPKREIHAGLAEVIKYGAILDDEFFTWLEKHITNLVALEQQYLQQCIARCCQIKADVVTRDETEKGERALLNLGHTFGHAIETHLGYGNWLHGEAVATGMMIAAILSNKLGDLSLNDVTRLEKLLIQADLPTASPDTMKAEDYLPHMMRDKKVLAGKLRLVLLKSLGQAYVATDTDKEYVLDAIRTCSKKS

SEQ ID NO: 914 - DNA, 1092 bp, Trichodesmium erythraeum IMS101
  CDS (1)..(1092): transl_table=11
atggcatccatcactgttcaacttccccaaaaatcctatgaaatagcgatcgcttcaggccacctcgaccaacttggcagaaaaatggaatccctcaacctgggaaaaaaggtcttgctggtatccaacccagaaatatttgctcattatggcgaaagagcaattatctcactccaagaagccggttttgatgtctcggactgcattctcccctcaggagaagaatataaaactcctcaaaaccttaactgtatttatgatgcagctttagcacaccgtctcgaacgctcttccacaatagtcgctcttggtggtggagtagttggggatatgaccgggtttgctgcggcaacttggttacgcggtttgaatgtagtacaagttcctacttctcttttggcgatggtcgatgctgctattggtggaaaaacaggagttaatcatcctcaaggcaaaaatcttatcggtgctttccatcaaccacggttagtcttaattgatccagaggtactaaagactttacccttgcgagaatttcggggagggatggcagaagtgatcaaatatggagttatatgggatgccgagttgttttttcaaatggaaaatagtcagagtcttgatgacattaacaatttaacaccagggttattagaggaaatcttgattaagtcttgccaaagtaaagcacatgtggtagcaaaagatgagaaagaatctgggttaagagcaattttgaattacggtcataccataggtcatgcagtggaaagtttgactggttataccgcggtgactcatggtgaggcggtcagtattgggatggtggcagcaagtgggttagcattagagttaggaatgtgggatgagcagagcgatcgccgtcagttagtcttgatagaaaaagctagtttgccaaccaaacttccggatggcttggatattgatgatattttggtttctttacagacagataaaaaggtaaaagcaggtaaggtacgatttgttttacctactggaataggatcagttacagtgacagataaggtaagtcaagatgtgttgaggagagtattgttgagaatcagttaa

SEQ ID NO: 915 - protein, 363 aa, Trichodesmium erythraeum IMS101
MASITVQLPQKSYEIAIASGHLDQLGRKMESLNLGKKVLLVSNPEIFAHYGERAIISLQEAGFDVSDCILPSGEEYKTPQNLNCIYDAALAHRLERSSTIVALGGGVVGDMTGFAAATWLRGLNVVQVPTSLLAMVDAAIGGKTGVNHPQGKNLIGAFHQPRLVLIDPEVLKTLPLREFRGGMAEVIKYGVIWDAELFFQMENSQSLDDINNLTPGLLEEILIKSCQSKAHVVAKDEKESGLRAILNYGHTIGHAVESLTGYTAVTHGEAVSIGMVAASGLALELGMWDEQSDRRQLVLIEKASLPTKLPDGLDIDDILVSLQTDKKVKAGKVRFVLPTGIGSVTVTDKVSQDVLRRVLLRIS

SEQ ID NO: 916 - DNA, 1134 bp, Synechococcus sp. CC9311
  CDS (1)..(1134): transl_table=11
atgatccaatcccaaccgagtacaacagcatcggcagagttaagacgtctcagcgttgcactcgaacgcaatccctatgacgttgtgatcacagcgggcgggatcgaccatctcggcactgaattgcttcgactcgggattcgcgaacacacaaaaattctggtggttagcaatgcagatgttgctacgcactacggaagccgttgtcttaacagcctcgaacaggcgggatttcaatccactttgctcacgatccccgcgggtgaagagcagaaaacattgaacaccttcagcacgatccttgatgcagcaaaagagaaagggttagagcgccagtcactcatgctcgctttaggtggtgggattgtgggtgacatgacgggttttgccgcggcttgctggttgcgtggaatcggcgtcgttcaggtccctacaacgttgttggccatggtggatgccgcgattggcggaaaaactggtgtcaaccatccaagcggtaaaaatctgatcggcgccttccaccagccccggctggtcatgattgatccagatacacttcaaacccttcccgcgcgggaatttagggctggtcttgctgaggtcatcaaatacggcgtcatcggagattcagatctgttcgaattgctcgaacgatccgtcagctttgacagccctctttcgatttcaaaagagttgctggcaacgatgctcgaacgttctgcccaagccaaggcagatgttgtagctgctgatgaaaaagaaggtggtcaaagggccatcctcaattacggccatacgtttggtcatgtggtcgaaacactgaccggatacggcacctggctccatggtgaagctgtggcaattgggatggtggcagtggctgcacttgccgtgcagcgcggtgtgatggcccaatccgatgcggaacgacaaacacgtttgatcaaaagcgctggattgcctagccaatggcctgatctcaatccagatttggtcttaaagacacttcagggcgacaaaaaagtccgtaatggtcgtcttcgctttgtgttgccgtcaagcatcggtgttgtgtcgatcgtggacgacgtaacccatgaggaaatcagagcatgcttggcgtcaatgcgttga

SEQ ID NO: 917 - protein, 377 aa, Synechococcus sp. CC9311
MIQSQPSTTASAELRRLSVALERNPYDVVITAGGIDHLGTELLRLGIREHTKILVVSNADVATHYGSRCLNSLEQAGFQSTLLTIPAGEEQKTLNTFSTILDAAKEKGLERQSLMLALGGGIVGDMTGFAAACWLRGIGVVQVPTTLLAMVDAAIGGKTGVNHPSGKNLIGAFHQPRLVMIDPDTLQTLPAREFRAGLAEVIKYGVIGDSDLFELLERSVSFDSPLSISKELLATMLERSAQAKADVVAADEKEGGQRAILNYGHTFGHVVETLTGYGTWLHGEAVAIGMVAVAALAVQRGVMAQSDAERQTRLIKSAGLPSQWPDLNPDLVLKTLQGDKKVRNGRLRFVLPSSIGVVSIVDDVTHEEIRACLASMR

SEQ ID NO: 918 - DNA, 1080 bp, Shewanella sp. MR-4
  CDS (1)..(1080): transl_table=11
atgacacaacaaattcaggttgatttaggtgaacgtagttaccccatttacattggccagagtttgatgagtgatagcgagaccttgtctcgctacctgctgaaaaaacgtatccttatcgtcaccaatgaaactgtcgcgcctttgtatctcaaacaaatacaagacacgatggcttcgtttggtgaggtatctagcgtcatccttcccgatggcgagcaatttaaagatttaacgcatttagattctatttttacggctttgctgcaacgcaattatgcccgtgattcagtgctggtggctctcggtggtggagttattggtgacatgacgggttttgctgcagcctgttaccaacgtggtgtcgattttattcaaattccgaccacgctattatcacaagtagattcctctgttggcgggaaaaccgccgttaatcatccgcttggcaaaaatatgatcggggctttttatcagccacagatcgtcattatcgatactgaatgtttacagaccttgcctgcgcgagaattcgctgcggggatggcagaagtcattaagtatggcatcatgtgggatgctgagttttttcaatggcttgagaacaatgttcaggcattgaaaagcctagatactcaagctttggtctacgcgatctctcgctgctgtgagattaaagccgatgtcgtgagccaggatgagaccgagcagggcgtccgcgcattattaaaccttgggcatacctttggacatgcgatcgaagccgagatgggctatggtaattggctgcatggtgaagcggttgcggctggcacagtccttgctgcacaaacggctaagtccatgggattgattgatgagtcaattgttcgtcgtattgtgcaattgttccacgctttcgatctgccaataacagcgccggaatcgatggatttcgacagttttattaaacatatgcgtcgcgataagaaagtcttaggtggtcagatccggctggtactcccgacggccattggtcgagctgatgtctttagccaagttccggaatctaccctagaacaggttatctgctgcgcataa

SEQ ID NO: 919 - protein, 359 aa, Shewanella sp. MR-4
MTQQIQVDLGERSYPIYIGQSLMSDSETLSRYLLKKRILIVTNETVAPLYLKQIQDTMASFGEVSSVILPDGEQFKDLTHLDSIFTALLQRNYARDSVLVALGGGVIGDMTGFAAACYQRGVDFIQIPTTLLSQVDSSVGGKTAVNHPLGKNMIGAFYQPQIVIIDTECLQTLPAREFAAGMAEVIKYGIMWDAEFFQWLENNVQALKSLDTQALVYAISRCCEIKADVVSQDETEQGVRALLNLGHTFGHAIEAEMGYGNWLHGEAVAAGTVLAAQTAKSMGLIDESIVRRIVQLFHAFDLPITAPESMDFDSFIKHMRRDKKVLGGQIRLVLPTAIGRADVFSQVPESTLEQVICCA

SEQ ID NO: 920 - DNA, 1080 bp, Shewanella sp. MR-7
  CDS (1)..(1080): transl_table=11
atgacacaacaaattcaggttgatttaggtgaacgtagttaccccatttacattggccagagtttgatgagtgatagcgagaccttgtctcgctacctgctgaaaaaacgtatccttatcgtcaccaatgaaactgtcgcgcccttgtatctcaaacagatacaagacacgatggcttcgtttggtgaggtatctagtgtcatccttcccgatggcgagcaatttaaagatttaacgcatttagattctatttttacggctttgctgcaacgcaattatggccgtgattcggtgctagtggccctcggtggcggggtgattggtgacatgacgggttttgcggccgcctgttaccaacgtggtgtcgattttattcaaataccaacgacgttgttatcccaagtggattcttcggtcggtggaaaaactgctgtcaaccatccgcttggcaaaaatatgatcggggctttttatcagccgcagatcgttattatcgataccgaatgtttacagacgctgcccgcgcgtgaatttgctgcggggatggcggaagtgattaagtatggcatcatgtgggatgctgatttttttcaatggcttgagaacaatgttcaagcattgaaaagtctagatactcaagctttggtctatgcgatttctcgctgctgtgagattaaagccgatgttgtgagtcaggatgagaccgagcagggcgtccgcgcgttattaaaccttgggcatacctttggccatgcgatcgaagccgagatgggctatggtaattggctgcatggtgaagcggttgcggctggcacagtccttgctgcacaaacggctaagtccatgggattgattgatgagtcaattgttcgtcgtattgtgcaattgttccacgctttcgatctgcctgtaacagcgccggaatcgatggatttcgacagttttattaaacatatgcgtcgcgataagaaagtgttaggtggtcagatccggctggtactcccgacggccattggtcgagcagatgtctttagccaagtctcggaatctaccctagaacaggttatctgctgcgcataa

SEQ ID NO: 921 - protein, 359 aa, Shewanella sp. MR-7
MTQQIQVDLGERSYPIYIGQSLMSDSETLSRYLLKKRILIVTNETVAPLYLKQIQDTMASFGEVSSVILPDGEQFKDLTHLDSIFTALLQRNYGRDSVLVALGGGVIGDMTGFAAACYQRGVDFIQIPTTLLSQVDSSVGGKTAVNHPLGKNMIGAFYQPQIVIIDTECLQTLPAREFAAGMAEVIKYGIMWDADFFQWLENNVQALKSLDTQALVYAISRCCEIKADVVSQDETEQGVRALLNLGHTFGHAIEAEMGYGNWLHGEAVAAGTVLAAQTAKSMGLIDESIVRRIVQLFHAFDLPVTAPESMDFDSFIKHMRRDKKVLGGQIRLVLPTAIGRADVFSQVSESTLEQVICCA

SEQ ID NO: 922 - DNA, 1095 bp, Alkalilimnicola ehrlichei MLHE-1
  CDS (1)..(1095): transl_table=11
atgaccgagaccaccaccctgcaggtggatctgggcagccgcagctacccgatccacatcggcaccggcctgctcgaccagccccggctgatcaccgaccacctgcccgcccggcgggtgatggtggtgaccaacgaaaccgtcgccccccattacctcgaccgggtgttggccagcctcgatggccgcgaggcccacagcgtggtgctccccgacggcgagcgcttcaagagcctggagaccgccatgcgcgtctatgacgcgctgatcgagcaccgcttcgaccgcggctccgccatcgtcgccctgggcggcggcgtgatcggcgatctcgccggcttcgtggccgccacctggcagcggggggtgcgctacctccaggtgcccaccaccctgttggcgcaggtggactcctcagtgggcggcaagaccgcggtcaaccacccgggcggcaagaacatgatcggcgcctttcaccagccccgctgcgtgatcgccgacatggacaccctggacaccctccccgaccgggagctgcgcgccgggctggccgaggtgatcaagtacgggctgatccgcgacgccgactttctgacctggctggaggcgaacatgccggccctgctggctcgcgacaaggcggcgctggccgaggcggtggagcgctcctgccggcacaaggccgcggtggtggccgaggacgagctggaggcggggcagcgggccctgctcaacctgggccataccttcggccacgccatcgagacccataccggctatggggcctggctgcacggtgaggcggtggccgccgggatggtgatggccggctggatgtccatgcgccagggctggctgagcgaggccgatttccaccgcctggaggccatcctctccaccgccggcctgcccgtggccccgccggcgatggagagtgagcgcttccgcgaattgatggccgtggacaagaaggtgcaggacggccggctgcggctggtgctgttgcgggcgctgggcgacgccgtggtcaccgatgccttcgaccccgccgcgctggaggccaccctggaccactactgcgccagccccgaatag

SEQ ID NO: 923 - protein, 364 aa, Alkalilimnicola ehrlichei MLHE-1
MTETTTLQVDLGSRSYPIHIGTGLLDQPRLITDHLPARRVMVVTNETVAPHYLDRVLASLDGREAHSVVLPDGERFKSLETAMRVYDALIEHRFDRGSAIVALGGGVIGDLAGFVAATWQRGVRYLQVPTTLLAQVDSSVGGKTAVNHPGGKNMIGAFHQPRCVIADMDTLDTLPDRELRAGLAEVIKYGLIRDADFLTWLEANMPALLARDKAALAEAVERSCRHKAAVVAEDELEAGQRALLNLGHTFGHAIETHTGYGAWLHGEAVAAGMVMAGWMSMRQGWLSEADFHRLEAILSTAGLPVAPPAMESERFRELMAVDKKVQDGRLRLVLLRALGDAVVTDAFDPAALEATLDHYCASPE

SEQ ID NO: 924 - DNA, 1122 bp, Hyphomonas neptunium ATCC 15444
  CDS (1)..(1122): transl_table=11
atgaaaacttcttccccgctggaaacggtgcgcgttgaactgggcgcgcgagcgtacgacattctcgtgggccatggcgcgctctcagaactcggcccgcgtctctcgcagatgctcaagcggccacgcgcctttgttctgaccgatgaaacggtggcgcgccatcacaaggacgcgctggaagcggcggttaaatccgctggcatccggctggactggttgagcctgccgccgggcgagaagaccaagtccttttcccagctggagggtgtgctggactggctgctggcgggcggcgcagaccggggcgatacgctgatcgcgtttggtggcggggtcatcggcgatatgggcggccttgccgccagcctgatgaagcgcggcatgggatttgtgcaggtgccgaccacgcttctggcgcaggtcgattcttcggttggcggaaaaacggcggtcaatacgccgcgcggcaaaaacctgatcggcgccttctaccagccgcgcctggtgattgccgataccgcgcttctcgcgacgcttccggcgcgggagctcaaagcgggctatgccgagattgtcaaatatggcctgatcaacgatgccgccttctttgactggctggccgtgaacggacagaaagttctggcgcttgagcctgaagccgcccgttacgccgtggcgcggtcctgtgctgccaaggcggcgattgtggcggaagatgaaaccgagaccggcgtgcgccagctgctcaatcttggccatacattcgggcatgctttcgaggcggccaacgaataccgggagaacctccttcatggcgaggccgttgcgctgggcatggcattggcgtttcgttatggcgccgccagcggcatcacgccggcggcagacgcggcgcgggttaccgaagtgctgggcgcgtcgggccttccggtatcgctcgaaggttttgaccccgcccgcttcgccgcagaccgtcttgccgccctgatgcagcaggacaagaaggcccgtgcgggccgcgttccgctgatcctcgcccgcggaatcggcgcggcttacgtccatcccgatgcggaccttgcttcggtcgaacgctttctcgcatctgaacttgcctaa

SEQ ID NO: 925 - protein, 373 aa, Hyphomonas neptunium ATCC 15444
MKTSSPLETVRVELGARAYDILVGHGALSELGPRLSQMLKRPRAFVLTDETVARHHKDALEAAVKSAGIRLDWLSLPPGEKTKSFSQLEGVLDWLLAGGADRGDTLIAFGGGVIGDMGGLAASLMKRGMGFVQVPTTLLAQVDSSVGGKTAVNTPRGKNLIGAFYQPRLVIADTALLATLPARELKAGYAEIVKYGLINDAAFFDWLAVNGQKVLALEPEAARYAVARSCAAKAAIVAEDETETGVRQLLNLGHTFGHAFEAANEYRENLLHGEAVALGMALAFRYGAASGITPAADAARVTEVLGASGLPVSLEGFDPARFAADRLAALMQQDKKARAGRVPLILARGIGAAYVHPDADLASVERFLASELA

SEQ ID NO: 926 - DNA, 1131 bp, Rhizobium leguminosarum bv. viciae 3841
  CDS (1)..(1131): transl_table=11
atgaatgcgataacctccgcctccgccatccgaacggtgcatgtgccgctcggcgagcgcgcctacgacatcctgatcgggccggggttgattgcgcgggccggcgccgagatcgcctctcgcctcaagggccgcaaggcggctgttgtcaccgatgaaaatgtcgcgccgctctatctcaaagcccttgtcgcaagtctggatgaagcaggtatcgcctcggccgaggtcgtcctgccggccggcgagaagaccaagagcttcgaacatctgatcacggcctgcgacaagttgcttgaggcgcgcgtcgagcgcaacgattacgtcatcgcgcttggtggcggcgtcatcggcgatctttccggatttgcggccggcatcgtccgtcgcggcgtgcgcttcgtgcaggtaccgacctcgctgctgtctcaggtcgattcctccgtcggcggcaagaccggcatcaattcccgccacggcaagaatctgatcggcgtcttccatcagccggacctggttctggccgatacggatgtgctgaattcgctgagcgagcgcgaattccgcgcaggttacgccgaggtcgccaaatacgggctgatcgacaagccggatttcttcgcctggctggaagcgaactggaagtcggtttttaccggcggctccgcgcgcatcgaggcgattgccgccagctgccaggcaaaggccgatgtcgtcgttgccgacgagcgtgagaatggtcagcgggcgctgctcaatcttggccatacattcggccacgcgctggaagcggcgaccgcctatgacagttctcgcctcgtgcatggcgagggcgtttcgatcggcatggtgctggcgtatgaattctccgcacgaatgaaccttgcaagcccggacgatgcgcggcgcgtcgagcggcatctgaaggaggtcggcctgccgacccgcatgtccgacattccgggcgacctgccgccggccgaaacgctgatggacgcgatcgcccaggacaagaaggtcaagagcggcaagctcactttcatcctgacgcgcggcatcggccagtccttcgtcgccgacgacgttccggcgtccgaagtgatcagctttctccgggaaaaacacgcctga

SEQ ID NO: 927 - protein, 376 aa, Rhizobium leguminosarum bv. viciae 3841
MNAITSASAIRTVHVPLGERAYDILIGPGLIARAGAEIASRLKGRKAAVVTDENVAPLYLKALVASLDEAGIASAEVVLPAGEKTKSFEHLITACDKLLEARVERNDYVIALGGGVIGDLSGFAAGIVRRGVRFVQVPTSLLSQVDSSVGGKTGINSRHGKNLIGVFHQPDLVLADTDVLNSLSEREFRAGYAEVAKYGLIDKPDFFAWLEANWKSVFTGGSARIEAIAASCQAKADVVVADERENGQRALLNLGHTFGHALEAATAYDSSRLVHGEGVSIGMVLAYEFSARMNLASPDDARRVERHLKEVGLPTRMSDIPGDLPPAETLMDAIAQDKKVKSGKLTFILTRGIGQSFVADDVPASEVISFLREKHA

SEQ ID NO: 928 - DNA, 1107 bp, Pseudomonas aeruginosa UCBPP-PA14
  CDS (1)..(1107): transl_table=11
atgcgcacacttcacgtcgatctaggcgagcgtagctatcccatttacatcggtgaaaacctgctgggcgacgcccgctggttcgcgccgcatatcgtcggtcgccgggtcgcggtgatcagcaacgaaacggtcgctcctctctatctggaaaccctgctcaaggcactgcaaggccacgaggtcacccctgtggtgctgcccgacggcgaggcctacaagcagtgggaaaccctgcaactgatcttcgatgccctgctgaaggagcggcatgaccgcaagactaccctgatcgccctgggcggcggcgtcatcggtgacatggccggtttcgccgcggcctgctaccagcgtggggtcaacttcatccaggtgccgaccaccctgttgtcccaggtcgactcctcggtgggcggcaagaccgggatcaaccatccgttgggcaagaacatgatcggtgcgttctaccagccccaggcggtggtcatcgacaccgcgtcgctgaagacgctgccgtcccgcgagctgtccgccgggctggcggaggtgatcaagtacggtttcatttgcgacgaaccgttcatcacctggctggaagagcacatggatgccttgctggcactggagccgaccgttgtcaccgaggccatcgagcgctcttgcgcggcgaaggcccgcgtggtgggcgccgacgagcgcgagtcgggcgtgcgtgccacgctgaacctcggccataccttcggtcacgcgatcgagacccagcaaggttacggcgtctggttgcacggcgaagcggtaggggcgggaaccgtgatggcactcgagatgtcgcatcggttgggttggctgagcgccgccgagcgcgatcgcggtatccgtctgctgcgccgggctggcctgcccgtggtaccgccggccgagatgacggcggaagattttatggaacacatggccgtcgacaagaaagtgctcgatggccgcctgcgtctggttttgctgcaaggactggggaatgccgtggtcaccggcgattttccccgtgagatcttggacgcgaccctgcgcaccgactatcgggccttggccgaccagcttggagatgaatga

SEQ ID NO: 929 - protein, 368 aa, Pseudomonas aeruginosa UCBPP-PA14
MRTLHVDLGERSYPIYIGENLLGDARWFAPHIVGRRVAVISNETVAPLYLETLLKALQGHEVTPVVLPDGEAYKQWETLQLIFDALLKERHDRKTTLIALGGGVIGDMAGFAAACYQRGVNFIQVPTTLLSQVDSSVGGKTGINHPLGKNMIGAFYQPQAVVIDTASLKTLPSRELSAGLAEVIKYGFICDEPFITWLEEHMDALLALEPTVVTEAIERSCAAKARVVGADERESGVRATLNLGHTFGHAIETQQGYGVWLHGEAVGAGTVMALEMSHRLGWLSAAERDRGIRLLRRAGLPVVPPAEMTAEDFMEHMAVDKKVLDGRLRLVLLQGLGNAVVTGDFPREILDATLRTDYRALADQLGDE

SEQ ID NO: 930 - DNA, 1065 bp, Leuconostoc mesenteroides subsp. mesenteroides ATCC 8293
  CDS (1)..(1065): transl_table=11
atgagcacaattacagttgatttagcgacaaaaaagtatgatgtgaaaattgataacactttacacacacgtcttggccaagaaatatcggctgtgtggtctgcgcgaaagatttcactattaacagatagcaacgttgggccattgtatttaaaggatacagcaaagcaattacgtgaagtaggatttgatatactcgagttagaagttcccgctggagagtcatcaaaatctttgtcagtggccggtgaattgattgctaaaatggcagctgctggatttacacgtggcgatggtgttattgcattaggtggtggcgttattggtgatttaggtggagtagtcgcctctttgtacatgcgcggaattgcttttattcaaattgcgacgtcattaacagctcaagttgattcgtcggttggtggtaagacagccgtgaatcttggtaatacaaaaaatattgctggctctttttatcagccggatttagatttagttgatgttacttatttgaatacactgacggaccgtgatttagttgaaggatatgcggaagttgttaaaacatcagcattggctaatcaagacttttttgattttactggtcaaatcaaatcggtagcagatatacgtcatcatgcgcaagaattgtcaaaacgtgcgattgcttataaggctagtgtagtgatggctgatgaaaaagaagctggagaccgccagtttctgaattttgggcatacttttggtcacgcgattgaactattagctcatggtgaattacgtcatggtgaagctgtggcgattggtatgattgctattagcagtcgatttgaacaacatggtataatgcctagagggctaactactgaattattaagtcgattggaagctgttggtttaccaacacattcgcattttatcgggacaactgacttctttaaccacttgatcaatgataaaaaaaatcatgatggtattttgaatttagtggctcttgaaaaagtaggtcagccaattattgtaaagaaaaaaatcgccgacatgccggcatttgtggagaattaa

SEQ ID NO: 931 - protein, 354 aa, Leuconostoc mesenteroides subsp. mesenteroides ATCC 8293
MSTITVDLATKKYDVKIDNTLHTRLGQEISAVWSARKISLLTDSNVGPLYLKDTAKQLREVGFDILELEVPAGESSKSLSVAGELIAKMAAAGFTRGDGVIALGGGVIGDLGGVVASLYMRGIAFIQIATSLTAQVDSSVGGKTAVNLGNTKNIAGSFYQPDLDLVDVTYLNTLTDRDLVEGYAEVVKTSALANQDFFDFTGQIKSVADIRHHAQELSKRAIAYKASVVMADEKEAGDRQFLNFGHTFGHAIELLAHGELRHGEAVAIGMIAISSRFEQHGIMPRGLTTELLSRLEAVGLPTHSHFIGTTDFFNHLINDKKNHDGILNLVALEKVGQPIIVKKKIADMPAFVEN

SEQ ID NO: 932 - DNA, 1074 bp, Solibacter usitatus Ellin6076
  CDS (1)..(1074): transl_table=11
atgccctcttatctggtcgaaacgccgcagcggtgctattccgccatcgtggaacgcggcatcatcgggcagacagcgcagtacctcccgcccaagaccggcaaggtcttcgttgtcactaccgcggatgtctggaagcacgccggagcgcccctgaaggccgcgctggccggtatcccgttcgaaatcctcaatcttcccggcggcgaagatcaaaagcgtctcgcccccgtcgaggctctcgccgaagaaatggtgcagcgcggcgccgatcgctccagcatggtgatcgcctacggcggcggcatcgtcaccgacatgggcggcttcctggccgctatcttcatgcgcggcatcccggtgctgcagatcccgaccaccttgctggcgcaggtcgatgccgcaatcggcggcaagaccggagtgaacctggtgagcggcaagaacctgatcggcagcttccaccagccgctcgcggtcctcaccgacccggccattctggattcgcttcccgaacgcgagtaccgcgccggactctgggaaatcatcaaggccggcatcatccgtgaggtggagctcttcgattacctgtccgaatcccgcgccgatgtgctggcgcgcaagccggaagccgtggaccacatcatcgccgagagcgtccgcatgaaagccgaggtggtctccagcgacgaacgcgaaggcgacatgcgccgcatcctgaatttcggccacaccttcggacacgcgctcgaagccgagaccgaatacaaacgcctgctgcatggcgaggcggtcgcgtggggtatgcgcgcagccatctatctcggcgagtccaccggctacgtgtcggcggaggactcggtcgatatgctgcagatgatcgaggactacggtccgattccctcactcgccggcattcgcgccgaaaacctgctggcgcgcctggttcacgataagaaaacggtacagggtaaagtccacttcgtgctgcccgtgcgcatcggcgaagtgacggtggtctccggaatcgaggaaccgctggtgttcgaggccatgcggtccgccctcgcatga

SEQ ID NO: 933 - protein, 357 aa, Solibacter usitatus Ellin6076
MPSYLVETPQRCYSAIVERGIIGQTAQYLPPKTGKVFVVTTADVWKHAGAPLKAALAGIPFEILNLPGGEDQKRLAPVEALAEEMVQRGADRSSMVIAYGGGIVTDMGGFLAAIFMRGIPVLQIPTTLLAQVDAAIGGKTGVNLVSGKNLIGSFHQPLAVLTDPAILDSLPEREYRAGLWEIIKAGIIREVELFDYLSESRADVLARKPEAVDHIIAESVRMKAEVVSSDEREGDMRRILNFGHTFGHALEAETEYKRLLHGEAVAWGMRAAIYLGESTGYVSAEDSVDMLQMIEDYGPIPSLAGIRAENLLARLVHDKKTVQGKVHFVLPVRIGEVTVVSGIEEPLVFEAMRSALA

SEQ ID NO: 934 - DNA, 1110 bp, Magnetococcus sp. MC-1
  CDS (1)..(1110): transl_table=11
atgtccgtacgtgaaaccctctccctggatctgggagaccgcagctatgagatcgtgattggtgaaaatgtgctggccagtttgggggcgcgtttaaaaccgatgctcaaaggtcggcagattggtttagtgaccaatgagaccgtagccccactctatgctgaaacggtcattcgcagcttggaagaggcgggttttcaggtcacactggtgattttgcccgatggcgagcgctataaaaattgggagaccctcaatctcatttttgatgcactgattggtgccaagtttgaacgccaaggggcgattgtggcgctggggggcggggtggttggggatatggcgggttatgcggcggcctcattactgcggggggtgccctatgtgcaggtacccaccacgctgctcgcgcaggtggatagttcggtgggggggaaaaccggcattaaccaccccttgggcaaaaacctgattggtgccttttatcaacccaagttggtgttgatggatttggcgaccctgcacacgctgcccaagcgggagttgttggcgggactggccgaggtgattaagtatggcattatctgggatgaggccctgtttcagcagttagaggagcaattagagcccctgctggcgctggattatggggtgttggctaaggtggtgcatcgttgctgtgtgatcaaggccgaggtggtggccaaggatgagcgggaaacgggggtacgggccttattaaatctgggtcatacctttggacatgcgattgaaaatttggcaggttatggtgaaaacctgcatggcgaagcggtcggtatgggcatgatgatggcggcgcacatggcctatctgcggggcatggtggatgccgctttggttgcaagggtgcgggctttgattgtgcgggcgggcctgccggagtttcccgcgcagcgccagccgttggcggcctatttggatgccatggggcgcgataaaaaggtggtcgcgggtaagatgcgttttgtattgcccacgggtatgggcgctgcggtagtggtggatgatgtgaccgatgccagtctggctcaggtgttagccccctatgcgtcggatgtgcaaaactaa

SEQ ID NO: 935 - protein, 369 aa, Magnetococcus sp. MC-1
MSVRETLSLDLGDRSYEIVIGENVLASLGARLKPMLKGRQIGLVTNETVAPLYAETVIRSLEEAGFQVTLVILPDGERYKNWETLNLIFDALIGAKFERQGAIVALGGGVVGDMAGYAAASLLRGVPYVQVPTTLLAQVDSSVGGKTGINHPLGKNLIGAFYQPKLVLMDLATLHTLPKRELLAGLAEVIKYGIIWDEALFQQLEEQLEPLLALDYGVLAKVVHRCCVIKAEVVAKDERETGVRALLNLGHTFGHAIENLAGYGENLHGEAVGMGMMMAAHMAYLRGMVDAALVARVRALIVRAGLPEFPAQRQPLAAYLDAMGRDKKVVAGKMRFVLPTGMGAAVVVDDVTDASLAQVLAPYASDVQN

SEQ ID NO: 936 - DNA, 1080 bp, Shewanella sp. ANA-3
  CDS (1)..(1080): transl_table=11
atgacaaaacaaattcaggttgatttaggtgaacgtagttatcccatttatattggccagagtttgatgagtgatggcgagaccctgtctcgctacctgctgaaaaaacgtatccttatcgtcaccaatgaaactgtcgcgcccttgtatcttaagcagatccaagacacgatggcttcgtttggtgaggtaaccagcgtcatccttcccgatggcgagcaattcaaagatttaacgcatttagattccatttttacggctttactgcaacgcaattatggccgtgattcagtgctggtggccctcggtggcggggtgattggtgacatgacgggttttgccgctgcctgttaccaacgtggcgtcgattttattcaaattccgaccacactactatcacaagtagactcttccgttggcggaaaaaccgccgttaatcatccgcttggcaaaaatatgatcggggctttttaccagccacagatcgtcattatcgatactgaatgcttgcagaccttgcccgcgcgtgaatttgccgctgggatggcagaagtcattaagtatggcatcatgtgggatgctgaattttttcaatggcttgagaacaatgttcaagcattgaaaagcctagatactcaagctttggtctatgcgatttctcgctgctgtgagattaaagccgatgtcgtgagtcaggatgagaccgagcagggcgtccgcgcgctattaaaccttgggcatacctttggtcatgcgatcgaggccgagatgggttatggcaattggttgcatggtgaagcggttgctgctggcacagtccttgctgcacaaacggctaaatccatgggattgattgatgagtcaattgttcgtcgtattgtgcaattgttccatgctttcgatctgccagtaacagcgccggaatctatggatttcgatagttttattaaacacatgcgtcgcgataagaaagtgttaggtggtcagatccgactggtactcccgacggccattggtcgagctgatgtctttagccaagttccggaatctaccctagaacaggttatctgctgcgcataa

SEQ ID NO: 937 - protein, 359 aa, Shewanella sp. ANA-3
MTKQIQVDLGERSYPIYIGQSLMSDGETLSRYLLKKRILIVTNETVAPLYLKQIQDTMASFGEVTSVILPDGEQFKDLTHLDSIFTALLQRNYGRDSVLVALGGGVIGDMTGFAAACYQRGVDFIQIPTTLLSQVDSSVGGKTAVNHPLGKNMIGAFYQPQIVIIDTECLQTLPAREFAAGMAEVIKYGIMWDAEFFQWLENNVQALKSLDTQALVYAISRCCEIKADVVSQDETEQGVRALLNLGHTFGHAIEAEMGYGNWLHGEAVAAGTVLAAQTAKSMGLIDESIVRRIVQLFHAFDLPVTAPESMDFDSFIKHMRRDKKVLGGQIRLVLPTAIGRADVFSQVPESTLEQVICCA

SEQ ID NO: 938 - DNA, 1077 bp, Mycobacterium avium 104
  CDS (1)..(1077): transl_table=11
gtgaccgtgcaggtggccgtcgacccgccctacccggtgatcatcggcaccgggctgctgggcgagctggacgaactgctcggcgcccggcacaaggtcgccgtcgtgcaccagcccgtactcgccgagaccgccgaggtgatccgaaagcggttggcggacaagggtgttgacgcgcaccgcatcgaaatcccggacgccgaggacggcaaggacctcccggtcgtcggcttcctgtgggaagtgttgggccgcatcggaatcggccgcaaggacgcgttggtcagcctgggcggtggcgcggccaccgacgtcgccggtttcgcggcggccacctggctgcgcggcgtcgacatcgtgcacgtgcccaccaccctgctcggcatggtcgacgccgccgtcggcggcaagaccggcatcaacaccgacgccggcaagaacctggtcggcgccttccaccagccgctcgcggtgctggtcgacctcgcgacgctacacacgttgccgcccaacgagttggtggccggcatggccgaagtcgtcaaggccggcttcatcgccgatccggcgatcctcgacctcatcgaggccgatccgcgggccgcggtggacccgtccggcgaggtgctggccgagctggtccagcgcgccatcgcggtcaaggccgacgtcgtcgccgccgacgagaaggagtcggagctgcgcgaaatcctcaactacgggcacacgttggggcatgcgatcgagcgccgcgagcgctaccggtggcggcacggcgcggcagtgtcggtgggcctggtcttcgccgccgagctggcccggttggccgggcggctcgacgacgccaccgcgcggcggcaccgcaccatcttgtccgcgctcggcctgccggtcagctacgacgccgacgcgctgccgcagctgctggaatacatggccggggacaagaagtcccgcgccggggtgctgcggttcgtggtgctggacggattggccaagccgggccggctggccggcccggacccgtcgctgctggcggcggcgtatgccgccctggccgacgaggacgcctcatga

SEQ ID NO: 939 - protein, 358 aa, Mycobacterium avium 104
MTVQVAVDPPYPVIIGTGLLGELDELLGARHKVAVVHQPVLAETAEVIRKRLADKGVDAHRIEIPDAEDGKDLPVVGFLWEVLGRIGIGRKDALVSLGGGAATDVAGFAAATWLRGVDIVHVPTTLLGMVDAAVGGKTGINTDAGKNLVGAFHQPLAVLVDLATLHTLPPNELVAGMAEVVKAGFIADPAILDLIEADPRAAVDPSGEVLAELVQRAIAVKADVVAADEKESELREILNYGHTLGHAIERRERYRWRHGAAVSVGLVFAAELARLAGRLDDATARRHRTILSALGLPVSYDADALPQLLEYMAGDKKSRAGVLRFVVLDGLAKPGRLAGPDPSLLAAAYAALADEDAS

SEQ ID NO: 940 - DNA, 1098 bp, Nocardioides sp. JS614
  CDS (1)..(1098): transl_table=11
atgagggacaccgtcgtccgggtgaccggggccgcgccgtacgacgtcgtcatcggccacgacctgtccgagcggctgccgcagctgctcggggtcggggtgcaacgggtcgcggtcgtgttctccgacgcgttggccgagctggtgaaccccgtcctcgactcgctggcggcggcgtacgacgtgatggtgctcccgatccccgacggcgaacgggcgaagaaggctgcggtcgcggtctcgtgctgggaggcgctcggtgaggccgggttcacccgctccgacgcggtcgtgaccttcgggggcggtgcgaccacggacgtcggtggcttcgtcgccgcgacctggctgcgcggcgtgaaggtcgtgcacgtgccgaccacgctgctcggcatggtcgacgccgcggtcggcggcaagaccggcgtgaacacccgcagcggcaagaacctggtgggtgccttccacgagccggccggcgtgctctgcgacctgtcgacgctgcgctccctgccccgcgccgagctgctcgccgggctcggcgaggtcatcaagtgcgggttcatcgccgaccccgcgatcctcaacctcgtcgagggcaacgaggcctcccgcctcgatgccgactccctcgtcctgcgcgagctggtcgagcgtgccgtgcgggtgaaggccggggtcgtctcggccgacctcaaggagaccggcggccgcccggacgacccgggccgggagatcctcaactacgggcacacgatggcgcacgccatcgagcgcaccgagaactaccggatccggcacggcgaggccgtctcgatcgggtgcgtgtacgtcgcggagctggccaaccgggccggcaccctcgcctccgacatcgtcgagcggcaccggcacgcgttcgcccgcgtcgggctgcccacgtcgtactccaaggcctccttcgacgacctgcaccgggcgatgcgggtcgacaagaaggcgcgcggctcccagctgcgcttcatcgtgctctccgacctcgcggtcccgaccgtgctggccggaccgtccgtggtggacctgcgcgacgcctacgccgcgatcggtggccccgcgtga

SEQ ID NO: 941 - protein, 365 aa, Nocardioides sp. JS614
MRDTVVRVTGAAPYDVVIGHDLSERLPQLLGVGVQRVAVVFSDALAELVNPVLDSLAAAYDVMVLPIPDGERAKKAAVAVSCWEALGEAGFTRSDAVVTFGGGATTDVGGFVAATWLRGVKVVHVPTTLLGMVDAAVGGKTGVNTRSGKNLVGAFHEPAGVLCDLSTLRSLPRAELLAGLGEVIKCGFIADPAILNLVEGNEASRLDADSLVLRELVERAVRVKAGVVSADLKETGGRPDDPGREILNYGHTMAHAIERTENYRIRHGEAVSIGCVYVAELANRAGTLASDIVERHRHAFARVGLPTSYSKASFDDLHRAMRVDKKARGSQLRFIVLSDLAVPTVLAGPSVVDLRDAYAAIGGPA

SEQ ID NO: 942 - DNA, 1083 bp, Azoarcus sp. BH72
  CDS (1)..(1083): transl_table=11
atgcgaacactgaacgttgcgcttggcgaccgtagttatccgattcacatcggcgcgggcctgctggcgcgacccgaactgatcgtgccgctgctgcgcacgccgcgggttgccatcgtcacgaacaccgtcgtaggaccgctgtatctcgagcgcctcaccgccggactggaatcccacggtattgccgtgtccaccgtagtgcttccggacggagaggcgcacaaggactggaccacgctcaaccgcatcttcgacatgctgctggagtcacgctgcgagcgttcgaccacgctgctcgcgctcggcggtggtgtcgtcggtgatatgggcggctttgcggctgccacctatcagcgcggcatgcccttcatgcagattccgactaccctgctgtcgcaggtcgattcttcagtcggggggaagaccgcgatcaatcatccgctcggcaagaacatgatcggcgcgttctaccagccccgtctggtcctggccgacatcgaggtattgaataccttgcccgatcgcgagctttccgcgggtctggccgaggttatcaagtacggcctgatccgcgaccccgcgttctacgcgtggcttgaggagaacatcgagcgcctgcgggcgcgcgaccctgaggcgcttgcttatgcgatcgagcgctcatgccgcaacaaggcggaggtcgtggctgcggacgagacggagcaaggggagcgtgccttgctcaacctcggccacacgttcggccacgccatcgaaacgggcatgggttacggtgaatggctgcacggggaggcggttgcggccggcaccatgatggccgcggagctgtcccgggcgcttggctggctgacggacgacgacgtgaatcgcatcgaagcgctgttcgtgcgtgccggtcttccggtgcgtgcgccggcgctgggcatcgaacgctatctggaactgatggctcacgacaagaaggtcgagtccggccggctgcggctggttctgctggcgtccatcggcaaggcgctgatgttcggggatgccacagccggcgaaatcggtgcggcgatttcccgccgctgcgggtga

SEQ ID NO: 943 - protein, 360 aa, Azoarcus sp. BH72
MRTLNVALGDRSYPIHIGAGLLARPELIVPLLRTPRVAIVTNTVVGPLYLERLTAGLESHGIAVSTVVLPDGEAHKDWTTLNRIFDMLLESRCERSTTLLALGGGVVGDMGGFAAATYQRGMPFMQIPTTLLSQVDSSVGGKTAINHPLGKNMIGAFYQPRLVLADIEVLNTLPDRELSAGLAEVIKYGLIRDPAFYAWLEENIERLRARDPEALAYAIERSCRNKAEVVAADETEQGERALLNLGHTFGHAIETGMGYGEWLHGEAVAAGTMMAAELSRALGWLTDDDVNRIEALFVRAGLPVRAPALGIERYLELMAHDKKVESGRLRLVLLASIGKALMFGDATAGEIGAAISRRCG

SEQ ID NO: 944 - DNA, 1104 bp, Acidovorax sp. JS42
  CDS (1)..(1104): transl_table=11
atggcaaagatggctacggtacagatcgaactaggggatcggggctacgccatctatatcggcaacggtctgctggagaatgcaggcacctacaagggcttgcccgcagcgtacgccgcgctcattgtcagcaatacctcggttgcaccgttgtatgcgcagagattgcggaatgccctgcggatgcaatatgcgcagctgcacgaagttgtcttgccagatggcgaatcacacaaggattggcatacgctgaatctgatctttgacggtctgctgaagcacggctgcgaccgtaggacggttttattcgcgctgggcggcggcgtcatcggcgacatgaccggtttcgccgcggcgtgctacatgcgcggcgtgcccttcgtgcaggtgcccaccacattgctggcacaagtggattcgtcggtgggcggcaagactgccatcaaccatccgctgggtaagaacatgatcggcgcgttctatcagcctcagttggtggtatgtgatctggacacgttggacactttgccggcgcgcgagttggcggcgggcctggccgaggtgatcaagtacgggccaatcgcagacatggagttgtttgcctggctcgaggcccacatggacgcgctcgtcgcgcgggagcgcggcgcgctggcccatgtggtcaagcgcagctgcgagatcaaggcggcggtggtaggcgcggatgaacgcgaagccgggctgcgtgccattttgaatttcggccatacctttggccatgccatcgaggcgggcatgggctacggcgtgtggctgcatggcgaaggggttgccgcaggcatggtgatggccgcgcatctatcgcagcggctgggtttggtggacggctctttcgttgaacgcctgacgcgcctgatcgagcgcgccggtctgcccacacgggggccggtgcttgacgcgcaggacaatgcggggcgctatctggaactcatgcgcgtggacaagaaggcagaaggcggtgagatccgcttcgtgctgatcgacggacccggcaaagccatcatgcgcgccgcgccggatgcgctggtgcgcgaagtcatcgaccagtgctgtgcgtcctaa

SEQ ID NO: 945 - protein, 367 aa, Acidovorax sp. JS42
MAKMATVQIELGDRGYAIYIGNGLLENAGTYKGLPAAYAALIVSNTSVAPLYAQRLRNALRMQYAQLHEVVLPDGESHKDWHTLNLIFDGLLKHGCDRRTVLFALGGGVIGDMTGFAAACYMRGVPFVQVPTTLLAQVDSSVGGKTAINHPLGKNMIGAFYQPQLVVCDLDTLDTLPARELAAGLAEVIKYGPIADMELFAWLEAHMDALVARERGALAHVVKRSCEIKAAVVGADEREAGLRAILNFGHTFGHAIEAGMGYGVWLHGEGVAAGMVMAAHLSQRLGLVDGSFVERLTRLIERAGLPTRGPVLDAQDNAGRYLELMRVDKKAEGGEIRFVLIDGPGKAIMRAAPDALVREVIDQCCAS

SEQ ID NO: 946 - DNA, 1116 bp, Magnetospirillum magnetotacticum MS-1
  CDS (1)..(1116): transl_table=11
atgagtgccgccgctgaacaggtcctggttgaactgggcgagcgctcgtatcccatccatatcggccctggcctgctggaccgggcgggcgaactggtcaagccgaagatgaagggcggccgtgccctggtggtgaccgacgccaatgtggcgccccactatcttgaacgggtgcaaagaagcctggccgaggccggggtgaccaccatgcacaccgtcatgcccgctggcgagcagaccaaggacttcaagcatctggaagccttgctggacgccatgctggaagcgcgctccgagcgcggcatcatggtggtggccttagggggaggcgtggtcggcgacctgaccggattcgctgccgccatcttgctgcgcggcgtggatttcgtgcagatccccaccaccttgctgtcccaggtggacagttctgtgggcggcaagaccggcatcaatacccgccagggcaagaatctgatcggcgccttccaccagccccggctggtcctggccgatacccaggtgctcgacaccctgccgcgccgtcaggtgctggccggttatgccgaggtggtcaaatacggggtgatcgacgacgagccgttctttgcctggctggaagccaacggcgccaaggtgatcgatggcgatctggaggcgcggggctatgccgtcgccgcctcgtgccgcgccaaggcccgcatcgtcggcgccgatgagcgggaaggcggcgtgcgggcgctgctcaatctcggccacacattcggccatgccctggaggccgagaccggcttttccgacgagatgctgcacggcgaggcggtggccatcggcatggtgatggcgctgcgcctctcggttcgcttgggtctggcgcccgccgccgatgccgaacggctggagcggcacttgacggctgttggcctgcccacgaccctgcccaagccccggctatgggcggtggaccggctgatccatcacatgtcgggcgacaagaaggtcaaggacggcaaggtcaccttcgtcatggccaggggtatcggcaaaagcttccttacccgcgacgttccggagaccgatctggcctccatgttggcggagatggcggcggggaggtag

SEQ ID NO: 947 - protein, 371 aa, Magnetospirillum magnetotacticum MS-1
MSAAAEQVLVELGERSYPIHIGPGLLDRAGELVKPKMKGGRALVVTDANVAPHYLERVQRSLAEAGVTTMHTVMPAGEQTKDFKHLEALLDAMLEARSERGIMVVALGGGVVGDLTGFAAAILLRGVDFVQIPTTLLSQVDSSVGGKTGINTRQGKNLIGAFHQPRLVLADTQVLDTLPRRQVLAGYAEVVKYGVIDDEPFFAWLEANGAKVIDGDLEARGYAVAASCRAKARIVGADEREGGVRALLNLGHTFGHALEAETGFSDEMLHGEAVAIGMVMALRLSVRLGLAPAADAERLERHLTAVGLPTTLPKPRLWAVDRLIHHMSGDKKVKDGKVTFVMARGIGKSFLTRDVPETDLASMLAEMAAGR

SEQ ID NO: 948 - DNA, 1089 bp, Haemophilus influenzae R2846
  CDS (1)..(1089): transl_table=11
atgttgtgcgtcaatgtggaattgcaagagcgtcgctatcctattttaattggtagcgaattgttacaagatgaacgtagttacccgattaaacctggggatcgcgtgatgattgtaacgaatcccacggttgcacagttttatcttgatacagtcatctatgcgttggaaaaacgtggttgcgtagtcgatcatgttttattgccagatggcgaaaaatacaaaacacttgaatctttaaacttaattttcaccgcacttttgcaaggtaatcatgggcgagataccacgattattgcattgggcggtggcgtaattggcgatgttgctggctttgctgcggcaagttatcagcgcggcgtgcgtttaattcaaattccaacaacattgctttcacaagtggattcttcagtgggcggtaaaacggcggttaatcatgaattaggcaaaaatatgattggcgcgttctatcagccatcaatggttattattgatacgctcacgcttaatacacttcctaaacgtgaagtaaatgcggggcttgccgaagttatcaaatatggtgccattttagattacgaattttttgaatggctagagcaacatattgatgaacttgtcgctttgcatcctgaggcgcttcaacattgtatttctcgttgttgccaaattaaagcagatgttgtcgcgagagatgaaacagaaaaaggcgatcgtgcattgcttaatcttggacatacttttggacatgccattgaaactcacttaggttatggaaactggcttcatggtgaagctgtttctacgggaatgatgatggcagcggcgctttcggaagaacttggagatatttctattgcagatgtgtctcgccttgaaaaattacttgctcgtgccaatttgcccaccgtatctccagatacgatgcagccggaggactatttaccgcatatgatgcgtgataaaaaagttctatcgggtaaattgcgtctggtattactcaaatctctaggtcaagcttatgtggcgaatgataccgaacataccctcgtgttaaacgcaattcgtcgttgtactcaaacggattaa

SEQ ID NO: 949 - protein, 362 aa, Haemophilus influenzae R2846
MLCVNVELQERRYPILIGSELLQDERSYPIKPGDRVMIVTNPTVAQFYLDTVIYALEKRGCVVDHVLLPDGEKYKTLESLNLIFTALLQGNHGRDTTIIALGGGVIGDVAGFAAASYQRGVRLIQIPTTLLSQVDSSVGGKTAVNHELGKNMIGAFYQPSMVIIDTLTLNTLPKREVNAGLAEVIKYGAILDYEFFEWLEQHIDELVALHPEALQHCISRCCQIKADVVARDETEKGDRALLNLGHTFGHAIETHLGYGNWLHGEAVSTGMMMAAALSEELGDISIADVSRLEKLLARANLPTVSPDTMQPEDYLPHMMRDKKVLSGKLRLVLLKSLGQAYVANDTEHTLVLNAIRRCTQTD

SEQ ID NO: 950 - DNA, 1098 bp, Listeria monocytogenes str. 4b H7858
  CDS (1)..(1098): transl_table=11
atgccagaaattacagtccgtgctaaaagtaaaacatacccagtatatattaatgaattcgcattagaagatgtccgggaaaagtggacggagagcctagctaaattttcccatgtgtttgttttgacagacgagcatgtggcggaacttcataaagcaaagcttgacgcggttctcgctgatttacctgtagtcacttattatgtggcgccaaacggggaagaagcgaaaacgtttcgtgtatatgaagatgtgatgacaaaattgattgaaacaggtcttgatcgtaaagcggttttaattgcttttggtggaggcgttattggtgatttaggtggttttgttgcggctacgtatatgaggggcattcctttttatcaggtgcctacgacggttcttgcgcatgatagtgccgtgggtggcaaggttgcgatcaatcatccgcttggcaaaaacatgattgggaacttttaccagccagaagcagtcatttatgatacccagttctttgctactttgccagaacgggaaatgcgctctggttttgcggaaatgattaaacatgcgcttattagcgatcagacgttactacgggccttaatggatacatttacggagccgaaagacttttatacgaaggatttgacgccgtttttacaacgtgggattgaaattaaagcaaatatcgttgcgcaagatgaaaccgagcaaggcgtgcgcgcttatttgaattttggtcacacatttggtcatgcacttgaagcctacggaaactttggcaagtggctgcacggcgaggcgattacttatgggatgatttatgcactcacgatgagtgagacaatttacggactggatttcgatttagcagaatttaaaacgtggctaaaacagttaggctatgatacgacatttgatgcaactgttccatttaataaaatactggaaaatatgcgtcatgataaaaaaacaacttttaatgaaataagtatggttttactcgaagaaattggagaaccggttatttttaaagcggaagatgatttgatttttgaaacttacaaacgtgtgatgcgaaatggagggaatggcatttga

SEQ ID NO: 951 - protein, 365 aa, Listeria monocytogenes str. 4b H7858
MPEITVRAKSKTYPVYINEFALEDVREKWTESLAKFSHVFVLTDEHVAELHKAKLDAVLADLPVVTYYVAPNGEEAKTFRVYEDVMTKLIETGLDRKAVLIAFGGGVIGDLGGFVAATYMRGIPFYQVPTTVLAHDSAVGGKVAINHPLGKNMIGNFYQPEAVIYDTQFFATLPEREMRSGFAEMIKHALISDQTLLRALMDTFTEPKDFYTKDLTPFLQRGIEIKANIVAQDETEQGVRAYLNFGHTFGHALEAYGNFGKWLHGEAITYGMIYALTMSETIYGLDFDLAEFKTWLKQLGYDTTFDATVPFNKILENMRHDKKTTFNEISMVLLEEIGEPVIFKAEDDLIFETYKRVMRNGGNGI

SEQ ID NO: 952 - DNA, 1101 bp, Crocosphaera watsonii WH 8501
  CDS (1)..(1101): transl_table=11
atgtcctctatcattgacgttaccttacctcataccagctacaatattgttatttctcctaacacattagaagatgtaggaaatcatttaacttcactccagttaggtaaaaagattctggttatttccaatccagaagtttttaatcactacggagaaactgttattaattccttgaataaggcagggtttaaagttttttatcacttgataccagcaggagaaacttataagacattagagagtatttctcaagtttatgatgttgccttgaaacatcgtttagaacgctcatcgaccctgttagcattaggaggtggagtcatcggagatatgacagggtttgctgcagctacttggttaagagggattaattttgtgcaagttcccacctctttgttggccatggtagatgcttctatggggggaaaaacaggggtcaatcatcctcaaggtaaaaatttaattggagctttttatcaaccccgtttagtgtttattgatccaatggtattaaaaacattacctatcagagaatttcgagcaggaatggcagaagtgattaaatatggagttatctgggatcaagatttatttcaacagttagaagcagaaaaaaaattagatagtttagaaaatatagatttagaagtaatggataaaattatcacaaaatcctgtcaagcgaaagttgatgtggttagtcaagacgaaaaagaagcaggaattagagctatattaaactacggtcatactattggtcatgctctagaaagtttaacaggttatagtcaaattaatcatggagaggctgtggcgataggtatggcagtagcaggaaaaatagcagttaaactaggtatgtggcaagaaggaaagacagaaagacaagacaatctcattaaaaaagcagccttaccatcgacctttgataacaagttaaaatctccagaaattttagacagtttacagttagataaaaaagtcaaagcagggaaagttagatttattttacccacagatattggccaggtagaaatacgtgagagtatttcctctgaagttattaccacagtgttagaagaaatcaaaattaagtaa

SEQ ID NO: 953 - protein, 366 aa, Crocosphaera watsonii WH 8501
MSSIIDVTLPHTSYNIVISPNTLEDVGNHLTSLQLGKKILVISNPEVFNHYGETVINSLNKAGFKVFYHLIPAGETYKTLESISQVYDVALKHRLERSSTLLALGGGVIGDMTGFAAATWLRGINFVQVPTSLLAMVDASMGGKTGVNHPQGKNLIGAFYQPRLVFIDPMVLKTLPIREFRAGMAEVIKYGVIWDQDLFQQLEAEKKLDSLENIDLEVMDKIITKSCQAKVDVVSQDEKEAGIRAILNYGHTIGHALESLTGYSQINHGEAVAIGMAVAGKIAVKLGMWQEGKTERQDNLIKKAALPSTFDNKLKSPEILDSLQLDKKVKAGKVRFILPTDIGQVEIRESISSEVITTVLEEIKIK

SEQ ID NO: 954 - DNA, 1080 bp, Prosthecochloris aestuarii DSM 271
  CDS (1)..(1080): transl_table=11
gtgagtgaaattatagtcagcaccccggttaccgaagatattgcagtcctgttcgacaaacatggactggcacgcaaaaccgtggttctttttgatgaaaacaccagaaagcttatcggcaatcagattctcgatagcctcgatcgccagggcttcatctggaaagaacttgtcatcccggccagggagacatccaaaagcttccgtactgcaatgaagctctacacggaaatgatcgaggcgcatgtcgaccgggggtggaaccttcttgctgtcggcggcggtgtcgtcggggatctcggaggattcgtcgcagcgagtttttaccggggcattccggtcattcaactcccgacaactctgctggcaatgaccgacagcgccattggaggaaaagtggccatcaaccatcctctgggcaaaaaccttatcggcttcttccacatgccgcaactggtcctgattgatccggcatggctcaacacgcttcctgaaagggaaatctatgcaggcatggctgaagttgtcaaatacggcttcattgccgacaggcagttcctctcctacctcgacgaacacttcgatgagatcgttgccgtcaaagatccatatgtcacctacgccatccggaccagcgcgatgatcaaagccgatgtggttgaaaaagatttcaaagaggaaagcggactgagagccacccttaacttcggccatacgtttggccacggactggaaaagcttgccgactatcgccatatccgccatggtgaagctgttgcactcggcatggtctgcgcgctcatattatccgaaatgctcgggaccatcactgaagaggaactgcagcaggggctcaacgtcctctcaagattcaaattcagaaaaggtctggtcgaaaaacatttcaaggtccatcctgcacaaaagatccttgaaagcatgcattcagacaaaaaaaaggtagacagcgcgttacgtttcgttctgctcgacgggctcggcaaagcatttcttcaccgcgagacacttgacgatgagctgattacgggcgctatagaaaaagcaaaaacgttctgctga

SEQ ID NO: 955 - protein, 359 aa, Prosthecochloris aestuarii DSM 271
MSEIIVSTPVTEDIAVLFDKHGLARKTVVLFDENTRKLIGNQILDSLDRQGFIWKELVIPARETSKSFRTAMKLYTEMIEAHVDRGWNLLAVGGGVVGDLGGFVAASFYRGIPVIQLPTTLLAMTDSAIGGKVAINHPLGKNLIGFFHMPQLVLIDPAWLNTLPEREIYAGMAEVVKYGFIADRQFLSYLDEHFDEIVAVKDPYVTYAIRTSAMIKADVVEKDFKEESGLRATLNFGHTFGHGLEKLADYRHIRHGEAVALGMVCALILSEMLGTITEEELQQGLNVLSRFKFRKGLVEKHFKVHPAQKILESMHSDKKKVDSALRFVLLDGLGKAFLHRETLDDELITGAIEKAKTFC

SEQ ID NO: 956 - DNA, 1113 bp, Xylella fastidiosa Ann-1
  CDS (1)..(1113): transl_table=11
atgaccactcccacaccactgcgcagcgtcaccgtcaacaccccccccccctataccatcaccattggtcccggcctattgcacgatcctccacgcctggccgccaccatccgcggcagacatgcactcattctcagtgattctgaagtcgccccccgttatgccgcacaactgcatgaaacgctactgcgcgcccgtcccgatctacacctcaacgtattcaccgtgccagccggcgaaacatccaagtccctagagaacttcggcgccgcaatcggccaactcgccacactgggcgccacgcgtgatgcctgcctctttgcactgggcggcggtgtcatcggggatctggccggctttaccgccgcctgctggatgcgtggcatcgactacgtacaagtgccaaccaccttattggcgatggtcgactcttccgtcggcggcaaaaccgccgtagacatcccccagggtaaaaacatggtcggtgccttccatccgccacgtgcagtgatcgccgacaccaacacccttgccacactcccgctacgggaactacgcgctggtctgagcgaagtcatcaaatacggcgcaatccgcgaccccgtattcttccactggctccaaaccacacgcgaagcacttctagcacgtgaccccgccgcactggcccaagcaatcgcacgtagctgcgaacacaaagccgatattgtcggacgtgacccactggaaaaaggggaacgcgtcctgctcaatctcggtcataccttcggccacgccatagaaacaacacagggttacagcacaccaggaagcaacaacctcaaccacggtgaagccgtcgccgtcggcatggtacttgccgcacgcttgtcaaacacattaggtctggcacccgcagaagacaccgagacactgaaaaacctactggatgcctacggcttgcccactgtcctgccctcaggtctaacacctgaaatgctcctggagcgtatgcgcctggacaaaaaaaacattgccggtcgcttacgcttggtcctatggcacggtattggccacgccgaagccgtccccgacgttgatgaagcagccgtgcgacagatcctggccaactaa

SEQ ID NO: 957 - protein, 370 aa, Xylella fastidiosa Ann-1
MTTPTPLRSVTVNTPPPYTITIGPGLLHDPPRLAATIRGRHALILSDSEVAPRYAAQLHETLLRARPDLHLNVFTVPAGETSKSLENFGAAIGQLATLGATRDACLFALGGGVIGDLAGFTAACWMRGIDYVQVPTTLLAMVDSSVGGKTAVDIPQGKNMVGAFHPPRAVIADTNTLATLPLRELRAGLSEVIKYGAIRDPVFFHWLQTTREALLARDPAALAQAIARSCEHKADIVGRDPLEKGERVLLNLGHTFGHAIETTQGYSTPGSNNLNHGEAVAVGMVLAARLSNTLGLAPAEDTETLKNLLDAYGLPTVLPSGLTPEMLLERMRLDKKNIAGRLRLVLWHGIGHAEAVPDVDEAAVRQILAN

SEQ ID NO: 958 - DNA, 1113 bp, Xylella fastidiosa Ann-1
  CDS (1)..(1113): transl_table=11
atgaccactcccacaccactgcgcagcgtcaccgtcaacacccccccaccctataccatcgctattggtccctgcctattgcacgatcctccacgcctggccgccaccatccgcggtcggcatgcactcattctcagtgattctgaagtcgccccgcgttatgccgcacaactgcatgaaacgctactgcgcgcccgtcccgatctacacctcaacgtattcaccctgccagccggcgaaacatccaagtccctagagaacttcggcgccgcaatcgcccaactcgccacactgggcgccacgcgtgatgcctgcctctttgcactcggtggcggtgtcatcggagatctaacaggctttaccgccgcctgctggatgcgtggcatcgactacgtacaagtgccaaccaccttattggcgatggtcgactcttccgtcggcggcaaaaccgccgtagacatcccccagggtaaaaacatggtcggtgccttccatccgccacgtgcagtgatcgccgacaccgacacccttgccacactcccgctacgggaactacgcgctggtctgagcgaagtcatcaaatacggcgcaatccgcgaccccgtattcttccactggctccaaaccacacgcgaagcacttctagcacgtgaccccgccgcactggcccaagcaatcgcacgtagctgcgaacacaaagccgatattgtcggacgtgacccactggaaaaaggggaacgcgtcctgctcaatctcggccataccttcggccacgccatcgaaacaacacagggctacagcacaccaggaagcaacaacctcaaccacggtgaagccgtcgccgtcggcatggtacttgccgcacgcttgtcaaacacattaggtctggcacccgcagaagacaccgagacactgaaaaacctactggatgcctacggcttgcccactgtcctgccttcaggtctaaaacctgaaacgctcctggagcgtatgcgcctggacaaaaaaaacattgccggccgcttacgcttggtcctatggcgcggcattggccacgccgaagccgtacccgacgttgatgaagcagccgtgcgacagatcctggccaactaa

SEQ ID NO: 959 - protein, 370 aa, Xylella fastidiosa Ann-1
MTTPTPLRSVTVNTPPPYTIAIGPCLLHDPPRLAATIRGRHALILSDSEVAPRYAAQLHETLLRARPDLHLNVFTLPAGETSKSLENFGAAIAQLATLGATRDACLFALGGGVIGDLTGFTAACWMRGIDYVQVPTTLLAMVDSSVGGKTAVDIPQGKNMVGAFHPPRAVIADTDTLATLPLRELRAGLSEVIKYGAIRDPVFFHWLQTTREALLARDPAALAQAIARSCEHKADIVGRDPLEKGERVLLNLGHTFGHAIETTQGYSTPGSNNLNHGEAVAVGMVLAARLSNTLGLAPAEDTETLKNLLDAYGLPTVLPSGLKPETLLERMRLDKKNIAGRLRLVLWRGIGHAEAVPDVDEAAVRQILAN

SEQ ID NO: 960 - DNA, 1068 bp, Streptococcus suis 89/1591
  CDS (1)..(1068): transl_table=11
atgaaactgaccgtcaatcttcccaacactccctacgacatccttatccaaagaggaagtttagcacagacaggtacatggatcaaagaactttggaaacctcagaaaatcgccattattacagatgaccacgttggctcactctatcgcgaaacagttcagtcaagcttagaacaagctggttttgaaaccattgtttttgaatttccagaaggtgaagcctcaaaaaatcttgataccgtcaaccaggcctacgaatttctcgtaaaaaatggtatgacacgaagtgatggaatcattgctctcggcgggggagtcgttggcgatttggcaggttttgtcgcttctacctatatgcgaggtatccatttcctacaaatcccaaccagcctaactgcccaagtcgattcttctatcgggggaaaaactggcgtgaacaccccatttgccaaaaatatggtggggaccttctgccagccagacggcgttctcattgaccctgataccctaaaaacactcggcaaacgagaattgattgaaggaatgggcgaggttgtcaaatatggcttaatagatgatgtggagctctgggaaaccctagaccaattagacggctctgtcgagagcattctggagcatgctgactatatcatctaccactcctgtgaagtcaaacgcaaggttgttgtcgaagatgaattagacaacggtgtcagactctacctcaacttcggtcacacgattggacatgctattgaagtgaccgctggctacggccaggtcatgcacggtgaagctgttgccattggtatggtacaaatctcacgcgcagctgagaaaaaaggactgatgccagctggtatgacagaaaagattatcgccatgtgtgaaaaattcggcttgccgactacacaccagccttggaatgtagatgaattatatgccaccctaactcacgataaaaaagcacgtggcaagaccatcaaacttgtcatcgttcctcaattgggacaggctgccatccatcaaattccaatggaagaaatgctagaatttctacaagtatag

SEQ ID NO: 961 - protein, 355 aa, Streptococcus suis 89/1591
MKLTVNLPNTPYDILIQRGSLAQTGTWIKELWKPQKIAIITDDHVGSLYRETVQSSLEQAGFETIVFEFPEGEASKNLDTVNQAYEFLVKNGMTRSDGIIALGGGVVGDLAGFVASTYMRGIHFLQIPTSLTAQVDSSIGGKTGVNTPFAKNMVGTFCQPDGVLIDPDTLKTLGKRELIEGMGEVVKYGLIDDVELWETLDQLDGSVESILEHADYIIYHSCEVKRKVVVEDELDNGVRLYLNFGHTIGHAIEVTAGYGQVMHGEAVAIGMVQISRAAEKKGLMPAGMTEKIIAMCEKFGLPTTHQPWNVDELYATLTHDKKARGKTIKLVIVPQLGQAAIHQIPMEEMLEFLQV

SEQ ID NO: 962 - DNA, 1077 bp, Croceibacter atlanticus HTCC2559
  CDS (1)..(1077): transl_table=11
atgaaatttgatcccatagcttctggcaatagcattgtgtactttgaaaatgaaggttatacagcgttaaacagttatttgaaagaggaaaaaccttctaaaatttttgttcttgtagactctaataccctacaagattgtttacctattttcttagctaaactagaaacagaaattgttattgaaacaattgagattgaaccaggcgaaagttttaaaacaattgatacctgtgtaggtgtttggaatgctctatctgagttgaatgcagatcgaaaaagtattattcttaatcttggtggtggcgttgtaacagatcttggtggttttgtcgcttcaacttttaaaagaggcataccttatataaatatacctacatctttattagcaatggttgatgcctctgttggtggaaaaacaggcgtagatttaggagtgcttaaaaatcagattggcgtaatatcacattctgaaatggttattgtagatacaaattatcttaaaacactgcctggaaaacaaatgcgaagtggtcatgccgaaattttaaagcatggattaattactagtaaatcgtattgggacaaatgttcagatttaaagaatctcaccttagagtcttatgatgctattatttatgagtctgtacagataaaaaataatgttgtaaccaaagaccctaaagaaaaaggattaaggaagacattaaactttggccatacgctaggtcatgctatagaatcttatttattagaacacgatacaaaagacgctgtattacacggcgaagcagttgctgcaggaatgatacttgcattgcacctttctgaagcagaatatgagtttcctagccaagaaaaagaagaaatttgtaatactttattgagtatttatggaaaaatttctcttaaccatgaagattatcagcatattattgaattattaaaatttgataaaaaaaatacgcacggtaaaataaactttatacttttgaagggctttggagaggctgttttagactgccaaatatctaacgaaagattactcgaagcatttaattactataaaaacttatag

SEQ ID NO: 963 - protein, 358 aa, Croceibacter atlanticus HTCC2559
MKFDPIASGNSIVYFENEGYTALNSYLKEEKPSKIFVLVDSNTLQDCLPIFLAKLETEIVIETIEIEPGESFKTIDTCVGVWNALSELNADRKSIILNLGGGVVTDLGGFVASTFKRGIPYINIPTSLLAMVDASVGGKTGVDLGVLKNQIGVISHSEMVIVDTNYLKTLPGKQMRSGHAEILKHGLITSKSYWDKCSDLKNLTLESYDAIIYESVQIKNNVVTKDPKEKGLRKTLNFGHTLGHAIESYLLEHDTKDAVLHGEAVAAGMILALHLSEAEYEFPSQEKEEICNTLLSIYGKISLNHEDYQHIIELLKFDKKNTHGKINFILLKGFGEAVLDCQISNERLLEAFNYYKNL

SEQ ID NO: 964 - DNA, 1116 bp, Sulfitobacter sp. EE-36
  CDS (1)..(1116): transl_table=11
atgcgagaaacggttcatgtcggtcttgagggccgcgcctatgatgtggtgatcggccccgatttgttggcgcaagcaggcgcgttgattgccccgctgttgcgccgcaaacgtgttgtggtggtcagtgatgagacggttgcggcgcaccatctggacagtttacgcgccggactggacgccgctgacatcaacgtcgaggcgctggcattgccgccgggcgaggccacaaaatgttgggcagagctgacccgcacggtcgattggctgatggatcagaaggtcgaacgcaacgatatcgtgattgcctttggcggcggtgtcatcggcgatctggtgggctttgccgccgcgatcctgcgccgtggtgtgcgctttgtgcaaatcccgacctcgcttctggcacaggtcgacagctcggtcgggggcaagacggggatcaacgtatcacagggcaagaaccttgtcggcgcgtttcatcagccgtcccttgtattggccgatacggccgtgcttggcacattgcaggcgcgtgacttccttgccggatatggcgaggtcgtcaaatacgggctgctgggggatgcggccttctttgactggctcgaggtgaacgcccccgcgatggccgctggcaatatggcgctgcgcgtaggggcggtgcgccggtctgtccagatgaaggccgacattgttctgcgcgacgaaaaagaacacggcgaccgcgcgctgttgaaccttggccataccttctgtcacgcgcttgaggcggcgacgggctattccgaccggttgctgcatggcgaaggtgtggcgatcggctgtgcgatggcgttcgaattgtccgcccgtttggggctttgcgcgcaagaggaccccagccgcgtccgcgcgcatctgcgggccatggggatgaaaaccgacctgcgcgacattgacggagatctgccggacgccgcttatctgcttgatctgatggggcaggataaaaaggtcatcgacggcaagctacgctttattctggctcgaagcattggcgatgcttttgtcaccgccgatgtccccagggacgcggtgctgcaactgctggatgacgcactggctgaacgccactag

SEQ ID NO: 965 - protein, 371 aa, Sulfitobacter sp. EE-36
MRETVHVGLEGRAYDVVIGPDLLAQAGALIAPLLRRKRVVVVSDETVAAHHLDSLRAGLDAADINVEALALPPGEATKCWAELTRTVDWLMDQKVERNDIVIAFGGGVIGDLVGFAAAILRRGVRFVQIPTSLLAQVDSSVGGKTGINVSQGKNLVGAFHQPSLVLADTAVLGTLQARDFLAGYGEVVKYGLLGDAAFFDWLEVNAPAMAAGNMALRVGAVRRSVQMKADIVLRDEKEHGDRALLNLGHTFCHALEAATGYSDRLLHGEGVAIGCAMAFELSARLGLCAQEDPSRVRAHLRAMGMKTDLRDIDGDLPDAAYLLDLMGQDKKVIDGKLRFILARSIGDAFVTADVPRDAVLQLLDDALAERH

SEQ ID NO: 966 - DNA, 1122 bp, Roseovarius nubinhibens ISM
  CDS (1)..(1122): transl_table=11
atgagcgaaacggtgcatgtcccgctcggggaccgggcctatgatgtggttgtgggcgacggtctgctggccgaggcgggggcgcggattgcgccgctgatttcggggcgcaaacatgtcgcggtggtcagtgacgagacggtggccgcgctgcatctggacacgctgcgcgcggggctggcggaagcggggatcagcctgtcggtgctgaccctgccgccgggcgaggcaaccaaatgctgggccgagctggagcgcgtggtggaatggctgcttgcggaaaaaatcgagcgacgtgatgtggttatcgcgctgggcggtggggtgatcggcgatctggtgggctttgccgcggcgatcctgcggcggggcgtgcggtttgtgcagctgccgacgagccttttggcgcaggttgacagctcggtggggggcaaaacggggatcaattcgccgcggggcaagaaccttgtgggggcctttcatcagccgagcctggtgctcgccgataccggtgttctgggcacgctgaaaccgcgtgactatctggcgggctacggcgaggtggtgaaatacggcctgttgggagatgccgattttttccaatggttggagacacatggcgcgcgttctgcaggtggcgacatggcggcgcgcatccggttggtgacccattcggtgcagatgaaagcggatattgtggtgcgcgatgagacggagcaaggggatcgggcgttgctcaatctcgggcatacgttttgtcatgcgctggaggcggcgacgggctattcgcagcggctgttgcatggtgagggcgtggcggtgggctgtgccttggcgtttgagctgtcagcacggctggggctgtgttcgcaagaagacccgagccgggtgcgggcccatttgcgcgagatgaacatgaaggtcgatctctctgatattgaaggggatttgccggatgcggatgcgctgctcgagctgatggcgcaggataagaaagtcctcgacgggcagttgcgctttattctggcgcggggcattggcgaggcgtttgtgacctcggatgtgccgcgcgaggcggtgcgcgagctgctcaatgatgcgctggcggcgcggcggggctag

SEQ ID NO: 967 - protein, 373 aa, Roseovarius nubinhibens ISM
MSETVHVPLGDRAYDVVVGDGLLAEAGARIAPLISGRKHVAVVSDETVAALHLDTLRAGLAEAGISLSVLTLPPGEATKCWAELERVVEWLLAEKIERRDVVIALGGGVIGDLVGFAAAILRRGVRFVQLPTSLLAQVDSSVGGKTGINSPRGKNLVGAFHQPSLVLADTGVLGTLKPRDYLAGYGEVVKYGLLGDADFFQWLETHGARSAGGDMAARIRLVTHSVQMKADIVVRDETEQGDRALLNLGHTFCHALEAATGYSQRLLHGEGVAVGCALAFELSARLGLCSQEDPSRVRAHLREMNMKVDLSDIEGDLPDADALLELMAQDKKVLDGQLRFILARGIGEAFVTSDVPREAVRELLNDALAARRG

SEQ ID NO: 968 - DNA, 1116 bp, Oceanicola batsensis HTCC2597
  CDS (1)..(1116): transl_table=11
atgaccgaaacggtgcaggtggaccttggcgcgcgcagctatgccattcatatcggcgaggggcttctgagcgatgccggagattacatcgggcccatgctgtcccgcccgcgcgtcgcgatcctgaccgacgaaaccgtcgccggaacgcacctggcggccttcgaggcggggctggccgccgaggggatcgaaaccgcggccctggcgctgccggcgggcgaggccaccaagggatgggagcagttctcgcgcgccgtggaatggctgctcgagcagagggtcgaacgccgcgacgtcgtggtggcgctcggcggcggcgtcatcggggaccttgccggctttgccgccgccgtgctgcggcgcggggtgcggttcgttcaggtccccaccacgttgctcgcgcaggtcgacagctcggtcggcggcaagaccgggatcaacgcgccgcagggaaagaacctgatcggcgccttccaccagcccagcctcgttctggcggacatcgacgcgctggcgaccctgccggcccgcgatttcctggctggttacggcgaggtggtgaaatacggccttctgggggatgccgatttctttcactggctcgaggacaacggccaggcgcttgcccggggggacacggcggcccgcattcacgcggtgcgccggtcctgcgagatgaaggccgccattgtggcccgggacgagacggagcagggcgaccgggcgctgctgaacctcgggcacaccttctgtcacgcgctcgaacgggcgacgggatattccgaccggctgctgcatggtgagggcgtcgcgatcggctgtgcgctggccttcgagctctcgtcgcgtctggagctctgcccgcaggaggacccctcgcgggtcagggcccacctcgccgcgatggggatgaagacggatctcgcggacattcccggcgatctacccccggccgaggcgctctatgatctgatgggccaggacaagaaggtgatggacggtcagatccgtttcgtgctggccagggggatcgggcgtgccttcgtgacggccgatgcgccacgggaaaaggtggttgcccttctggatgaagctttgtccgcaaggcgttag

SEQ ID NO: 969 - protein, 371 aa, Oceanicola batsensis HTCC2597
MTETVQVDLGARSYAIHIGEGLLSDAGDYIGPMLSRPRVAILTDETVAGTHLAAFEAGLAAEGIETAALALPAGEATKGWEQFSRAVEWLLEQRVERRDVVVALGGGVIGDLAGFAAAVLRRGVRFVQVPTTLLAQVDSSVGGKTGINAPQGKNLIGAFHQPSLVLADIDALATLPARDFLAGYGEVVKYGLLGDADFFHWLEDNGQALARGDTAARIHAVRRSCEMKAAIVARDETEQGDRALLNLGHTFCHALERATGYSDRLLHGEGVAIGCALAFELSSRLELCPQEDPSRVRAHLAAMGMKTDLADIPGDLPPAEALYDLMGQDKKVMDGQIRFVLARGIGRAFVTADAPREKVVALLDEALSARR

SEQ ID NO: 970 - DNA, 1140 bp, Erythrobacter sp. NAP1
  CDS (1)..(1140): transl_table=11
atggctctgacaaactcgaccgctatccgtgtggagcttggcggtcgttcctatgacgtgctggtgggacgcgggctgctcgacgacatcgtagtacaggctcggccatttctcggaccctatgccggtcgcaaggtgccaatcgtcgcggacgtaaatgcacgcgaacatcatggaaagcgcctcgcccgctcgctcgcaagcgacgggtacgaaatcgcatggtacgatgtcgcgccgggtgaaggctcgaaaagctgggagagcctggagcgattgaccgactggcttctcgacctcggcattacgcgctctgaccatgtattcgcgcttggcggcggcgtcgtcggcgatctggtcggctttgcctgcgccatcctcaagcgcggttgcggatttgtgcaattgccgaccacactattgtcgcaagtcgacagttcggttggcggaaagactgcaatcaacacccggtccggcaagaatttgatcggcgcattccatcaaccgtcactggttctggccgacacgcagacgctcgacacgttgcctgatcgcgaaatgcgcgcgggctacgccgaagtgctcaaatacggactgctcggcgacgaggcattcttcgcatggctcgaatccaacggtccggatgtgctcgcccgaaatcgcgaagcgctcacccacgccgttgcgaccagtatcgaagccaaggcgcggatcgttgcggaggatgaacgcgagacgtcgggcagacgcgcccttctcaatcttggccacaccttcggccatgcgcttgaggctgagacgggtttttcggacaggctgctccatggggaagcggttgcactcggaatggtgctcgccgcgcgctattcggcgcggcggggtgagctagcggctgcggacgctgagcgtgctgcgcaagcgattgcggaatcgggactgccctccgagatcgcgaacctcgacatgaaatgcgacggcaaacgtctcgtcgatcacatgcgccacgacaagaaaatggaagccgcaggaacgctgccctttcttctactcaagggtttaggcgaagcttacatggccagagacgtcgatctgggcgatgtcgccgcgtttctggatgaacagctgaaagtgcccgcatga

SEQ ID NO: 971 - protein, 379 aa, Erythrobacter sp. NAP1
MALTNSTAIRVELGGRSYDVLVGRGLLDDIVVQARPFLGPYAGRKVPIVADVNAREHHGKRLARSLASDGYEIAWYDVAPGEGSKSWESLERLTDWLLDLGITRSDHVFALGGGVVGDLVGFACAILKRGCGFVQLPTTLLSQVDSSVGGKTAINTRSGKNLIGAFHQPSLVLADTQTLDTLPDREMRAGYAEVLKYGLLGDEAFFAWLESNGPDVLARNREALTHAVATSIEAKARIVAEDERETSGRRALLNLGHTFGHALEAETGFSDRLLHGEAVALGMVLAARYSARRGELAAADAERAAQAIAESGLPSEIANLDMKCDGKRLVDHMRHDKKMEAAGTLPFLLLKGLGEAYMARDVDLGDVAAFLDEQLKVPA

SEQ ID NO: 972 - DNA, 1092 bp, Synechococcus sp. RS9917
  CDS (1)..(1092): transl_table=11
atgcgcatcccggtggcgcttgagcagcagccctacgaggtgatgatcgaagcgggcggcctcgatcgtttggggcagcgtctgagcgatgccggggtccgctccggtcgcaagctgctggtcgtgagcaatcccgacgtggccacgccctacggcgagcgctgcctcacctcgctgcggcaggcgggcttcgacgcccacctggtggtgcttgaggcgggagaagatcgcaagaccctggccagcatcagcctcattcacgatgcggccttcgcccagcggctggagcgcagttccctgatggtggctctgggcggcggtgtggtgggcgacatgaccggctttgccgctgccacctggctgcggggcatcggggtggtgcaggtgcccaccaccctgctggcgatggtggatgccgccatcggcggcaaaacaggggtgaaccaccccggcggcaagaacctgatcggcgccttccaccagccccagctggtgctgatcgatcccgacagcctcgccaccctgccggagcgggaattccgtgccggcatggcagaagtgatcaaatacggtgtgatcagcgatgcggagttgttcagggaactggaggacgccggggagcggctcgcctcgatgcgcaccctgccggccgaactgctgaagcgcatcctggagcgctccgctgccgccaaggcccgcgtggtggccgctgatgaacgggaaggcgggctgcgggcgatcctcaactatggccacaccctcggccacgtggtggaaacgctctgtggctacggcacctacctgcacggggaagccgtggcgatcggcatggtcgccgccggcgaattggccctggagctcgggctgtggaacgctgaggatcaagctcgccagcgggcggtgatcgccgccgccggactgcccggccgctggccggaactcgacaacgcagccgtgctggagtgcctgcagggcgataaaaaagtgcgcgacggttgcgtgcgcttcgtgctgcccaccagctttggcagcgtggagatccgcagcgacgtgagcggcgagcaggtggttgccgcgctggcacgctgttaa

SEQ ID NO: 973 - protein, 363 aa, Synechococcus sp. RS9917
MRIPVALEQQPYEVMIEAGGLDRLGQRLSDAGVRSGRKLLVVSNPDVATPYGERCLTSLRQAGFDAHLVVLEAGEDRKTLASISLIHDAAFAQRLERSSLMVALGGGVVGDMTGFAAATWLRGIGVVQVPTTLLAMVDAAIGGKTGVNHPGGKNLIGAFHQPQLVLIDPDSLATLPEREFRAGMAEVIKYGVISDAELFRELEDAGERLASMRTLPAELLKRILERSAAAKARVVAADEREGGLRAILNYGHTLGHVVETLCGYGTYLHGEAVAIGMVAAGELALELGLWNAEDQARQRAVIAAAGLPGRWPELDNAAVLECLQGDKKVRDGCVRFVLPTSFGSVEIRSDVSGEQVVAALARC

SEQ ID NO: 974 - DNA, 1116 bp, Synechococcus sp. WH 5701
  CDS (1)..(1116): transl_table=11
atgatcccgcccctttcgatcgaggtggccctcagcagccagccgtactcggtgctgatcggcaagggcagcctcgatcagctcggcccgctgatccgctccagcggagtggcggccgccaccaaggtgctggtggtgaccaacccggtggtggagggcttctatggccccagggccctcgcgagcctgcgctgtgcggagctggagcccagcctgctggtgctggacgcgggggaggatcagaaaacacccgccagcgtggctctgatccatgacgcggcccaggcccggcggctggagcggagctctctgatcgtggccttaggcggaggggtggtgggcgacatggcgggcttcgccgccgccacctggttgcgcgggatcgcggtggtgcaggtgcccaccaccctgctggcgatggtggatgcctccatcggcggcaaaaccggggtgaaccaccccggcggcaagaacctgatcggggccttccaccagcccaggctggtgctgatcgacccaagcaccctggtcacgctgccggagcgggaattccgggcggggatggccgaggtgatcaagtacggcgtgatcggtgatcccgagttgttcagcgagctggaggccgccgccgacctctccagcctggaggcggtgggcgacagcctgctgcaacggctgctggagcgctccgcggcggccaaggcccgcgtggtggccgccgatgaacgggaagggggcttgcgcgccatcctcaactacggccacaccctcggccacgtggtggagaccctctgcggctacggcacctacctgcatggagaggcagtggcgctggggatggtggcagctggtgagcttgcggtggccatgggcctctggagcccggccgagcagcaacggcagtgcgccctgatcgccaaggccggcctgccattgcagctgccaccccttgatccagaggcggtgctgctcacccttcagagcgacaaaaaagtgaggagcggcctggtgcgcttcgtgctgcccaacgccatcggcgaggtgcagatccgcaacgacgtgggggctgatcagatccttgagctgctcagcacacgtggcggcgagccgggctga

SEQ ID NO: 975 - protein, 371 aa, Synechococcus sp. WH 5701
MIPPLSIEVALSSQPYSVLIGKGSLDQLGPLIRSSGVAAATKVLVVTNPVVEGFYGPRALASLRCAELEPSLLVLDAGEDQKTPASVALIHDAAQARRLERSSLIVALGGGVVGDMAGFAAATWLRGIAVVQVPTTLLAMVDASIGGKTGVNHPGGKNLIGAFHQPRLVLIDPSTLVTLPEREFRAGMAEVIKYGVIGDPELFSELEAAADLSSLEAVGDSLLQRLLERSAAAKARVVAADEREGGLRAILNYGHTLGHVVETLCGYGTYLHGEAVALGMVAAGELAVAMGLWSPAEQQRQCALIAKAGLPLQLPPLDPEAVLLTLQSDKKVRSGLVRFVLPNAIGEVQIRNDVGADQILELLSTRGGEPG

SEQ ID NO: 976 - DNA, 1134 bp, Synechococcus sp. WH 7805
  CDS (1)..(1134): transl_table=11
gtgaccatcaccccagagacaacaacggcaatggaaccacaagccaggatccgtgttgccctcgaacgcaacccctatgacgtgatcatcggtcggggacagctcaaccatgtgggtgacgcaatctctgcgctgcaagtgcgagaaggcacccgaattcttgtggtgagcaacccggatgtcgcagatcactacgccgctcaatgcctgaccagtctcgagacaggaggtttcaggccggtgctcctccagatcgatgctggcgaggagcagaaaaccctcgacaccttcaggatcattcttgacgccgcacaacggaacggtctggaacgcacctccttgatgctggccctaggtggcggagtggtgggtgacatgactggattcgctgctgcctgttggctacgaggcatccgggtggtgcaggttcccacgacacttctggcgatggtggatgcctcgatcggaggcaaaaccggagtcaatcatgcctgtggaaaaaacttgattggggcatttcatcaaccatcgctggtgttgattgatcccctcacattgagaacactgcccacaagggagttccgtgccgggatggcggaagtgatcaaatacggagtgatcggcgatcctgaactgtttgatcgtctcgaacaggctgacgatctcagcgagccaggcaggatggatcaggagttgctgcagatgattctcgagcgatccgctcaggccaaagctgcagtggttgccgccgatgaacgggaaggcggacgccgggcgattctcaattacggccataccttcggtcatgtcgtggagacactcacgcgctatggcacgtggctgcatggtgaggccgttgccatcggaatggcagctgttggtgatcttgccgtcatcaaaggcctctggacggagacagatcagcaacgtcagttgaccctgatccgtaaggccgggctacccacccaatggccttcactggcaatcgacagagtgcttgacacacttcgctctgacaaaaaggtccgccacgggcagttgcgattcgtcgtgccgaatgccattggatcggtgctaatcagtgatcagatcagtgatgacgacgtcaggcagtgtctagagggccagcactga

SEQ ID NO: 977 - protein, 377 aa, Synechococcus sp. WH 7805
MTITPETTTAMEPQARIRVALERNPYDVIIGRGQLNHVGDAISALQVREGTRILVVSNPDVADHYAAQCLTSLETGGFRPVLLQIDAGEEQKTLDTFRIILDAAQRNGLERTSLMLALGGGVVGDMTGFAAACWLRGIRVVQVPTTLLAMVDASIGGKTGVNHACGKNLIGAFHQPSLVLIDPLTLRTLPTREFRAGMAEVIKYGVIGDPELFDRLEQADDLSEPGRMDQELLQMILERSAQAKAAVVAADEREGGRRAILNYGHTFGHVVETLTRYGTWLHGEAVAIGMAAVGDLAVIKGLWTETDQQRQLTLIRKAGLPTQWPSLAIDRVLDTLRSDKKVRHGQLRFVVPNAIGSVLISDQISDDDVRQCLEGQH

SEQ ID NO: 978 - DNA, 1080 bp, Pseudoalteromonas tunicata D2
  CDS (1)..(1080): transl_table=11
atgcttgaattgaccgttaatttagatgagcgtagttatccaatttatattggccccggtatatttgaagccggggttaaccttcttgattatatcaaaacgcgacgtcctgttgttgttacaaacgagactgtagcgccactgtatttagatttattattaaataaattagcgccttgtgagcctttacatattgtattacctgacggtgagcaatacaaaacattagagtactttgagaaagtaagcgcatttttattggaaaataattgtggccgcgatacttgtctaattgctttaggtggtggtgtcattggtgatttaactggttttgttgctgcttgttatcaacgaggtgtgccgtttattcaaatacccactacgcttttatcacaagttgattcatctgttggaggaaaaaccgcagtaaatcatcccttgggtaaaaacatgataggtgcattttatcagcctgacttagtcttaattgataccaatagtttaataaccttgcctgagcgtgagtttgctgcaggtatggctgaggttatcaaatatggtttgatttatgatactgaattatttgcttatcttgaacagcatgttgagcagataaaagatcaatcgacagagcatttacagcatatcatttttcgttgttgtcagattaaagctttaattgtggcagaagatgaaactgaacaaggtcaacgcgcgttacttaatttaggtcatacatttgggcatgctatagaagcgcaaatgggatacggtaattggttacatggtgaagctgttgctgcaggtatggtaatggcaagtaagctaagttatcagcgtgggaaattatcaaacgtagagctacagcgaattatcaacttgttaatagcatacgacttgccaacacttttccctcaagaaatgggtttagacgtttttgtcaaacacatgaaaaaagacaaaaaaaataagctaggaaccattcgttttattcttcctaaaaattttggtcaatgtgagcttgtttctgatgtaacagaagctgagttagaggatttgatatcttcaaatgcaggctag

SEQ ID NO: 979 - protein, 359 aa, Pseudoalteromonas tunicata D2
MLELTVNLDERSYPIYIGPGIFEAGVNLLDYIKTRRPVVVTNETVAPLYLDLLLNKLAPCEPLHIVLPDGEQYKTLEYFEKVSAFLLENNCGRDTCLIALGGGVIGDLTGFVAACYQRGVPFIQIPTTLLSQVDSSVGGKTAVNHPLGKNMIGAFYQPDLVLIDTNSLITLPEREFAAGMAEVIKYGLIYDTELFAYLEQHVEQIKDQSTEHLQHIIFRCCQIKALIVAEDETEQGQRALLNLGHTFGHAIEAQMGYGNWLHGEAVAAGMVMASKLSYQRGKLSNVELQRIINLLIAYDLPTLFPQEMGLDVFVKHMKKDKKNKLGTIRFILPKNFGQCELVSDVTEAELEDLISSNAG

SEQ ID NO: 980 - DNA, 1080 bp, Photobacterium sp. SKA34
  CDS (1)..(1080): transl_table=11
atggaacggatcaatgtcaatttagatgacagaagctaccctatttcaattggcgccgagttgttttgcaactcggcgttgtttgcatctgcgattcctgcgggaaagcgggtggtagtggtcagtaacgaaactgttgctccgctgtatgcacagcaagtaatggaaaccatcagttcattagagtgccaagtggcattactttctctccctgatggtgaacaatacaaaacgttagagacttttgatcaaatcatgacttttttacttgatggtaattatggtcgtgatgttgtgattgtagcgcttggtggcggcgtcattggtgatgtcgtgggctttgctgctgcaagttatcaacgtggcgtagactttattcaagtacctacaacattactttctcaagtggactcatctgttggtggcaaaaccgcagtgaatcatccattgggtaaaaatatgataggcgctttttatcagcctaaggcggtagtgattgataatcactgcttacaaaccctacctgaacgtgagtttgcggcgggaatggctgaagtgatcaagtatggcattattgccgatcacgacttttttgtctggttagaagacaacattgaacgcttacaaacactcgataacgatgcattgtgttatgccattgcacgttgttgtcaaattaaggcagatgttgttgcggctgatgaaaaagaatcaggtgtacgagctttacttaatctcggtcatacatttggtcatgcgattgaagcagagatgggctatggtaactggctgcacggcgaagcggtgtcggcaggcacagtgctagcggctaaaactgctgcaatacaaggccttattagtgatgacgatgtagcgagaattattcgactgcatgagcgagcaaagctaccggtaatcgcacctgaaacaatgggcttcgatgattttattaagcacatgatgcgtgataaaaaggtattatctggccaattacgattggttctaccgacatccattggcagtgctgaagtcgtgtctaacgtgacacatgaagtattgcgggatgtgattaatcactaa

SEQ ID NO: 981 - protein, 359 aa, Photobacterium sp. SKA34
MERINVNLDDRSYPISIGAELFCNSALFASAIPAGKRVVVVSNETVAPLYAQQVMETISSLECQVALLSLPDGEQYKTLETFDQIMTFLLDGNYGRDVVIVALGGGVIGDVVGFAAASYQRGVDFIQVPTTLLSQVDSSVGGKTAVNHPLGKNMIGAFYQPKAVVIDNHCLQTLPEREFAAGMAEVIKYGIIADHDFFVWLEDNIERLQTLDNDALCYAIARCCQIKADVVAADEKESGVRALLNLGHTFGHAIEAEMGYGNWLHGEAVSAGTVLAAKTAAIQGLISDDDVARIIRLHERAKLPVIAPETMGFDDFIKHMMRDKKVLSGQLRLVLPTSIGSAEVVSNVTHEVLRDVINH

SEQ ID NO: 982 - DNA, 1119 bp, Neptuniibacter caesariensis
  CDS (1)..(1119): transl_table=11
atggagagtgatcagtactatcttatgcgaactctaaaagtagatttaggtgaacgaagctatccgatttttataggtcagggcttattggatcaggggctaatggctccttatataaagggcaagcaggtactgatcgtaacgaatgagacaattgctcctctttatctggaacgtttgatttcatctttgccgaattcactgactgtagatcacgtggttttacccgatggtgagcagtataagaatatcgatcagatcaataccatttttgacgcgctacttgaaaagcggcataaccgaaccaccactttggtcgctctgggaggtggtgttattggggatatgacgggctttgccgccgcttgctatcagcggggtgttgattttattcaggtgccaaccactttgctttctcaggttgactcatcggtaggtggaaaaacaggtgtaaatcatcctaaaggaaaaaatatgattggggcttttcatcagccccagtgcgtggtgattgataccgatgttttgaatacgctcgccgaacgagagctgtcagctggaatggcggaagttattaagtacggactgatctacgatgaagctttcctttgttatcttgaagatcatattgatggactaatgggtctgcagccggaccttttagagcaggcaatctatcgttcctgtgaagttaaggctgaagttgtcgctcaggatgaaagagaagcaggcattcgtgcgtggttgaatttaggccacacattcggtcatgctatcgaagctgagcaggggtatggggcctggcttcatggtgaggctgtaggggctggcaccatgatggccgcagatctctcatgccgccttggctggatcagtgaaagcgatgtgaagcgggttgaaagcattcttgctgcagcaaatctgccaatttatccgccggagcagatgaccagcgtgcaattcaaggagcatatggcagtagataaaaaggtactggacggttctatacgcttagtacttttaaaagagattggtaaagcaactgtgactgctgatttccctgttgagttatttgagcaaacgctctccgcaggggataaattagggaagtttatttga

SEQ ID NO: 983 - protein, 372 aa, Neptuniibacter caesariensis
MESDQYYLMRTLKVDLGERSYPIFIGQGLLDQGLMAPYIKGKQVLIVTNETIAPLYLERLISSLPNSLTVDHVVLPDGEQYKNIDQINTIFDALLEKRHNRTTTLVALGGGVIGDMTGFAAACYQRGVDFIQVPTTLLSQVDSSVGGKTGVNHPKGKNMIGAFHQPQCVVIDTDVLNTLAERELSAGMAEVIKYGLIYDEAFLCYLEDHIDGLMGLQPDLLEQAIYRSCEVKAEVVAQDEREAGIRAWLNLGHTFGHAIEAEQGYGAWLHGEAVGAGTMMAADLSCRLGWISESDVKRVESILAAANLPIYPPEQMTSVQFKEHMAVDKKVLDGSIRLVLLKEIGKATVTADFPVELFEQTLSAGDKLGKFI

SEQ ID NO: 984 - DNA, 1068 bp, Flavobacteria bacterium BBFL7
  CDS (1)..(1068): transl_table=11
atgaacccaattactattaaagactttaccatttactttgaaaaccaaggctttaacgccatcaacaaatggatcaaagaaaataaaccatctactatttttgttcttgtagacgataagacgatggaaaactgttatccttacttgatgccaatgattgaaacaacggcaaccattgaagtaatcgaaatcgatcatggagaagaatataaaaatatagatacctgtgctggtgtatggagtgcactagttgaactgggctgtgaccgcaacagtttaatgattaatctaggtggtggcgtgattactgacttgggtggttttattgcatcaactattaaacgtggtattccatttatacatatccctacaacactattaggtatggtagacgctgctataggtggtaaaaacggtgtagacctaggtcatcttaaaaaccagataggcgttattaatccacctataatgacgattatagatcctgcattcttaagaacattaccacagcaacacctggttaatggtagcatcgagatgtttaaacatggactgataagcgaccgagtatattggaaagatatgttacatgttacagactatctatctgatacttttaattcattaatatatcaaagcgctgttattaaaagtgacatcgtgtcgatggacccatttgaaaaaggacctcgcaaggctcttaactatggtcataccgcaggacatgcgatagaatcttttttaatggagcatccagaaagagaagctgttttacatggtgaagccattgcagctggtatcgttattgaatcttatttaagcgtgcactatgcaggcttatctactaaagcatatgaggaaattaaagagtggtacaccacattagattttaaattctcttttaatgatgatgaggtgatgcaaatgatccaactcatgaagtacgataagaaaaatactaatggcgaaattaaatttgtgcttctagacaccataggttcttttatcactaatcaagtcgttagcaacgaggacattataaaagcctttcatgaactaaaaatataa

SEQ ID NO: 985 - protein, 355 aa, Flavobacteria bacterium BBFL7
MNPITIKDFTIYFENQGFNAINKWIKENKPSTIFVLVDDKTMENCYPYLMPMIETTATIEVIEIDHGEEYKNIDTCAGVWSALVELGCDRNSLMINLGGGVITDLGGFIASTIKRGIPFIHIPTTLLGMVDAAIGGKNGVDLGHLKNQIGVINPPIMTIIDPAFLRTLPQQHLVNGSIEMFKHGLISDRVYWKDMLHVTDYLSDTFNSLIYQSAVIKSDIVSMDPFEKGPRKALNYGHTAGHAIESFLMEHPEREAVLHGEAIAAGIVIESYLSVHYAGLSTKAYEEIKEWYTTLDFKFSFNDDEVMQMIQLMKYDKKNTNGEIKFVLLDTIGSFITNQVVSNEDIIKAFHELKI

SEQ ID NO: 986 - DNA, 1092 bp, delta proteobacterium MLMS-1
  CDS (1)..(1092): transl_table=11
atggtgacgggtgagttgcgggttgaagtgggtctgggggagcgggcctatgagatcattattgccgacgggctgctggcggcggtgggcggcgatctggcggccaccggcctggcccggcgctgggtggtggtggccgatgatcgggtggccggtctgtttggcgaagaactgcgggcggggctgaccgccgccgggctgaataccgagatcctgacctttccccatggcgaggccagcaagaacctggccacggtggccgagctggccagcggcctggcccggctggggctggatcggggtgatggcctgattgccctgggtggcggggtcagcggtgatatctgcggcttcctggcctccatctatatgcgtgggattccctttgtgcaggtacccacctcgctgctggcccaggtggattcctcggtgggcggcaagaccggggtcgatatccccgagggcaaaaatctggtgggtaccttttatcaaccccgccgggtttatatcgatccgggagtgctggccgccctgccggccgtcgagatgctcaacgggctggcggaaatcatcaagtacggcgtgatttatgacgccgattttttccggctgctggaagagcagcggccggccatcctggatcgtcggcaagaggtgctggcggcggtgatcaagcgctgctgcgagatcaaggcggcggtggtggccgccgacgaacgggagagcgactggcggcggatcctcaattttggccataccctgggccatgccgtcgaggccgcctccggctataccctggcccacggtttggcggtggctatcggcatggttctggtggcggaaatcgccgtggaaaaagagttgtggagccgggaggaagcccagcggctgcgccgcctgctcaccgactatggtctgccgacgacggtacccgccgacctggattcggcccggatcaagtcatacctcaagaccgataaaaaaagtgtcgccggccgcccctgctttgtcctgcccaccaccatcggccgggtaaccatcaccagcgaagtcgaagaagaactgatcgaccgggctttggccggctgctga

SEQ ID NO: 987 - protein, 363 aa, delta proteobacterium MLMS-1
MVTGELRVEVGLGERAYEIIIADGLLAAVGGDLAATGLARRWVVVADDRVAGLFGEELRAGLTAAGLNTEILTFPHGEASKNLATVAELASGLARLGLDRGDGLIALGGGVSGDICGFLASIYMRGIPFVQVPTSLLAQVDSSVGGKTGVDIPEGKNLVGTFYQPRRVYIDPGVLAALPAVEMLNGLAEIIKYGVIYDADFFRLLEEQRPAILDRRQEVLAAVIKRCCEIKAAVVAADERESDWRRILNFGHTLGHAVEAASGYTLAHGLAVAIGMVLVAEIAVEKELWSREEAQRLRRLLTDYGLPTTVPADLDSARIKSYLKTDKKSVAGRPCFVLPTTIGRVTITSEVEEELIDRALAGC

SEQ ID NO: 988 - DNA, 1101 bp, delta proteobacterium MLMS-1
  CDS (1)..(1101): transl_table=11
atggtgacgggtgaattgcgggttgaggtgggcctgggggagcgggcctatgagatcattattgccgacgggctgctggcggcggtgggaggtgatctggcggccaccggcctggcccggcgctgggtggtggtggccgatgatcgggtggccggtctgtttggcgaagaactgcgggcggggctgaccgccgccgggctgaatgccgagatcctgacctttccccatggcgaggccagcaagaacctggccacggtggccgagctggccagcggcctggcccggctggggctggatcggggcgatggcctgattgccctgggtggcggggtcagcggtgatatctgcggcttcctggcctccatctatatgcgggggattccctttgtgcaggtacccacctcgctgctggcccaggtggattcctcggtgggcggcaagaccggggtcgatatccccgagggcaaaaatctggtgggtaccttttatcaaccccgccgggtttatatcgatccgggagtgctggccgccctgccggccgccgagatgctcaacgggctggcggaaatcatcaagtacggcgtgatttatgacgccgattttttccggctgctggaagagcagcggtcggccatcctggatcgtcggcaagaggtgctggcggcggtgatcaagcgctgctgcgagatcaaggcggcggtggtggccgccgacgaacgggagagcgactggcggcggatcctcaattttggccataccctgggccatgccgtcgaggccgcctccggctataccctggcccacggtttggcggtggccatcggcatggccctggtggcggaaatcgccgtggaaaaagagttgtggagccgggaggaagcccagcggctgcgccgcctgctcaccgactatggtctgccgacgacggtacccgccgacctggattcggcccggatcaagtcatacctcaagaccgataaaaaaagtgtcgccggccgcccctgctttgtcctgcccaccaccattggccgggtaaccatcaccagcgaagtcgaagaagaactgatcgaccgggctttggccggctgccgaagtaactga

SEQ ID NO: 989 - protein, 366 aa, delta proteobacterium MLMS-1
MVTGELRVEVGLGERAYEIIIADGLLAAVGGDLAATGLARRWVVVADDRVAGLFGEELRAGLTAAGLNAEILTFPHGEASKNLATVAELASGLARLGLDRGDGLIALGGGVSGDICGFLASIYMRGIPFVQVPTSLLAQVDSSVGGKTGVDIPEGKNLVGTFYQPRRVYIDPGVLAALPAAEMLNGLAEIIKYGVIYDADFFRLLEEQRSAILDRRQEVLAAVIKRCCEIKAAVVAADERESDWRRILNFGHTLGHAVEAASGYTLAHGLAVAIGMALVAEIAVEKELWSREEAQRLRRLLTDYGLPTTVPADLDSARIKSYLKTDKKSVAGRPCFVLPTTIGRVTITSEVEEELIDRALAGCRSN

SEQ ID NO: 990 - DNA, 1080 bp, Oceanobacter sp. RED65
  CDS (1)..(1080): transl_table=11
atgcagactttgaatgtggatctaggtgatcgtagctaccctatttttgtaggttctgggctgatcgagaatactcagctcatcctgccttatgtggcagggcagcaagttatgattgtcaccaatgatacgattgcacctttgtatcttgaaaaagccaaggctttgttcccaggtaaacaggttgatagtgtgattttgccggatggtgaagctttcaaagatcttacccatttaaatttaattttcgatgccttactagaaaaacagcataaccgaaccactacactggttgcgttgggcggaggcgttattggcgatatgactggatacgcggcagcaagttatcagcgaggtgtggattttatccaaataccaacgacattactgtcgcaagtcgattcttcagtcggtggtaaaacaggtgttaatcatcgtttaggcaaaaacatgattggtgcgttccatcagccaaaatgtgttttgattgatattgactcgttaactaccttgcctgaccgagaactatctgcaggtattgctgaggtaatcaaatacggtttgatcaccgattatgagtttttggagtggttggagactcatatgagttctctattatctagggatcaagacgcgttaatttatgccgtgttaacctcttgtgctgccaaagcggatgttgttgcccaagacgaaaaagaaggtggtattcgagcgattttgaatctaggtcatacctatggccatgctattgagaatcatcagggctacggcaactggttacatggcgaagcggttgcagcgggcatgattatggcggccgatttgtcccaccgcttgggttggatatcgggtgcagacctgaagagaacgcaatctttaattcgagctgcgaacttacctgtcgatgcgcctaaagatatgtccgtagccgactttaaggcgctgatggcagtagacaaaaaggttgtggatggtaagctgaggctagtactgctcaaagcattagggcaagcaattatatcatcagactttggccttgaagagtttgaagcgagtttgcatagctttgtgcattaa

SEQ ID NO: 991 - protein, 359 aa, Oceanobacter sp. RED65
MQTLNVDLGDRSYPIFVGSGLIENTQLILPYVAGQQVMIVTNDTIAPLYLEKAKALFPGKQVDSVILPDGEAFKDLTHLNLIFDALLEKQHNRTTTLVALGGGVIGDMTGYAAASYQRGVDFIQIPTTLLSQVDSSVGGKTGVNHRLGKNMIGAFHQPKCVLIDIDSLTTLPDRELSAGIAEVIKYGLITDYEFLEWLETHMSSLLSRDQDALIYAVLTSCAAKADVVAQDEKEGGIRAILNLGHTYGHAIENHQGYGNWLHGEAVAAGMIMAADLSHRLGWISGADLKRTQSLIRAANLPVDAPKDMSVADFKALMAVDKKVVDGKLRLVLLKALGQAIISSDFGLEEFEASLHSFVH

SEQ ID NO: 992 - DNA, 1095 bp, Synechococcus sp. RS9916
  CDS (1)..(1095): transl_table=11
atgcaacggatcaccgtcaagctcgcgtcaaacccttacgacgtcgtgatcggcagcgggggcttgcagaacctcggacaggaaatgttgaacagcgggatcagcgcaccccgcaaggttctggtcgtcagcaatgcggatgtggccggaccttatggcgccaccgtgctggagagtctgcgcagcagtggctttgaagccgactccctggtgatcgaggccggcgaagaccaaaagcacctgggcacagtcagccagatccacgacgcagcccatcgcctgcggctcgagcgagggtcactgatggtcgccctcggtggtggcgtggtcggtgacatgaccggcttcgctgcggccacctggttgcgggggatcgccgtggtgcaggtcccgaccacccttctcgccatggtggacgccgccatcggcggcaaaacaggggtcaaccacccaggcggcaaaaacctgatcggtgctttccaccaacccaaactggtcctgatcgatcccgacacgttgaacacacttccggatcgcgaatttcgcgccgggatggccgaggtgatcaagtacggggtgattggcgatccgggcctgtttgatctgcttgagagctgcgatgggttgagtgaggcgtcagctttgccggatggcgttctgcagacgatcctcgagcgttcagcccaagccaaggccaacgtggtggcggccgatgaacgggaaggagggcagcgggccatcctcaattacggacacacgtttggacacgtggtcgagaacctcaccggatatggcacctggctgcatggcgaagccgtcgccattgggatggtggcggtgggggaactggcagtgcaacggggtcactggagccgagaccaggcgaaccgccaacgccgactgattcagaaatgtggattgcccaccgtctggccaccgctggacccttcagcagtgctcgagacccttcaaggggataagaaagtacaggacggcaccgttcgttttgtggttccagacgccattggggccgtcagcattcgctcggatgtgaacaccgacgaggtgaaagcctgtctggcggcgctcagctga

SEQ ID NO: 993 - protein, 364 aa, Synechococcus sp. RS9916
MQRITVKLASNPYDVVIGSGGLQNLGQEMLNSGISAPRKVLVVSNADVAGPYGATVLESLRSSGFEADSLVIEAGEDQKHLGTVSQIHDAAHRLRLERGSLMVALGGGVVGDMTGFAAATWLRGIAVVQVPTTLLAMVDAAIGGKTGVNHPGGKNLIGAFHQPKLVLIDPDTLNTLPDREFRAGMAEVIKYGVIGDPGLFDLLESCDGLSEASALPDGVLQTILERSAQAKANVVAADEREGGQRAILNYGHTFGHVVENLTGYGTWLHGEAVAIGMVAVGELAVQRGHWSRDQANRQRRLIQKCGLPTVWPPLDPSAVLETLQGDKKVQDGTVRFVVPDAIGAVSIRSDVNTDEVKACLAALS

SEQ ID NO: 994 - DNA, 1101 bp, Vibrio sp. Ex25
  CDS (1)..(1101): transl_table=11
atggaacggattacggtcaacctagctgagcgtagctacccaatctctattggcgccgggttatttgaggacccggcgtacctctctcaagttctctcaaacaaaaatgcaaaacaaaaagttgttgtgatcagtaatgtcacagtggcgcctttgtatgcagacaaaattttaaagcaactcgagcagctcggttgtagtgcatccttgttagaattgcctgacggcgaacagtacaaaaacttggatgtgtttaaccaagtgatgaacttcctcctcgaggggaattacgctcgtgatgttgtgatcatcgcgttaggtggtggcgttattggcgaccttgtgggttttgcttctgcctgttaccagcgtggggtcgactttattcaaataccaacgacattactatctcaagtggactcttcggtgggtggaaaaaccgcggttaaccatccgttgggtaagaacatgataggtgcgttttaccaacctaaagccgtgatcatcgataccaactgtttatcgacgttgcctgagcgtgaattcgcagcaggtatcgcagaagtcattaagtacggcatcatttacgatgtagacttttttgtatggttggaagaaaaccttgaacgcttgtacgcgttggatgaagaagcgctaacttatgccattgcacgttgctgtgaaataaaagcggaagtggtggctcaggatgagaaagaatcgggcatccgcgctctgctcaacttaggtcacacctttggtcatgcgattgaagctgagcttggctacggcaattggctgcatggtgaagcggtttctgctggcacggttatggcggccaaaacttcgcatctgcgcggtcttatctcagcagagcaatttgagcgtattgttgcgattttgcgtcgtgccaaactgcctgttcatactccagaaagtatgagcttcgatgacttcctcaaacatatgatgcgagataaaaaagtcctctctggtcaattaagattagttctacctacaggcattggtagtgccgaggtcattgctgatacgacacaagacgtactcaaacaggcgatagacttcggtcgcgatatttaa

SEQ ID NO: 995 - protein, 366 aa, Vibrio sp. Ex25
MERITVNLAERSYPISIGAGLFEDPAYLSQVLSNKNAKQKVVVISNVTVAPLYADKILKQLEQLGCSASLLELPDGEQYKNLDVFNQVMNFLLEGNYARDVVIIALGGGVIGDLVGFASACYQRGVDFIQIPTTLLSQVDSSVGGKTAVNHPLGKNMIGAFYQPKAVIIDTNCLSTLPEREFAAGIAEVIKYGIIYDVDFFVWLEENLERLYALDEEALTYAIARCCEIKAEVVAQDEKESGIRALLNLGHTFGHAIEAELGYGNWLHGEAVSAGTVMAAKTSHLRGLISAEQFERIVAILRRAKLPVHTPESMSFDDFLKHMMRDKKVLSGQLRLVLPTGIGSAEVIADTTQDVLKQAIDFGRDI

SEQ ID NO: 996 - DNA, 1071 bp, Alteromonadales bacterium TW-7
  CDS (1)..(1071): transl_table=11
atgcttaaattaactgttaatttggacgagcgaagttatcctatttatattgggcaatctgcacttcaagataatggccgtctaattcatcatattggtgattgtcggcctatcatcattactaatgacacaattgaacctttatatctacaaggcttacttgattcattagctgaattaaatcctctttcctttatcatacctgatggtgagcaatacaagtcactagagtggtttgaaaaaatatccgcttttttactgcaaaataactgtggtcgcgatacttgtttaattgcattaggtggtggcgtagttggtgatttaactggttttgtagctgcatgttaccaacgtggcgtgccgtttattcaaatacctacaacacttttatcgcaagtagattcatctgttggtggaaaaacagcggtgaaccatccattaggaaaaaacatgattggggctttttatcagccacaagctgtttttattgatactcagtctcttcatacactcccaaaaagagagtttgcggcaggaatggctgaagttatcaagtatggtttaatatacgataccgagctttttacttatttagagcaaaatgttgaaaacttacagcagttaaatgaaacatgcctgcagcatatcatttacaggtgctgtgaaatcaaagcgttaatagttgctgaggatgaaaaagagcaaggtctcagagcattgctaaacttggggcataccttcggtcacgcaattgaagcccaaatgggttatggtaagtggcttcatggtgaagctgttgctacgggtatggtgttagcttctcagttggctcacactcgaggtgacttaacgcagcaggatatagcgcgtattgtggatgttattaaacaatataacttaccaactgaagtacctgcagatatgacgagtgaacaatttttattgcatatgcgcaaagataaaaaaaataaaaaaggaactatccgttttattttacccactcaatttggtcaatgtgcactggtagacgatgtatctgacgatcaagtccgagcattaatcgagcactaa

SEQ ID NO: 997 - protein, 356 aa, Alteromonadales bacterium TW-7
MLKLTVNLDERSYPIYIGQSALQDNGRLIHHIGDCRPIIITNDTIEPLYLQGLLDSLAELNPLSFIIPDGEQYKSLEWFEKISAFLLQNNCGRDTCLIALGGGVVGDLTGFVAACYQRGVPFIQIPTTLLSQVDSSVGGKTAVNHPLGKNMIGAFYQPQAVFIDTQSLHTLPKREFAAGMAEVIKYGLIYDTELFTYLEQNVENLQQLNETCLQHIIYRCCEIKALIVAEDEKEQGLRALLNLGHTFGHAIEAQMGYGKWLHGEAVATGMVLASQLAHTRGDLTQQDIARIVDVIKQYNLPTEVPADMTSEQFLLHMRKDKKNKKGTIRFILPTQFGQCALVDDVSDDQVRALIEH

SEQ ID NO: 998 - DNA, 1083 bp, marine gamma proteobacterium HTCC2143
  CDS (1)..(1083): transl_table=11
atgcaaacactcaatgtcgatctgggcgatcgcagttatcctatttatattggcgaagatttactgtcgcaagctgaattacttcgtcagcatattcacggtcaccaggtgctcgttatcagcaatgaaacggtagcgccaatttatctcgaatcgataagacgatcactgggtgatttgcactattctgaattgattttgccggacggtgaacaatacaaatcgctcgaagtcctcggaaaaatttacgatcgcttactggaagaaaatcacaaccgtacaacaacactggtcgctttaggtggaggcgttgtcggggatatgacgggttttgccgctgccagttatcagcgtggtgttaatttcattcagattccgactaccttactttcgcaggtagattcctctgttggtggtaaaacaggggttaatcatccgctcggaaaaaacatgataggcgcttttcaccagcctcaatgtgttatcgcagacacccaaactttgtcgacattgccgcctcgtgaattatcagccggagtggctgaagtgattaaatatgggttgatatcggatgcttctttttatcgctggttgaagggcaatgtcgatggtctgctggcctgtgatggggacgttctcagtgaggtaattcgccgttcctgtgaaaataaggcacatgtagttgccagtgatgagcgcgaggccggtgttcgtgcgatattgaattttggccatacctttgggcatgccatcgaaactgctcaaggttatggagcctggcttcatggagaagcggtagccgccggtatgatgctggccacagatttatcgtcgcgtttgggttggttgacagtgggtgatgttaatgatgtgcggcaattattacagcagtcaaggttgccggtccaaccgccaacgatgagctgcgatcaatttttgtcgttaatggcgcgagataaaaaagtcttggatgggaacttgcgtttagtattgcttaagagtgtcggcgaggcgattgtcacaagtgatgtcacaacgcagcagataaaagccacactgatggctgcgggcgttcagtcttga

SEQ ID NO: 999 - protein, 360 aa, marine gamma proteobacterium HTCC2143
MQTLNVDLGDRSYPIYIGEDLLSQAELLRQHIHGHQVLVISNETVAPIYLESIRRSLGDLHYSELILPDGEQYKSLEVLGKIYDRLLEENHNRTTTLVALGGGVVGDMTGFAAASYQRGVNFIQIPTTLLSQVDSSVGGKTGVNHPLGKNMIGAFHQPQCVIADTQTLSTLPPRELSAGVAEVIKYGLISDASFYRWLKGNVDGLLACDGDVLSEVIRRSCENKAHVVASDEREAGVRAILNFGHTFGHAIETAQGYGAWLHGEAVAAGMMLATDLSSRLGWLTVGDVNDVRQLLQQSRLPVQPPTMSCDQFLSLMARDKKVLDGNLRLVLLKSVGEAIVTSDVTTQQIKATLMAAGVQS

SEQ ID NO: 1000 - DNA, 1098 bp, marine gamma proteobacterium HTCC2080
  CDS (1)..(1098): transl_table=11
atgtctagcaccctctacagtcttcacgtcgatttaccgtctggcggtattgatcgcagttaccccattgttattgggcacggtgtattgggtgacggcgagggttttgcggagttgttaggcgattctccggtagttttagtgagtaatgacacagtggcgccgttgtatatgtcacgggtgcgtgacgccttggggaaggggagaaaggtgacggaggtgattctgcccgacggagaagaccaaaagcacctggagagcgccaaccaaatttggcaaaaagcccttgaagatcatcatgagcgtcgcagtgtatttatcgcacttggcggtggcgtgatcggtgatctaacgggctacagcgcagcgtgtttcttacgaggcgtcgatttcattcagctgccgacaaccttgctcgctcaggtagattcttcggtgggaggtaagactggggtgaatcaccctctgggaaaaaatatgattggtgcgtttcaccagcctagggcggttctcattgacctcgattcgttgaagacactcccagaccgggaattcgcagctggggttgctgaaattattaagtatggctgtatttgggagccagatttttatcattggttgctacagaacagcgatgcgctacttacccgaaataatgatgtgctggctgaagccatccatcgtagctgtggcataaaggcagctgtagtagctcaggatgagcgtgagggcgggctgcgcgccatccttaattttgggcatacgtttgctcatgcaatcgagcacgtgatgggttacggcgtttggctgcatggcgaggctgtcgcttgcggaatggtcatggctgcgaagatttcagccgcgagaggccaagtttcggaggatatggttaccgggctaataagttttttagaagctttcggtttgcctgttgagccgccaccagcaatgtctgcagaggtatttctcaacgctatggcgggggacaaaaaggtccttcggggtaaaatacgctacgttttgctcgagaggttaggctgtgcctgcttggttgaagacgtaacaaccgaggaaatcaaccaaatcctgatgaaatga

SEQ ID NO: 1001 - protein, 365 aa, marine gamma proteobacterium HTCC2080
MSSTLYSLHVDLPSGGIDRSYPIVIGHGVLGDGEGFAELLGDSPVVLVSNDTVAPLYMSRVRDALGKGRKVTEVILPDGEDQKHLESANQIWQKALEDHHERRSVFIALGGGVIGDLTGYSAACFLRGVDFIQLPTTLLAQVDSSVGGKTGVNHPLGKNMIGAFHQPRAVLIDLDSLKTLPDREFAAGVAEIIKYGCIWEPDFYHWLLQNSDALLTRNNDVLAEAIHRSCGIKAAVVAQDEREGGLRAILNFGHTFAHAIEHVMGYGVWLHGEAVACGMVMAAKISAARGQVSEDMVTGLISFLEAFGLPVEPPPAMSAEVFLNAMAGDKKVLRGKIRYVLLERLGCACLVEDVTTEEINQILMK

SEQ ID NO: 1002 - DNA, 1092 bp, Marinobacter sp. ELB17
  CDS (1)..(1092): transl_table=11
atgcttgaattactccgtgaacttgaggtagacctgggcgaacgaagctatccgatactgattggcgagcagctgttggggcaatatgacttgacgcgttatgttggcggttcccaggtgatgattgtgtctaataacaccgtggccccgctctatctggagcaggcaaaagcctgttttgcaggtaagcaggtagattcggtgattttgccggatggcgaaaaacacaaagactggcaaaccctgaatctgatttttgatgcgctactgcagcacaggcacaatcgcacgacgaccctggtagctctgggcggaggcgtagtgggggacatgaccgggtttgcggcggcgagctaccagcgcggcgtagcgttcatccagattccaacaacgctgctgtcgcaggtggattcctccgttggtggcaaaaccgggatcaatcaccccttgggtaaaaacatgataggggctttccatcagccccgagccgtgctgattgataccggtaccctggtgacgctgccagaccgggaagtccgagccgggatggcggaagtcatcaagtacggtctgattcgcgatctgccttttctgcactggctggatcagaatcttgggtctttgcttgaaaaggatccgcggcaggtcgcacaggccatctaccgttcttgcgtctgcaaagcggaagtggtggccattgatgaacgcgaaggcggcctaagagcaatacttaatcttggccacaccttcggccacgctatcgagactttcgccggctatggcaattggttacacggagaagccgttggcaccggcatgttgatggcagcggatctttccgcccgcgaaggttttatcagtgctgccgaatgccagcagatttacagcctgatcagccgtgccggattgccgccgctggcgcctgcagctatgcgcccggacgacttcatagagctgatggcagtggataaaaagaatgtagatgggcggctcaggctggttctgttgcaggcggtgggcgaagcggttgtgaccgccaaaactgcgcgcaaaaaccttgaagcaaccctgaacgctttttgccagcgttga

SEQ ID NO: 1003 - protein, 363 aa, Marinobacter sp. ELB17
MLELLRELEVDLGERSYPILIGEQLLGQYDLTRYVGGSQVMIVSNNTVAPLYLEQAKACFAGKQVDSVILPDGEKHKDWQTLNLIFDALLQHRHNRTTTLVALGGGVVGDMTGFAAASYQRGVAFIQIPTTLLSQVDSSVGGKTGINHPLGKNMIGAFHQPRAVLIDTGTLVTLPDREVRAGMAEVIKYGLIRDLPFLHWLDQNLGSLLEKDPRQVAQAIYRSCVCKAEVVAIDEREGGLRAILNLGHTFGHAIETFAGYGNWLHGEAVGTGMLMAADLSAREGFISAAECQQIYSLISRAGLPPLAPAAMRPDDFIELMAVDKKNVDGRLRLVLLQAVGEAVVTAKTARKNLEATLNAFCQR

SEQ ID NO: 1004 - DNA, 1110 bp, Erythrobacter sp. SD-21
  CDS (1)..(1110): transl_table=11
atggcagtaatcacggtcgagctaacaggccgcagctacgaggtccgcgtggcgcgcggcctcctatccgatatcgcacgcgaggcggcgcctttcctgcgcaagacttgcgtcccgatcgtcgcggatgccaatgcgagattgcattggggtgcggcggtcgagcaatcgctggcgtctgccggcaaggagccgcgctggtatgaggttgcgcccggcgaaggctccaagagctgggaaagcctcatgcggctgaccgactggctgctggccgaaggcgtggagcgcggggaccatgtgctggccctgggcggcggcgtggtcggcgaccttaccggttttgcctgcgccatcctgaaacggggctgcggcttcgtgcaattgcccaccaccctgctcgcccaggtcgacagctccgtgggcggcaagaccgcgatcaacacggcagcgggcaagaaccttgtcggtgcgttccaccagccctcgcttgtgttggccgatctggacacgctttcgacattgccgccacgcgaattgcgcgcaggctatgccgaggtgctgaaatacggcgtgctgggcgatgcgggtttcttcgactggctggaggagaacggcgatgccgtgcttgcgctggacgaggctgcgctcgaacgggcggcggcgaccagcgttgctgccaaggcccggatcgtcgccgaggacgagcgcgagaccagcggggcgcgcgcgttactcaaccttggccacaccttcggccatgctttggaggccgagaccggattttccgaccacctgctgcacggcgaaggtgtcgccctcggcatggtgctggccgcgcgctactcggcgcggcgcggcgagatttcaggtgagaatgcagcgcgcgtcactcgcgctgtcgacgcggcggggctccctgcggaaatcgctgcgctcggactggagtgcgacgggcgaacgcttgccgaccacatgctgcacgacaagaagatggacgcgggcaccctgcccttcatcctgctgcgcggcatcggcgaggcctggcaggcgcgcgatgtcgacctgaccgacatagccgcttttctggacgagcagttgcaggcgcattag

SEQ ID NO: 1005 - protein, 369 aa, Erythrobacter sp. SD-21
MAVITVELTGRSYEVRVARGLLSDIAREAAPFLRKTCVPIVADANARLHWGAAVEQSLASAGKEPRWYEVAPGEGSKSWESLMRLTDWLLAEGVERGDHVLALGGGVVGDLTGFACAILKRGCGFVQLPTTLLAQVDSSVGGKTAINTAAGKNLVGAFHQPSLVLADLDTLSTLPPRELRAGYAEVLKYGVLGDAGFFDWLEENGDAVLALDEAALERAAATSVAAKARIVAEDERETSGARALLNLGHTFGHALEAETGFSDHLLHGEGVALGMVLAARYSARRGEISGENAARVTRAVDAAGLPAEIAALGLECDGRTLADHMLHDKKMDAGTLPFILLRGIGEAWQARDVDLTDIAAFLDEQLQAH

SEQ ID NO: 1006 - DNA, 1110 bp, Moritella sp. PE36
  CDS (1)..(1110): transl_table=11
atggaaaggttaactgttgaactaggtgagcggagctaccctatttatattggtgaaggcgtattaacgcaagtagagcaatttaagtctgcaataacaaccaataaagtcgtcgtgatatcaaacgatacggttgcacccttgtatttacaacgcgttacagcattgttacaagactatgaatttgacagtattattctttctgatggtgagcaatttaaaaccttagatactttaaatgaaatatttaccgcgctactgcgtgagaattgtggacgtgatactacgttgatagctcttggtggtggtgttattggtgacatggttggcttcgcggctgcctgttaccaacgcggtatcccctttatccaaatcccgacgactgtgttgagtcaagttgattcctcggttggcggtaaaacggcagttaaccatccattaggtaaaaatatgattggtgctttttatcagcccaatgctgtttttatcgatacggtttgtttagctaccttacctcgacgcgaactggcggctggtatggctgaagtgattaagtacggaatcatttatgatgctaacttttttacttggctagaagacaacataacagcactgatggcgcttgatactgcggcattagaatatgcaatttatcgctgttgtgaaattaaagctgaaattgttgctatcgatgagaaagagcaaggcttacgggcactgctgaatcttggtcatacctatggccatgccattgaagctgaaatgggttatggcgtttggctacatggtgaggcggttgctgcaggtatgatcatggctgcacagacatcggctgccatggggttattaacggcagcgcaagtcacccgtatcgccacgttaattaaagcggcagaattgccattaatggcgcctgcagagatgggctttgatgcatttatgcgacacatgaagcgtgataaaaaagtacttaatggtcaacttcgtttcattctgccaacttcgattggtagtgctgaattgttatcgacagtaactgaaaacacattacgtgatgtggttaacttccataatcaggcggatcctagtgcactattcagttcaaactga

SEQ ID NO: 1007 - protein, 369 aa, Moritella sp. PE36
MERLTVELGERSYPIYIGEGVLTQVEQFKSAITTNKVVVISNDTVAPLYLQRVTALLQDYEFDSIILSDGEQFKTLDTLNEIFTALLRENCGRDTTLIALGGGVIGDMVGFAAACYQRGIPFIQIPTTVLSQVDSSVGGKTAVNHPLGKNMIGAFYQPNAVFIDTVCLATLPRRELAAGMAEVIKYGIIYDANFFTWLEDNITALMALDTAALEYAIYRCCEIKAEIVAIDEKEQGLRALLNLGHTYGHAIEAEMGYGVWLHGEAVAAGMIMAAQTSAAMGLLTAAQVTRIATLIKAAELPLMAPAEMGFDAFMRHMKRDKKVLNGQLRFILPTSIGSAELLSTVTENTLRDVVNFHNQADPSALFSSN

SEQ ID NO: 1008 - DNA, 1086 bp, Opitutaceae bacterium TAV2
  CDS (1)..(1086): transl_table=11
atgtccgacgctctcaatatccggctgggtgaacgcagttattcgatccattttggttcggacttgaagtttcaggtgcgctctacgctcgccgagcttcaggctgcgggacgccgctgcgccgtcgtgaccgaccgtcacatccaccggcagcaatccgaggcgctccaagccatgatcggcgatgcgccgttgctcgtgctggagccgggcgaggaaaccaagtcgctcacggagttgggccgcgtgcttgattttctggcggaaaaccggctcgaccgttcttccgtgcttgtcgccatcggtggcggcgtgattggcgatctggcgggttttgccgcggcgagctacctgcggggcatcggtttttaccagattccgaccacgctgctcgccatggtggacagttccgtgggcggcaaaacgggcatcaatttgcgcgcaggaaaaaatcttgtgggagcgtttcatcagcccaaggcggtttttatttcgaccgatctgctcgtcaccctgccgccgcgcgaatttgcggcgggcatggcggaggtcatcaaatacggattgcttggcgaccggtcgctgtttgaggaactcgaaaaaacaccgcttcaggcggacagccctgcgctggcgggcgtcatccggcggtgttgcgcgatcaaggcggcgattgtcgaggccgacgaacgcgagacagcggccgaaggcgggcgcgcgctgctcaatctgggacacacctttggccatgcgatcgaacaggtcaccggttacggcacgtatctgcatggcgaggccgtggcggtcgggctgtgcgcggcggcgcgtttgtcgcggcggcttggatacatcgacgacgttgccgtgacgcgggtggagtccgtggtgcgggcgcatgcgcttccggtgcggttgcgcgaaccgctgccgatcggcgcgctgacggcggcgatgggcgcgacaaaaaggtgcgtgccgggacgctgcggtttgtcgtgctgcgggcgttgggtgaggcggcgacgcagggcggcatcgatccggtgctggccgaggcaagtttcgtggacgtgggagcggccttga

SEQ ID NO: 1009 - protein, 361 aa, Opitutaceae bacterium TAV2
MSDALNIRLGERSYSIHFGSDLKFQVRSTLAELQAAGRRCAVVTDRHIHRQQSEALQAMIGDAPLLVLEPGEETKSLTELGRVLDFLAENRLDRSSVLVAIGGGVIGDLAGFAAASYLRGIGFYQIPTTLLAMVDSSVGGKTGINLRAGKNLVGAFHQPKAVFISTDLLVTLPPREFAAGMAEVIKYGLLGDRSLFEELEKTPLQADSPALAGVIRRCCAIKAAIVEADERETAAEGGRALLNLGHTFGHAIEQVTGYGTYLHGEAVAVGLCAAARLSRRLGYIDDVAVTRVESVVRAHALPVRLREPLPIGALTAAMGATKRCVPGRCGLSCCGRWVRRRRRAASIRCWPRQVSWTWERP

SEQ ID NO: 1010 - DNA, 1083 bp, Thauera sp. MZ1T
  CDS (1)..(1083): transl_table=11
atgcagaccctgaacgtggcgctcggcgagcgcgcctatcccattcacatcggccgcggcctgctcggacgcaccgacctgatcctcccccacctcaagacgcggcgcgtcgcgatcgtcaccaacgcggtggtggggccgctctacctcgagcgtctgcgcgccgggctggaaggggcgggggtgcgcaccgcagcggtggtgctgcccgacggcgaggcgcacaaggactgggagacgctcaaccgcatcttcgacatgctgctcgcggagcgctgcgagcgctcgaccaccctggtcgcgctcggcggcggggtggtgggcgacatgggcggcttcgccgcggcctgctaccagcgcggcatgcccttcatccaggtgccgactacgctgctctcgcaggtcgactcctcggtgggcggcaagaccgcgatcaaccacccgctcggcaagaacatgatcggcgccttctaccagcccagtatggtgctggccgacatcgacaccctcgacaccctgcccgaccgcgagctctccgccggcctggccgaggtcatcaagtacgggctgatccgcgaccccgagttcctcgcctggctggaggtcaacctcgaccgcctggtggcgcgcgacaccgacgcgctggcgtgggcgatcgagcgctcctgccgcaacaaggccgaggtggtggcggccgacgagaccgagcagggcgagcgcgcgctgctcaacctcggccacaccttcggtcatgccatcgagaccggcctcggctacggcgagtggctgcacggcgaggccgttgccgccggcacgatgatggccgccgagctgtcgtgccgcctgggctggatcgacgccgccgcggtggcgcgcatcgaggcgctgttcgagcgcgctcgcctgccggtgtgggggccgcggctcggtgtcgagcgctacgtcgagctgatgtcgcacgacaagaaggtcgaggccggcaagctgcgcctggtactgctgcgcgagatggggcgcgcggtgatgcacggcgaggcgccggcctccgagatcgccgcggcgatcgaggcgcgctgccgctga

SEQ ID NO: 1011 - protein, 360 aa, Thauera sp. MZ1T
MQTLNVALGERAYPIHIGRGLLGRTDLILPHLKTRRVAIVTNAVVGPLYLERLRAGLEGAGVRTAAVVLPDGEAHKDWETLNRIFDMLLAERCERSTTLVALGGGVVGDMGGFAAACYQRGMPFIQVPTTLLSQVDSSVGGKTAINHPLGKNMIGAFYQPSMVLADIDTLDTLPDRELSAGLAEVIKYGLIRDPEFLAWLEVNLDRLVARDTDALAWAIERSCRNKAEVVAADETEQGERALLNLGHTFGHAIETGLGYGEWLHGEAVAAGTMMAAELSCRLGWIDAAAVARIEALFERARLPVWGPRLGVERYVELMSHDKKVEAGKLRLVLLREMGRAVMHGEAPASEIAAAIEARCR

SEQ ID NO: 1012 - DNA, 1101 bp, Verrucomicrobium spinosum DSM 4136
  CDS (1)..(1101): transl_table=11
atgactgagggttccatgtctgaatgcctctctgtccgcgtcgatctcgccgaacgtagctacgatgtctatgtagggagcggtttgctcccgcacgtgggcacctacgcgacggagctcttgggacggaaaaagtgcgtggtggtgacggacaccaacgtggagcctctctacggccagacggtgatcgacagcctggagcagagcgggatcacggccactctggttgccgtttcagctggagagcccagcaaggccatgtccgtagtggaagatgtgtgccgggaaatgctgaaggccggccttgaccggaagtcctttctcgtggcactcggcgggggcgtgattggggatctggccggatttgccgcctcgatttttctgcgcggaattcccttcattcaagtgcccacgacagtgctctcccaggtggacagcagtgtcggcggcaagacgggcgtgaacacgccggagggcaagaaccttctcggaaccttttaccagcccagcctggtgctggcagatgtggacaccctctccagccttccagaacgggagtaccgtgagggattcgcggagatcatcaagcacgccgccatccgggatgccttcatgtttgaagccatcgccgaagtggcagagggcaaaggcgatcttgccgctttgattcaccgcaatgtggcaatcaaggcccgcattgtggaagcggatgaacatgaaacgaagggggagcgggccttgctcaatttcggccataccattggccatgccattgaggccagcgcaggctatggtcagctactgcacggggaggccatcagcctcggcatgattgcggcagcgtcattgtccgctcagcttgccggactgccgcctgttggtcgcgcgaagatcgccaacatggtgaagctcttcaacctgcctacccggcttccggaagggatgaccaccgagaccatcctggactacatgaaacacgacaagaagttcagcgaaggaagcattcgctttgtcttgctgcgggcgctgggcgatgcctacgtgagcaaggaagtgaccgaagcgcacatcatcactgcgatcaaagggctgcggttttag

SEQ ID NO: 1013 - protein, 366 aa, Verrucomicrobium spinosum DSM 4136
MTEGSMSECLSVRVDLAERSYDVYVGSGLLPHVGTYATELLGRKKCVVVTDTNVEPLYGQTVIDSLEQSGITATLVAVSAGEPSKAMSVVEDVCREMLKAGLDRKSFLVALGGGVIGDLAGFAASIFLRGIPFIQVPTTVLSQVDSSVGGKTGVNTPEGKNLLGTFYQPSLVLADVDTLSSLPEREYREGFAEIIKHAAIRDAFMFEAIAEVAEGKGDLAALIHRNVAIKARIVEADEHETKGERALLNFGHTIGHAIEASAGYGQLLHGEAISLGMIAAASLSAQLAGLPPVGRAKIANMVKLFNLPTRLPEGMTTETILDYMKHDKKFSEGSIRFVLLRALGDAYVSKEVTEAHIITAIKGLRF

SEQ ID NO: 1014 - DNA, 1101 bp, Cyanothece sp. PCC 8801
  CDS (1)..(1101): transl_table=11
atgtcaattattattcctgttaagttaccccatacttcttacaacattgcgatcgcccctggtagtctttctcagttaggaagccatctagaacccctcaaattaggtcaaaaaatcctgatcatttctaaccctgaaatttttaactattatggtgatgtagttgtcaattccctcaagaaatcaggttttgaagtatttacccatcttattccggccggagaagcttacaaaactctagactccatcgcccaagtctatgataccgccttagaacatcggttagaaaggtcatcaacaatgatagccctagggggaggggtcattggggatatgacggggtttgctgcggcaacttggctaaggggaatcaattttgttcaggtgcccacctctctattagccatggtagatgcttctattgggggtaaaacaggggtcaaccatccccaaggaaaaaacctcattggagccttttatcaaccccgtttagtgtttattgatccttcggtgttaaagacgttgcctgtgcgggaatttcgggcaggaatggcggaagtcattaaatatggcattatttgggataaagcgttatttgagcaattagaacaagccaaaacactcgatcatcttaatagtttaaatgatgaattattgcaaaccattattacccgttcttgtcaagcgaaggtcgatgttgttagccaagatgaaaaagaaagtggtttaagagctattttgaattatggtcatactattggtcatgcaatagaaagtttaaccggatatgaaaccattaatcatggtgaagcggtagcaatggggatggtagctgcgggaaaaatcgccattaaattatcattatggacacaagaagaaaccattcgacaagaccagttaattgacaaagttggattaatttctaccattcctaagacgctagatattgatcaagtgattgagagtttacagagcgataaaaaagtcaaaagcggaaaagttcggtttattctcccaacgagcattggtaaggttattattagcgatcaagtttcttcggaaattattaaatcagttatgattcatcaggttaataagtaa

SEQ ID NO: 1015 - protein, 366 aa, Cyanothece sp. PCC 8801
MSIIIPVKLPHTSYNIAIAPGSLSQLGSHLEPLKLGQKILIISNPEIFNYYGDVVVNSLKKSGFEVFTHLIPAGEAYKTLDSIAQVYDTALEHRLERSSTMIALGGGVIGDMTGFAAATWLRGINFVQVPTSLLAMVDASIGGKTGVNHPQGKNLIGAFYQPRLVFIDPSVLKTLPVREFRAGMAEVIKYGIIWDKALFEQLEQAKTLDHLNSLNDELLQTIITRSCQAKVDVVSQDEKESGLRAILNYGHTIGHAIESLTGYETINHGEAVAMGMVAAGKIAIKLSLWTQEETIRQDQLIDKVGLISTIPKTLDIDQVIESLQSDKKVKSGKVRFILPTSIGKVIISDQVSSEIIKSVMIHQVNK

SEQ ID NO: 1016 - DNA, 1104 bp, Cyanothece sp. PCC 7424
  CDS (1)..(1104): transl_table=11
atgtattcccgtattcccgttaacttaccccaaaactcttacgaaattgccatcgcttctggcagtttatcccgactcggtgctgaaatgagtaccttgaacctaggcaaaaaagttttactggtttcaaacccagaaatttatgactattatggagaaattgcggttaattctctcaaaacagccggatttgaagtagcgactcatttgattcccgaaggagaaatctataaaaccttagattctatcacccaaatttatgatactgcggttgaaaattttctagaacgttcctcaacgatgattgctttaggagggggagtagttggggatatgacagggtttgccgccgccacatggttgagagggatttcttttgtgcaagttcccacctctcttttagccatgattgatgctgctatagggggaaaaacaggagtaaatcatccaaaaggaaaaaacttaattggcgcttttcatcaacctcgtttagtgttaattgatcctcaagttttgaaaacattacctcctagagaatttcgcgccgggatggcagaagtgattaaatatggagtcatttgggatgcgaatttatttagccaattagaagcggctaaaaaattagatgaattttctgatctcgatgaggatttattacaaactattattactcgctcttgtcaagcgaaagcggatgtcgtcagtaaagatgaaaaagaggcaggattaagagctattttaaactatggtcatacgattggtcatgggatagaaagtttaaccggctacagtcaaattattcacggagaaggggtagcgattggaatggttgcagccggcacaatagcggttaaattgcaattgtggagtgaacaagaggctaaccgtcaggatgctttaattaaaaaagcaggtttacccacagaagttccgcctaatgtgaatatagaggcaattattgaagcgttgcaaactgataaaaaggtaaaagcgggtaaagttcgctttattttaccgcaacagataggaactgtaacgattaccgatcaggttacgtctgatgttattcgggaagtgttagctcaaattcaaagcaaagcttaa

SEQ ID NO: 1017 - protein, 367 aa, Cyanothece sp. PCC 7424
MYSRIPVNLPQNSYEIAIASGSLSRLGAEMSTLNLGKKVLLVSNPEIYDYYGEIAVNSLKTAGFEVATHLIPEGEIYKTLDSITQIYDTAVENFLERSSTMIALGGGVVGDMTGFAAATWLRGISFVQVPTSLLAMIDAAIGGKTGVNHPKGKNLIGAFHQPRLVLIDPQVLKTLPPREFRAGMAEVIKYGVIWDANLFSQLEAAKKLDEFSDLDEDLLQTIITRSCQAKADVVSKDEKEAGLRAILNYGHTIGHGIESLTGYSQIIHGEGVAIGMVAAGTIAVKLQLWSEQEANRQDALIKKAGLPTEVPPNVNIEAIIEALQTDKKVKAGKVRFILPQQIGTVTITDQVTSDVIREVLAQIQSKA

SEQ ID NO: 1018 - DNA, 1332 bp, Oryza sativa subsp
  CDS (1)..(1332)
atggcggccgccgcctcctcctctctgctcgccgccgcctcgtcgtcctcccgcgcggcggccgtgtccgcccgccgcgcccccagcgcgagtccggccgcggcggcctccctcccctcgccgtctcgcgcctcctgcgctcctcccctccgtgcttccgcagcgaggaccctccgcagccgtgtcgtcgcgagcgcggcccccgctatgcagccgccgccggcgtcgagggtctccacggttgtcgacgtcgacctcggcgaccggagctacccgatctacatcggcgcaggccttctcgacgagcctgagctgctgcagaggcatgttcatgggaagagggttttggtggtgaccaacaccaccgtcgcgccgctctacctggagaaggtgacctgggcactcacgcacaacaacccgaatgtttctgtggagagcgtgatcctgcccgacggcgagaagtacaaggacatgggcacactgatgaaggttttcgacaaggcagtcgagtcccggctggaccggcggtgcacgtttgttgcgttgggaggtggcgttattggggacatgtgcggttttgcagctgctgcgttcctgcgtggtgtcaatttcatacagattcctactactctgatggcccaggtggattcatctgttggagggaagaccggcattaaccatccattggggaagaacttaattggggcgttctaccagccacagtgtgtactgatagacaccgagacactgaatacattgcctgacagggaactggcttcaggcatagctgaggtggtgaagtatggtctcataagagatgcaccgttctttgaatggcaagagaaaaacatgccagcattattagcaagagaaccaagtgctctggcctatgctattaagagatcgtgtgaaaacaaagctgaagtggttgctcaagacgagaaggaaagtggtctccgagcaacacttaatctcggccatacatttggccatgctatagaaacaggaactggctatggagcatggctccatggggaggctgttgcagctggaacagttatggcagctgacatgtctcaccgcctgggttggatagacgagtcaatcaagaaacgggcaattgacatactagagaaagcgaagcttccaattacacctccagaggccatgacagtggagaagttcaaaagtattatggccgttgataagaaggttgctgatggattgctgaggctcatcctcctgaaaggacctctgggaagctgtgttttcactggcgattacgacaggaatgccctcgacgaaaccctccgtgcattctgcgacagctga

SEQ ID NO: 1019 - protein, 443 aa, Oryza sativa subsp
MAAAASSSLLAAASSSSRAAAVSARRAPSASPAAAASLPSPSRASCAPPLRASAARTLRSRVVASAAPAMQPPPASRVSTVVDVDLGDRSYPIYIGAGLLDEPELLQRHVHGKRVLVVTNTTVAPLYLEKVTWALTHNNPNVSVESVILPDGEKYKDMGTLMKVFDKAVESRLDRRCTFVALGGGVIGDMCGFAAAAFLRGVNFIQIPTTLMAQVDSSVGGKTGINHPLGKNLIGAFYQPQCVLIDTETLNTLPDRELASGIAEVVKYGLIRDAPFFEWQEKNMPALLAREPSALAYAIKRSCENKAEVVAQDEKESGLRATLNLGHTFGHAIETGTGYGAWLHGEAVAAGTVMAADMSHRLGWIDESIKKRAIDILEKAKLPITPPEAMTVEKFKSIMAVDKKVADGLLRLILLKGPLGSCVFTGDYDRNALDETLRAFCDS

SEQ ID NO: 1020 - DNA, 1089 bp, Bacillus subtilis
  CDS (1)..(1089): transl_table=11
atgaaaacactgcatgttcaaaccgcttcctcgtcgtatcctgtttttatcggacaaggcatcagaaaagaggtttgcgaactattaaactctctaaacaggcctttaacacggattatgcttgtcacggatgaagaggttgaccgcctgtatggtgatgaaatgcttcatttgctgcaagaaaaatggcccgtgaaaaaagtgacggtgccgagcggagagcaggcgaaatccatggacatgtacacaaaactgcagagtgaagcgattcgttttcatatggatcgctcctcatgcatcatcgcgttcggtggcggtgttgtaggagatcttgccggttttgtggctgccacttttatgcgcggcattgattttatccaaatgcctacgacgcttttggcgcatgacagtgcagtcggaggaaaggtagccgtgaaccatccgctcggaaaaaatctaatcggtgcattttatcagccgaaggccgtgctctacgatacagacttcctgcgttctttgcctgaaaaagagcttcgatccggaatggcagaagtgattaaacacgcttttatctatgacagagcgtttctggaagagctgctgaatatccgctcactgcgtgatatcaccagtgatcagctgaatgacatgatttttaaagggatttcaataaaagcatctgtcgttcagcaggatgaaaaagaagaggggatcagagcttacttaaacttcggacatacgctcggccatgccgttgaggctgaatatggatacggacagatcactcacggtgatgccgtagccctcgggatgcagtttgctttatatataagcgaaaagacagcgggctgtgaaatggacaggaaacgtttggtcagttggctaataagcctgggctatccaagtcaaattaaaaatgagacggaaacttcggttctattggaccgtatgatgaatgataagaaaacccgcggcgggaagattcagtttatcgtgctcaacgaattaggaaaagttgctgatcacgcattttccagaaatgaacttgagagctggctgaacaaatggcgattggaggagacatcatga

SEQ ID NO: 1021 - protein, 362 aa, Bacillus subtilis
MKTLHVQTASSSYPVFIGQGIRKEVCELLNSLNRPLTRIMLVTDEEVDRLYGDEMLHLLQEKWPVKKVTVPSGEQAKSMDMYTKLQSEAIRFHMDRSSCIIAFGGGVVGDLAGFVAATFMRGIDFIQMPTTLLAHDSAVGGKVAVNHPLGKNLIGAFYQPKAVLYDTDFLRSLPEKELRSGMAEVIKHAFIYDRAFLEELLNIRSLRDITSDQLNDMIFKGISIKASVVQQDEKEEGIRAYLNFGHTLGHAVEAEYGYGQITHGDAVALGMQFALYISEKTAGCEMDRKRLVSWLISLGYPSQIKNETETSVLLDRMMNDKKTRGGKIQFIVLNELGKVADHAFSRNELESWLNKWRLEETS

SEQ ID NO: 1022 - DNA, 1101 bp, Vibrio harveyi
  CDS (1)..(1101): transl_table=11
atggaacggattacggtcaatctagcagagcgtagctacccaatctcaattggcgccgggttatttgaagacccggcgtacctttctcaaattctttcaagcaaaaacgcaaaccagaaagtggttgtgatcagtaatgttacggtcgcgcctctgtatgcggataaaattcttagccaactaaaacagctcggttgtgatgcatccctgcttgaattgccagatggcgaacaatacaaaagcttagacgtatttaatcaagtcatgaacttcctgctagagggaagttatgctcgtgatgtggtgattattgcgttaggtggtggtgttattggcgacttggtgggttttgcttcggcgtgttaccaacgtggtgttgacttcattcaaatcccaaccacattattgtctcaagtggattcatcagtaggtggtaaaaccgcagttaaccatccgctgggcaacaacatgattggtgccttctaccaacctaaagccgttatcatcgatactaactgcctatcgacactgccagaacgcgagtttgcagcgggtattgcagaagtgatcaaatacggcatcatttacgatgctgcttttttcgattggctagaagagaatctagaacgattgtatgcacttaacgaagaggcgctaacttacgctattgcacgttgttgtgaaatcaaagcggaagtggttgctcaagatgagaaagagtcgggcattcgagcgctgttgaacctgggtcatacctttggccatgccattgaagctgaacttggctatggtaactggctacacggtgaagcggtatcttcgggtacgattatggcggcgaaaacatctcatttgcgtggattaatttcgcaagagcagcttgattgcatcatttccattatgcgccgagcaaaactgccagtgcatacgccagatagcatgacttttgatgactttatgacgcacatgatgcgcgacaaaaaagtattgtctggtcaattacgcttagttttacctacgggtattggtagtgccgaagtcattgctgatacgccgcaagacataatcaaacaagctatcgacttcggtcgagacatttaa

SEQ ID NO: 1023 - protein, 366 aa, Vibrio harveyi
MERITVNLAERSYPISIGAGLFEDPAYLSQILSSKNANQKVVVISNVTVAPLYADKILSQLKQLGCDASLLELPDGEQYKSLDVFNQVMNFLLEGSYARDVVIIALGGGVIGDLVGFASACYQRGVDFIQIPTTLLSQVDSSVGGKTAVNHPLGNNMIGAFYQPKAVIIDTNCLSTLPEREFAAGIAEVIKYGIIYDAAFFDWLEENLERLYALNEEALTYAIARCCEIKAEVVAQDEKESGIRALLNLGHTFGHAIEAELGYGNWLHGEAVSSGTIMAAKTSHLRGLISQEQLDCIISIMRRAKLPVHTPDSMTFDDFMTHMMRDKKVLSGQLRLVLPTGIGSAEVIADTPQDIIKQAIDFGRDI

SEQ ID NO: 1024 - DNA, 1107 bp, Magnetospirillum gryphiswaldense
  CDS (1)..(1107): transl_table=11
atgagcatcgaccgcctgcacatggaattgggcgaccgcggatacgatatcctgatcggctccggcctgctggaccagaccggagcgctgatggccccggtgatgcgcggcaaacgcgccttcgtcgtcaccgatgatcaagtcggcccggtctatctggatcgggtgctggcctcgctcgacaaggccggcatcgctcacgaccacacccagatcacccacggcgaacacagcaaggatttcgcccatctggaagccttggtcgagtccatgctggacgcgcgctgcgaacgctccaccatgatcatcgccttgggcggcggcgtcgtcggcgatctcaccggtttcgccgccgccatcttgcagcgcggcgtcgatttcgtccaaatccccaccacgcttctggcccaggtggattcatcggtgggtggcaagaccggcatcaacaccaagaagggcaagaatctggtgggcgccttccaccaaccgcgtctggtactggccgatatttccgtcctcgacactctgccgcgccgtcaggtgctggccggctatgccgaggtggtcaaatacggttgcatcgacgatgccgatttcttcacttggttggaagccaatggcgataaggtcatcgacggcgacgtcgccgcccgccgctacgccgtggccatttcctgccgggccaaggcccgcatcgtcgccgccgatgaacgcgagggcggcatccgtgcattgttgaacctaggtcacaccttcggtcacgcgctggaagcggaaaccggttacggcgacgagatcctgcacggcgaggcggtggccttgggcatgatcatggccttccggctgtcggcgcgcatgggcttggcccccgtcgccgatgccgaccgcctggaaggtcatctggcggccatgggcatgcccacccgcttgtccaagcaacgtcattggaacgtggaaagactggtccaccacatggccggcgacaaaaaggtcaaggacggcaagatcaccttcgtcctcgcccgtggcatcggcaaaagcttcctgacccccgaggtaccgcaacaggcggtgcacgacatgttggccgagttcatcggagcctga

SEQ ID NO: 1025 - protein, 368 aa, Magnetospirillum gryphiswaldense
MSIDRLHMELGDRGYDILIGSGLLDQTGALMAPVMRGKRAFVVTDDQVGPVYLDRVLASLDKAGIAHDHTQITHGEHSKDFAHLEALVESMLDARCERSTMIIALGGGVVGDLTGFAAAILQRGVDFVQIPTTLLAQVDSSVGGKTGINTKKGKNLVGAFHQPRLVLADISVLDTLPRRQVLAGYAEVVKYGCIDDADFFTWLEANGDKVIDGDVAARRYAVAISCRAKARIVAADEREGGIRALLNLGHTFGHALEAETGYGDEILHGEAVALGMIMAFRLSARMGLAPVADADRLEGHLAAMGMPTRLSKQRHWNVERLVHHMAGDKKVKDGKITFVLARGIGKSFLTPEVPQQAVHDMLAEFIGA

SEQ ID NO: 1026 - DNA, 1371 bp, Vitis vinifera
  CDS (1)..(1371)
atggcctcttccgccaatcctttctctctttcgctatcctccgagctcgcttccaactcttctctccactgcgccaactcgtccgaggtctttctccgcttcccgaactctcccgcgcccccctcgctccgctcttccttcgtctcgcctattaagattgaattgaatcgagtcggtgtttctgcgttgaaagtgagtcgaatcggttcaaggatttcggcgagttcaactccggtgatggatcagtcgccgagtcagacgagtcctagggttcctactgttgttgaggtcgatttggggaaccggagctacccgatctacatcggatctggattgcttcaacaacccgagcttctccagagacatgttcatgggaagagagctcttgtggtcaccaacaccacaattgcagcattataccttgataaagtagttgatgctttaactcgtggaaacccaaatatttcagttgagagtgtgattttgccagacggtgagaagtacaaaaacatggacacactaatgaaagtttttgacaaggcaattgagtcacggttggatagacgttgtacatttgttgccgttggtggtggtgttattggtgacatgtgtggatttgctgctgctgccttccttcgtggtgttaatttcattcagattcctacaactgtaatggcacaggtggattcttcagttggaggcaaaactggcataaaccatcctctaggaaaaaatttgattggtgctttctaccaacctcagtgtgtacttatagacactgacacattaaacacactgccagagagggagttggcatcaggttttgctgaggttattaagtatgggcttattagggatgctgaattctttgagtggcaagagaagaatatgcaggcattaatggcaagggatccaggtgcactggcttatgctatcaagcgatcatgtgaaaacaaggctgaggtagtatctttagatgagaaggaaagtggactgagggcgacattgaacttgggtcatacttttggccatgcaatagaaactggggttggttatgggcagtggctccatggagaagctgttgcagctggcatggtcatggctgtcgacatgtcataccgccttggttggattgatgattcaattgtgaagcgagttcacaatatcataaagcaggctaagctacccattaccccacctgaaagcatgacagtggagatgttcaagtcagtcatggcggttgataagaaagtggctgatggactgctaaggctcattctcttgaaaggtcctctaggcaactgtgttttcactggtgactatgacaggaaggcactggatgatacactccgggcatttgccaagtcctga

SEQ ID NO: 1027 - protein, 456 aa, Vitis vinifera
MASSANPFSLSLSSELASNSSLHCANSSEVFLRFPNSPAPPSLRSSFVSPIKIELNRVGVSALKVSRIGSRISASSTPVMDQSPSQTSPRVPTVVEVDLGNRSYPIYIGSGLLQQPELLQRHVHGKRALVVTNTTIAALYLDKVVDALTRGNPNISVESVILPDGEKYKNMDTLMKVFDKAIESRLDRRCTFVAVGGGVIGDMCGFAAAAFLRGVNFIQIPTTVMAQVDSSVGGKTGINHPLGKNLIGAFYQPQCVLIDTDTLNTLPERELASGFAEVIKYGLIRDAEFFEWQEKNMQALMARDPGALAYAIKRSCENKAEVVSLDEKESGLRATLNLGHTFGHAIETGVGYGQWLHGEAVAAGMVMAVDMSYRLGWIDDSIVKRVHNIIKQAKLPITPPESMTVEMFKSVMAVDKKVADGLLRLILLKGPLGNCVFTGDYDRKALDDTLRAFAKS

SEQ ID NO: 1028 - DNA, 1101 bp, Microcystis aeruginosa PCC 7806
  CDS (1)..(1101): transl_table=11
atggctatttgtattcccgttaatttacccgatcgctcctataatattctgatcgagaagggcagtttagctaatctcggtgcagaaatgagccagttaaacttaggtaaaaaggttttattggtttctaatcccgaaatttttgactattacggacatacagccgttaattctctagacaaagcgggatttaccgtttttacacatctgatccccgccggcgaaaattataaaaccctcgattcgatcgcccaagtttatgatactgccctcgctcaccggttggaacgttcctcgactatggttgccctcggtggtggtgtaatcggggatatgacgggatttgcggcagccacatggttacggggcattaattttgtccaggttcccaccaccctgttagcgatggtggatgcttccatcgggggtaaaactggtgttaatcatccccagggcaaaaatctgatcggggcgttttatcaaccgaaattagttctgatcgatcctaacgtgcttaaaagcctacccgtgcgagaatttcgggctggaatggcagaagtgattaaatacggtgtaatttgggattctgatttatttcaacagttagaagactcggacaatttagctagtttttctcagattgatggcgagctattgcaaacaattattacaaagtcttgccaagctaaagcagatgtggtatgcacagacgaaaaagaagcgggtttgcgggcgatcttaaactatggtcacacgatcgcccacggcattgaaagtctaacgggatatactagcgttaaccacggggaagcggtggcgatggggatggtggcggcaggagcgatcgctgttaaactgggaatgtggaccgccggggaaaatcaacgtcaaaccgatttaatcgaaaaagccgccttagaaacccatatgccgcctttaaatgccgatgagatggttaatgctcttactgccgataaaaaggttaaagatggcaaggttagatttattttaccaacggcaatcggccaagttaccattagcgatcgagtcacccccaccctggtgcgcgaggtgttatcaccaaccgaatccgggcagtaa

SEQ ID NO: 1029 - protein, 366 aa, Microcystis aeruginosa PCC 7806
MAICIPVNLPDRSYNILIEKGSLANLGAEMSQLNLGKKVLLVSNPEIFDYYGHTAVNSLDKAGFTVFTHLIPAGENYKTLDSIAQVYDTALAHRLERSSTMVALGGGVIGDMTGFAAATWLRGINFVQVPTTLLAMVDASIGGKTGVNHPQGKNLIGAFYQPKLVLIDPNVLKSLPVREFRAGMAEVIKYGVIWDSDLFQQLEDSDNLASFSQIDGELLQTIITKSCQAKADVVCTDEKEAGLRAILNYGHTIAHGIESLTGYTSVNHGEAVAMGMVAAGAIAVKLGMWTAGENQRQTDLIEKAALETHMPPLNADEMVNALTADKKVKDGKVRFILPTAIGQVTISDRVTPTLVREVLSPTESGQ

SEQ ID NO: 1030 - DNA, 1374 bp, Picea sitchensis
  CDS (1)..(1374)
atggccgccgcgacgttctctgcaactctggtggcaccttcaatcctaaattctcattccgaaaccaacactgcttcatcctcttttcacaaacccaagatatccgtcttcgccaaacccaaaagcatttgcttccgatcgtcaggcccgaggatctgtagggttttcaatgctaataaatttgttcggacggaggtgaattcgagagctgcgggagtaattagagcgaatgcggctcaggtagccgaggaagcacgcccctctgctcagaaggaaatggaagtcgtggacgtggatctgggtgatcggagttatcccatatacattggatctagtttgctagaccggccggatctcctccagagccatgtgaaaggacggagggttcttgtagtaacaaacacaactgttgggccattgtatcttgacagagttgtggcagcacttactcatggcggttcaaacatttcagtggaaagtgtcattttaccagatggagagaagtataaggaaatggggactcttatgaaagtctttgacaaggctattgagacacgaatggatcgacgctgcacatttattgctcttggaggaggtgtgattggtgacatgtgtggctttgctgctgcttccttcttgcgtggagtaaattttattcagattccaacaacactgatgtctcaggttgattcttcagttggaggaaaaacaggaataaaccatccattgggaaagaacttgattggtgcatttttccagcctcagtgtgtactagtagacacagatacacttagtacattaccagatagagaactagcttcaggtattgctgaagttataaaatatggtctaatcagagatgctgcattttttgagtggcaagaaaagaacatgcaggctttgctaacaagggatccaagtgcattggcttatgccatcaagcgttcgtgtgagaacaaagcagaagttgtgtccttggatgagaaagagagtggcctaagagctacattaaatctgggacatacatttggccatgcaatagagaatggtattggctatggaggatggctacatggagaggcagttgctgcgggaacggttatggcagcagacatgtcatatcgccttgggtggattgatgacactttgccaaagcgaatagttaagttgcttaagcaagctaagcttcctattgccccacctgaagaaatgactgtagataaattcaaaagtattatggcggtagataaaaaggtggcagatggtttgctaagacttatactgctcaaaggaccacttggtaactgtgtctttacaggagattatgatcgaaagacacttgatgacacactccgtgccttctgccattcatga

SEQ ID NO: 1031 - protein, 457 aa, Picea sitchensis
MAAATFSATLVAPSILNSHSETNTASSSFHKPKISVFAKPKSICFRSSGPRICRVFNANKFVRTEVNSRAAGVIRANAAQVAEEARPSAQKEMEVVDVDLGDRSYPIYIGSSLLDRPDLLQSHVKGRRVLVVTNTTVGPLYLDRVVAALTHGGSNISVESVILPDGEKYKEMGTLMKVFDKAIETRMDRRCTFIALGGGVIGDMCGFAAASFLRGVNFIQIPTTLMSQVDSSVGGKTGINHPLGKNLIGAFFQPQCVLVDTDTLSTLPDRELASGIAEVIKYGLIRDAAFFEWQEKNMQALLTRDPSALAYAIKRSCENKAEVVSLDEKESGLRATLNLGHTFGHAIENGIGYGGWLHGEAVAAGTVMAADMSYRLGWIDDTLPKRIVKLLKQAKLPIAPPEEMTVDKFKSIMAVDKKVADGLLRLILLKGPLGNCVFTGDYDRKTLDDTLRAFCHS

SEQ ID NO: 1032 - DNA, 1332 bp, Populus trichocarpa
  CDS (1)..(1332)
atgacttccacggccaacaccatctccctctctctccccaccacccacaacccctcgtctctctcaaaacccaagtccctccccgatttctacctccggttccgtaaccaaaacccaaaattaacccgggtcggaatctctgtaacaaacccgaacaaccgaattagaactttatcaacaatccgtgcaagtacagcttcagtgatggaagcgagttcgaaagagaaagctttgcctacaatagtggaagttgatttgggcaaccgaagttacccgatttatattggatcggggctattggatcaacccgagttgcttcaaagacatgtccatgggaagagagttcttgttgttactaacagtactgtggctcctttgtatcttgataaagttgttgatgctctaacaagagggaatcctaatgtttctgttgacagtgtgattctacctgatggtgaaaagtacaagaatatggaaacacttatgaaagtgtttgataaagcaattgagtcaaggttggacaggaggtgtacgtttgttgcgcttggaggtggtgtgattggtgatatgtgtggatttgcagcggcatcttttcttcgaggtgttaactttattcagattcctacaactgttatggcacaggtggactcttctgttggaggcaaaactgggattaaccacccactcgggaagaatttgatcggtgcattttatcaacctcaatgtgtgttgatagatactgacacgcttaataccttgccggatagggaattggcatcagggcttgcagaggttattaaatatgggcttattagagatgcagtgttttttgagtggcaggagaagaatatggcggctttgatggcaagggatccaagtgccatggcctatgccatcaagcgttcatgtgaaaataaggctgaggttgtatccttggatgagaaggaaagtggactgagggcaactttgaacctgggtcacacatttggccatgcaatagaaacaggatttggatatggtgtgtggctccatggagaagctgttgcagctggcatggtcatggctgttgacatgtcataccgccttggttggattgatgatctgcttgtgaagcgtgtcctcaacattctacaacaggcgaagctacccactgctccaccagataccatcaccgtggaaatgttcaagtctgtgatggcggtcgataagaaggtagcagatgggttgctaaggcttatccttttgaaaggctccctgggtaattgtgtgttcaccggtgattatgataggaaggccctcgatgatacacttcgtgcattttgcaaatcatga

SEQ ID NO: 1033 - protein, 443 aa, Populus trichocarpa
MTSTANTISLSLPTTHNPSSLSKPKSLPDFYLRFRNQNPKLTRVGISVTNPNNRIRTLSTIRASTASVMEASSKEKALPTIVEVDLGNRSYPIYIGSGLLDQPELLQRHVHGKRVLVVTNSTVAPLYLDKVVDALTRGNPNVSVDSVILPDGEKYKNMETLMKVFDKAIESRLDRRCTFVALGGGVIGDMCGFAAASFLRGVNFIQIPTTVMAQVDSSVGGKTGINHPLGKNLIGAFYQPQCVLIDTDTLNTLPDRELASGLAEVIKYGLIRDAVFFEWQEKNMAALMARDPSAMAYAIKRSCENKAEVVSLDEKESGLRATLNLGHTFGHAIETGFGYGVWLHGEAVAAGMVMAVDMSYRLGWIDDLLVKRVLNILQQAKLPTAPPDTITVEMFKSVMAVDKKVADGLLRLILLKGSLGNCVFTGDYDRKALDDTLRAFCKS

SEQ ID NO: 1034 - DNA, 1032 bp, Helicobacter pylori
  CDS (1)..(1032): transl_table=11
atgcaagaaattgtaatccctttaaaagaaaaaagctataaagtgtttttgggggaactgcctgaaataaaattgaaacaaaaagccctcatcattagcgatagcatcgtggccgggttgcatttatcgtatttattagagcgcttgaaagccttagaagtcagagtgtgcgtgatagagtccggagaaaaatacaaggaattttcattcattagagcacattttaaacaacgctttgaaatgcaattaaaccgccattctttaatgatagcccttggtgggggagtgataagcgatatggtggggtttgcgagcagtatttattttagggggattgattttattaacatccctacgactttactcgctcaagtggatgcgagcgtgggggggaaaacagggatcaatacgccttatggcaagaatttaatcggatcgttccaccagcctaaagcggtttatattgatttggcttttttaaaaacccttgaaaaaagggaatttcaagcaggggttgctgaaatcattaaaatggcggtgtgttttgataaaaacttggtagaaagattggaaacaaaggatttagaagattgtttagaagaagtaatctttcaaagcgtttatatcaaagctcaagtcgttgttcaagatgaaaaagaccaaaacatcagggctgggttgaactatgggcatacttttgggcatgcgatagaaaaagagactgattatgagcgatttttgcatggcgaagcgatcgctattggcatgcgcatggcgaatgatttagccctttctttaggcatgctcactctaaaagaatacgaacgcatagaaaatttattgaaaaaatttgatttgatattccattacaaaatcacagatattcaaaaattttacgaacgcttgtttttagacaaaaaaagcgagaataagacaatcaaattcattctgcctaaaggcattggagcgtttgaggttgtctctcatatccctaaagaaacgattttaaaggtgttagaaaaatggcaataa

SEQ ID NO: 1035 - protein, 343 aa, Helicobacter pylori
MQEIVIPLKEKSYKVFLGELPEIKLKQKALIISDSIVAGLHLSYLLERLKALEVRVCVIESGEKYKEFSFIRAHFKQRFEMQLNRHSLMIALGGGVISDMVGFASSIYFRGIDFINIPTTLLAQVDASVGGKTGINTPYGKNLIGSFHQPKAVYIDLAFLKTLEKREFQAGVAEIIKMAVCFDKNLVERLETKDLEDCLEEVIFQSVYIKAQVVVQDEKDQNIRAGLNYGHTFGHAIEKETDYERFLHGEAIAIGMRMANDLALSLGMLTLKEYERIENLLKKFDLIFHYKITDIQKFYERLFLDKKSENKTIKFILPKGIGAFEVVSHIPKETILKVLEKWQ

SEQ ID NO: 1036 - DNA, 1251 bp, Ostreococcus tauri
  CDS (1)..(1251)
atgtccgcgcgcggtgtccgcgcccccgtcgccgtcgtcgcgagagacacggggaaaacgtgcgctcaaaggtgtcctggggttcgctcgatgatcgctcggagacgcgccttggtcaccccgcgcgcgtcgtccacggcgaaagaggcggcggcgacggtgcgcgtggatctgggcgatcggtcgtatccgatactcatcgggagcgggcttctggacgacggcgtggcgttgagggaacacgtgacgtcgtccacggcgctcgtggtgacgaacgaaaccatcgcaaagctcgggtacctggaacgaacggtcaaagcgctggagggaggagatgagaagattcgcgtggaaacggtcgtacttccggacggggaggaacacaagaacttggacgtgctgaacatggtgtacacgcgggcgctggagacgcgtctggaccgagggacgacgtttgtcgccctgggcggaggggtcatcggagacatgacgggatacgccgcggcgtcgtaccagcgaggggtgaagttcgtgcaaattcccaccacggtgatggccatggtggacagctcggtcggggggaagactggtgtgaaccacgcgcttgggaagaatatgataggggcgttttatcaacccgagtgcgtgttgatcgacattgacgccctgcagacgcttccagatcgcgagtttgcgagcggcatcgccgaggtcgtgaaatatggattgattcgcgacggcccgttttttgagtggctcgaggcgaacgtcgataagctcttggctcgggatgcggatgccattgtatacgccgtcgagcgctcgtgcatcaacaaagccgaagttgtcgcggcagatgagaaggagggcggcgttcgtgcgacgttgaacctcggtcatacatttgggcacgccatcgagacgggtctcggttacggcgagtggttgcacggtgaagccgttagcgccggcatgtgtatggcggcggacatgtcgcttcgcctcggctggatcgactcttcgctgaaggatcgtaccatcaacctgctgaagaagtgcaacacccctatcgaagtcccggaggagatgacgatacaaaccttcatggatctcatggctgtggacaagaaagccgcgaatgggaagctgcgtttgatccttctgaagggcccgctcggcgagtgcgtgttcaccggcgacttcgaccagactaaactgcgtgaaactttggacgcgtacgtgaagaagtaa

SEQ ID NO: 1037 - protein, 416 aa, Ostreococcus tauri
MSARGVRAPVAVVARDTGKTCAQRCPGVRSMIARRRALVTPRASSTAKEAAATVRVDLGDRSYPILIGSGLLDDGVALREHVTSSTALVVTNETIAKLGYLERTVKALEGGDEKIRVETVVLPDGEEHKNLDVLNMVYTRALETRLDRGTTFVALGGGVIGDMTGYAAASYQRGVKFVQIPTTVMAMVDSSVGGKTGVNHALGKNMIGAFYQPECVLIDIDALQTLPDREFASGIAEVVKYGLIRDGPFFEWLEANVDKLLARDADAIVYAVERSCINKAEVVAADEKEGGVRATLNLGHTFGHAIETGLGYGEWLHGEAVSAGMCMAADMSLRLGWIDSSLKDRTINLLKKCNTPIEVPEEMTIQTFMDLMAVDKKAANGKLRLILLKGPLGECVFTGDFDQTKLRETLDAYVKK

SEQ ID NO: 1038 - DNA, 1008 bp, Kitasatospora putterlickiae
  CDS (1)..(1008): transl_table=11
gtggagctgggcgagcgcggctacccggtgctgatcggccccggcgcccgccaccggctggccggggtgctcgcggggatcggcgcccgccgggtcgcggtggtcagcgcccggcccgccgagtggctgcccgacaccggcctcgacaccctggtggtggaggcgaaggacggtgaggagggcaagtccctcgcctgggtggccgaactgtgcagccgcttcgccgcgttcggcctgagccgggcggacgccgtggtctcctgcggcggcggcaccaccaccgacgcggtcgggctcgccgccgcgctgcaccaccggggagtgcccgtggtgcacctgcccacctcgctgctggcccaggtcgacgcgagcgtcggcggcaagacggcggtgaacctcccggagggcaagaacctggtgggcgcgtactggcagccgtccgccgtgctctgcgacaccgactacctcagcaccctcccgccgcgcgaacgcgtcaacggctacggggagatcgcgcgctgccacttcatcggcgccggggacctccgccacctgccgctgcccgagcagatcgccgcgagcgtcgcccgcaaggccgccgtggtggccgccgacgagcgcgacaccgggctgcggcacatcctcaactacggccacaccctgggccacgcgctggaacgcgccaccgacttccggctgcgccacggcgaggcggtcggcgtcggcacggtcttcgccggccggctggcgggcgcgctcggccggatcggccctgagcgggtcgccgagcaccacgaggtggtggcccactacgggctgccgaccgcgctgccgccggaggtcgacaccggggcgctgatcgccctcatgcggctggacaagaaggccgtcgacgggctctccttcgtcctggacggcccgcgcggcgccgaactcgtcagcgacgtccccgcgtcactggtcgcccgcacgctggacgccatgccgcgcgccgccggggaggcctga

SEQ ID NO: 1039 - protein, 335 aa, Kitasatospora putterlickiae
MELGERGYPVLIGPGARHRLAGVLAGIGARRVAVVSARPAEWLPDTGLDTLVVEAKDGEEGKSLAWVAELCSRFAAFGLSRADAVVSCGGGTTTDAVGLAAALHHRGVPVVHLPTSLLAQVDASVGGKTAVNLPEGKNLVGAYWQPSAVLCDTDYLSTLPPRERVNGYGEIARCHFIGAGDLRHLPLPEQIAASVARKAAVVAADERDTGLRHILNYGHTLGHALERATDFRLRHGEAVGVGTVFAGRLAGALGRIGPERVAEHHEVVAHYGLPTALPPEVDTGALIALMRLDKKAVDGLSFVLDGPRGAELVSDVPASLVARTLDAMPRAAGEA

SEQ ID NO: 1040 - DNA, 1089 bp, Candidatus Kuenenia stuttgartiensis
  CDS (1)..(1089): transl_table=11
atgaagactattcatgtaaatctttccgcagatagttacaatatttacataggaaaagatatccttgcgaaagtaggggagattgtcgcaaaagacaaagaaccatgcaaaacgctcttaataaccgacgaaaacatagaaaaaatctatggagacgtggttgcagaaagtttccgacagaacaattttgatgtaaaattactttccttaccgccgggagaagaacaaaaaaatatcgaaaatgcattattgctttacgacaactgctttgcccataaacttgacagaaaatccctcatcgtagcccttggaggaggcgttgtcggggatttaagcggttttattgcagcaacctttatgcgcggcattccttatatacaaattcccacctcgctgcttgcgcaagttgatagcagcatcggcggaaaggtagccgtcaatcacccgaaagggaaaaacatgatcgggtgtttttatcagccaaaggcagtattcatagacacaaacacgctttcttccctcccgtcgaaagaaatggttgccggaatcgctgaggttattaaatacggcgttataagggatgcggaattatttgcgtttatggaaaaatcaatggatgctattcttcaattacaagatgaagcattgcttaaaattattgccacgtcgtgtcagataaaggccaatgttgtagaacaggacgaaaaggagaaagatcttcgtgccattttaaattatggacacaccataggccatgccatagaaacggttacccattacaaacaatatcgtcacggagaagccgttgccataggcatgctttatgccacaaaaatagcaattgaacttggcatcgcggatacctccgttttcgaccggcagctatccataatgaaaaacctgggcttatccattcaaaccggactgaaatcagaggatattataaaggcgctgtacactgacaagaaaacggtctccggaagactccgttttgtgctccctacaaaaatcggcgaggttattatctctgataaagtaaatgatgaaatgctctaccgcgtattagataaaccccttttagccttctaa

SEQ ID NO: 1041 - protein, 362 aa, Candidatus Kuenenia stuttgartiensis
MKTIHVNLSADSYNIYIGKDILAKVGEIVAKDKEPCKTLLITDENIEKIYGDVVAESFRQNNFDVKLLSLPPGEEQKNIENALLLYDNCFAHKLDRKSLIVALGGGVVGDLSGFIAATFMRGIPYIQIPTSLLAQVDSSIGGKVAVNHPKGKNMIGCFYQPKAVFIDTNTLSSLPSKEMVAGIAEVIKYGVIRDAELFAFMEKSMDAILQLQDEALLKIIATSCQIKANVVEQDEKEKDLRAILNYGHTIGHAIETVTHYKQYRHGEAVAIGMLYATKIAIELGIADTSVFDRQLSIMKNLGLSIQTGLKSEDIIKALYTDKKTVSGRLRFVLPTKIGEVIISDKVNDEMLYRVLDKPLLAF

SEQ ID NO: 1042 - DNA, 1380 bp, Fagus sylvatica
  CDS (1)..(1380)
atggcctccaccgccaacccgttctctatttccctctcctccaaaccaaccgccacctcatctcttcgtaaaatcaaccactcctccgattcatttctccgcgttcagaatcctcctaactcggtctcgctccgctcctccttcatttccccgagttcgattgagttgaatttgaatcgggtaggaaactccatttcgagtgcgagtcgagtgaagtcgaggatatgcgcgagttctgctcaggttatggaccaatcagtgactaaatcggatcctacggctcctactatcgttgacgtcaatttgggcaaccggagctacccgatttatatcggacccggactcctcgatcaacctcaccttctccaaaagcatgttcatgggaagagggttcttgtagttactaatgataaagttggaccactctaccttgataaagttgttgaagctttaactaaggggaaccctaatgtttccgtggagagtgtgattttaccggatggtgagaagtacaaggacatggatactcttatgaaagtctttgacaaggccattgagtcacgattggatcggcgttgtacgtttgttgcccttggaggtggtgtgattggtgacatgtgtggctatgctgctgcctcgtacctccgtggcattaatttcattcagatccctacgacggtgatggcacaggtggattcctctgttggtggcaaaactgggataaaccatcaccttgggaagaacttgattggagctttttaccaacctcaatgtgtacttatagacacagacacactaaacacattgccagatagggaattggcatcggggcttgcagaggttataaagtatgggcttatcagggacgctgaattttttgagtggcaggagaagaatattcaggcattgatggcaagggatccaaacgcactggcttatgctataaagcgatcatgtgaaaacaaggctgaggtcgtgtccttggatgagaaggaaagtggactgagggcaacactgaatttgggtcatacatttggccatgcaatagaaactgggtttggctatgggcagtggctccatggagaagctgttgcagttggcatggtcatggctgttgacatgtcatatcgccttggttggattgatgattctattgtgaagcgagtgcacaacattctgcaacaggctaagttgcctactttccctcccgaaatcatgactgtggagatgttcaagtctgttatggctgttgataagaaggtagctgatggactactaaggctcatccttctaaaaggtcctctaggcaattgtgtttttacaggtgattatgatagaaaggccctggatgaaacactccgtgcatttgttaagccctga

SEQ ID NO: 1043 - protein, 459 aa, Fagus sylvatica
MASTANPFSISLSSKPTATSSLRKINHSSDSFLRVQNPPNSVSLRSSFISPSSIELNLNRVGNSISSASRVKSRICASSAQVMDQSVTKSDPTAPTIVDVNLGNRSYPIYIGPGLLDQPHLLQKHVHGKRVLVVTNDKVGPLYLDKVVEALTKGNPNVSVESVILPDGEKYKDMDTLMKVFDKAIESRLDRRCTFVALGGGVIGDMCGYAAASYLRGINFIQIPTTVMAQVDSSVGGKTGINHHLGKNLIGAFYQPQCVLIDTDTLNTLPDRELASGLAEVIKYGLIRDAEFFEWQEKNIQALMARDPNALAYAIKRSCENKAEVVSLDEKESGLRATLNLGHTFGHAIETGFGYGQWLHGEAVAVGMVMAVDMSYRLGWIDDSIVKRVHNILQQAKLPTFPPEIMTVEMFKSVMAVDKKVADGLLRLILLKGPLGNCVFTGDYDRKALDETLRAFVKP

SEQ ID NO: 1044 - DNA, 1065 bp, Streptomyces hygroscopicus
  CDS (1)..(1065): transl_table=11
ttgaccacgtcgacttccacttcggccaccggctccgcgtcccctgcccggcaggtcaccgtcgggctggccgaacgctcctacaccgttcacatcggccacggtgtgcagcggctgctgccacaggtggtggccgccctgggcgcgcgcagggcggtggtggtcaccgcgcggcccgccgggcagacccccgacccgggagtgccctcgctcgtcgtgcccgcccgcgacggggaggaggccaaggacctggccgccgtgacggacctgtgccgccggttcgtcggattcggactcacccgctcggatgtggtggtgtcctgtggcggcggcaccacgaccgacacggtgggcctggccgccgccctctaccaccggggcaccccggtcgttcatgtgccgacctcgctgctcgcccaggtggacgcgagcgtcggcgggaagaccgcggtgaatctgcccgagggcaagaacctggtcggcgcctactggcagcccgcggccgtgctctgcgacctcgagcatctgaaaaccctgcccgaccgggaatggcgcaacggcctcggtgagatcgcccgctgccacttcatcggcgcgcccgacctcgacgggctgccgctgctcgaccagatctcggccagtgtgacgctcaaggcgggcatcgtcgcggcggacgaacgcgactccggcctgcgccacctcctcaactacggacacaccttggggcatgcgctggaacgcgccaccgggttcgcactgcgccacggcgagggcgtggccatcggcacggtcttcgccggccggctcgccggcgcgctggggcgcatcggcccggaacgggtcgccgagcaccatgacgtcgtatcccgctacggcctgccgaccgggctgccgccggatgtctcggtgtccgagctggtggagctgatgcgcctggacaagaaggccaccgacgggctgacgttcgtcctggacggccccgaggggcccggactggtgcgcgggatccccgaggacaccgtcagcaccaccctcgcggcgatgccccgcgcgcccgcatggtga

SEQ ID NO: 1045 - protein, 354 aa, Streptomyces hygroscopicus
MTTSTSTSATGSASPARQVTVGLAERSYTVHIGHGVQRLLPQVVAALGARRAVVVTARPAGQTPDPGVPSLVVPARDGEEAKDLAAVTDLCRRFVGFGLTRSDVVVSCGGGTTTDTVGLAAALYHRGTPVVHVPTSLLAQVDASVGGKTAVNLPEGKNLVGAYWQPAAVLCDLEHLKTLPDREWRNGLGEIARCHFIGAPDLDGLPLLDQISASVTLKAGIVAADERDSGLRHLLNYGHTLGHALERATGFALRHGEGVAIGTVFAGRLAGALGRIGPERVAEHHDVVSRYGLPTGLPPDVSVSELVELMRLDKKATDGLTFVLDGPEGPGLVRGIPEDTVSTTLAAMPRAPAW

SEQ ID NO: 1046 - DNA, 1065 bp, Streptomyces hygroscopicus
  CDS (1)..(1065): transl_table=11
ttgaccacgtcgacttccagtccggccgccagttccgcttcccccgcccgacaggtcgtcgtcgggctggccgaacgctcctacaccgtgcacatcggacacggtgtgcagcggctgctcccacaggtggtggccgccctgggcgcgcgcagggcggtggtggtcaccgcgcggcccgccgagcagacccccgacccaggagtgccctcgctcgtcgtacccgcccgcgacggggaggcggccaaggacctggccgccgtgaccgatctgtgccgccggttcgtcggattcggactgacccgctcggatgtggtggtgtcctgtggcggcggcaccacgaccgacacggtgggcctggccgccgccctctaccaccggggcaccccggtcgtacacgtgccgacctcgctgctcgcccaggtggacgcgagcgtcggcgggaagaccgcggtgaatctgcccgagggcaagaatctggtcggcgcctactggcagcccgcggccgtgctctgcgacctcgaacatctgaagaccctgcccgaacgggaatggcgcaacggcctcggtgagatcgcccgctgccacttcatcggcgcgcccgatctcgacgggctgccgctgctcgaccagatctcggccagtgtgacgctcaaggcgggcatcgtcgccgcggacgagcgcgactcgggcctgcgccacctcctcaactacggacacacgttggggcatgcgctggaacgtgccaccgggttcgcgctgcggcacggggagggagtggccatcggcacggttttcgccggccggctcgccggcgcgctggggcgcatcggcccggagcgcgtggccgagcatcatgacgtggtcgcccgctacggcctgccgaccgcgctgcccccgcatgtctccgtgtccgagctggtggagctgatgcgcctggacaagaaggccaccgacgggctgacgttcgtcctggatagccccgcggggcccggactggtgcgcgggatcgccgaggacaccgtcggcgccaccctcgcggcgatgccccgcgcgcccgcatggtga

SEQ ID NO: 1047 - protein, 354 aa, Streptomyces hygroscopicus
MTTSTSSPAASSASPARQVVVGLAERSYTVHIGHGVQRLLPQVVAALGARRAVVVTARPAEQTPDPGVPSLVVPARDGEAAKDLAAVTDLCRRFVGFGLTRSDVVVSCGGGTTTDTVGLAAALYHRGTPVVHVPTSLLAQVDASVGGKTAVNLPEGKNLVGAYWQPAAVLCDLEHLKTLPEREWRNGLGEIARCHFIGAPDLDGLPLLDQISASVTLKAGIVAADERDSGLRHLLNYGHTLGHALERATGFALRHGEGVAIGTVFAGRLAGALGRIGPERVAEHHDVVARYGLPTALPPHVSVSELVELMRLDKKATDGLTFVLDSPAGPGLVRGIAEDTVGATLAAMPRAPAW

SEQ ID NO: 1048 - DNA, 1329 bp, Arabidopsis thaliana
  CDS (1)..(1329)
atggcagccaacaccatttctctttccaacgtcgccgcctccaagaatctcaactcctttcaaagccgtgcctttattgctccaccaactatttttttccctgtggcttctgcaaagtctaaacctggggaactttctttatcttccacgactctttccaggtctcgtgtgcgcgccggtgctagccagctcatgaacgaaccgcttaacgatcaacgctccatctcttctcccactgtcgtcgaggttgatcttggtgaccggagttatccgatctatatcggcgccggcttgcttgatcactcagaacttcttcaaaggcatgttcacggaaagagagtgcttgtggtcaccaatgatcgagttgctcctctctacctggacaagactatagatgctttaaccagaggaaatccaaacgtgacagtggaaagtgtaattttgcctgatggagagaaatacaaagacatggatactctcatgaaagtcttcgacaaggccattgagtctcgcctagatagacgatgtacatttgttgcccttggaggcggtgtgataggcgatatgtgtggatatgctgctgcatcgtacctacgtggtgtcaatttcatccaaattcctaccactgttatggcacaggttgattcttctgtaggtggcaaaacaggcataaatcatcgtcttggaaagaatttgatcggtgcattttaccaaccacagtgtgtgctagtagacactgacacgttgaacacattgccagatagggagatggcatcagacctagctgaagtgatcaagtacgggcttatcagggatgccgagttctttgaatggcaggagaagaacattgaggcattgctggcaagggatccagctgcattagcttttgctataaagcgatcatgtgaaaacaaggcagacgttgtatcacaagatgagaaagaaagcggcttgcgagcaaccttaaatttgggtcatacctttggccatgccatagaaactggctttggttatggagagtggctccatggagaagctgttgcagctggcacggtaatggcagtggacatgtcatatcgtcttggttggatcgatgaatcgattgttaagagagtgaacaagatcctagtacgggcgaaattgcctacaactccgccagagagcatgaccgtcagcatgttcaagtccataatggcggtggacaagaaagtggcagatggactgctgaggctgattcttctcaaaggcccgctgggaaactgcgtgttcactggagattatgatcgggaagcgttggatgccacgcttcgtgcattctccaaatcctga

SEQ ID NO: 1049 - protein, 442 aa, Arabidopsis thaliana
MAANTISLSNVAASKNLNSFQSRAFIAPPTIFFPVASAKSKPGELSLSSTTLSRSRVRAGASQLMNEPLNDQRSISSPTVVEVDLGDRSYPIYIGAGLLDHSELLQRHVHGKRVLVVTNDRVAPLYLDKTIDALTRGNPNVTVESVILPDGEKYKDMDTLMKVFDKAIESRLDRRCTFVALGGGVIGDMCGYAAASYLRGVNFIQIPTTVMAQVDSSVGGKTGINHRLGKNLIGAFYQPQCVLVDTDTLNTLPDREMASDLAEVIKYGLIRDAEFFEWQEKNIEALLARDPAALAFAIKRSCENKADVVSQDEKESGLRATLNLGHTFGHAIETGFGYGEWLHGEAVAAGTVMAVDMSYRLGWIDESIVKRVNKILVRAKLPTTPPESMTVSMFKSIMAVDKKVADGLLRLILLKGPLGNCVFTGDYDREALDATLRAFSKS

SEQ ID NO: 1050 - DNA, 1329 bp, Solanum lycopersicum
  CDS (1)..(1329)
atggcgtcgtctttctgcccaaaacaggctttatctttcaccaattcgacccaccaactccaccaatccagagcaattccacgtgacatacacgttcgtttccctgctcccgtctcttcaccttcttccaggtgtgggctgaagtcgaaagccaccacacgattgaaggtgttggcaacttctgccacgaaggtgatggatcactcgtccagtaaagcgagttcacaggctcctacagttgttgaagtggatctgggtactcggagctacccgatttatattggggctggacttcttgatcaacctgacctcctacaaagacatattcatgggaagagagtccttgtcgttactaacactacagttgcccctctatatcttgataaaactataagcgctttgacagatggaaaccctaatgttaccgtagaaagtgtcattttgccagatggtgagcaatttaaaaacatggaaactcttatgaaagtctttgataaagccatcgaatcaaggctggatcgtcgttgtacatttgtcgctctcggtggtggagttataggtgacatgtgtggttatgccgccgcttcctaccttcgtggagttaattttattcagatccccaccactgttatggcacaggtagattcttctgttggaggcaaaactggaataaaccatccacttggtaaaaatatgattggagcattctaccagccacaatgtgtgcttatagacacggataccctgaatactttaccagatagagaattagcatctggcctcgcagaagtaataaaatatggactcattagagatgctgagtttttcgagtggcaagaacagaatatgccattattattagcaagggaccccactgcatttacctatgctatcaagcgttcctgtgaaaacaaagcagatgttgtttctcaagatgagaaggaaagcggagtgagggcaactttgaacttgggtcatacctttggtcatgcagttgagactggcgttggctatgggcagtggcttcatggagaagcagttgctgctggaacggtcatggctgttgacatgtcacgccgtcttggttggattgatgactcactggtacagcgggtgcagaagatcttacaacaggcaaagctgccgacttcacctcctgaaactatgactgtggagatgttcaagtctatcatggctgttgataaaaaagtggcagatgggaaactaagacttatccttctaaaaggttcacttggtaactgtgtttttaccggtgattatgaccagaaggccctcgatgaaacactccgtgcattttccaaatcttaa

SEQ ID NO: 1051 - protein, 442 aa, Solanum lycopersicum
MASSFCPKQALSFTNSTHQLHQSRAIPRDIHVRFPAPVSSPSSRCGLKSKATTRLKVLATSATKVMDHSSSKASSQAPTVVEVDLGTRSYPIYIGAGLLDQPDLLQRHIHGKRVLVVTNTTVAPLYLDKTISALTDGNPNVTVESVILPDGEQFKNMETLMKVFDKAIESRLDRRCTFVALGGGVIGDMCGYAAASYLRGVNFIQIPTTVMAQVDSSVGGKTGINHPLGKNMIGAFYQPQCVLIDTDTLNTLPDRELASGLAEVIKYGLIRDAEFFEWQEQNMPLLLARDPTAFTYAIKRSCENKADVVSQDEKESGVRATLNLGHTFGHAVETGVGYGQWLHGEAVAAGTVMAVDMSRRLGWIDDSLVQRVQKILQQAKLPTSPPETMTVEMFKSIMAVDKKVADGKLRLILLKGSLGNCVFTGDYDQKALDETLRAFSKS

SEQ ID NO: 1052 - DNA, 1137 bp, Arabidopsis thaliana
  CDS (1)..(1137)
atgaacgaaccgcttaacgatcaacgctccatctcttctcccactgtcgtcgaggttgatcttggtgaccggagttatccgatctatatcggcgccggcttgcttgatcactcagaacttcttcaaaggcatgttcacggaaagagagtgcttgtggtcaccaatgatcgagttgctcctctctacctggacaagactatagatgctttaaccagaggaaatccaaacgtgacagtggaaagtgtaattttgcctgatggagagaaatacaaagacatggatactctcatgaaagtcttcgacaaggccattgagtctcgcctagatagacgatgtacatttgttgcccttggaggcggtgtgataggcgatatgtgtggatatgctgctgcatcgtacctacgtggtgtcaatttcatccaaattcctaccactgttatggcacaggttgattcttctgtaggtggcaaaacaggcataaatcatcgtcttggaaagaatttgatcggtgcattttaccaaccacagtgtgtgctagtagacactgacacgttgaacacattgccagatagggagatggcatcaggcctagctgaagtgatcaagtacgggcttatcagggatgccgagttctttgaatggcaggagaagaacattgaggcattgctggcaagggatccagctgcattagcttttgctataaagcgatcatgtgaaaacaaggcagacgttgtatcacaagatgagaaagaaagcggcttgcgagcaaccttaaatttgggtcatacctttggccatgccatagaaactggctttggttatggagagtggctccatggagaagctgttgcagctggcacggtaatggcagtggacatgtcatatcgtcttggttggatcgatgaatcgattgttaagagagtgaacaagatcctagtacgggcgaaattgcctacaactccgccagagagcatgaccgtcagcatgttcaagtccataatggcggtggacaagaaagtggcagatggactgctgaggctgattcttctcaaaggcccgctgggaaactgcgtgttcactggagattatgatcgggaagcgttggatgccacgcttcgtgcattctccaaatcctga

SEQ ID NO: 1053 - protein, 378 aa, Arabidopsis thaliana
MNEPLNDQRSISSPTVVEVDLGDRSYPIYIGAGLLDHSELLQRHVHGKRVLVVTNDRVAPLYLDKTIDALTRGNPNVTVESVILPDGEKYKDMDTLMKVFDKAIESRLDRRCTFVALGGGVIGDMCGYAAASYLRGVNFIQIPTTVMAQVDSSVGGKTGINHRLGKNLIGAFYQPQCVLVDTDTLNTLPDREMASGLAEVIKYGLIRDAEFFEWQEKNIEALLARDPAALAFAIKRSCENKADVVSQDEKESGLRATLNLGHTFGHAIETGFGYGEWLHGEAVAAGTVMAVDMSYRLGWIDESIVKRVNKILVRAKLPTTPPESMTVSMFKSIMAVDKKVADGLLRLILLKGPLGNCVFTGDYDREALDATLRAFSKS

SEQ ID NO: 1054 - DNA, 1089 bp, Acinetobacter sp
  CDS (1)..(1089): transl_table=11
atgcaaactctacacgttgaattaggcgatcgccgttatccgatatttattggtagtcagctaaatcctcagaatctactcgcaccttatatcaagggtcgtcaggtcatgattgtgaccaacaccacgttagaacaattatatttgcaacattatcaagatgcattacatgcacttgataagcaggtggcggtttgtgtattgcctgacggtgaaaaatataaaaatattgaacaccttaatctgatttttgatgcattgctaaaggctggcttcaatcgggactgtactgttttagctttaggtggaggtgtcattggggatatggctggctttgccgctgcgagttttcagcgcggtgtgtattttgtgcagatacctaccactttgttatctcaggtcgattcaagtgtaggtggtaaaacaggtattaaccatccacttggcaaaaatatgattggtgcatttaagcagcctgaagtggtcatggcagatatgtcacagttaaagactctgccaccacgtgaactttcagcaggcttggctgaggtcatcaagtatgcgctacttggggatattgagtttttaggctggcttgaaacgcatatggacggcctgattgcaggcgatgaaactttgttggccgaggctgtatatcgctcttgtgcacacaaagcccgaatagttgccaatgatgaaaaagagcagggcgaacgtgccttgctgaatctagggcatacttttggtcatgccattgagtcttatcttggctatggtgagtggctacatggtgaggcggttgcaacaggtatggtgatggcagcagatttatcacaccgtctgggctggatttcatcaggtgatcttgagcgtacaaaaaaaattatccagcgtgccaatttgccgatatcatgtccgccaattccactggatgagttcttgtcttacatgtcgcatgataagaaagtactcaatggacaattaagactggtattattgcaacagttaggacaagcaatcattaccaagacatttgatgttgagatgatgaaagcagcaattctagcaaatcaagcaagtcatacataa

SEQ ID NO: 1055 - protein, 362 aa, Acinetobacter sp
MQTLHVELGDRRYPIFIGSQLNPQNLLAPYIKGRQVMIVTNTTLEQLYLQHYQDALHALDKQVAVCVLPDGEKYKNIEHLNLIFDALLKAGFNRDCTVLALGGGVIGDMAGFAAASFQRGVYFVQIPTTLLSQVDSSVGGKTGINHPLGKNMIGAFKQPEVVMADMSQLKTLPPRELSAGLAEVIKYALLGDIEFLGWLETHMDGLIAGDETLLAEAVYRSCAHKARIVANDEKEQGERALLNLGHTFGHAIESYLGYGEWLHGEAVATGMVMAADLSHRLGWISSGDLERTKKIIQRANLPISCPPIPLDEFLSYMSHDKKVLNGQLRLVLLQQLGQAIITKTFDVEMMKAAILANQASHT

SEQ ID NO: 1056 - DNA, 1077 bp, Aeropyrum pernix
  CDS (1)..(1077): transl_table=11
gtggcacaggctgctgtagagaggagggtgttcaggctctcggttgatgaggagacggtggtggccgcgggtgtgggcgccctctccgaggccccccgcgccgccggggggacagcctatatagtgcatgaggaggccctctccgccgaggcagcaaggctggccaggatactggaggcccggggggtagaggtcctgggcgccgtggcggggggcggagagcgggtgaagagtctagactgggttacgaggctctgggacctcatgctccaggccggggtggagaggtcgacaaccgtctacataataggcgggggcgccctcctggacgccgcaggcttcgccgcgtcaacactcatgagaggcctatccacggttaacataccctccacgacactcgcagccttcgacgcggccgccgggggcaagaccggggtcaacctgagggggaagaacatggtgggcacgttccacaatcccaggatggtcctggtggagcctggcatagtggctgggcagccggatgagggctatagggacggcttcgccgagcttgttaagcacgtggccctctcgggcgacagggagcccgccgccagcctcctcccccaagccctcgccaggcggcccgccccgctggccaggctggccttctggagcctgggatacaagatgcaggtggtcgctggagacccgagggagaggggtttgaggaggatactaaacctgggccacaccataggccacgccctcgaggcggcctcaagctacacccttagccacggcaggtccgtctccataggcctggctggggagcttgagctcagcaggaggctggcaggcctcccccgcggtgaggctgaggatgtcctcgacatgctgtccacggcaggcctccccctagagccccctcccggcctggctggggaggccgcggggcttgtgggcctagacaagaagagggaggggggcagcatagtcatgccccttctggagaggctcgggaggcccaggctctccagggttccggtggagacggtctcccggctaatggtggagctgtggggcggggggtga

SEQ ID NO: 1057 - protein, 358 aa, Aeropyrum pernix
MAQAAVERRVFRLSVDEETVVAAGVGALSEAPRAAGGTAYIVHEEALSAEAARLARILEARGVEVLGAVAGGGERVKSLDWVTRLWDLMLQAGVERSTTVYIIGGGALLDAAGFAASTLMRGLSTVNIPSTTLAAFDAAAGGKTGVNLRGKNMVGTFHNPRMVLVEPGIVAGQPDEGYRDGFAELVKHVALSGDREPAASLLPQALARRPAPLARLAFWSLGYKMQVVAGDPRERGLRRILNLGHTIGHALEAASSYTLSHGRSVSIGLAGELELSRRLAGLPRGEAEDVLDMLSTAGLPLEPPPGLAGEAAGLVGLDKKREGGSIVMPLLERLGRPRLSRVPVETVSRLMVELWGGG

SEQ ID NO: 1058 - DNA, 1134 bp, Agrobacterium tumefaciens
  CDS (1)..(1134): transl_table=11
atgacgccttccgaaatccacgccgatgaacgtcttgtccatgtgccgctcggcgagcgcgcctatgacattctgatcgggccgggactgatcggcagggcgggcggcgaaatctcggcgcggctgaagggcagacgcgcggcgatcatcaccgacgagcatgtcgcgccgctttacctcgaaggcctgatggacggtttgcagacggatggcattgaggccgtttctctgacgctgccggccggagagaagaccaagagcttcgagcatctcgtcaccgtctgcgatgcggttctctccgcacgggtggagcgcaacgatgcggtgatcgcactcggcggtggcgtcatcggcgatctcgccggtttcgccgcaggcatcgtgcgccgcggcgtgcgcttcgtgcagataccgacctcgcttctgtcccaggtcgactcctccgtcggcggcaagaccggcatcaacacccgccacggcaagaaccttgtcggcgttttccatcagcctgatctggtgttggcggatacggcggtgctcgatacgctgagcccgcgggaattccgcgccggttatgctgaagtggtcaaatacggtttgatcgacaagccggatttcttcttctggctggaaaagaactgggatgacatccgcactggcggcccggcccgcatcgaggcgatcgccacgagctgccaggccaaggccgatgtggtggtggccgacgagaaggaaaacggcgtgcgcgcccttctgaacctcggccacaccttcggtcacgcgctggaggcggcgacgaattacgacagcaagcggctggtgcacggcgaaggtgtcgccatcggcatggtgctggcgcaccagttctccgcccgcctcaacctcgccagccccgatgatgccgcgcgtgtcgaggcgcatctgaaggccgtcggtctgccgaccacgatgaaggatattcccggcgaattgccgccggtcgaaaccttgatggcggcgattgcgcaggacaagaaggtcaagggtggcaagctcaccttcatccttacccacggcatcggccagtccttcgtggccgacgatgtggcgtcgtcggaggtgcagtccttcctgtcggagaagcatcctggctaa

SEQ ID NO: 1059 - protein, 377 aa, Agrobacterium tumefaciens
MTPSEIHADERLVHVPLGERAYDILIGPGLIGRAGGEISARLKGRRAAIITDEHVAPLYLEGLMDGLQTDGIEAVSLTLPAGEKTKSFEHLVTVCDAVLSARVERNDAVIALGGGVIGDLAGFAAGIVRRGVRFVQIPTSLLSQVDSSVGGKTGINTRHGKNLVGVFHQPDLVLADTAVLDTLSPREFRAGYAEVVKYGLIDKPDFFFWLEKNWDDIRTGGPARIEAIATSCQAKADVVVADEKENGVRALLNLGHTFGHALEAATNYDSKRLVHGEGVAIGMVLAHQFSARLNLASPDDAARVEAHLKAVGLPTTMKDIPGELPPVETLMAAIAQDKKVKGGKLTFILTHGIGQSFVADDVASSEVQSFLSEKHPG

SEQ ID NO: 1060 - DNA, 1092 bp, Anabaena sp
  CDS (1)..(1092): transl_table=11
atgacttctgtaattaatgtgaatctaccaacgcagtcttatgagattgcgatcgcacctgcaagtttagatcagattggtcaaagcttggctgggttaaaactgggcaagaaagtattactggtttctaatcccacgatttttaagcatttcggcaaagttgctgttgattccttagaagctgctggatttcaagtagcaagttattctttgccagccggggaacgctataaaacccttaactctattcaaaaactatacgatatagccctagaaaatcgcctagaacgctcctccacaatggtggctttggggggaggggtaattggtgatatgactggctttgccgccgctacttggctacgggggattaatgtggtgcaagtacctaccacactcttagcaatggtagattcggctattggtggtaagacaggtgtgaatcatccccacgggaaaaacttgattggtgcgttccatcagccgcgattcgtgttaattgatccccaagtattaaaaaccttgcctgtacgtgaatttcgcgcaggaatggcggaggtaattaaatatggcgtgatttgggatgcagaattattcaaccagttggaacagagtaagcgtctcgaccaactgcgctacatcaaaccagaactggtggatgctatcttaactcgttcttgccaagctaaagctgatgttgtcggcaaagatgagaaagaaggtggactgagggcgattttgaattacggacacactgttggtcatgcggtggaaagcttaactaactatcggctactcaaacatggtgaagcagtaggtatcggtatggtagcggctgggcaaatcgctgtaaatttagaactgtggcaacaagcagatgcagaccgtcaaaatgccttaattgaaaaagcgggtttaccgacaaagttaccagtgggattagatattgaagggattattgaggcattgcaattagataaaaaagtcaaagatggtaaagtacggtttgttttaccaactcaaattggtgtagtgacagttactgatgaggtgacatcagatcacattcggcaagttttacagcagatgtaa

SEQ ID NO: 1061 - protein, 363 aa, Anabaena sp
MTSVINVNLPTQSYEIAIAPASLDQIGQSLAGLKLGKKVLLVSNPTIFKHFGKVAVDSLEAAGFQVASYSLPAGERYKTLNSIQKLYDIALENRLERSSTMVALGGGVIGDMTGFAAATWLRGINVVQVPTTLLAMVDSAIGGKTGVNHPHGKNLIGAFHQPRFVLIDPQVLKTLPVREFRAGMAEVIKYGVIWDAELFNQLEQSKRLDQLRYIKPELVDAILTRSCQAKADVVGKDEKEGGLRAILNYGHTVGHAVESLTNYRLLKHGEAVGIGMVAAGQIAVNLELWQQADADRQNALIEKAGLPTKLPVGLDIEGIIEALQLDKKVKDGKVRFVLPTQIGVVTVTDEVTSDHIRQVLQQM

SEQ ID NO: 1062 - DNA, 1092 bp, Anabaena variabilis
  CDS (1)..(1092): transl_table=11
atgacttctgtaattaatgtgaatctaccaacgcagtcttatgagattgcgatcgcacctgcaagtttagatcagattggtcaaagcttggctgggttaaaactgggcaagaaagtattactggtttctaatcccacgatttttaagcattttggcaaagttgcggttgattccttagaagctgctggatttcaagtagcaagttattgcttaccagcaggggaacgctacaaaacccttaattctattcaaaaactctacgatatagccctagaaaatcgcctagaacgatcctcaacaatggtggctttggggggaggggtaattggtgatatgactggctttgccgccgctacttggctacgggggattaatgtagtgcaagtacccaccacactcttagcaatggtagattcggctattggtggtaagacaggtgttaatcatccccacgggaaaaacttgattggtgcgttccatcagccgcgatttgtgttaattgatccccaagtactaaaaaccttgcctgtacgagaatttcgcgcgggaatggcagaggtaattaagtatggcgtgatttgggatgcagaattattcaaccagctagaacaaagtaaacgtctcgaccaactgcgctacatcaagccagaattgatggatgctatcttaactcgttcatgtcaagccaaagctgatgttgtcggcaaagatgagaaggaaggtggactgcgtgcgattttgaattacggacacaccgttggtcacgcggtggaaagcttaactaactatcggctactcaaacatggtgaagcagtaggtatcggcatggtagcggctgggcaaattgctgtaaatttaggactgtggcaacaagcagatgcagaccgtcaaaatgccttaattgaaaaggcgggtttaccgacaaagttaccagccggattagatattgaagggattattgaggcattgcaattagataaaaaagtcaaagatggtaaagtacggtttgttttaccaactcaaattggtgtagtgacagttactgacgaggtgacatcagatcacattcggcaagttttacagcagatgtaa

SEQ ID NO: 1063 - protein, 363 aa, Anabaena variabilis
MTSVINVNLPTQSYEIAIAPASLDQIGQSLAGLKLGKKVLLVSNPTIFKHFGKVAVDSLEAAGFQVASYCLPAGERYKTLNSIQKLYDIALENRLERSSTMVALGGGVIGDMTGFAAATWLRGINVVQVPTTLLAMVDSAIGGKTGVNHPHGKNLIGAFHQPRFVLIDPQVLKTLPVREFRAGMAEVIKYGVIWDAELFNQLEQSKRLDQLRYIKPELMDAILTRSCQAKADVVGKDEKEGGLRAILNYGHTVGHAVESLTNYRLLKHGEAVGIGMVAAGQIAVNLGLWQQADADRQNALIEKAGLPTKLPAGLDIEGIIEALQLDKKVKDGKVRFVLPTQIGVVTVTDEVTSDHIRQVLQQM

SEQ ID NO: 1064 - DNA, 1083 bp, Azoarcus sp
  CDS (1)..(1083): transl_table=11
atgcgaacactgaacgtcgccctcggggaccgtgcctacccgatccatatcggaccgggcgtgctcgacaacgccggcctgatccggcctttcctcaggactgcgcgggtcgcgatcgtcacgaacgacgtcgtcggtccgctttacctggcgcggctgcagcgcgcgctcgaggcggacggcgtcagggtggacgtcgttacccttcccgatggcgagtcgcacaagaactggcagaccctcaatctcgtcttcgacatgctgctggcgacgcgctgcgaacgctcgacgacgctgatcgcgctgggcgggggcgtggtcggcgacatggccggattcgcggcggcgacctaccagcgcggcatgccgttcatccaggttccgacaacgctgctgtcgcaggtcgattcgtcggtcggcggcaagaccgcgatcaaccacccgctcggcaagaacatgatcggggcgttctatcagccccgcgtcgtgctcgcggacaccgcaacactcgacacgctgccggaccgcgagctgaaagccggcctcgccgaagtgatcaagtatgggctgatccgcgacccggcactgttcgactggctcgaagcgcacatcgagcgcgtgctcgcgcgcgaacccgaagcgctcgcgttcgcgatcgagcgttcgtgcgcgaacaaggccgaagtcgtcgcggcggacgagaccgaacagggcgagcgcgcgctgctcaatctcggccacacgttcgggcatgcgatcgagaccggcatggggtacggcaactggctgcacggcgaagccgtcgccgccggcacgatgatggctgcggagctgtcgcgcaggctgggctggctgagcgctgccgacgttgcgcgcatcgaagcgctgcacgtgcgcgccgggctgccggtgctcgggccgccgttgccggtcgcgacctatctcgagctgatggcgaacgacaagaaagtcgaggagggacgcctgcgcctggtcctgctgcgctcgatcggcaaggcggtgcttcatgcaggcgcggcgccggacgtgatcggcgcgtcgatcgaggcgcgttgcgggtga

SEQ ID NO: 1065 - protein, 360 aa, Azoarcus sp
MRTLNVALGDRAYPIHIGPGVLDNAGLIRPFLRTARVAIVTNDVVGPLYLARLQRALEADGVRVDVVTLPDGESHKNWQTLNLVFDMLLATRCERSTTLIALGGGVVGDMAGFAAATYQRGMPFIQVPTTLLSQVDSSVGGKTAINHPLGKNMIGAFYQPRVVLADTATLDTLPDRELKAGLAEVIKYGLIRDPALFDWLEAHIERVLAREPEALAFAIERSCANKAEVVAADETEQGERALLNLGHTFGHAIETGMGYGNWLHGEAVAAGTMMAAELSRRLGWLSAADVARIEALHVRAGLPVLGPPLPVATYLELMANDKKVEEGRLRLVLLRSIGKAVLHAGAAPDVIGASIEARCG

SEQ ID NO: 1066 - DNA, 1092 bp, Bacillus anthracis
  CDS (1)..(1092): transl_table=11
atgggaaacatacatattcaaacgaaatcaaaagaatatgatgtatatgtaggaaaagaatcgttgtcacatttgacaacaatcgttcaaaacatgcagccatctgtatcaaatattatgatcatttcagatgaagctgttgcatctttacatttacagacagttgtagacgcgttgcaaatagatcaaaaagtattttcattcgttgtaccgagtggtgaaaaagagaagtcctttgaaaatttctatgcggctcatacgtcagctcttgaaaataaattagatagaaattctttaattattgcacttggaggtgggatgattggagatttagctggttttgttgctgcgtcgtttatgcgtggaattcgctttgttcaagttccgacgactttattagctcacgatagcgcggtaggtgggaaagtagcaatcaatcatccgttaggtaaaaatatgataggtgcattccatcaaccggaagcagttgtatatcatacgccatttttacagtctcttcctgaaaaagagtggcgctcaggttatgcagaagtgataaaacatgctctaattggtgatgtaaagctatatcattggctaaaagaagaagtgcaaacattagcagatcttcgtgatgagaaattaatccatatattaatgaaggcaattcctgtaaaggcaaacattgtagcacaagatgaaacagaaaaaggtgtacgtgctcatttgaactttggacatacgttaggccatgctcttgaaaaagaactaggatatggaaatattactcacggtgacggagtagcggttggaatgttatttgctatattcttaagtgaacaagtgtataaggtgaatcttgcttatgaagagatgaagcagtggttcttgaattacggctatccaaaaatgccaagtgatttaagtgtagaacgcctcgtcgggttgatgaaacaagataagaaagcgaatgcagggacaattcatatggtacttatgcaggaatatggggtagtgaatgtcgtatctattcctgatgagactgttcatattgcgttagaggcatttcaaaaggatatggttgaaaaataa

SEQ ID NO: 1067 - protein, 363 aa, Bacillus anthracis
MGNIHIQTKSKEYDVYVGKESLSHLTTIVQNMQPSVSNIMIISDEAVASLHLQTVVDALQIDQKVFSFVVPSGEKEKSFENFYAAHTSALENKLDRNSLIIALGGGMIGDLAGFVAASFMRGIRFVQVPTTLLAHDSAVGGKVAINHPLGKNMIGAFHQPEAVVYHTPFLQSLPEKEWRSGYAEVIKHALIGDVKLYHWLKEEVQTLADLRDEKLIHILMKAIPVKANIVAQDETEKGVRAHLNFGHTLGHALEKELGYGNITHGDGVAVGMLFAIFLSEQVYKVNLAYEEMKQWFLNYGYPKMPSDLSVERLVGLMKQDKKANAGTIHMVLMQEYGVVNVVSIPDETVHIALEAFQKDMVEK

SEQ ID NO: 1068 - DNA, 1086 bp, Bacillus halodurans
  CDS (1)..(1086): transl_table=11
atgtcggttttgactgtccatacatcgtcaaaagtatataatgttacggtaaagtcgggggtgctatcgcagataggctcatacatagctcccctgcgcccttcggcgattctcatagtgaccgatgatcaagtggcagacctttatttggataccgtgaaatcaagcctgcataatcttgcccctttgcatgccgtcgtcttgccgaacggagaagagacgaaatcttttgataactattatgcgttgcaaaccgctgccctagagtatggacttgatcgaaagtcaatgattatcgcccttggcggaggggtaattggtgatttagctggttttgttgcggcgacctacatgcgcggaattgcttacgttcaagtgccaacgacgcttcttgcccatgatagcagtgtaggagggaaggtggctattaatcatcctcttggtaaaaacatgattggtgcgtttcatcaaccggaggcggttctttacgatccacaggtgtttgccaccttaccggagcgagagtggcgttctggttttgcagaagtggtgaagcacggattaattaaggatgccgcgttttatgcatggttacagaagtatattaacgatttttctcggattcaaggagaaatagccgaggagcttctgctccgttcgattcaagtaaaggccaatatcgtggcagcagatgaaaaagaaaaaggggaacgagccttattaaacctcgggcatacactcggacatgcgattgaagcggagctcggctacggaaaaatcactcacggcgaagcggttgttatcgggattatcttcgccatgaaactgagtgaaaaagtgtaccatcaatcgctaccgatccaagacctagaaaaatggctcaaatttcttggctatgaaacgaggattccaaaagggcttgatacaggtgccctcatcggaacgatgaaaaaggacaaaaaggtagagcgtggagtgatccgttttgtcttgcttgaggaagtgggtcatgctgtcatcaaagaggtagatgaacagctcatccgagagctattgaatgttgaaatagaggaggagacaacatga

SEQ ID NO: 1069 - protein, 361 aa, Bacillus halodurans
MSVLTVHTSSKVYNVTVKSGVLSQIGSYIAPLRPSAILIVTDDQVADLYLDTVKSSLHNLAPLHAVVLPNGEETKSFDNYYALQTAALEYGLDRKSMIIALGGGVIGDLAGFVAATYMRGIAYVQVPTTLLAHDSSVGGKVAINHPLGKNMIGAFHQPEAVLYDPQVFATLPEREWRSGFAEVVKHGLIKDAAFYAWLQKYINDFSRIQGEIAEELLLRSIQVKANIVAADEKEKGERALLNLGHTLGHAIEAELGYGKITHGEAVVIGIIFAMKLSEKVYHQSLPIQDLEKWLKFLGYETRIPKGLDTGALIGTMKKDKKVERGVIRFVLLEEVGHAVIKEVDEQLIRELLNVEIEEETT

SEQ ID NO: 1070 - DNA, 1092 bp, Bacillus thuringiensis subsp
  CDS (1)..(1092): transl_table=11
atgggaaacatacatattcaaacgaaatcaaaagaatatgatgtatatgtaggaaaagaatcgttgtcacatttgacaacaatcgttcaaaacatgcagccagctgtatcaaatattatgatcatttcagatgaagctgttgcatctttacatttacagacagttgtagacgcgttgcaaatagatcaaaaagtattttcattcgttgtaccgagcggtgaaaaagagaagtcctttgaaaatttctatgcggctcatacgtcagctcttgaaaataaattagatagaaattctttaattgttgcacttggaggtgggatgattggagatttagctggttttgttgctgcgtcgtttatgcgtggaattcgctttgttcaagttccgacgactttattagctcacgatagcgcggtaggtgggaaagtagcaatcaatcatccgttaggtaaaaatatgataggtgcattccatcaaccggaagcagttgtatatcatacgccatttttacagtctcttcctgaaaaagagtggcgctcaggttatgcagaagtgataaaacatgctctaattggtgatgtaaagctatatcattggctaaaagaagaagtgcaaacattagcagatcttcgtgatgagaaattaatccatatattaacgaaggcaattcctgtaaaggcaaacattgtagcacaagatgaaacagaaaaaggtgtacgtgctcatttgaactttggacatacgttaggccatgctcttgaaaaagaactaggatatggaaatattacgcacggtgacggagtagcggttggaatgttatttgctatattcttaagtgaacaagtgtataaggtgaatcttgcttatgaagagatgaagcagtggttcttgaagtacggctatccaaaaatgccaagtgatttaagtgtagaacgcctcgtcgggttgatgaaacaagataagaaagcgaatgcagggacaattcatatggtacttatgcaggaatatggggtagtgaatgtcgtatctattcctgatgagactgttcatattgcgttagaggcatttcaaaaggatatggttgaaaaataa

SEQ ID NO: 1071 - protein, 363 aa, Bacillus thuringiensis subsp
MGNIHIQTKSKEYDVYVGKESLSHLTTIVQNMQPAVSNIMIISDEAVASLHLQTVVDALQIDQKVFSFVVPSGEKEKSFENFYAAHTSALENKLDRNSLIVALGGGMIGDLAGFVAASFMRGIRFVQVPTTLLAHDSAVGGKVAINHPLGKNMIGAFHQPEAVVYHTPFLQSLPEKEWRSGYAEVIKHALIGDVKLYHWLKEEVQTLADLRDEKLIHILTKAIPVKANIVAQDETEKGVRAHLNFGHTLGHALEKELGYGNITHGDGVAVGMLFAIFLSEQVYKVNLAYEEMKQWFLKYGYPKMPSDLSVERLVGLMKQDKKANAGTIHMVLMQEYGVVNVVSIPDETVHIALEAFQKDMVEK

SEQ ID NO: 1072 - DNA, 1089 bp, Bacillus licheniformis
  CDS (1)..(1089): transl_table=11
atgaaatcacttcaaatcgaaaccgcttctttgtcctacccggtattcatcgggggaggcattagaaaaaacgcggcagagcttttgtcatccttgaaccttccgatgacgaaactgcttttgatcaccgacgaagaagttgataaacgctatggagaagagctgttcagtcttctccgcagcaaatggcccgtcaaaaaggttgcggtgccaagcggcgagcaggccaaatccatcgatatgtttatgaagctccagacggaagccattcaatttcaccttgaccgctcgtcatgcattgtggcgctgggcggcggtgttgtcggcgatcttgcaggattcgtcgcttcaacttttatgaggggcatcgattatgtgcaattcccaacgactctgctgtctcatgacagcgcagtcggagggaaagtggccattaatcacccgctcggaaaaaacttaatcggcgcttttcatcagccgaaggcggtggtatatgacaccgaatgcctgagcacgcttccggaaaaagaaatgcgttcaggtcttgcggaagtcattaagcacgcatttatccgtgatgaatctttcttgaacgaattgcttaaacttgattcaatagaagcgattacgaccggccagctcagtgaaatggtttacaaaggcatttcgattaaagcggaagttgtctcacaagacgaacgcgaacagggaatcagggcctatttgaacttcgggcatacgcttggccacgccgttgaagccgaatacggctacggagagatcacccatggcgatgccgtcgctttaggcatgcaatttgctttgtttgtcagcgagaaggtgctgaattgtcctgttgaccgtacgaaaatcgccgcctggctgaaaaatctcggctatccggaaagcgtgaaacgcgaagtttcaacagaagcccttatctatcgaatgatgaacgataaaaaaacacgcggaggcatcattcagtttgtccttctggataagatcggcagtgtgcggctgcactcctttaaagccgaagaaatcgaacgatggctgaatatgtggagattggagggagacaaatga

SEQ ID NO: 1073 - protein, 362 aa, Bacillus licheniformis
MKSLQIETASLSYPVFIGGGIRKNAAELLSSLNLPMTKLLLITDEEVDKRYGEELFSLLRSKWPVKKVAVPSGEQAKSIDMFMKLQTEAIQFHLDRSSCIVALGGGVVGDLAGFVASTFMRGIDYVQFPTTLLSHDSAVGGKVAINHPLGKNLIGAFHQPKAVVYDTECLSTLPEKEMRSGLAEVIKHAFIRDESFLNELLKLDSIEAITTGQLSEMVYKGISIKAEVVSQDEREQGIRAYLNFGHTLGHAVEAEYGYGEITHGDAVALGMQFALFVSEKVLNCPVDRTKIAAWLKNLGYPESVKREVSTEALIYRMMNDKKTRGGIIQFVLLDKIGSVRLHSFKAEEIERWLNMWRLEGDK

SEQ ID NO: 1074 - DNA, 1077 bp, Bacillus clausii
  CDS (1)..(1077): transl_table=11
atgtttgtagacattcacacctcttcaaaacaatacaaggctgaagtggggtcaggaattttgcgggaggcaggcaaaacgattgaagcgcttgccccggcttcttcctatttgatcgtttcagatgaaaatgtcgcaaaccgttatcttgatgtgttggtttcttctttttcaaaggagcctcatacgtttgtcgtgaaagcgggggaacaatcaaagtcttttcatgtgtatgagcagcttgccgctttttgtttggaaaaacagcttgaccgccagtcggttatcatcgcttttggaggcggcgttgttggcgatttggccgggtttgtagcggggacctatatgcgtggcgttcgctttattcaagttccaactactttgcttgcccatgattcaagcgttggcggaaaagtagcagtcaatttgcctgccgctaaaaatatgattggcgtttttcatcagcctgaagctgtcttgttcgacacagaattgttggcaactttgccggaacacgaatggcgttctggttttgcagaaatcgttaaacttggttttatagccgacgcttcttttttagcttggctgcgtgaaacagtgcctgcactaacaagtataaaagcagataatttgcaaaaaatggtggccaaggcgattgccatcaaagccgacattgttggcaaagatgaaaaagagcatggcatccgcgcccatttgaactttggtcatacactcgctcatgcgattgaagcagaactagggtatggaaagataacccatggcgaagcggtggcaatcggcatgcgttttgcttttcgtcttagcctccgttttacaaaagaggatttgcggcttgccgattatgaagagtggttttctgccctcggttatgaccttcgtttgccagcagggctttcagcacaacggttgcttgcccgtatgaaaagcgacaaaaaaacgaatgcaggaaagattgtcatggtgttgctcgctcagcttggagccgcctatacaaaaacagtcgatgaacatttgcttttagagttgttagaagaagaactgggaggaagatcatga

SEQ ID NO: 1075 - protein, 358 aa, Bacillus clausii
MFVDIHTSSKQYKAEVGSGILREAGKTIEALAPASSYLIVSDENVANRYLDVLVSSFSKEPHTFVVKAGEQSKSFHVYEQLAAFCLEKQLDRQSVIIAFGGGVVGDLAGFVAGTYMRGVRFIQVPTTLLAHDSSVGGKVAVNLPAAKNMIGVFHQPEAVLFDTELLATLPEHEWRSGFAEIVKLGFIADASFLAWLRETVPALTSIKADNLQKMVAKAIAIKADIVGKDEKEHGIRAHLNFGHTLAHAIEAELGYGKITHGEAVAIGMRFAFRLSLRFTKEDLRLADYEEWFSALGYDLRLPAGLSAQRLLARMKSDKKTNAGKIVMVLLAQLGAAYTKTVDEHLLLELLEEELGGRS

SEQ ID NO: 1076 - DNA, 1089 bp, Bacillus subtilis
  CDS (1)..(1089): transl_table=11
atgaagacactgcatgttcaaactgcttcctcgtcatatcctgtttttatcggacaaggtatcagaaaaaaggcttgcgaactattaacctctttaaacaggcctttaacaaggattatgtttgtcacggatgaagaagtggaccgcctgtatggtgatgaaatgctccatttgctgcaagaaaaatggcctgtgaaaaaagtgacggtaccgagtggagagcaggcaaaatccatggacatgtacacaaaattgcagagtgaagcgattcgttttcatatggatcgctcctcatgcatcatcgcattcggtggcggtgttgtaggggatcttgccggttttgtggctgccacttttatgcgcggcattgatttcatccaaatgcctacgacgctcttggcgcatgacagcgcagtcggaggaaaagtagccgtgaaccatccgcttggaaaaaatctaatcggtgcgttttatcagccgaaagccgtgctctatgatacagatttcctgcgttctctgcctgaaaaagagcttaggtccggaatggcagaagtgattaaacacgcttttatctatgacagagcgtttctggaggagctgctgaatatccactcactgcgtgatatcactaatgatcagctgaatgacatgatttttaaaggcatttcaattaaagcgtctgtcgttcagcaggatgaaaaagaagaggggataagagcttacttaaactttgggcatacgctcggccatgccgttgaggcggaatatggatatgggcagatcactcacggtgatgccgtagccctcggaatgcagtttgctttatatataagcgaaaagactgtaggctgtgaaatggacagaaaacgtttggtcagctggctaaaaagcctgggttatccaagtcaaatcagaaaagagacggaaacttcggttctcttgaaccgtatgatgaatgataagaaaacccgtggcgggaagattcagtttattgtgctcaacgaattagggaaagttgctgatcatacattttccagaaatgaacttgagagctggctgaacaaatggcgattggaggagacatcatga

SEQ ID NO: 1077 - protein, 362 aa, Bacillus subtilis
MKTLHVQTASSSYPVFIGQGIRKKACELLTSLNRPLTRIMFVTDEEVDRLYGDEMLHLLQEKWPVKKVTVPSGEQAKSMDMYTKLQSEAIRFHMDRSSCIIAFGGGVVGDLAGFVAATFMRGIDFIQMPTTLLAHDSAVGGKVAVNHPLGKNLIGAFYQPKAVLYDTDFLRSLPEKELRSGMAEVIKHAFIYDRAFLEELLNIHSLRDITNDQLNDMIFKGISIKASVVQQDEKEEGIRAYLNFGHTLGHAVEAEYGYGQITHGDAVALGMQFALYISEKTVGCEMDRKRLVSWLKSLGYPSQIRKETETSVLLNRMMNDKKTRGGKIQFIVLNELGKVADHTFSRNELESWLNKWRLEETS

SEQ ID NO: 1078 - DNA, 1134 bp, Bartonella henselae
  CDS (1)..(1134): transl_table=11
atgcaaaccaaaactgtcactgttaaagtagacaaacactgttacgatatcattattggttcaagtttggttgcaaaagctgctttgcagattaaacattctcttcacagaaaaagttttcatcaaacgcgtttagcaattgttacagatacaaatgttgcatctatccatttagagatattacaagaagaactcacaaaaaataaaattcatactgttccaattattgttgaagcaggagaacaatcaaaatcattctcaaccctgcaaactgtcattgataaaattcttgctgcacgtctagaaagaggtgattgcgttattgcttttggaggtggtgtcattggagacttaggagggtttgccgccagtattatacgtcgtggaatgaactttattcagatgcccacaacactgcttgcacaaattgactcctctgttgggggaaaaacaggcatcaatagccaatatggtaaaaatcttattggtactttttatcaaccacaatgcgtcattactgatactgaccttcttgatacactgccagcacgtgaatttcgcgctggttacgccgaaatggtcaaatatggtctcattaaccagcctgatttttttgaatggctagaaaaaaacggacaaaaagttttttccaatggtccaacacgaatacaagccattgtccgctcatgccaatttaaagcagacattgtagcgcgtgatgaatacgaaacaggagaacgcgcactcttaaatcttggtcatacatttggacacatgcttgaaacagcaaccgcctatgacccaaatcgtttaattcacggcgaagccgtagccattgggatgattctagcgcaccaattctctgctcaactcaatttaataagtccaacactcatacaacgcattaaaacacactttaaagctatgagattgcctacgcagttaaaggatatcccaggtaaattaccaaatgctgaaactctgatgactttcattgcccaagataaaaaagttttgcaaaatgatttaaccttcatcttaatacgtggacttggtcaatcatttattgcaaaaaatgtcccccgggaagcagttttaacctttctagaacaaaaattagcggaaattggttaa

SEQ ID NO: 1079 - protein, 377 aa, Bartonella henselae
MQTKTVTVKVDKHCYDIIIGSSLVAKAALQIKHSLHRKSFHQTRLAIVTDTNVASIHLEILQEELTKNKIHTVPIIVEAGEQSKSFSTLQTVIDKILAARLERGDCVIAFGGGVIGDLGGFAASIIRRGMNFIQMPTTLLAQIDSSVGGKTGINSQYGKNLIGTFYQPQCVITDTDLLDTLPAREFRAGYAEMVKYGLINQPDFFEWLEKNGQKVFSNGPTRIQAIVRSCQFKADIVARDEYETGERALLNLGHTFGHMLETATAYDPNRLIHGEAVAIGMILAHQFSAQLNLISPTLIQRIKTHFKAMRLPTQLKDIPGKLPNAETLMTFIAQDKKVLQNDLTFILIRGLGQSFIAKNVPREAVLTFLEQKLAEIG

SEQ ID NO: 1080 - DNA, 1095 bp, Blochmannia floridanus
  CDS (1)..(1095): transl_table=11
atgataaaaagaattattgttaatgtgaaaacaggaagttaccctattattatagggtatggtcttttaaataaggattttatgtcttattggactataaaaaatggtgatttagttgttattattactaatgatcgtgtagctcctatttatttaaatagattgtataattcatttaatgcatgtgagattgtaactgatcaatgtattttacctgatggtgaacaaaataaatctttaagtatgttaaataaaatattaactcagctgttatctaaaaattatgatcgagatactattttagttgctcttgggggaggtgtaattggagatttaacgggatttgcagcatctgtatatcaacgtggaatacgttttattcaagttccaacaacattgttagctcaagtggatgcatctattggaggtaaaaccggtgtaaatcatgtttttggaaagaacatgattggttcttttcatcagcctatatcggtgatggttgatttagattgtttatgtacattatctgaaaaagaatttagatctggtttatcggaaataattaaatatgctgttgctcttgactcagctttctttaattggttagaaaataatttagattatttgttaatgttgaatcctcagtctttaatgtattgtgtatatcgttgttgtgagttgaaaagatctatagttattatggatgaatttgatcaaggaataagaagcgtgttgaatcttggtcatacttatggacatgcgatagagtcctatttaggatatagtcaatggtctcatggggaagctatagcagcaggattaatgatggcagtgagtactgctttgcatataggaggattgattagttttcatgatgctattcgtattaaattgttattaaaacgtgctaatttgcctatttgtggtcctgaagaaatgaaacctcaggattatattaaatatatgatacgtgataaaaaatctagattgggaagaattaatttagttttacctaagtctataggaaaaacacaagtttttgtaaatgtcaatactgatgttattttaaatgctattgaaaatattgatatttga

SEQ ID NO: 1081 - protein, 364 aa, Blochmannia floridanus
MIKRIIVNVKTGSYPIIIGYGLLNKDFMSYWTIKNGDLVVIITNDRVAPIYLNRLYNSFNACEIVTDQCILPDGEQNKSLSMLNKILTQLLSKNYDRDTILVALGGGVIGDLTGFAASVYQRGIRFIQVPTTLLAQVDASIGGKTGVNHVFGKNMIGSFHQPISVMVDLDCLCTLSEKEFRSGLSEIIKYAVALDSAFFNWLENNLDYLLMLNPQSLMYCVYRCCELKRSIVIMDEFDQGIRSVLNLGHTYGHAIESYLGYSQWSHGEAIAAGLMMAVSTALHIGGLISFHDAIRIKLLLKRANLPICGPEEMKPQDYIKYMIRDKKSRLGRINLVLPKSIGKTQVFVNVNTDVILNAIENIDI

SEQ ID NO: 1082 - DNA, 1077 bp, Bordetella bronchiseptica
  CDS (1)..(1077): transl_table=11
atggacgttgtcgaggtcgccacgcccggtggcagttatcccatccatatcggccccggacgcctggatgcgctggacgcgtcgattccggccgacgcgacggccatcgccgtggtcaccaacccgaccgtggcgggcctgtacggcgcgcgcgtcgaggcggccctggcgcgcaccggcaagcgggtgctgcgcatcgagttgcccgatggcgaggcgcacaaggattggcagaccctgaacctgattttcgacgccctgctggaaaaccgcctggaccggcgcgccgtgctggtggcgctgggcggaggggtgatcggcgacatgacgggtttcgcggccgccgtatacatgcgcgggatccgcttcgtgcaggtgccgaccaccttgctggcgcaggtggattcgtcggtgggcggcaagaccgcggtcaaccacccgctgggcaagaacatgatcggcgccttctaccagccggtggcggtggagatcgataccgaggtgctgggcacgctgccggcgcgggaagtgtccgcgggactggccgaggtgatcaagtacggcctgatcctggatgccggtttctggcagtggtgcgaggacaacgtcggcgccttgcgcgcgctggagcccagggcgctggcctatgcgatccggcgctcgtgcgagctcaaggcgcaggtggtggggcaggatgagcgcgagtccggcctgcgcgccattctcaacctggggcataccttcggccatgcgatcgagtccggcctgggttacggcgagtggctgcacggcgaggccgtgggctgcggcatggtgcaggcggccgagctgtccaccctggcagcgggctttcccgccgccgatgtgcagcgggtgcgcgatctggtgcgcgagatcggctgccccacggtggcgccggacctgggcgccgagcgctggctggcgctgatgcaggtggacaagaagaccgaaggcggcgagatccgtttcgtgctgatgccgcgcataggccaggccttgagccgggcggcgccggaggcggacgtgcggaccgcgctggaacgaaccacgcgatga

SEQ ID NO: 1083 - protein, 358 aa, Bordetella bronchiseptica
MDVVEVATPGGSYPIHIGPGRLDALDASIPADATAIAVVTNPTVAGLYGARVEAALARTGKRVLRIELPDGEAHKDWQTLNLIFDALLENRLDRRAVLVALGGGVIGDMTGFAAAVYMRGIRFVQVPTTLLAQVDSSVGGKTAVNHPLGKNMIGAFYQPVAVEIDTEVLGTLPAREVSAGLAEVIKYGLILDAGFWQWCEDNVGALRALEPRALAYAIRRSCELKAQVVGQDERESGLRAILNLGHTFGHAIESGLGYGEWLHGEAVGCGMVQAAELSTLAAGFPAADVQRVRDLVREIGCPTVAPDLGAERWLALMQVDKKTEGGEIRFVLMPRIGQALSRAAPEADVRTALERTTR

SEQ ID NO: 1084 - DNA, 1149 bp, Bradyrhizobium japonicum
  CDS (1)..(1149): transl_table=11
atgactgcgccgttgaagcattccgatcccgtcaacgtcgacgtcgcgctcggcgatcgcgcctatgacatcgtcatcggccgcggcgtgctggcctcgctcggcgaacgggtcgcagcgctgcgccccggcgtgcgcacggctgttgtcaccgaccgtaccgttgcaaagcactggctcgagccgaccgaagcatcgctcgcggccgccggcatcccgacgtcgcgcatcgtcgtcgaggaaggcgagatctccaagacctatgccggcctggaaaaggtcagcgaagccctgatcgccgcgaagatcgagcgcaacgatctcgtcatcgcgctcggcggcggtgtggtcggcgatctcgccggctttgccgccgcgatcctgcgccgcggcgtcgatttcgtgcaggtgccgacctcgctgctggcgcaggtcgattccagcgtcggcggcaagaccggcatcaactcgccgcagggcaagaatctgctcggcgccttccaccagccggtgctggtcatcgccgacaccgccgtgctcgacacgctgtcgccgcgccagttccacgccggctatgccgaggtcgccaaatacggcgtgctcggcgatgaggccttcttcacctggctggaaaagaaccattccgacatcttcaagggcggatcagcgcgcgagcacgcgatcgccacctcctgccgtgccaaggccggaatcgtctcgcgcgacgagcgcgaaaccggcgaacgcgcgctgctcaatctcggccacacctttggtcacgcgctggaagctgcgaccggcttctccgaccgtctgttccacggcgagggcgtcgcgatcggcatgacgctagcggcgcagttctcggccaagctcggcatgatcggcgaggccgacgcggcgcgcgtcgagcggcatctcatcgaggccggcctgccgacccgcttgcaggacatcgcgggcttttcgcaggaagggcttgccgatgccgacgcgctgatggccctgatggcgcaggacaagaaggtcaagcgcggcaagctcaccttcatcctgctggaggcggtcgggcgcgccgtgatcgcaaaggacgtcgagccggccccggtgcgcgacttcctgaaagagaagctcgcgcagaaggcctga

SEQ ID NO: 1085 - protein, 382 aa, Bradyrhizobium japonicum
MTAPLKHSDPVNVDVALGDRAYDIVIGRGVLASLGERVAALRPGVRTAVVTDRTVAKHWLEPTEASLAAAGIPTSRIVVEEGEISKTYAGLEKVSEALIAAKIERNDLVIALGGGVVGDLAGFAAAILRRGVDFVQVPTSLLAQVDSSVGGKTGINSPQGKNLLGAFHQPVLVIADTAVLDTLSPRQFHAGYAEVAKYGVLGDEAFFTWLEKNHSDIFKGGSAREHAIATSCRAKAGIVSRDERETGERALLNLGHTFGHALEAATGFSDRLFHGEGVAIGMTLAAQFSAKLGMIGEADAARVERHLIEAGLPTRLQDIAGFSQEGLADADALMALMAQDKKVKRGKLTFILLEAVGRAVIAKDVEPAPVRDFLKEKLAQKA

SEQ ID NO: 1086 - DNA, 1137 bp, Brucella melitensis
  CDS (1)..(1137): transl_table=11
atgaatgcgcccacaaccgttgccgatagtgttaccgttccggtttcgctcggggatcgttcctacgatattctgatcggcaaggggcttgtcgagcgcgcgggcgaggaagtcgccaagcggctgaagggggttcgtgtcgccatcgtcaccgatgagaatgtggcggcagtgcatcttgagcgtttgcaggcaagctttgcacgggccggtatcgattccacgccggtgattgtcgcacctggagaaaaatccaaatcctttgcgacgcttgaaaccgtcaccaacgccattctggcggcaaagctggagcgtggcgatgcggtggtggcgttgggcggtggcgtggtgggcgacctttccggctttgttgcggggattgtgcggcgcggcatgaatttcgtgcaaatgccaacctcgcttcttgcacaggtcgattcctccgttggcggcaagaccggcattaataccgcccatggcaagaacctcgttggtgtctttaaccagccgcaactcgtgctggccgatacgcaggtgctcgatacgctgagcccgcgtgaattccgtgccggttatgcggaagtcgcaaaatatggcctgatcgaccgcccggatttcttcgcctggcttgaagcgaactggcaggaggttttctccggcggtgcggcccgcacaaaggctattgccgaatcctgccgctcaaaggctgcggtcgtggcgcgcgatgagcgtgaaaccggcgaccgcgccctgctcaatctcggtcatacattcggccatgcgctggaaagcgcaaccggctatgattccagccgtctcgttcatggcgaaggggtcgcgatcggcatggcgctggcatatcgcttttcggcccggatgaaccttgccggtattgaagcggcagagcgggtggaagcgcatctgaaagctgtcggcctgccggtttcgctggccgaggtgccgggcggcctgccgcccgcggaaaagctgatggattatatcgcgcaggacaagaaggtgacgcgcggtacgctgaccttcattctcacgcatggcatcggccagtccttcatcgcaaaggacgtaccgcctgctgccgtgctggaatttctgaaagagcgcctcgccatagcttag

SEQ ID NO: 1087 - protein, 378 aa, Brucella melitensis
MNAPTTVADSVTVPVSLGDRSYDILIGKGLVERAGEEVAKRLKGVRVAIVTDENVAAVHLERLQASFARAGIDSTPVIVAPGEKSKSFATLETVTNAILAAKLERGDAVVALGGGVVGDLSGFVAGIVRRGMNFVQMPTSLLAQVDSSVGGKTGINTAHGKNLVGVFNQPQLVLADTQVLDTLSPREFRAGYAEVAKYGLIDRPDFFAWLEANWQEVFSGGAARTKAIAESCRSKAAVVARDERETGDRALLNLGHTFGHALESATGYDSSRLVHGEGVAIGMALAYRFSARMNLAGIEAAERVEAHLKAVGLPVSLAEVPGGLPPAEKLMDYIAQDKKVTRGTLTFILTHGIGQSFIAKDVPPAAVLEFLKERLAIA

SEQ ID NO: 1088 - DNA, 1092 bp, Buchnera aphidicola subsp
  CDS (1)..(1092): transl_table=11
atgaaaattgtggaacgattgcaagttgttctaggagaacgcagttatcctattagtataggagctggtattattcaagaagatgatattttctggcctttaaaacccggagatcaagcaatgctagtgaccaataaaacactagctaatcttttgaaagataaagttttttatcatttaagaaaatccggaattaagatagatcaagtaattttatcagatggcgaacaatataaaacattaaatgagatggagttgattatttctgctttattagaaaaaaagcacgctcgtgatacaactttaattgcattaggtggaggtgtcataggtgatttagctggctttgctgcttctgtttatcagagaggtgtacgttttattcaaataccgactactcttttatctcaagttgatgcatctgttggtggaaagacagccgttaatcatttacttggaaaaaatatgattggctctttttggcaaccgtcttcagtgattattgatattgattgtctgaagaccctaccatataatgaattagtatctggtatggcagaagtaatcaaatatgctattgtttttgataaaacgtttttttgttggttagaagaaaacattgaatctattttatctcttaatcatacagccatgtcttattgtataaagaagtgttgtgaattaaaatcacaattaattgctttagatgaaagagaaaataatttaagagcattattaaaccttggtcatacatatggtcacgctattgaagttcacgcgggttatggcaattggcttcatggggaggcaatatcagtaggaatggttatggctgcacgtacatccgaattgctaggacacttaaaaacaatagattttaaaagaatacttgtattattaaaaagaaccggtctacccataaagggaccgaaaaacatgtctgctgcttcatatcttccctatatgatgagagataaaaaagtaatttcgggagaaatgagattagttttaccactttctattggaaaagcagaaatttatagcaatatagataaaaatattattttaaccgctattaaacattctcaataa

SEQ ID NO: 1089 - protein, 363 aa, Buchnera aphidicola subsp
MKIVERLQVVLGERSYPISIGAGIIQEDDIFWPLKPGDQAMLVTNKTLANLLKDKVFYHLRKSGIKIDQVILSDGEQYKTLNEMELIISALLEKKHARDTTLIALGGGVIGDLAGFAASVYQRGVRFIQIPTTLLSQVDASVGGKTAVNHLLGKNMIGSFWQPSSVIIDIDCLKTLPYNELVSGMAEVIKYAIVFDKTFFCWLEENIESILSLNHTAMSYCIKKCCELKSQLIALDERENNLRALLNLGHTYGHAIEVHAGYGNWLHGEAISVGMVMAARTSELLGHLKTIDFKRILVLLKRTGLPIKGPKNMSAASYLPYMMRDKKVISGEMRLVLPLSIGKAEIYSNIDKNIILTAIKHSQ

SEQ ID NO: 1090 - DNA, 1083 bp, Buchnera aphidicola subsp
  CDS (1)..(1083): transl_table=11
atggaacaattaaaagttgttttaggaaaacgtagctatcctattaatattggatctagtattattcaagaagataacatcttttggcctttaaatcctggaaatcaagctatgttaatcacaaataaaacattagctaatctttttaaagataaggttttttttcatttaagaaaatctggaataaaaatagatcaagtaattctttcagatggagaacaatttaaaacattaaatgaaatggaagtaattatttcagctttattagaaaaaaaacattctcgtgatacgaccttgatcgcattaggtggaggagtaataggtgatctaactggattttcagcatctatttatcagagaggtgtacgatttattcaaattcccactactcttttatctcaagtagacgcttctgttggtggaaaaactggagtcaatcatttacttggtaaaaatatggtgggttcgttttggcaaccctcttctgttattattgatatcaattttttaaaaactcttccgtacaatgaactggtttctggcatggcagaagttattaaatacgctgttatttttgacgcaaatttttttgaatggttagaagaaaacattgaaaatttattactattaaatgatgaactaatgtcttattgtattaaaaaatgttgcgaattaaaagcccaaataattgctcttgatgaaagagaaaataattttagagcattattaaattttggacatacatatggtcacgctattgaagcacatgctggttatggaagttggttacatggtgaagcgatttcagttggtatggtaatggcatctcgtacatcagaactaataggatgtttaaaaaaaacagattataaaagaatattgtctttattaaagaaagcagggttgcctgttaagggacctaaaaatatgtctgctgcttcatatttaccatatatgatgagagataaaaaagttatttctggagaaatgaggttagttctcccaatttctattggaaaagcaaaaatttattctggaatagataaaaatattattttaagtgccattaaagattctcaataa

SEQ ID NO: 1091 - protein, 360 aa, Buchnera aphidicola subsp
MEQLKVVLGKRSYPINIGSSIIQEDNIFWPLNPGNQAMLITNKTLANLFKDKVFFHLRKSGIKIDQVILSDGEQFKTLNEMEVIISALLEKKHSRDTTLIALGGGVIGDLTGFSASIYQRGVRFIQIPTTLLSQVDASVGGKTGVNHLLGKNMVGSFWQPSSVIIDINFLKTLPYNELVSGMAEVIKYAVIFDANFFEWLEENIENLLLLNDELMSYCIKKCCELKAQIIALDERENNFRALLNFGHTYGHAIEAHAGYGSWLHGEAISVGMVMASRTSELIGCLKKTDYKRILSLLKKAGLPVKGPKNMSAASYLPYMMRDKKVISGEMRLVLPISIGKAKIYSGIDKNIILSAIKDSQ

SEQ ID NO: 1092 - DNA, 1068 bp, Buchnera aphidicola subsp
  CDS (1)..(1068): transl_table=11
atggtaaatttaggaaaagatacatatccagtttatataggatctaatttattggaaataagtaatattttttttccaattgaatcgaacactcaagttgcaattattactaacgatgtagtattcaaaatttggaataaaaagattacatattatttgcataaattgggagcacaagtcaaaaacgttatcatatctgatggtgaaatttataaaaacattgatacagtagaaattattttatctactttattaaaatattcgtattgtcgagatgcagttttaattgcattaggaggaggagttattggtgacataactggttttgtggcttctatttatcaaagaggtattaaattcgtacagatacctacaacattattagcacaagtagatgcatctattggtggtaaaacttctgtcaatcatgttttgggaaaaaatatgattggttctttttggcaacctagttccgtaattataaattttgattttttaaatacgttacctagacgtcaattaatatccggaatagcggaaattgtaaaatatgctgtttcttttgacgtcaatttttttaattggttagaagaaaatttagagcgtgttttaaaattagattatagtgcgttatcttattgtattaatcgatgttgtgaaattaaaatcagtattgtagaaaaagatgaaaaagaaattcatgatagaatgttgttaaatttaggccatacgtatggtcatgctattgaaacgtttttgggatatggaacatggttacatggagaagctgtatcagtgggcattgttatggcttctaaaacgtcggagttattaggatttatgaaagacaatgatataactcgtattatatctttactacagagggtaggattaccaattagtggacctaaaaatatgagttttgaatcttatatttcaaattttaaaagagataaaaaagttatttcaggaaaattaagaatggttttaccagtttttattggtaatgttaaaattttttctaatgttcatgaaaatatattgatgtcagtaataaaaaattgttag

SEQ ID NO: 1093 - protein, 355 aa, Buchnera aphidicola subsp
MVNLGKDTYPVYIGSNLLEISNIFFPIESNTQVAIITNDVVFKIWNKKITYYLHKLGAQVKNVIISDGEIYKNIDTVEIILSTLLKYSYCRDAVLIALGGGVIGDITGFVASIYQRGIKFVQIPTTLLAQVDASIGGKTSVNHVLGKNMIGSFWQPSSVIINFDFLNTLPRRQLISGIAEIVKYAVSFDVNFFNWLEENLERVLKLDYSALSYCINRCCEIKISIVEKDEKEIHDRMLLNLGHTYGHAIETFLGYGTWLHGEAVSVGIVMASKTSELLGFMKDNDITRIISLLQRVGLPISGPKNMSFESYISNFKRDKKVISGKLRMVLPVFIGNVKIFSNVHENILMSVIKNC

SEQ ID NO: 1094 - DNA, 1080 bp, Burkholderia mallei
  CDS (1)..(1080): transl_table=11
atgattaccgtcaacgtcgacctgggcgagcgcgcctatccgatccacatcggcgccgatctgatcggccgcaccgagctgttcgcgccgcacatcgcgggcgcatccgtcacgatcgtcacgaacaccaccgtcgagccgctctacggcgacacgctgcgcgccgcgctcgcgccgctcggcaagcgcgtgtcgaccgtcgtcctgcccgacggcgaagcgtacaagaactgggaaacgctcaatctgatcttcgatggcctgctcgagcagcacgccgatcgcaagacgacgctgatcgcgctcggcggcggcgtgatcggcgacatgacgggcttcgcggccgcatgctacatgcgcggcgtgccgttcatccaggtgccgacgacgctcctgtcgcaggttgattcgtcggtcggcggcaagacgggcatcaaccatccgctcggcaagaacatgatcggcgcgttctatcagccgcaggcggtgatcgccgatatcggcgcgctgtcgacgctgcccgatcgcgagcttgccgcgggcgtcgccgagatcgtcaagacgggcgcgatcgccgatgccgcgttcttcgactggatcgaggcgaacgtgggcgcgctcactcgccgcgatcccgacgcgctcgcgcacgcggtcaagcgctcgtgcgagatcaaggcgggcgtcgtcgcggcggacgagcgcgagggcggtctgcgcgcgatcctcaattttggccatacgttcgggcacgcgatcgaagcggggctcggctacggcgagtggctgcacggcgaggcggtgggctgcggcatggtgatggcggccgacctgtcggtgcgaaccggccatctcgacgaagcgtcgcgcgcgcggctgtgccgcgtcgtcgaggccgcgcatctgccgacgcgcgcgccggatctcggcgacgcgcgttatgtcgagctgatgcgcgtcgacaagaaggccgaggcgggcgcgatcaagttcatactgctcaaacgcttcggcgaaacgatcatcactccggcgcccgacgacgccgttctcgcgacactggcggcaaccacccggtaa

SEQ ID NO: 1095 - protein, 359 aa, Burkholderia mallei
MITVNVDLGERAYPIHIGADLIGRTELFAPHIAGASVTIVTNTTVEPLYGDTLRAALAPLGKRVSTVVLPDGEAYKNWETLNLIFDGLLEQHADRKTTLIALGGGVIGDMTGFAAACYMRGVPFIQVPTTLLSQVDSSVGGKTGINHPLGKNMIGAFYQPQAVIADIGALSTLPDRELAAGVAEIVKTGAIADAAFFDWIEANVGALTRRDPDALAHAVKRSCEIKAGVVAADEREGGLRAILNFGHTFGHAIEAGLGYGEWLHGEAVGCGMVMAADLSVRTGHLDEASRARLCRVVEAAHLPTRAPDLGDARYVELMRVDKKAEAGAIKFILLKRFGETIITPAPDDAVLATLAATTR

SEQ ID NO: 1096 - DNA, 1080 bp, Burkholderia sp
  CDS (1)..(1080): transl_table=11
atgattactgtcaacgtcgatctgggcgaccgcgcctatccgattcacattggcgccggcctgatcggccgcgccgagttgttcgcgcctcacatcaagggctcgtccgtcacgatcgtcacgaacacgacggtcgatccgctttacggcgacgcgctgcgcgcggcgctcgcgccgctcggcaagcgcgtgtcgacggtcgtgctgccggacggcgaggcgtacaagaactgggaaacgctgaacctgatcttcgacggcctgctgaccgaccgcgcggaccgcaagacgacgctcgtcgcactcggcggcggcgtggtcggcgacatgacgggctttgcggccgcgtgctacatgcgcggcgtgccgttcatccaggtgccgacgacgctgctgtcgcaggtcgactcgtcggtcggcggcaagacgggcatcaaccacccgctcggcaagaacatgatcggcgcgttctaccagccgcaggccgtaatcgcggacatcggtgcgctcacgaccctgcccgaccgcgaactggcggccggtgttgccgagatcatcaagaccggcgcaattgccgatgcggaattcttcgactggatcgaggcgaacgtcgacgcgctgaaccgtcgcgacccggctgcgctcgcgcacgctgtgaagcgctcgtgcgagatcaaggcgagcgtggtggcggccgacgaacgcgaaggcggcctgcgcgcgatcctgaacttcggccacacgttcggccatgcgatcgaggccgggctcggctacggcgagtggctgcacggcgaagcggtcggctgcggaatggtgatggcgggcgacctgtcggtgcggctcggcctgctcgacgaagcgtcgcggcagcgcctcgatgcggtgatcgcggccgcgcacctgccgacccgcgggcctgcactcggcgacgcgcgctacctggacctgatgcgcgtcgacaagaaggcggaagccggcgcgatcaagttcatcctgctgaagcgattcggcgatacgctgatcacgcaggcgccggacgaagccgtgttcgctacactggcgcagacgacccactaa

SEQ ID NO: 1097 - protein, 359 aa, Burkholderia sp
MITVNVDLGDRAYPIHIGAGLIGRAELFAPHIKGSSVTIVTNTTVDPLYGDALRAALAPLGKRVSTVVLPDGEAYKNWETLNLIFDGLLTDRADRKTTLVALGGGVVGDMTGFAAACYMRGVPFIQVPTTLLSQVDSSVGGKTGINHPLGKNMIGAFYQPQAVIADIGALTTLPDRELAAGVAEIIKTGAIADAEFFDWIEANVDALNRRDPAALAHAVKRSCEIKASVVAADEREGGLRAILNFGHTFGHAIEAGLGYGEWLHGEAVGCGMVMAGDLSVRLGLLDEASRQRLDAVIAAAHLPTRGPALGDARYLDLMRVDKKAEAGAIKFILLKRFGDTLITQAPDEAVFATLAQTTH

SEQ ID NO: 1098 - DNA, 1056 bp, Campylobacter jejuni
  CDS (1)..(1056): transl_table=11
atgcaagtagaagttaagttaaaagaaaatgcttataaggtttatattgatgaacttgaagaattagaatttgatagtaaggtttttatactttcaaatcctaagatttcaggtcttcatttgaaaacattactttctaaaattaaggcaaaagaaatttttattgccactgtgaaagatggtgaagaatataaaaatttaagcaccatggaagaaattttaaaccaaatgtttaattctaaattggatagaaaaagcgtacttataagttttggtggtggcgtgattagtgatatgggcggatttgctgctagtatttatcaaagaggtattgattttataaatattcctactacacttttagcttgtgttgatgcagcagtaggtggaaaaacaggtgttaataataattttggtaaaaatcttattggcactttttatcaacctaaagctgtatattgtgagagtttttttttaaagactttgagctctagagaacttgctgcaggcatggctgaatttattaaaatggcagcaatgtttgattatagtatacttgattttatagaaaaaattgatgaaaaaagtttcttaaatgctacttgtgagaatgaaatttttactcagattatagcaaaaagcatagagcttaaatcaagggttgttgaacaagatgaaaaagaatcaaggcttagaatgcttttaaattatggtcatacttttgctcatgttatagaaaattttacagattataagctttatttacacggagaagcggtggctataggtatggttatggcaaatcaattggctttaaatttagggcttttggataaaatgcaaagtcaaagaataaaagatattttacttaaattcggtttgccaatatcatataaaatcaacaatgtagatgaattttatgaagcttttttcatggataaaaaaagctctaataaaaaaatcaattttgttcttgctagtcctttgggtaagggtttgataaaaggtgatatttctaaagaagatataattgcaactttaagagaattccaatga

SEQ ID NO: 1099 - protein, 351 aa, Campylobacter jejuni
MQVEVKLKENAYKVYIDELEELEFDSKVFILSNPKISGLHLKTLLSKIKAKEIFIATVKDGEEYKNLSTMEEILNQMFNSKLDRKSVLISFGGGVISDMGGFAASIYQRGIDFINIPTTLLACVDAAVGGKTGVNNNFGKNLIGTFYQPKAVYCESFFLKTLSSRELAAGMAEFIKMAAMFDYSILDFIEKIDEKSFLNATCENEIFTQIIAKSIELKSRVVEQDEKESRLRMLLNYGHTFAHVIENFTDYKLYLHGEAVAIGMVMANQLALNLGLLDKMQSQRIKDILLKFGLPISYKINNVDEFYEAFFMDKKSSNKKINFVLASPLGKGLIKGDISKEDIIATLREFQ

SEQ ID NO: 1100 - DNA, 1113 bp, Caulobacter crescentus
  CDS (1)..(1113): transl_table=11
atgatccgcaccgtccccgtgggcctgggcgagcgcgcctatgacgtcgtcatcgggcctggcctgctggatcaggccggcgagcgtgtcgccgccgtgctgggcaagcgcaagcgcgtcgccgtcgtcaccgacgcccatgtcggcgcccatcacggcgagcgtctctccgccgcgctgcaaggcgccgggatcaccgtcgacctcatcaccatcgcgcccggcgaggagagcaagagcttcgagggcctggccgatctctccgaccgcctgctggccttgaacctggagcgcggcgaccagatcgtggccctgggcggcggcgtcgtgggcgacctcgccggctttgcggcggcgatctacaagcgcggcatcgacttcgtgcaggtcccgaccaccctgctggcccaggtcgacagctcggtgggcggcaagaccgccatcgacaccccgcgcggcaagaacctgatcggggccttccaccagccgcgcctggttctggccgacctcgatgtgctggccaccctgcccgcccgcgagctggcctgcggctatgccgagatcatcaagtacggcctcctgggggacttcgccttcttcgaatggctggagaccaacgtccaggcggtgctggaccgcgacgtcgacgctctggtgcgcgccgtcggccgcagcgtcgagatgaaggccgagatcgtcgccgaggacgaaaaggaagccggacgccgcgcgctcttgaatctcggccataccttcggtcacgccatcgaggccgagatgggctttggcgaggcgctcaagcacggcgaggccgtcggggtgggcatggcccaggcgttccgcttctcggccaggctcggcctctgccccagccaggacgcggtgcgcgcgcaggcggccatcaaggccgccggcctgccgaccacgctggccgatgtgcgccccgagcccttcagcgccgacgccctgatcgctcactgcggccaggacaagaaggcgcaaggcggcaagctgaccttcgtgctggcgcgcggcatcggcgatgcgttcgtcgccaaggacgtcgatcgcgcggcgctgaaggcgttcctggttgaggaaggcgcggtctag

SEQ ID NO: 1101 - protein, 370 aa, Caulobacter crescentus
MIRTVPVGLGERAYDVVIGPGLLDQAGERVAAVLGKRKRVAVVTDAHVGAHHGERLSAALQGAGITVDLITIAPGEESKSFEGLADLSDRLLALNLERGDQIVALGGGVVGDLAGFAAAIYKRGIDFVQVPTTLLAQVDSSVGGKTAIDTPRGKNLIGAFHQPRLVLADLDVLATLPARELACGYAEIIKYGLLGDFAFFEWLETNVQAVLDRDVDALVRAVGRSVEMKAEIVAEDEKEAGRRALLNLGHTFGHAIEAEMGFGEALKHGEAVGVGMAQAFRFSARLGLCPSQDAVRAQAAIKAAGLPTTLADVRPEPFSADALIAHCGQDKKAQGGKLTFVLARGIGDAFVAKDVDRAALKAFLVEEGAV

SEQ ID NO: 1102 - DNA, 1122 bp, Chlamydia muridarum
  CDS (1)..(1122): transl_table=11
atgatagaactcatcacagataaaccccaccctatgcacttagtagattccctgtgcgatccccagctatttgctaccttagcaaaaacttctcctttgatttttatcaccaattctacgctagaaatactcgtactcccgcctttattagaaacggctcgctcattaggattttctgtagaaatccttatcattccagaaggagaacaggcaaaaacagaaaccaccttcctctatttgcataaacagctagcaactcttactatccctaggcaagctactcttattggtgttggaggtggcgttgttttggatattgtaggatttgtagcctctacacattgtcgaggcatgcctttcattgccgtacccacaaccctagttgctatgatcgatgccagtattggggggaaaaatggaatcaatttggatcatattaaaaatcgcattggctctttttatttacctaaagatgtatggatttgcccctctgtgctctcttctcttcctgaacaagaattttatcatggaatagctgagtgcatcaaacatgcctatatagcggatgcttctattctccctatccttcaaaatccagcttctttacgctccacgaaacaactgtctcttctcatcaaacgcaactgtctttgtaaggcctctatagtgggaaaagatattagagatcatggaatacgtcagattttaaattttgggcatacgttaggacatgctttggaaatgctatttacagggaaaatttctcatggttttgctataagcgtgggaatggttctggaaacgaaactttctctagccatgggagtcgctcgcaacccaaatatcttacattttttagttcaggatctcctgagataccaacttcctacttctttgaaagatctgtacgcacaagctcaaattcctattcacagttgtagtcaaattctttctgctctcagctatgataagaaaaaacaaaatgcctctttacctcctttcgttatgatagaagagatcggactcgcagcctcttgtaatggtagtttctgccaacctgcatctaatcattttcttacacacattttaaaggaagatctccatgctatgcacgatcattag

SEQ ID NO: 1103 - protein, 373 aa, Chlamydia muridarum
MIELITDKPHPMHLVDSLCDPQLFATLAKTSPLIFITNSTLEILVLPPLLETARSLGFSVEILIIPEGEQAKTETTFLYLHKQLATLTIPRQATLIGVGGGVVLDIVGFVASTHCRGMPFIAVPTTLVAMIDASIGGKNGINLDHIKNRIGSFYLPKDVWICPSVLSSLPEQEFYHGIAECIKHAYIADASILPILQNPASLRSTKQLSLLIKRNCLCKASIVGKDIRDHGIRQILNFGHTLGHALEMLFTGKISHGFAISVGMVLETKLSLAMGVARNPNILHFLVQDLLRYQLPTSLKDLYAQAQIPIHSCSQILSALSYDKKKQNASLPPFVMIEEIGLAASCNGSFCQPASNHFLTHILKEDLHAMHDH

SEQ ID NO: 1104 - DNA, 1143 bp, Chlamydia pneumoniae
  CDS (1)..(1143): transl_table=11
atgatgtcagagacaataattacgactccccatgtagtgaaactcatatccaacttcttccagaagaagttgttctcttctatatccacagcgtatcccttagtcattattacagacgtttcagtacaacagcatctcctaggtcctatcttagaccatattaaaatgttaggatatcaagtcattgtcctaacctttcctcctggagaacctaacaaaacctgggaaacattcatatctctacaatatcagcttgtagatcagaatatctctccgaaatcttcaattattggaattggaggggggactgttttagatatgacaggatttttagctgctacatattgtcgagggctccctctatatctaattcccacgacgatcaccgcaatggtagatacgagtatcggggggaaaaatggaatcaacttacgaggaatcaaaaatcgactggggacattctacttacccaaggaagtatggatgtgtcctcagttcctctctacactcccaagagaagaatggtatcatggaattgcagaagcaataaaacatggattcatcgcggatgcttatctctgggaatttctaaatagccatagtaaaatgctattttcttcatcgcagatcctccacgagttcatcaaaagaaactgccaaatcaaagcggcgattgtcgctgaagatccctatgaccgaagtctgagaaaaatcctaaacttcggtcactccatagcccacgctatagaaaccctggcaaaaggaacggtaaatcatggccaagccgtaagtgtcggtatgatgatagaaacaagaatatctcttgctgaaggagttatgaaaaccccacaactcatagaccaacttgaaagactcctaaaacgatttaatctcccttctactttgaaagatttacaatctattgttccggaacatctccacaacagcttgtatagtcctgaaaatatcatctacactttaggatacgataaaaaaaatctttctcaacacgaactaaaaatgatcatgatagagcatctaggtcgtgcagctccctttaatggtacctattgtgcatctccaaatatggagattctctatgatatactatggagtgagtgtcatgttatgcgccactgttag

SEQ ID NO: 1105 - protein, 380 aa, Chlamydia pneumoniae
MMSETIITTPHVVKLISNFFQKKLFSSISTAYPLVIITDVSVQQHLLGPILDHIKMLGYQVIVLTFPPGEPNKTWETFISLQYQLVDQNISPKSSIIGIGGGTVLDMTGFLAATYCRGLPLYLIPTTITAMVDTSIGGKNGINLRGIKNRLGTFYLPKEVWMCPQFLSTLPREEWYHGIAEAIKHGFIADAYLWEFLNSHSKMLFSSSQILHEFIKRNCQIKAAIVAEDPYDRSLRKILNFGHSIAHAIETLAKGTVNHGQAVSVGMMIETRISLAEGVMKTPQLIDQLERLLKRFNLPSTLKDLQSIVPEHLHNSLYSPENIIYTLGYDKKNLSQHELKMIMIEHLGRAAPFNGTYCASPNMEILYDILWSECHVMRHC

SEQ ID NO: 1106 - DNA, 1107 bp, Chlorobium tepidum
  CDS (1)..(1107): transl_table=11
atgcagactccgtccagccatatcatcgtcagaacgccggtcatcgactccgtcggtgaactctacgccacaaggggactcggcaagaaaaccgtgctgcttttcgacgagaacacccgcaggcttttcggcgacgcgatcatcgaatcgatgcagcgccaaggcttccgcaccatcgagctggtcgtgcccgcacgcgagacctcgaaaagcgtttcgacggcatggaaactctatggacagatgatcgaggcggacgttgaccggagctggaacctgctctgcgcaggcggcggagtggtaggcgacctcggcggctacatcgcggcaagctactaccgcggcattccggtggtgcagctcccaacgacgctgctcgccatgaccgacagctccattggcggcaaggtggccatcaaccacccgctcggcaaaaatctcatcggcttcttccatatgccggagctggtgctgatcgaccccgcctacctcaggacactcccctctcgtgaaatttacggaggcatgtcggaagtggtgaagtacggattcatcgctgaccgggagtttttcgacctgcttaccaaacattgggacgaggtggtacgcctcgaagaaccttggctctccaaagcggtcagccgcagcgctttcatcaaggccaacgtggtggaaaaggatttccgcgaaacctctggactgcgagcgacgctgaacttcggccacaccttcgcgcacggcctcgaaaagatggccgggtaccgcaacctgcgccacggcgaggcagtcaccatcggcatggtctgcgcgctcttcctttcgcaccggccgggattcctcgccgaagctgatctgcgcgaaggactcgcgctgctcgcccgcttccgcttcccgcgcggcctggtcaacaagcgcttcctttcactcgaccgcgacgagctggtggagagtatgctctccgacaaaaagaagatcgacaagcagctccgcttcgtcctgctcgaccgcatcgggcacgctttcctgcacgacaaggacatcacaaaaaccgatgtgctgcaggcaattgacgatgcaatggggtggttctcttcagcagggttttaa

SEQ ID NO: 1107 - protein, 368 aa, Chlorobium tepidum
MQTPSSHIIVRTPVIDSVGELYATRGLGKKTVLLFDENTRRLFGDAIIESMQRQGFRTIELVVPARETSKSVSTAWKLYGQMIEADVDRSWNLLCAGGGVVGDLGGYIAASYYRGIPVVQLPTTLLAMTDSSIGGKVAINHPLGKNLIGFFHMPELVLIDPAYLRTLPSREIYGGMSEVVKYGFIADREFFDLLTKHWDEVVRLEEPWLSKAVSRSAFIKANVVEKDFRETSGLRATLNFGHTFAHGLEKMAGYRNLRHGEAVTIGMVCALFLSHRPGFLAEADLREGLALLARFRFPRGLVNKRFLSLDRDELVESMLSDKKKIDKQLRFVLLDRIGHAFLHDKDITKTDVLQAIDDAMGWFSSAGF

SEQ ID NO: 1108 - DNA, 1080 bp, Chromobacterium violaceum
  CDS (1)..(1080): transl_table=11
gtgatcaccctcgacctgatcctgcccgacacccgatacccgatacacattggccacggacttctggaacaggtcgacctgctgctaccccacctgccgctgcccaaggcggccatcgtcagcaacgccaccgtggccccgctgtacctgcagcggctgcaacaggcgctggaagcgcgcggcgtggcctgctccagcgtagtgctgcccgacggcgagcagcacaaggactggcagacgctcaacctgatcttcgacgcgctgctgtccggcaacgccgagcgcaagaccacgctgatcgcgctgggcggaggcgtgatcggcgacatgaccggcttcgccgccgcctgctaccagcgcggcgcgcccttcatccagattcccaccacgctgctcgcccaggtggactcctcggtcggcggcaagaccgcgatcaaccacccgctgggcaagaacatgataggcgccttctaccagcccaaagcggtgatcgcggacatggagctgctcgccacgctgcccgaccgcgaactatcggccggcttggccgaggtgatcaaatacggcctgctcggcgacgccggcttcctcgcctggctggaagccaatatggccaagctgcgcgcgcgcgacggcgacgcgctgcagtacgcggtgaaacgcagctgcgaaatgaaggccgccatcgtcgccgaggacgaaaaggaaaacggcgttcgcgcgctcctgaacctgggccataccttcggccacgccatcgaggcgggcatgggctacggcgcctggctgcacggcgaagcggtggctgccggcatggttctggccgcggcggcgtccgccgagctcggctggatcggccgggacgaggccgaacgcgtgcgtcggctgatcgccgccgccggactgccggtcaaggcgccctccatgccaaccgaacaatggctgaacctgatgagccacgacaagaaggtggaggcgggcaccgtgcgcttcgtattgttgcgcgagctgggccaggccgtgataaagtcggggttggacaccgccttgctggacaagattctgcgcgaaaacagctga

SEQ ID NO: 1109 - protein, 359 aa, Chromobacterium violaceum
MITLDLILPDTRYPIHIGHGLLEQVDLLLPHLPLPKAAIVSNATVAPLYLQRLQQALEARGVACSSVVLPDGEQHKDWQTLNLIFDALLSGNAERKTTLIALGGGVIGDMTGFAAACYQRGAPFIQIPTTLLAQVDSSVGGKTAINHPLGKNMIGAFYQPKAVIADMELLATLPDRELSAGLAEVIKYGLLGDAGFLAWLEANMAKLRARDGDALQYAVKRSCEMKAAIVAEDEKENGVRALLNLGHTFGHAIEAGMGYGAWLHGEAVAAGMVLAAAASAELGWIGRDEAERVRRLIAAAGLPVKAPSMPTEQWLNLMSHDKKVEAGTVRFVLLRELGQAVIKSGLDTALLDKILRENS

SEQ ID NO: 1110 - DNA, 1122 bp, Clostridium tetani
  CDS (1)..(1122): transl_table=11
ttgagtgagattttttataatatagttagaagagtcaggagggatacaatgagggaaattgaagttgaaggtgataatagatataaaatatatatagatacaaatttagacaaattatataaagcttttgaagattacaaaataaagtctaatagtgaaatgtttttaattactgatgataaagtatactcaatatataaagatagaatagaaatgttaaagaatatttacaatataaaagagttttatttcaaaaatggagaggagaataaaacccttgaaactcttcaagaaatttattcttttttaatggaaaataacgctaaaagaaatagtattataattgcattaggtggaggagttgtaggagacttagtgggttttgtggcatctacttatatgaggggagtaagatatataaatattccaactactcttttatctcaaatagatagttgtgtaggtggaaaagtaggttataattataaggggataaaaaatttaataggaagtttttataacccggaattcgtatttatttccactaactttttaaaaacattagattttcaacggtttaaagatggtttaggggaagttattaaatatgggttgatattagatgaagaaataataagttttatagaagaaaattacaaaggtgttttagaaaaagaaagtgataaattactttatataactagaacctgtttaatattaaaaaaacaagttatagaaatggattataaagacttaggatttagaaacattttaaactttggtcatactataggacatgccattgaaatgacctctaaaaataaaataactcatggtgaagcggtagcactgggaatgcttgtatcactaaaactttctgaacatatttatggtttagataaaaatttatattatagaatggaaaaattatataagaaattaggattacctactaagtataaagttgacaattataatttatttatgtatgctattaatcatgataaaaaaaataaggataatattaggtttgttttgttaaaggatgtagaaaaacctgaagttaaaatagaggtaaataaagaagaaatattaaaggctatagaagaaagcattaattaa

SEQ ID NO: 1111 - protein, 373 aa, Clostridium tetani
MSEIFYNIVRRVRRDTMREIEVEGDNRYKIYIDTNLDKLYKAFEDYKIKSNSEMFLITDDKVYSIYKDRIEMLKNIYNIKEFYFKNGEENKTLETLQEIYSFLMENNAKRNSIIIALGGGVVGDLVGFVASTYMRGVRYINIPTTLLSQIDSCVGGKVGYNYKGIKNLIGSFYNPEFVFISTNFLKTLDFQRFKDGLGEVIKYGLILDEEIISFIEENYKGVLEKESDKLLYITRTCLILKKQVIEMDYKDLGFRNILNFGHTIGHAIEMTSKNKITHGEAVALGMLVSLKLSEHIYGLDKNLYYRMEKLYKKLGLPTKYKVDNYNLFMYAINHDKKNKDNIRFVLLKDVEKPEVKIEVNKEEILKAIEESIN

SEQ ID NO: 1112 - DNA, 1065 bp, Colwellia psychrerythraea
  CDS (1)..(1065): transl_table=11
atggcaattcttaatcttgatctaggcgaacgtagttatcctatctatattgattcaggtctgataaataaaacagacctgctctcttctcatattcgtgcgaaacgagtgtgtattgtaacaaacgatattgttgcacctttatatctagactcattaaaagcgaagttaaccgactttgaagtcgatgaagtcatactccctgatggtgaagctgagaaaaatttagctaattttgaggttattatttcccacctgcttactcttgagcacggcagagatacaactttgattgcattaggtggtggagttattggtgatataactggttttgctgctgcatgttatcagcgtggaattgattttatacaaattccgacaagcctgctttcacaagttgattcatcagtaggtggcaaaacagcagtaaatcatccactaggtaaaaatatggtgggcgcattttaccagcctaaagctgtatttattgatattgatagccttactactttaccaattcgcgagtttaatgcgggaatggctgaagttattaagtatggtattttaggtgataaagagtttttcttatggcttgaagataatatttcagccattaaagcgggtgaaaaacaagttttagcacaaatgatagaaaagtgctgtcaatgtaaagctgatatagtcgctagtgatgagaaagaatcaggagttagagcactgctgaatctaggtcatacttttggtcatgctattgaagccgagcaaggttatggaaaatggttgcatggtgaagctgtagctactggcatggtacttgctgctaaattagcattagcaatgaatttgcttgaagtgtcagaatttcgacgtatagaaaaattaatttcagcgtttgatttacccataacggctcctaaaaacatgggcttcgctgagtttattcgtcatatgcgtagagataaaaaaaatatcgccggtaagctgagatttataataccaacagctattggtcaatctgaaattcgtgacgatgtcactcaagatacgcttcaagaaattctataa

SEQ ID NO: 1113 - protein, 354 aa, Colwellia psychrerythraea
MAILNLDLGERSYPIYIDSGLINKTDLLSSHIRAKRVCIVTNDIVAPLYLDSLKAKLTDFEVDEVILPDGEAEKNLANFEVIISHLLTLEHGRDTTLIALGGGVIGDITGFAAACYQRGIDFIQIPTSLLSQVDSSVGGKTAVNHPLGKNMVGAFYQPKAVFIDIDSLTTLPIREFNAGMAEVIKYGILGDKEFFLWLEDNISAIKAGEKQVLAQMIEKCCQCKADIVASDEKESGVRALLNLGHTFGHAIEAEQGYGKWLHGEAVATGMVLAAKLALAMNLLEVSEFRRIEKLISAFDLPITAPKNMGFAEFIRHMRRDKKNIAGKLRFIIPTAIGQSEIRDDVTQDTLQEIL

SEQ ID NO: 1114 - DNA, 1098 bp, Corynebacterium efficiens
  CDS (1)..(1098): transl_table=11
gtgcacgtgaccaccatcttcgataccgtccccgtcaatggcgcatccccctatgaggtcgtgatcggttccgggctcaccccgctcatcgccgagcgtgcggccgggtccggcgcgacccaggtggccctgctccaccagccggcactcgcggaggtcgccgctgacatcgacggggccctgcaggcagcaggtctgcaggtgctccacctcgaggtccccgacgccgagtccggcaagaccctcgccgtggcgggggagtgctgggacaagctcggtgccgccgccttcgggcgtcgtgacatcatcatcggcctcggtggtggggcggcgaccgacctggcggggttcgttgcggcagcatggatgcgtggcgtccgggtgatccaggtgcccaccacggtgctcggcatggtcgatgccgccgtcggtggcaagaccggcatcaacaccgccgccgggaagaacctggtgggggccttccatgaaccggatgccgtcttcatcgacctggaccggttgcacacccttccggatgaggagatcatcgccggctccgcggagatcatcaaaaccggtttcatcgccgatgaggagattctgcggctctatgagtccgacgcatccgcctgtctgcagagggagattgacggttcccacctgccggagctcatcgcacggtcggtaagggtgaagggatcagtggtcagcgcggatctgaaggaatccaatctgcgtgagatcctcaactacgggcacaccttcgcccacgccgttgaactgcgggaggatttccagtggcgtcacggcaacgcggtggcagtgggcatgatgttcatcgccaacctctcgtacaacctcggcctcatcgatgccgacctgctggagcgccaccgcgtgatcctggattccatcggtctgcccaccacctaccaaggtggggtgttcgatgaactctacgagggaatgacccgggacaagaagaaccgcgacggcaatatccgcttcgtggcgctcaccgccgtcggtgaggtcacccgcatcgagggacccgaccgcggggaactgatccgggcttacgaggccatcagcagctag

SEQ ID NO: 1115 - protein, 365 aa, Corynebacterium efficiens
MHVTTIFDTVPVNGASPYEVVIGSGLTPLIAERAAGSGATQVALLHQPALAEVAADIDGALQAAGLQVLHLEVPDAESGKTLAVAGECWDKLGAAAFGRRDIIIGLGGGAATDLAGFVAAAWMRGVRVIQVPTTVLGMVDAAVGGKTGINTAAGKNLVGAFHEPDAVFIDLDRLHTLPDEEIIAGSAEIIKTGFIADEEILRLYESDASACLQREIDGSHLPELIARSVRVKGSVVSADLKESNLREILNYGHTFAHAVELREDFQWRHGNAVAVGMMFIANLSYNLGLIDADLLERHRVILDSIGLPTTYQGGVFDELYEGMTRDKKNRDGNIRFVALTAVGEVTRIEGPDRGELIRAYEAISS

SEQ ID NO: 1116 - DNA, 1083 bp, Coxiella burnetii
  CDS (1)..(1083): transl_table=11
atgaaaacagaacgcgttaatgtcaatgttaacaaccaaccctaccctatatacataggagaaaatcttctgcaagataaatcgttgcttcaacgtcacgtaaaaggacgacaagtgatgattgttagcaatgaaacgatagccgctttttacctcgatccccttaaagccatttaccaagattttcaatgcgatacttttattttgccggatggcgagcaatataaaacgcttgaatattgggagcatattcttcataaactcgcttcatgcaaccaccatcgtgatacgacgttgattgcgcttgggggcggggtcgtaggcgatattacgggatttgcagccgcctgttatcagcgcggtgttgattttattcaagtcccgacgactttgttagcacaggtagatgcctctatcggcggtaaaacagccgttaatcatcccgtcggaaaaaacctcatcggtgcttttcatcaacctaaagcggttattattgatcttaatacgcttaacactttacccgaacgtgaatttaaagcggggatggctgaaattgtcaaagcagcgcttattaaagatgaaaaattttttactgatttagagaataaaatgtcggacttgctgcaacgcaattttatctttttgcaagccgttattaagcgcgcagcggaaattaagcgcgatatcgtgaatgcggacgaaaaagaaagaagtggcgaacgggctttattgaacctcggccatacattcgctcacgccattgagcgattgcttggttacggccagtggttacacggcgaagcagtctcagcggggctcgtgctcgccgctcaattgtcacatcgtaaaaacttacttgattttgagtccttacaacgaatttgtcgtctgcttacccaaatttctctgccgattcattttcccaaaagcatcaatgcggatgaattattatcggctatgtatatggataaaaaggtagccaacgaacgcttgcatctaattctgttggaggaccttggacatgctgtcgtttctgatcaagtcgatgatcgagagttgaagtcctttttggagaatggttga

SEQ ID NO: 1117 - protein, 360 aa, Coxiella burnetii
MKTERVNVNVNNQPYPIYIGENLLQDKSLLQRHVKGRQVMIVSNETIAAFYLDPLKAIYQDFQCDTFILPDGEQYKTLEYWEHILHKLASCNHHRDTTLIALGGGVVGDITGFAAACYQRGVDFIQVPTTLLAQVDASIGGKTAVNHPVGKNLIGAFHQPKAVIIDLNTLNTLPEREFKAGMAEIVKAALIKDEKFFTDLENKMSDLLQRNFIFLQAVIKRAAEIKRDIVNADEKERSGERALLNLGHTFAHAIERLLGYGQWLHGEAVSAGLVLAAQLSHRKNLLDFESLQRICRLLTQISLPIHFPKSINADELLSAMYMDKKVANERLHLILLEDLGHAVVSDQVDDRELKSFLENG

SEQ ID NO: 1118 - DNA, 1095 bp, Dechloromonas aromatica
  CDS (1)..(1095): transl_table=11
atgaaaaccgtgactcaaacgctcaatgttgcgttgggtgagcgttcttatccaatacatatcggaacggatgtcttgtcccggccggaattgattctgccctttctctcccagaaaagagtggttgtggtaactaacacgagtgtcgcgccgctctatctcgacgagcttcgttccgggttggaaaaatgcggaatagaaacactaccggttgtgctgcctgacggagagcagtacaagacgtgggaaacgcttaatctgatctttgacgctttgcttgccgccaggtgcgagcgtaacaccacgttgattgctcttggtggtggggttatcggtgatatgggcggatttgctgcggcttgctatcagcgaggaatgccatttattcaggttccaaccacgcttttgtcacaagtggattcttcggtgggcggcaagaccgctattaatcatccgatgggcaaaaacatggtcggtgcgttctatcagcccaggcttgtactggccgatctgtcgacgctcgatactttgcctgaccgggaattgaaagccggtctggctgaagtcatcaaatatggtctgattcgcgatccggatttctttgtgtggctggaagctaacctggaaaaattactggtccgggataagtctgccttggcctacgcggtacatcgctcttgtgccaataaggcggaggttgttgcagccgacgagcgtgagagtggcgagcgcgctttgctgaatctggggcatacctttggtcatgccattgagaccggattgggctacggcgagtggttgcatggcgaggctgttgctgccggcacattaattgctgctgaactgtcttgccggttgggctggattgatgctgattcggtggcgcggatagaaaaaattttcgtccgctcgggtctgccggtaaaggctcctgatcttggcgctgctcgttatctcgaactgatgagccacgacaagaaggtgcaggatggaaaattgcgcctggttctgcttcgggagatcggcaaggcggtggtttcagatgcggccacgacggcgcagatggttgatgcaattgaggcgcgatgcacctaa

SEQ ID NO: 1119 - protein, 364 aa, Dechloromonas aromatica
MKTVTQTLNVALGERSYPIHIGTDVLSRPELILPFLSQKRVVVVTNTSVAPLYLDELRSGLEKCGIETLPVVLPDGEQYKTWETLNLIFDALLAARCERNTTLIALGGGVIGDMGGFAAACYQRGMPFIQVPTTLLSQVDSSVGGKTAINHPMGKNMVGAFYQPRLVLADLSTLDTLPDRELKAGLAEVIKYGLIRDPDFFVWLEANLEKLLVRDKSALAYAVHRSCANKAEVVAADERESGERALLNLGHTFGHAIETGLGYGEWLHGEAVAAGTLIAAELSCRLGWIDADSVARIEKIFVRSGLPVKAPDLGAARYLELMSHDKKVQDGKLRLVLLREIGKAVVSDAATTAQMVDAIEARCT

SEQ ID NO: 1120 - DNA, 1089 bp, Escherichia coli O157
  CDS (1)..(1089): transl_table=11
atggagaggattgtcgttactctcggggaacgtagttacccaattaccatcgcatctggtttgtttaatgaaccagcttcattcttaccgctgaaatcgggcgagcaggtcatgttggtcaccaacgaaaccctggctcctctgtatctcgataaggtccgcggcgtacttgaacaggcgggtgttaacgtcgatagcgttatccttcctgacggcgagcagtataaaagcctggctgtactcgataccgtctttacggcgttgttacaaaagccgcatggtcgcgatactacgctggtggcgcttggcggcggcgtagtgggcgatctgaccggcttcgcggcggcgagttatcagcgcggtgttcgtttcattcaagtcccgacgacgttactgtcgcaggtcgattcctccgttggcggcaaaactgcggtcaaccatcccctcggtaaaaacatgattggcgcgttctaccagcctgcttcagtggtggtggatctcgactgtctgaaaacgcttcccccgcgtgagttagcgtcggggctggcagaagtcatcaaatacggcattattcttgacggtacgttttttaactggctggaagagaatctggatgcgttgttgcgtctggacggtccggcaatggcgtactgtattcgccgttgttgtgaactgaaggcagaagttgtcgccgccgacgagcgcgaaaccgggttacgtgctttactgaatctgggacacacctttggtcatgccattgaagctgaaatggggtatggcaattggttacatggtgaagcggtcgctgcgggtatggtgatggcggcgcggacgtcggaacgtctcgggcagtttagttctgccgaaacgcagcgtattataactctgctcacgcgggctgggttaccggtcaatgggccgcgcgaaatgtccgcgcaggcgtatttaccgcatatgctgcgtgacaagaaagtccttgcgggagagatgcgcttaattcttccgttggcaattggtaagagtgaagttcgcagcggcgtttcgcacgagcttgttcttaacgccattgccgattgtcaatcagcgtaa

SEQ ID NO: 1121 - protein, 362 aa, Escherichia coli O157
MERIVVTLGERSYPITIASGLFNEPASFLPLKSGEQVMLVTNETLAPLYLDKVRGVLEQAGVNVDSVILPDGEQYKSLAVLDTVFTALLQKPHGRDTTLVALGGGVVGDLTGFAAASYQRGVRFIQVPTTLLSQVDSSVGGKTAVNHPLGKNMIGAFYQPASVVVDLDCLKTLPPRELASGLAEVIKYGIILDGTFFNWLEENLDALLRLDGPAMAYCIRRCCELKAEVVAADERETGLRALLNLGHTFGHAIEAEMGYGNWLHGEAVAAGMVMAARTSERLGQFSSAETQRIITLLTRAGLPVNGPREMSAQAYLPHMLRDKKVLAGEMRLILPLAIGKSEVRSGVSHELVLNAIADCQSA

SEQ ID NO: 1122 - DNA, 1089 bp, Escherichia coli O6
  CDS (1)..(1089): transl_table=11
atggagaggattgtcgttactctcggggaacgtagttacccaattaccatcgcatctggtttgtttaatgaaccagcttcattcttaccgctgaaatcgggcgagcaggtcatgttggtcaccaacgaaaccctggctcctctgtatctcgataaggtccgcggcgtacttgaacaggcgggtgttaacgtcgatagcgttatcctccctgacggcgagcagtataaaagcctggctgtactcgataccgtctttacggcattgttacaaaagccgcatggtcgcgatactactctggtggcgcttggcggcggcgtagtgggtgatctgaccggcttcgcggcggcgagttatcagcgcggtgtacgtttcattcaagtcccgacgacgttactgtcgcaggtcgactcctccgttggcggcaaaactgcggtcaaccatcccctcggtaaaaacatgattggcgcgttctaccagcccgcttcagtggtggtggatctcgactgtctgaaaacgcttcccccgcgtgagttagcgtcggggctggcagaagtcatcaaatacggcattattcttgacggtgcgttttttaactggctggaagagaatctggatgcgttgttgcgtctggacggtccggcaatggcgtactgtattcgccgttgttgtgagctgaaagcagaagttgtcgccgccgacgagcgcgaaaccgggttacgtgctttactgaatctgggacacacctttggtcatgccattgaagctgaaatggggtatggcaattggttacatggtgaagcggtcgctgcgggtatggtgatggcggcgcggacgtcggaacgtctcgggcagtttagttctgccgaaacgcagcgtattataaccctgctcacgcgggctgggttaccggtcaatgggccgcgcgaaatgtccgcgcaggcgtatttaccgcatatgctgcgtgacaagaaagtccttgcgggagagatgcgcttaattcttccgttggcaattggtaagagtgaagttcgcagcggcgtttcgcacgagcttgttcttaacgccattgccgattgtcaatcagcgtaa

SEQ ID NO: 1123 - protein, 362 aa, Escherichia coli O6
MERIVVTLGERSYPITIASGLFNEPASFLPLKSGEQVMLVTNETLAPLYLDKVRGVLEQAGVNVDSVILPDGEQYKSLAVLDTVFTALLQKPHGRDTTLVALGGGVVGDLTGFAAASYQRGVRFIQVPTTLLSQVDSSVGGKTAVNHPLGKNMIGAFYQPASVVVDLDCLKTLPPRELASGLAEVIKYGIILDGAFFNWLEENLDALLRLDGPAMAYCIRRCCELKAEVVAADERETGLRALLNLGHTFGHAIEAEMGYGNWLHGEAVAAGMVMAARTSERLGQFSSAETQRIITLLTRAGLPVNGPREMSAQAYLPHMLRDKKVLAGEMRLILPLAIGKSEVRSGVSHELVLNAIADCQSA

SEQ ID NO: 1124 - DNA, 1077 bp, Enterococcus faecalis
  CDS (1)..(1077): transl_table=11
atgaaattaaccgtaacgttacctacacattcatatgatttaaccatcgaaacaggtgccttagataaaattggcacctgggtacgtagcctgtggcagccacaacgggtagcgattattaccgatgaaacggtgaataaattatatggcgcagctgttgagaaagaattgcaagctgctggttttgaaacatcattgattgctgtagcggcaggtgaacaaagtaagagcctcgaaatagctcaactgctttatgattttttagcggaacagcaattgactcgaagtgatggtctaattgctttaggtggaggcgttgtgggagatctagctggatttgtcgcttcaacctatatgcgcggtattcactttttgcaagtaccaacaaccttactggcacaagtagatagtagcattggaggtaaaacagcggttaatactaaaaaagccaaaaatcttgtcggtacttttgcccaaccagatggggttttaattgatcctaatacacttaaaacattagaacctagacgtgtgcgtgaaggaattgcagaaattgtaaaatcagcagctatcgctgatgttgaattgtggcaccgtttatcctctttggaaaatgaacaagatttagtggcacatgcagaagaaattatcacggcctgttgcaagattaaacgtgatgtcgtcgaagaagatgaattagatttgggcttacgtttgattctgaattttgggcatacgatcggccacgcattagaaaatacagctggttacggggtgattgctcacggtgaaggcgtttctttaggaatgattcaaataactcaagtcgcagaacaacaagggctttccccacttgggactacccaagagttggtcaccatgctagaaaagttccatttaccagtaaccacagatcgttggtcagaagaacgtctctatcaagcaattacacatgataaaaaaacacgtgggggacagattaaaatcattgtcttagaaaaaattggtcaagcgaaaattgtctctttaccaacggaagaaattcgagcatttttaaacagagaaggaggaatttaa

SEQ ID NO: 1125 - protein, 358 aa, Enterococcus faecalis
MKLTVTLPTHSYDLTIETGALDKIGTWVRSLWQPQRVAIITDETVNKLYGAAVEKELQAAGFETSLIAVAAGEQSKSLEIAQLLYDFLAEQQLTRSDGLIALGGGVVGDLAGFVASTYMRGIHFLQVPTTLLAQVDSSIGGKTAVNTKKAKNLVGTFAQPDGVLIDPNTLKTLEPRRVREGIAEIVKSAAIADVELWHRLSSLENEQDLVAHAEEIITACCKIKRDVVEEDELDLGLRLILNFGHTIGHALENTAGYGVIAHGEGVSLGMIQITQVAEQQGLSPLGTTQELVTMLEKFHLPVTTDRWSEERLYQAITHDKKTRGGQIKIIVLEKIGQAKIVSLPTEEIRAFLNREGGI

SEQ ID NO: 1126 - DNA, 1086 bp, Erwinia carotovora subsp
  CDS (1)..(1086): transl_table=11
atggaaagaattaccgtaacacttggggaacgtagttaccccattacgatagctgcaggattatttgatgatccggcttcttttatgccgttgaaagcgggggatcaggccatgctggtgacgaaccagacgttggcccctctgtatctcgactgtgttcgtggtgtgttggaaaaccatggcgtgcatgtcgatcaggttattttacctgatggcgagcagtacaaatcgttgaccgtcttggatcaggtttttaccgcgttgctggcgaagccgcatggtcgtgatacgacgattgttgctttgggtggcggtgttatcggcgacctagccggttttgccgcagccagttatcagcgtggcgtccgattccttcaggtgccgacaacgctgttatcgcaggtagattcttccgtcggcggtaaaaccgccgtcaatcacccgttgggtaaaaacatgatcggggcgttctaccagcccgtatcggttgtgatcgatctggactgtctgaaatctttaccggcacgggaattgtcatccgggctggcggaagtcattaagtacggcattattctggatcgcgatttctttctttggcttgaagaaaacattgaggcagtgcgtgagctacagcatgacgcgctggcttactgcattcgacgctgctgtgaaatcaaagcggcagtagttgcagccgatgaacgtgaaaatagcatgcgtgcgttgctcaatctgggccatacttacgggcatgccattgaagctgaaatgggctacggtaactggcttcatggcgaagcggttgcggcaggtatggtgatggctgcgcatactgcacgtcgtctcgggcagttctccgattcggacgtcgagcgagttaagtctcttctggttcgtgctggtctgccggtgaatggtccgacgcaaatgacgcctgaatcctatcttcctcacatgatgcgtgacaagaaagtactcgcgggtgagttacgtctggtactgccaacggcaataggtcagtcagaagtccgtggtggtgtagcgcatgacatggtgttggcctcgatagcagattgtcttgcctga

SEQ ID NO: 1127 - protein, 361 aa, Erwinia carotovora subsp
MERITVTLGERSYPITIAAGLFDDPASFMPLKAGDQAMLVTNQTLAPLYLDCVRGVLENHGVHVDQVILPDGEQYKSLTVLDQVFTALLAKPHGRDTTIVALGGGVIGDLAGFAAASYQRGVRFLQVPTTLLSQVDSSVGGKTAVNHPLGKNMIGAFYQPVSVVIDLDCLKSLPARELSSGLAEVIKYGIILDRDFFLWLEENIEAVRELQHDALAYCIRRCCEIKAAVVAADERENSMRALLNLGHTYGHAIEAEMGYGNWLHGEAVAAGMVMAAHTARRLGQFSDSDVERVKSLLVRAGLPVNGPTQMTPESYLPHMMRDKKVLAGELRLVLPTAIGQSEVRGGVAHDMVLASIADCLA

SEQ ID NO: 1128 - DNA, 1080 bp, Francisella tularensis subsp
  CDS (1)..(1080): transl_table=11
gtgattagtaagttatcagtaaatcctacttttagtcctagttataatattattgttgactcagtattagatttttcacatatccttgagtatgtaactaacaagcaagtcttagttgttacaaatactactgtagcaaaattatatttgactaagtttttagcagctttagtagatgatttagatgtcagaacttgtattttagaagatggtgagcaatataaatcacaacagagtttagataagatattatcaaccttacttgagaatcatttcacgcgcaactcaacagttttagttgctttgggtggaggcgtgataggtgatattacaggctttgctgctgcgatatatcagcgtggtattgattttattcaaataccaacaacattactttctcaagttgactcatcagtaggtggtaagactgctataaatcatcagcttggtaaaaatatgattggagctttttaccaaccaaaagttgtttatacatctatagagttttataaaactttgccgcagcgagaatatattgctggtatggctgaggttgtcaaatatgcttttatctcaaaagatttttatctttggcttgattcaaatagagacaaaatcttggcaaaagatagcgttaccttgatagagatggtaaaaagaagttgtcagattaaagctcaagtcgttgctatggatgaaaaagagctaactggggctagagctattttgaattttggtcatacatttggccatgctatagagaagtgtcaaaattaccgaggtttaaagcatggtgaggctgttggtgttggtatggcacaagctatagacttttctcattaccttggcttaatctcacaacaacaggcaaaagattttaatgattttatagttagctttggaatatctattgattttcctaatgatatttgtcaaaaagagtttttagaggcaatgcttttagataagaaaaatagtaataaagagctaaaatttatccttatagaaaatataggaagtttaagcttacaaaagcaatctaaaaatgaattagaacaatttttagacatttcaagatag

SEQ ID NO: 1129 - protein, 359 aa, Francisella tularensis subsp
MISKLSVNPTFSPSYNIIVDSVLDFSHILEYVTNKQVLVVTNTTVAKLYLTKFLAALVDDLDVRTCILEDGEQYKSQQSLDKILSTLLENHFTRNSTVLVALGGGVIGDITGFAAAIYQRGIDFIQIPTTLLSQVDSSVGGKTAINHQLGKNMIGAFYQPKVVYTSIEFYKTLPQREYIAGMAEVVKYAFISKDFYLWLDSNRDKILAKDSVTLIEMVKRSCQIKAQVVAMDEKELTGARAILNFGHTFGHAIEKCQNYRGLKHGEAVGVGMAQAIDFSHYLGLISQQQAKDFNDFIVSFGISIDFPNDICQKEFLEAMLLDKKNSNKELKFILIENIGSLSLQKQSKNELEQFLDISR

SEQ ID NO: 1130 - DNA, 1101 bp, Geobacillus kaustophilus
  CDS (1)..(1101): transl_table=11
atgatcgaacggacgattgaaacggcgacgaagcgctatccgcttcttctgggcgatggggcggcccgcgtgctgccaagcttgcttcggtcgctctcctgtccgccagggacaaaacttttcatcgttaccgacgatactgtggcgcctctttatttggatgaggtgcgggcgttgctcgccgccgctgagtatgacgtgtacgcctacgtcattccaagcggggaggcggccaagtcatttgatcattattacgcttgccagacagcggcattgcagtgcggcctcgaccgccgctcggtcatcattgcgcttggcggcggcgttgtcggcgatttggctgggtttgtcgccgccacctatatgcgcggcatccgttacattcaaatgccgacgacactcttggcccatgacagcgccgtcggcggcaaagtcgccatcaaccatccgctcggcaaaaatatgatcggcgccttccaccagccggaagcagttgtgtatgacacctcctttttgcgcacgctgcccgagcgcgagcttcggtccgggtttgccgaagtgatcaaacatgcgctgatccgcgaccgccgcttttacgactggctgcgcgcggaaatcaagacgctcgccgacttgcgcggcgagaaactcgcctattgcattgaaaagggcattgacattaaggcgtccgtcgtgcgtgaggatgaaaaagaaaccggggtgcgcgcccatttgaatttcggccatacgctcggccatgcgctggaaagcgagttaggctacggcgcgctcactcacggggaggcggttgcggttggcatgctgtttgccgtctttgtcagcgaacggttttacggccggtcgttcgctgagcatcgattggccgactggttcgccggatacggcttcccggtgtcgctgccgacaacggttcagacgccccgcctgcttgagaagatgaaaggcgacaaaaaagcgtacgccggaacagtgcggatggtgcttctctgtgagatcggcgacgtggaagtggtggaactcgaagacgacaacctgctcacgtggctggacgagtttgccagacagggggggaaaggatga

SEQ ID NO: 1131 - protein, 366 aa, Geobacillus kaustophilus
MIERTIETATKRYPLLLGDGAARVLPSLLRSLSCPPGTKLFIVTDDTVAPLYLDEVRALLAAAEYDVYAYVIPSGEAAKSFDHYYACQTAALQCGLDRRSVIIALGGGVVGDLAGFVAATYMRGIRYIQMPTTLLAHDSAVGGKVAINHPLGKNMIGAFHQPEAVVYDTSFLRTLPERELRSGFAEVIKHALIRDRRFYDWLRAEIKTLADLRGEKLAYCIEKGIDIKASVVREDEKETGVRAHLNFGHTLGHALESELGYGALTHGEAVAVGMLFAVFVSERFYGRSFAEHRLADWFAGYGFPVSLPTTVQTPRLLEKMKGDKKAYAGTVRMVLLCEIGDVEVVELEDDNLLTWLDEFARQGGKG

SEQ ID NO: 1132 - DNA, 1083 bp, Geobacter metallireducens
  CDS (1)..(1083): transl_table=11
gtggaaacgctgacggtaggacttggcgacagaagctacacgattcggggaggaagcggaatcctcccggggatcggtgcgttctgcagggagttggggctggggaggattgtcgcggttgtgaccaataccacggtgggccccctctactatggcccggtggccgactctctcgccgcggcgggtttttcgccccttcgggtggagcttcccgatggcgaggagttcaagaccagtgccaccatgaacatcatctacgacgccctcatcgacggcgggctcacccgtgattcattcatcgtcgccctcggcggcggcgtggttggtgatatggcggggtttgccgctgccacctacctgcggggcatccccttcgtgcaggtgccaaccacgctccttgcccaggtggacagcagcgtcggcggcaagaccggcatcaaccatccccggggcaagaatcttatcggcgcattctaccagccccgtgcggttgtcatcgatgtggagaccctcacgacgcttcccgagcgggagtacttggccgggatggccgaggtggtgaagtacggagtcgttcttgatcctcagcttttcgccgaggtggagcggaatatcacgccgatccttgcccgtgaccgtgacgtcctcaccaggatcattatggcctgctgcgccataaaggcgtcggtggtagagaaggatgagcgggaatcggggctgagggcggtgcttaactacggccacacccttggccatgcggtcgaaacccttgcgggctacggaaccttcctccacggcgaagcggttgccatcggcatggtgcaggccgccaagctggccgaacatcggggtgaggccactgccgacgataccggccggctccgtgcgcttctggagtccttgaaactgccggtggagcttccagtcttcgccgcagaggcctatcgcgaagttctcctgcgggacaagaaagcccgggatacgggactcagtttcgtactcaacaacgggatcggcggcttctccatcgtcaggcttcgggacctctccgaggtgatcgacgtctgcgggatcggagggtga

SEQ ID NO: 1133 - protein, 360 aa, Geobacter metallireducens
METLTVGLGDRSYTIRGGSGILPGIGAFCRELGLGRIVAVVTNTTVGPLYYGPVADSLAAAGFSPLRVELPDGEEFKTSATMNIIYDALIDGGLTRDSFIVALGGGVVGDMAGFAAATYLRGIPFVQVPTTLLAQVDSSVGGKTGINHPRGKNLIGAFYQPRAVVIDVETLTTLPEREYLAGMAEVVKYGVVLDPQLFAEVERNITPILARDRDVLTRIIMACCAIKASVVEKDERESGLRAVLNYGHTLGHAVETLAGYGTFLHGEAVAIGMVQAAKLAEHRGEATADDTGRLRALLESLKLPVELPVFAAEAYREVLLRDKKARDTGLSFVLNNGIGGFSIVRLRDLSEVIDVCGIGG

SEQ ID NO: 1134 - DNA, 1089 bp, Geobacter sulfurreducens
  CDS (1)..(1089): transl_table=11
atgaccatcgagacactgagagtagaactcggtgaacggagctacgatattcgcgtcggctcggcgatcatcggcacgatcggcgccgtgtgtcgtgacgctgtggccggcaggcgcgtggccgttgtgaccaataccaccgttggtcccctctatgcggacggtgttgttgattcgttgaccgccgccggttttaccgtgcttcgcattgatatccccgatggagaagagcataaaacttctgtcaccctcactagtgtctatgacgaactcatcaaaggcggattgacgcgggactctcttcttgttgcccttggcggaggggtggttggagacctggccggttatgccgctgccacgtatctgcgcggtgttcccttcgtgcaggtcccgaccacgctcctcgctcaggtggatagcagcgtgggcggcaagaccggcatcaaccatccactgggcaagaatctgatcggcgcgttccatcagcccagagcggttctcattgacgtggacacccttgcaactctcccccagcgtgagtatctcggcggccttgccgaagtcatcaaatatggcgtggtgctcgacggaaagttcttcgcgtttctcgaacagaatgtgagcgctcttctcgggcgagaccggcagacgttggtccgtgccattacgcgttgctgtgcgctgaaggcctgggtcgtggagcaggatgaacgcgagaccggacttcgggcggtcctcaactacgggcacacgttcggccacgccgtggaggcgctgacgggctacactgccgttctccacggggaggcggtcgccattggcatggtccgggccgctgtcctggcagaggcccgggggcactcttcggccggagatacccgacggattcgcgcacttgtggaggccttggggctgccgaccgaactcccgtcgtttgatgcagacagctaccgggatgtacttctgcgcgataagaaggctcgggatcgcgggctggacttcgtactcaaccggggaataggcggccatgagatcgtcaggatcgaaaacctgtctgaagtattcggcatctgcggcgtgggggaatga

SEQ ID NO: 1135 - protein, 362 aa, Geobacter sulfurreducens
MTIETLRVELGERSYDIRVGSAIIGTIGAVCRDAVAGRRVAVVTNTTVGPLYADGVVDSLTAAGFTVLRIDIPDGEEHKTSVTLTSVYDELIKGGLTRDSLLVALGGGVVGDLAGYAAATYLRGVPFVQVPTTLLAQVDSSVGGKTGINHPLGKNLIGAFHQPRAVLIDVDTLATLPQREYLGGLAEVIKYGVVLDGKFFAFLEQNVSALLGRDRQTLVRAITRCCALKAWVVEQDERETGLRAVLNYGHTFGHAVEALTGYTAVLHGEAVAIGMVRAAVLAEARGHSSAGDTRRIRALVEALGLPTELPSFDADSYRDVLLRDKKARDRGLDFVLNRGIGGHEIVRIENLSEVFGICGVGE

SEQ ID NO: 1136 - DNA, 1086 bp, Gloeobacter violaceus
  CDS (1)..(1086): transl_table=11
atgatccgcatccctgttgccctgcccatggacagttacgacatctgcatcgacgagggcggtcttgagcgcctcggcgagtacctggccgaactgggcaaagtgaaccgggcgctggtggtgagcaatcccgtggttttgcgccattacggcgcccgggtggtacgctccttgaacgccgctggcttcgagacggcaagcgtcaccgtcccggcaggcgagcgccacaagcacctgcgctcggtggagcgcatttatcaagcagccctcgaacaccgcctggagcgctcgtcgctcatcgtcgctttgggcggcggggtggtgggcgacatggcgggcttcgcggccagcacctggctgcggggcatccgggtggcccaggtgccgacgacgttgctggcgatggtggacgctgccatcggcggcaagacgggggtgaaccaccccctgggcaagaacttgatcggcaccttccaccagccctgcctggtgctcatcgacccgcaggtgctggggacactgccgccgcgcgagacgcgcgccgccatggccgaggtgatcaaatacggggtgatctgggacggggacttatttaagcggctggagcaattgcccagcctgcaacgcccggacgcgcgcaccctcaccacgctgctggtgcgctcctgccaggccaaagccgaggtggtcgtgcgcgacgagcgcgaaggcggtctgcgcgccatcctcaactacggccacaccgtcggccacgccctcgaaagtgccaccggttaccgccgctatctgcacggcgaaggggtcgccctcggtatggcggcggcgggccgggtggcagtggcgctcgatctctggagccccgaggagcttcgccgccaggaggcgttgattatcaaagcccgcctgccggtgcgctggaagagcgacatcgccagcgaggcgctgctgttgcgcatgcaatcggacaaaaaagtcgaggcgggcaaggtgcgcttcgtgttgccggaagcgatcggtcgcgtccacaccggggtcgaggtgcccacagaggtgctgcgcagggtgctcgacaccctgcgcggttga

SEQ ID NO: 1137 - protein, 361 aa, Gloeobacter violaceus
MIRIPVALPMDSYDICIDEGGLERLGEYLAELGKVNRALVVSNPVVLRHYGARVVRSLNAAGFETASVTVPAGERHKHLRSVERIYQAALEHRLERSSLIVALGGGVVGDMAGFAASTWLRGIRVAQVPTTLLAMVDAAIGGKTGVNHPLGKNLIGTFHQPCLVLIDPQVLGTLPPRETRAAMAEVIKYGVIWDGDLFKRLEQLPSLQRPDARTLTTLLVRSCQAKAEVVVRDEREGGLRAILNYGHTVGHALESATGYRRYLHGEGVALGMAAAGRVAVALDLWSPEELRRQEALIIKARLPVRWKSDIASEALLLRMQSDKKVEAGKVRFVLPEAIGRVHTGVEVPTEVLRRVLDTLRG

SEQ ID NO: 1138 - DNA, 1089 bp, Haemophilus ducreyi
  CDS (1)..(1089): transl_table=11
atgctgcaagttaatgttgaattaaaacatcatcattaccccattaagattggtcagggattacttaccaatcctcaaagttatgcacccctaaaagctggtgataatgtgatgattgtttctaacccaactatagcacaatattatcttgctacagtccgtgacacgctcatcacaataggttgtaaagttgatacagtcttactcgctgatggtgagcaatacaaaacatttgaatcgttaaaccaaatttttaccgctttattggaaaatgatcatcatcgcgatactacattagtcgcactcggcggtggtgtaattggtgatgtgaccggttatgcggctgcgtcgtatcaacgcggtgttcgttttatacagatccccaccactttattagcacaaattgattcatctattggtggtaaaactgcgattaatcacccattaggcaaaaatatgattggtgctttttatcaacctgctgccgtgattattgatacacaagtactaaatacactggcaaaacgccaagtcagcgctggactggcagaagtgataaaatacggcgttgcttttgatagccacttttttgaatggctagaacaacatattgatcaattaatgcaattagatccagaaacattagcgcattgtatccaacgctgttgtcaattaaaagcggcgatcgttgcacaagatgaaactgaacaaggtgaacgcgcgcttctcaactttgggcatactttcggccactcaattgaagcacatttaggttatggcacttggttacacggtgaaagtgttgctgttggtatgctagaagcggccgaattatcaaaaatattaggcaatttaacggaagatcagctcgctcggctagaaaaattgttagccaacgctgttctgcccacaacctctcccgatggaatgaccgctgatcaatacttaccttatatgtggcgagataaaaaagtattaaacggacaattacgccttgttcttctaaaatcatttggtcaagcttatataacaactgaagcaacagaacaacaaattctgacagcgattcaacgctttacacaacactaa

SEQ ID NO: 1139 - protein, 362 aa, Haemophilus ducreyi
MLQVNVELKHHHYPIKIGQGLLTNPQSYAPLKAGDNVMIVSNPTIAQYYLATVRDTLITIGCKVDTVLLADGEQYKTFESLNQIFTALLENDHHRDTTLVALGGGVIGDVTGYAAASYQRGVRFIQIPTTLLAQIDSSIGGKTAINHPLGKNMIGAFYQPAAVIIDTQVLNTLAKRQVSAGLAEVIKYGVAFDSHFFEWLEQHIDQLMQLDPETLAHCIQRCCQLKAAIVAQDETEQGERALLNFGHTFGHSIEAHLGYGTWLHGESVAVGMLEAAELSKILGNLTEDQLARLEKLLANAVLPTTSPDGMTADQYLPYMWRDKKVLNGQLRLVLLKSFGQAYITTEATEQQILTAIQRFTQH

SEQ ID NO: 1140 - DNA, 1089 bp, Haemophilus influenzae
  CDS (1)..(1089): transl_table=11
atgttgtgcgtcaatgtggaattgcaagagcgtcgctatcctattttaattggtagcggattgttacaagatgaacgtagttacccgattaaacgtggggatcgcgtgatgattgtaacgaatcccacggttgcacagttttatcttgatacagtcatctatgcgttggaaaaacgtggttgcgtagtcgatcatgttttattgccagatggcgaaaaatacaaaacacttgaatctttaaacttaattttcaccgcacttttgcaagataatcatgggcgagataccacgattattgcattgggcggcggcgtaattggcgatgttgctggctttgtggcggcaagttatcagcgcggtgtgcgtttaattcaaatgccaaccacattgctttcacaagtggattcttcagtgggcggtaaaacggcggttaatcatgaattaggcaaaaatatgattggcgcgttctatcagccatcaatggttattattgatacgctcacgcttaatacgcttcctaaacgtgaagtaaacgcggggcttgccgaagttatcaaatatggtgccattttagattacgaattttttgaatggctagagcaacatattgatgaacttgtcgctttgcatcctgaggcgcttcaacattgtatttctcgttgttgccaaattaaagcagatgttgttgcgagagatgaaacagaaaaaggcgatcgtgcattgcttaatcttggacatacttttggacatgccattgaaactcacttaggttatggaaactggcttcatggtgaagctgtttcgacgggaatgatgatggcagcggtgctttcggaagaacttggagatatttctattgcagatgtgtctcgccttgaaaaattacttgctcgtgccaatttgcccaccgtatcaccggatacgatgcagccagaagactatttaccgcatatgatgcgtgataaaaaagttctatcgggtaaattgcgtctggtgttactcaaatctctaggccaagcttatgtggcgaatgataccgatcataccctcgtgttaaacgcaattcgtcgttgtactcaaacggattaa

SEQ ID NO: 1141 - protein, 362 aa, Haemophilus influenzae
MLCVNVELQERRYPILIGSGLLQDERSYPIKRGDRVMIVTNPTVAQFYLDTVIYALEKRGCVVDHVLLPDGEKYKTLESLNLIFTALLQDNHGRDTTIIALGGGVIGDVAGFVAASYQRGVRLIQMPTTLLSQVDSSVGGKTAVNHELGKNMIGAFYQPSMVIIDTLTLNTLPKREVNAGLAEVIKYGAILDYEFFEWLEQHIDELVALHPEALQHCISRCCQIKADVVARDETEKGDRALLNLGHTFGHAIETHLGYGNWLHGEAVSTGMMMAAVLSEELGDISIADVSRLEKLLARANLPTVSPDTMQPEDYLPHMMRDKKVLSGKLRLVLLKSLGQAYVANDTDHTLVLNAIRRCTQTD

SEQ ID NO: 1142 - DNA, 1089 bp, Haemophilus influenzae
  CDS (1)..(1089): transl_table=11
atgctgtgcgtcaacgtggaattgcaagagcgtcgctatcctattttaattggtagcggattgttacaagatgaacgtagttacccgattaaacgtggagatcgcgtgatgattgtaacgaatcccacggttgcacagttttatcttgatacagtcatctatgcgttggaaaaacgtggttgcgtagtcgatcatgttttattgccagatggcgaaaaatacaaaacacttgaatctttaaacttaattttcaccgcacttttgcaaggtaatcatgggcgagataccacgattattgcattgggcggtggcgtaattggcgatgttgctggctttgctgcggcaagttatcagcgcggcgtgcgtttaattcaaattccaacaacattgctttcacaagtggattcttcagtgggcggtaaaacggcggttaatcatgaattaggcaaaaatatgattggcgcgttctatcagccatcaatggttattattgatacgctcacgcttaatacacttcctaaacgtgaagtaaacgcggggcttgccgaagttatcaaatatggtgccattttagattacgaattttttgaatggctagagcaacatattgatgaacttgtcgctttgcatcctgaggcgcttcaacattgtatttctcgttgttgccaaattaaagcagatgttgtcgcgagagatgaaacagaaaaaggcgatcgtgcattgcttaatcttggacatacttttggacatgccattgaaactcacttaggttatggaaactggcttcatggtgaagctgtttctacgggaatgatgatggcagcggcgctttcggaagaacttggagatatttctattgcagatgtgtctcgccttgaaaaattacttgctcgtgccaatttgcccaccgtatctccagatacgatgcagccggaggactatttaccgcatatgatgcgtgataaaaaagttctatcgggtaaattgcgtctggtattactcaaatctctaggtcaagcttatgtggcgaatgataccgaacataccctcgtgttaaacgcaattcgtcgttgtactcaaacggattaa

SEQ ID NO: 1143 - protein, 362 aa, Haemophilus influenzae
MLCVNVELQERRYPILIGSGLLQDERSYPIKRGDRVMIVTNPTVAQFYLDTVIYALEKRGCVVDHVLLPDGEKYKTLESLNLIFTALLQGNHGRDTTIIALGGGVIGDVAGFAAASYQRGVRLIQIPTTLLSQVDSSVGGKTAVNHELGKNMIGAFYQPSMVIIDTLTLNTLPKREVNAGLAEVIKYGAILDYEFFEWLEQHIDELVALHPEALQHCISRCCQIKADVVARDETEKGDRALLNLGHTFGHAIETHLGYGNWLHGEAVSTGMMMAAALSEELGDISIADVSRLEKLLARANLPTVSPDTMQPEDYLPHMMRDKKVLSGKLRLVLLKSLGQAYVANDTEHTLVLNAIRRCTQTD

SEQ ID NO: 1144 - DNA, 1062 bp, Helicobacter hepaticus
  CDS (1)..(1062): transl_table=11
atgagcgaaatattgcatattcaaactgctacttcaaactatcctatccatataggcatacttccgcatatagaatatgctcataaggtattacttgtctcaaatcctaaagtcgctggattacatcttaagtatgttttagagcgtattaaagcccctgaagtctatgtgtgtattgtcccagatggcgaacaatataaggatatgaaaagcatagaatatattcttgaatgtgcatttactcataggcttgatagaaaatctttaatgatagcacttggcggtggtgtcataggtgatatggtaggttttgcaagcggtatttatcagcgagggattgattttatacaaatacctacgactttacttgcacaagttgatgcttctgtgggcggaaaaacgggcattaacaatacctttggaaagaatcttattggactttttcatcaaccaaaagcagtgtatatcgacccatttatgctttctactcttccaaaacgcgaatttggagcaggagtggctgaaataattaaaatggcagtatgttttgatgaagcatttttcatattacttcaagagcagatcctaagtattaatgataatgactttctcactcgtgccatagccaaaagtgtggcgattaaggcacaagtagtcaatgccgatgaaaaagagcaaggcattcgtgcagctcttaattatgggcatactttcgggcatattattgagaatcttacgcaatattcgcaatttttacacggcgaagcagtaagtataggtatgtgtatggcaaatgcactctcttgtaagcttggacttttaacaaaagagcaaaaagatgcaatcagtgcccttttggagcgctatgatttgcctacacacttttatattcaaaacgcattagatttttatgaaaaattttctttagataaaaaaagtgttaatgcgaaaattatgtttgtattgccttgtgggattggtaatgtgagtttgcgcaatgatgtgccaaaagctgatgtgcttgatgttttatcatcttttagtaaggatagtggcaagtga

SEQ ID NO: 1145 - protein, 353 aa, Helicobacter hepaticus
MSEILHIQTATSNYPIHIGILPHIEYAHKVLLVSNPKVAGLHLKYVLERIKAPEVYVCIVPDGEQYKDMKSIEYILECAFTHRLDRKSLMIALGGGVIGDMVGFASGIYQRGIDFIQIPTTLLAQVDASVGGKTGINNTFGKNLIGLFHQPKAVYIDPFMLSTLPKREFGAGVAEIIKMAVCFDEAFFILLQEQILSINDNDFLTRAIAKSVAIKAQVVNADEKEQGIRAALNYGHTFGHIIENLTQYSQFLHGEAVSIGMCMANALSCKLGLLTKEQKDAISALLERYDLPTHFYIQNALDFYEKFSLDKKSVNAKIMFVLPCGIGNVSLRNDVPKADVLDVLSSFSKDSGK

SEQ ID NO: 1146 - DNA, 1074 bp, Idiomarina loihiensis
  CDS (1)..(1074): transl_table=11
atggctgaggttaacgtctctttaggtgaacgcagctacaccatctacattggtaacgccctgttacccaattatgtagagcgccttccgcacaaacttaatcaacaactgctggtcatcaccaacccgaccattagtcagtattaccttaagccgctattaaaaagccttgccggtcatcaggtaaaagtgtttgaaatgcgcgacggtgagcagttcaaaagtctggacagttacgccgaggccatggatattctgatagacgcaggctttaaccgcgactgtggcatcattgccttaggcggcggtgtggtaggtgatttagccggctttgtggcgtcaacttttcaacgcggtgtcgatttttaccaaattccgaccactttattgtcgcaggttgactcttccgtgggtggaaaaacggcggttaatcacccccagggcaaaaacctgattggcgctttttatcagcctaagtcggtggttatcgacattgactgcctgcaaacgctcactgagcgggactaccgcagcggtttagccgaaatagtaaaatacggcgttatctacgacgccgactttttccaatggctggaacaacatgccaaagaattaaatcagcaagacccggccgcactaacctacgctattcaacgcagctgcgaaattaaagccgaagttgtggcgttagacgagcgcgaaaaaggcctgcgggcactgctgaatttaggccacacctttggtcatgccattgaagccgccaccgaatacggcgcatggacacacggcgaggctgtggctgctggcattataattgcatctaagctgtcagaagtgacacagcggctcaattcgtcagattttcgacgcattaaagatttactgctggcacttagcttgccaacaaagggtccgcaaatgccctggcaggactggttagactacatgcagcgcgataagaaagtaaaagacggtcagctgcattttgttcttccggttgctattggtcaggctgaagttgtcagtactgtagaacacaataccgttactgctgtgatcactgaatgttgctaa

SEQ ID NO: 1147 - protein, 357 aa, Idiomarina loihiensis
MAEVNVSLGERSYTIYIGNALLPNYVERLPHKLNQQLLVITNPTISQYYLKPLLKSLAGHQVKVFEMRDGEQFKSLDSYAEAMDILIDAGFNRDCGIIALGGGVVGDLAGFVASTFQRGVDFYQIPTTLLSQVDSSVGGKTAVNHPQGKNLIGAFYQPKSVVIDIDCLQTLTERDYRSGLAEIVKYGVIYDADFFQWLEQHAKELNQQDPAALTYAIQRSCEIKAEVVALDEREKGLRALLNLGHTFGHAIEAATEYGAWTHGEAVAAGIIIASKLSEVTQRLNSSDFRRIKDLLLALSLPTKGPQMPWQDWLDYMQRDKKVKDGQLHFVLPVAIGQAEVVSTVEHNTVTAVITECC

SEQ ID NO: 1148 - DNA, 1071 bp, Lactococcus lactis subsp
  CDS (1)..(1071): transl_table=11
atgaaattaaatgtgaatttaccagaacatccctatgatgtcatcatcgaaaatggggccttggctaatattggaacttgggtttcttcattgtggaagaagcaaaaaattgttttgatttctgataatcatgtcaatggactttatggtcaaaaagttgttgaccaacttgaaaaagtaggttttgaagtggcaacttttgaatttccagaaggagaagccagtaaaaatttactgacagccgaaaatgcttggaacttttgtgccgaatttggattgactcgttctgacggaattattgcactcggtggtggagtaacaggtgatttagctggttttgtagcttctacttacatgcgtggcatccatttcttacaaattccaacaagtttgaccgcccaagtggatagttctattggtgggaaaacaggaattaattccaaaatggctaaaaatatgattgggacttttacacagcctgacggcgtgttaattgacccagaagttctgcaaacgctcggtcaaagagaattccgtgaaggactgggggaggtcatcaagtgcgccctaattgctgacaaagatctctggaatttactgacagacttgtcggcggatgatttagtaaaaaagcttgataagattgaagaaattatctatcggtcttgtgaagtaaaacgaaaagtggttgttgatgatgaattagacaatggtgtacggctctatttgaactttggtcatacaattggacatgctgttgaaaatactgcaggctatggcaaagtgatgcatggagaagcagttgctatcgggatggttcaaatcagtaaaattgccgaactcaaaggtcttatgcccaaaggaattactgaccaaattcgaaagatggtcaaaaaatttggtttacctgacgaatatcaaccttgggatgaagagcttttgtttaaagcattaactcatgataaaaaagcacgaggaagaatcatcaaaaccgttattgttcctgaaattggcaccgctaaaattaatgaagtgacttttgaagaaatgaaagactatctcaaaaaataa

SEQ ID NO: 1149 - protein, 356 aa, Lactococcus lactis subsp
MKLNVNLPEHPYDVIIENGALANIGTWVSSLWKKQKIVLISDNHVNGLYGQKVVDQLEKVGFEVATFEFPEGEASKNLLTAENAWNFCAEFGLTRSDGIIALGGGVTGDLAGFVASTYMRGIHFLQIPTSLTAQVDSSIGGKTGINSKMAKNMIGTFTQPDGVLIDPEVLQTLGQREFREGLGEVIKCALIADKDLWNLLTDLSADDLVKKLDKIEEIIYRSCEVKRKVVVDDELDNGVRLYLNFGHTIGHAVENTAGYGKVMHGEAVAIGMVQISKIAELKGLMPKGITDQIRKMVKKFGLPDEYQPWDEELLFKALTHDKKARGRIIKTVIVPEIGTAKINEVTFEEMKDYLKK

SEQ ID NO: 1150 - DNA, 1110 bp, Legionella pneumophila subsp
  CDS (1)..(1110): transl_table=11
atggcgaagtttgaactttatgccgaggttgatgtttcgatttcagggcatcaatatccaataattatttgccgcaatggtttaattgatcctgaattaattaatcgttttatcacttcaaaacaggtgcttattgttactaatcgaacagtggcacctttgtatctaggccatttgcaatctgttttaccctcaaaacaatgcgatgttgttattctggaagacggtgaagagcataaaaatcagcgcagtttatttactatttatgattctttgattcaaaacaaacatcatagagatacctcaatcatcgctttgggtgggggagtgattggtgatatggctggttttgcagcttctacgtaccaacgaggagtgcgatttattcagctgcctactacgttattggcccaggttgatgcttcagttggtggtaaaacagcgattaatcatcctgccggtaaaaatatgattggcagtttttaccaacctcaagcggtcataattgatttaaataccttaaaaacattacctgagcgtgagtttcgtgcaggtattgccgagatgataaaatacgctttgttggttggcggctctttttttgaacgaattcaagaggctctgcaacaaggattaacggtacatagtccggagttaccactactgatagcagaatgttgtcaagttaaagctaaaattgtagagcaagatgaaagggaatccgggttgcgtgctttgcttaatctggggcatacttttgctcatgcgttggaaacgtataccgattataaaaagtggttacatggagaagccgttgccataggtttatattgtgcggctgtattatcagagaagaagggcttgctggataaaccaattgtagaccaggtagaaaagatgcttatacatgctggtttgcctcataaaattccaaactccatagatttaattcaattaagagagttgatgagtttggataagaaaattaaaaataattgtttacgtttcgtaatgattaaaaaaccaggtgcttgttatattgatgattcagttacagaagattgtttgcataatgcactgattaatgtggtagaaggagaacgaaaatga

SEQ ID NO: 1151 - protein, 369 aa, Legionella pneumophila subsp
MAKFELYAEVDVSISGHQYPIIICRNGLIDPELINRFITSKQVLIVTNRTVAPLYLGHLQSVLPSKQCDVVILEDGEEHKNQRSLFTIYDSLIQNKHHRDTSIIALGGGVIGDMAGFAASTYQRGVRFIQLPTTLLAQVDASVGGKTAINHPAGKNMIGSFYQPQAVIIDLNTLKTLPEREFRAGIAEMIKYALLVGGSFFERIQEALQQGLTVHSPELPLLIAECCQVKAKIVEQDERESGLRALLNLGHTFAHALETYTDYKKWLHGEAVAIGLYCAAVLSEKKGLLDKPIVDQVEKMLIHAGLPHKIPNSIDLIQLRELMSLDKKIKNNCLRFVMIKKPGACYIDDSVTEDCLHNALINVVEGERK

SEQ ID NO: 1152 - DNA, 1080 bp, Leifsonia xyli subsp
  CDS (1)..(1080): transl_table=11
atgaccgacgagaccaccgagatcctggtcgccggagcgaacccgtacccggtcgtgatcggccgcggcctgcggttcgatctcgcgcggcatctcggctccgcggtgagcaaggtgctcgtggttcacccgccgacgctcggggcggctgcggcggagcttcgggagtcgctcgccgggcagtacgaggtgctcctcaccgaagtgcccgacgcggaggcggcgaagcgcattgaggtcgcctccttcctctggtgcatcatgggccaggccgacttcacgcgctcggacgccgtggtgggcctcggtggcggcgccgtcaccgatctcgctggcttcgccgcggcgacgtggctgcgcggtgtgaggctggtccaggcgccgacgaccctgctggggatggtggacgccgcggtcggcggcaagaccggcatcaacacggcggaaggcaagaatcttgtcggggcgttctatgcgccggccgccgtcgtctgcgatctggacatgctgatctccctcgggcggaacgaactgctcgcgggctttgctgaggtcgtcaagtatggcttcatcgccgagccggagattctcgacatcatcgagcgggatgtggacgcggccaccgatccggagtctgcggagttccggcgagtggtcgaactgtcgatcggcatcaaagcgcgcgtggtcggtgaggacttcaccgagcagggcctgcgcgaaatcctcaactacgggcacaccctcgggcacgcgatcgagcacgccgagcgctaccagtggcggcacggcgccgcgatcgcggtcggcatggtgttcgcggccgaactcggtcgcctcagcgggcggttgagcgacgacgccgtggagcggcatcgccgcatcctggcgtccctcacgctgccgacgagctacccccttggccgctggcagacgctgctcgccgccatgcagcgcgacaagaaggcgcgcgggagcctgttgcgcttcatcgtgctcgacgatgtggcgcggccgacggtgctcgccggcccggatcagagtctgctgttcgccgcctaccaggagatcgcatcctga

SEQ ID NO: 1153 - protein, 359 aa, Leifsonia xyli subsp
MTDETTEILVAGANPYPVVIGRGLRFDLARHLGSAVSKVLVVHPPTLGAAAAELRESLAGQYEVLLTEVPDAEAAKRIEVASFLWCIMGQADFTRSDAVVGLGGGAVTDLAGFAAATWLRGVRLVQAPTTLLGMVDAAVGGKTGINTAEGKNLVGAFYAPAAVVCDLDMLISLGRNELLAGFAEVVKYGFIAEPEILDIIERDVDAATDPESAEFRRVVELSIGIKARVVGEDFTEQGLREILNYGHTLGHAIEHAERYQWRHGAAIAVGMVFAAELGRLSGRLSDDAVERHRRILASLTLPTSYPLGRWQTLLAAMQRDKKARGSLLRFIVLDDVARPTVLAGPDQSLLFAAYQEIAS

SEQ ID NO: 1154 - DNA, 1086 bp, Leptospira interrogans serogroup Icterohaemorrhagiae serovar
  CDS (1)..(1086): transl_table=11
atgagtcttatcgaaaccgttccagtaaatacggaacacaagtccgttccggttcatctccattcgaatctttccggtttgtcagaagagattgcaaaacttccaggagtcacttccgtttttttaatcacggaaaaatcgattcattctatctattccaaatatttagaaagggaactatcttctcttcccatcaaaacgatttatatcaaaggaggagaaaaatccaaacatatcaatcgaaccggagaagtatataatcaacttattgaatatggtgcagatcgtaagtctttgattcttgcatttggaggcggagttgtgggggactttgctggttttatcgcttctacttatttgaggggaattcgatttgttcaaattcctacaactctacttgcgtgtgtggattcttctgtaggtggaaaagttgcggtgaatgcggatttcggaaagaatatgatcggttccttttatcaaccagagtttgtgtttgctcctttatctgttttgtccactcttccagatcgggaatggaaatgtggtcaagctgaaattatcaaacattcacttctttctggaggagaatattgggaaaaggtaaagactcattcattcaaagatttgaatgtagattctacgattcttccttatctaatcgctgagtcggttcgttttaaagcaaacgtagtttcaagcgacgaaaaagaaaccggacttcgtaaaattttgaatttaggacatactacggctcatgcaattgaatccgttacgaaatataaaaaatattcccatggagaagcagttgcgattggtcttgttacggcgttattattaagcgaacaacattctgaactcgatcctgtcactacaaaagaaacaatagaatctctaaaaaattacgggcttccatttcagacgaaattaaaatctaaacaacttgccaaacatatgcttcacgataaaaaaaatgtgggcggctcgattcgttttgttcttttgaaaagcccgggttctcccatttttgatattcccataaattcagaagatattatattagcaattcataaacaaaaaggcatttaa

SEQ ID NO: 1155 - protein, 361 aa, Leptospira interrogans serogroup Icterohaemorrhagiae serovar
MSLIETVPVNTEHKSVPVHLHSNLSGLSEEIAKLPGVTSVFLITEKSIHSIYSKYLERELSSLPIKTIYIKGGEKSKHINRTGEVYNQLIEYGADRKSLILAFGGGVVGDFAGFIASTYLRGIRFVQIPTTLLACVDSSVGGKVAVNADFGKNMIGSFYQPEFVFAPLSVLSTLPDREWKCGQAEIIKHSLLSGGEYWEKVKTHSFKDLNVDSTILPYLIAESVRFKANVVSSDEKETGLRKILNLGHTTAHAIESVTKYKKYSHGEAVAIGLVTALLLSEQHSELDPVTTKETIESLKNYGLPFQTKLKSKQLAKHMLHDKKNVGGSIRFVLLKSPGSPIFDIPINSEDIILAIHKQKGI

SEQ ID NO: 1156 - DNA, 1089 bp, Mannheimia succiniciproducens
  CDS (1)..(1089): transl_table=11
atggtgtgtgttaatgtcgaattgaaagaacgtcgttatcctatttatatcggtgaaaatttgttaacggatacgggcgtttaccctgtaaaaatgggtgataaagtcatgattgtcagcaatcctacagtggcgcaatattatttaacaccggttaccgaaaccttagaaaaactgggttgccaggtcagccatgttttattacctgacggcgaaaagtataaaaccttagattctttaaacatgatttttaccgcattattgaaagaaaatcatgggcgtgataccacgcttatcgcattaggcggcggggtgatcggcgatgtaacgggttatgcggcggccagttatcagcgcggtatccgttttattcaaattccgaccactttgcttgcacaagtggattcttccgttggcggcaaaactgcggtaaatcacgaattaggtaaaaatatgattggtgccttttatcagccttgtactgtgattattgatacccgcactttagttacgctgcctaaacgggaagttaatgcgggtcttgccgaagtgatcaaatacggtgcgattctcgacttgccgtttttcgaatggttagaggcgcatattgataatttggtcgctttgaatcaacaggatttacaatattgtatcgcccgttgttgccaaattaaagcggatgttgttgcccgcgatgaaacggaaaaaggcgatcgcgccttattaaatctaggtcatacttttggtcatgcgatcgaaacccatctcggatacggtaactggctgcacggcgaagccgttgcggcgggcagtatgatggctgccgtattatccgaaaaattaggcgatttaagttattcggaagtcgcccgcttagaaaaattattggctcgtgcaaatttaccgacagtttcaccggatacaatgcaggcggaagattatctgccgcacatgatgcgtgataaaaaagtgctggcgggtaaactacgtctagtcttacttaaaacgttggggcaagcttatgtggcatcagacaccgataaatcgcttgttcttgatgcgattcgcgtttgttcacaaaataactaa

SEQ ID NO: 1157 - protein, 362 aa, Mannheimia succiniciproducens
MVCVNVELKERRYPIYIGENLLTDTGVYPVKMGDKVMIVSNPTVAQYYLTPVTETLEKLGCQVSHVLLPDGEKYKTLDSLNMIFTALLKENHGRDTTLIALGGGVIGDVTGYAAASYQRGIRFIQIPTTLLAQVDSSVGGKTAVNHELGKNMIGAFYQPCTVIIDTRTLVTLPKREVNAGLAEVIKYGAILDLPFFEWLEAHIDNLVALNQQDLQYCIARCCQIKADVVARDETEKGDRALLNLGHTFGHAIETHLGYGNWLHGEAVAAGSMMAAVLSEKLGDLSYSEVARLEKLLARANLPTVSPDTMQAEDYLPHMMRDKKVLAGKLRLVLLKTLGQAYVASDTDKSLVLDAIRVCSQNN

SEQ ID NO: 1158 - DNA, 1080 bp, Methylococcus capsulatus
  CDS (1)..(1080): transl_table=11
atgaaaaccttacacgtcgagctgggggagcgcggctaccccatttatataggacggggcctgctgggccatcccgacctgatacaggcccatctgccgggcgggcaggtcctggtggtgaccaacgaagtggtggcgccgctgtacctcgaccgcatgcttgcatccctggccggcaaggacacgggcagtgtcgtgcttcccgacggcgaggcccacaagaccctggactcggcgatggccgtgttcgatgccttgctggcccggcgtttcggccgcaacgccgccatcgtggcgctcggcggcggggtgatcggcgatctggccggtttcgcggcagcctgctatcagcgcggcgtgcctttcatccaggtgcccaccaccctgttgtctcaggtcgactcctcggtgggaggcaagaccgcggtcaaccatccgcgcggcaagaacatgatcggcgccttctaccagccgcgctgcgttctggccgacaccgacactctggatacgttgcccgaccgcgaactgagcgcgggtctggccgaggtcatcaagtacggcttcatccgtgacccggaattcctggcctggctcgaagcgaacgtcgagcgcttgctgcagcgcgatcccgaagcgctcgcctatgccatcgagcggtcctgcatcaacaaggcggaaatcgtggcggaagacgagaccgaaaccggggtgcgggcgacgctgaacctggggcacactttcggccacgccatcgaaaccggcatgggctatggtgtatgtctgcacggcgaagcggtggcgatcggtatgtgccaggcggccgatctgtcccgtcgcttgggctggatcggtgacgacgaggtggcgagggtgatccgcctgctggagcgggcgcggctgccggtcgtcccgccgcgcgagttggatgcggacgcctttctcgaacacatggcggtcgacaagaagaacgtcgacggcggtctgcgactggttctgctcaaatccctgggtgaggcgaccctgccggtggccgtggacgccggactgttacgggccacattggaatgctacggccgctga

SEQ ID NO: 1159 - protein, 359 aa, Methylococcus capsulatus
MKTLHVELGERGYPIYIGRGLLGHPDLIQAHLPGGQVLVVTNEVVAPLYLDRMLASLAGKDTGSVVLPDGEAHKTLDSAMAVFDALLARRFGRNAAIVALGGGVIGDLAGFAAACYQRGVPFIQVPTTLLSQVDSSVGGKTAVNHPRGKNMIGAFYQPRCVLADTDTLDTLPDRELSAGLAEVIKYGFIRDPEFLAWLEANVERLLQRDPEALAYAIERSCINKAEIVAEDETETGVRATLNLGHTFGHAIETGMGYGVCLHGEAVAIGMCQAADLSRRLGWIGDDEVARVIRLLERARLPVVPPRELDADAFLEHMAVDKKNVDGGLRLVLLKSLGEATLPVAVDAGLLRATLECYGR

SEQ ID NO: 1160 - DNA, 1086 bp, Mycobacterium leprae
  CDS (1)..(1086): transl_table=11
atgacaaatatcgacgcaccggtcactgtgcaggtggctgtcgacccgccatacccagtggtgatcggcaccgggttgtcggatcaattggatgaactgcttgccaaccgacatcgggtcgcgatactgcatcaaccggtactgacccaaactgcggaggcgatccgaagccacttggccggcaagggggtcgacgcgcaccgcatcgaaatacctgacgccgaggccggcaaggatctttctgtcatggatttcatatgggaagtattgggccgcatcggaattggacgtaaagatgcactggtcagttttggcggcggcgccgctaccgatgtagctgggttcgcggcggctacctggttacgcggtgtctctatcgtacatgtgccgaccacgttgttaggtatggtcgacgcagcggttgggggcaagactggtatcaacaccgaggctggcaagaacctggtcggcgcatttcatcaacctctcgccgtgttggctgacctggcgactttggaaactttgccgcgcaaagaaattgcgtccggtatggccgaagtagtcaaggccggatttattgctgacccgatcatcctcgacctcatcgaagccgacccacaggcctccttggacccgatgggtggcgtgttgccggagctgatccgccgggccgtcaccgtcaaggcgggcgtcgtctccgccgatgagaaggaatccgagttgcgcgaaatcctgaactatggccacactttggcacacgcaatcgagcgccgggagcgctatgaatggcgtcatggcgccgccgtgtcggtgggcttggtgttcgcagccgaactggcccgagttgcggggcggctcgacgatgccacggcgcagcgacatcacaccattctgacctcgcttggcttgccggtcagctatgacgctgatgcgttgccgcagctgctggaatatatggccggggacaagaaaacccgggctggcgtgcttagattcgtgatcctcgatgggctggctaagccggggcggttagtggggccggacccagggctgttagtgactgcttacgcaggattgagtgcctga

SEQ ID NO: 1161 - protein, 361 aa, Mycobacterium leprae
MTNIDAPVTVQVAVDPPYPVVIGTGLSDQLDELLANRHRVAILHQPVLTQTAEAIRSHLAGKGVDAHRIEIPDAEAGKDLSVMDFIWEVLGRIGIGRKDALVSFGGGAATDVAGFAAATWLRGVSIVHVPTTLLGMVDAAVGGKTGINTEAGKNLVGAFHQPLAVLADLATLETLPRKEIASGMAEVVKAGFIADPIILDLIEADPQASLDPMGGVLPELIRRAVTVKAGVVSADEKESELREILNYGHTLAHAIERRERYEWRHGAAVSVGLVFAAELARVAGRLDDATAQRHHTILTSLGLPVSYDADALPQLLEYMAGDKKTRAGVLRFVILDGLAKPGRLVGPDPGLLVTAYAGLSA

SEQ ID NO: 1162 - DNA, 1080 bp, Neisseria gonorrhoeae
  CDS (1)..(1080): transl_table=11
atgaaaacactgaccgtacacacgccttcgcacagctaccccatctttatcggcaacgggctgctgccgcaggcgggaagcctgctcaaaccgcatttgggcaaacgcgccgccatcatcaccaacgaaaccgtcgccccgctctacctcggcacgcttcagacggcattggatgcggcaggcgtatcccatttcagcatcatcctgcccgacggcgaggcgcacaaaaactggcagacgctcaacctcatctttgacgggctgatgcaaaaccgcgccgaacgtaaaaccacgctgattgcgctgggcggcggcgtgatcggcgacatggtcggctttgccgccgccacctaccagcgcggcgcgccgttcatccaaataccgaccacgctgttgagtcaggtcgactcatcggtgggcggaaaaaccgccatcaaccacccgctcggcaaaaatatgatcggcgcgttttaccagccgcaggcggtgcttgcagatttggacacgctgcacaccctgcccgcccgcgaactgtccgccggtatggcggaagtcatcaaatacggcgcgctcggcgacatcggcttttttgaatggctggaacagcatatgcccgaactgatggcactcgaacgcgcgcccctcacccaagccgtgtaccgctgctgccaaatgaaggcagacatcgtcgcccaagacgaaaccgaacagggcatacgcgcatggctcaacctcggacacaccttcggacacgccgtcgaagcggaaatgggttacggcgtatggctgcacggcgaggccgttgccgccggctgcgtgttggcggcgcgtttgtccgaacaactgggcaaaacctccgccgcagataccgcgcggctcgccgccctgctcgaagccgccggactgccgtccgcaccgcccgtgtttgcctttgaaaaatggctggcacatatgagccacgacaaaaaagtcagcggcggcatcatgcgctttatcggtctgaaccggctgggcgaagccgtcatcaccgaaattaccgacacggacatcctccggcgcaccctgcaaccgtatctctga

SEQ ID NO: 1163 - protein, 359 aa, Neisseria gonorrhoeae
MKTLTVHTPSHSYPIFIGNGLLPQAGSLLKPHLGKRAAIITNETVAPLYLGTLQTALDAAGVSHFSIILPDGEAHKNWQTLNLIFDGLMQNRAERKTTLIALGGGVIGDMVGFAAATYQRGAPFIQIPTTLLSQVDSSVGGKTAINHPLGKNMIGAFYQPQAVLADLDTLHTLPARELSAGMAEVIKYGALGDIGFFEWLEQHMPELMALERAPLTQAVYRCCQMKADIVAQDETEQGIRAWLNLGHTFGHAVEAEMGYGVWLHGEAVAAGCVLAARLSEQLGKTSAADTARLAALLEAAGLPSAPPVFAFEKWLAHMSHDKKVSGGIMRFIGLNRLGEAVITEITDTDILRRTLQPYL

SEQ ID NO: 1164 - DNA, 1080 bp, Neisseria gonorrhoeae
  CDS (1)..(1080): transl_table=11
atgaaaacactgaccgtacacacgccttcgcacagctaccccatttttatcggcaacgggctgctgccgcaggcgggaagcctgctcaaaccgcatttgggcaaacgcgccgccatcatcaccaacgaaaccgtcgccccgctctacctcggcacgcttcagacggcattggatgcggcaggcgtatcccatttcagcatcatcctgcccgacggcgaggcgcacaaaaactggcagacgctcaacctcatctttgacgggctgatgcaaaaccgcgccgaacgtaaaaccacgctgattgcgctgggcggcggcgtgatcggcgacatggtcggctttgccgccgccacctaccagcgcggcgcgccgttcatccaaataccgaccacgctgttgagtcaggtcgactcatcggtgggcggaaaaaccgccatcaaccacccgctcggcaaaaatatgatcggcgcgttttaccagccgcaggcggtgcttgcagatttggacacgctgcacaccctgcccgcccgcgaactgtccgccggtatggcggaagtcatcaaatacggcgcgctcggcgacatcggcttttttgaatggctggaacagcatatgcccgaactgatgacactcgaacgcgcgcccctcacccaagccgtgtaccgctgctgccaaatgaaggcagacatcgtcgcccaagacgaaaccgaacagggcatacgcgcatggctcaacctcggacacaccttcggacacgccgtcgaagcggaaatgggttacggcgtatggctgcacggcgaggccgttgccgccggctgcgtgttggcggcgcgtttgtccgaacaactgggcaaaacctccgccgcagataccgcgcggctcgccgccctgctcgaagccgccggactgccgtccgcaccgcccgtgtttgcctttgaaaaatggctggcacatatgagccacgacaaaaaagtcagcggcggcatcatgcgctttatcggtctgaaccggctgggcgaagccgtcatcaccgaaattaccgacacggacatcctccggcgcaccctgcaaccgtatctctga

SEQ ID NO: 1165 - protein, 359 aa, Neisseria gonorrhoeae
MKTLTVHTPSHSYPIFIGNGLLPQAGSLLKPHLGKRAAIITNETVAPLYLGTLQTALDAAGVSHFSIILPDGEAHKNWQTLNLIFDGLMQNRAERKTTLIALGGGVIGDMVGFAAATYQRGAPFIQIPTTLLSQVDSSVGGKTAINHPLGKNMIGAFYQPQAVLADLDTLHTLPARELSAGMAEVIKYGALGDIGFFEWLEQHMPELMTLERAPLTQAVYRCCQMKADIVAQDETEQGIRAWLNLGHTFGHAVEAEMGYGVWLHGEAVAAGCVLAARLSEQLGKTSAADTARLAALLEAAGLPSAPPVFAFEKWLAHMSHDKKVSGGIMRFIGLNRLGEAVITEITDTDILRRTLQPYL

SEQ ID NO: 1166 - DNA, 1080 bp, Neisseria meningitidis serogroup A
  CDS (1)..(1080): transl_table=11
atgaaaacactgaccgtacacaccccgtcccacagctaccccatctttatcggcaacggactgctgccgcaggcaggaagcctgctcaaaccgcatttgggcaaacgcgccgccatcatcaccaacgaaaccgtcgccccgctctacctcggcacgcttcagacggcattggatgcggcaggcgtatcccatttcagcatcatcctgcccgacggcgaggcgcacaaaaactggcagacgctcaacctcatctttgacgggctgatgcaaaaccgcgccgaacgcaaaaccacgctcatcgcactgggcggcggcgtgatcggcgatatgacgggttttgcggcggctacttatcaacgcggcgcgccatttgttcaaattcccactactttattaagtcaggtcgattcctccgtcggcggcaaaaccgccatcaaccacccgctcggcaaaaatatgatcggcgcgttctaccagccgcaggcggtgcttgccgacttggacacgctgcacaccctgcccgcccgcgaactgtccgccggtatggcggaagtcatcaaatacggcacgctcggcgacattagtttttttgaatggctggaacagcatatgcccgaactgatggcactcgaacgcgcgcccctcatccaagccgtgtaccgctgttgccaaatgaaggcagacatcgtcgcccaagacgaaaccgaacagggcatacgcgcatggctcaacctcggacacaccttcggacacgccattgaaaccgagatgggttacggtacttggctgcacggcgaggccgtcgccgccggctgcgtgttggcggcgcgtttgtccgaacaactgggcaaaatctccgccgcagataccgcgcggctcgccgccctgctcgaagccgccggactgccgtccgcgccacccgtgtttgcctttgaaaaatggctggaacacatgagccacgataaaaaagtcagcggcggcatcatgcgctttatcggtctgaaccggctgggcgaagccaacatcaccgaaattaccgacacggacatcctccgccgcaccctgcaaccgtatctctga

SEQ ID NO: 1167 - protein, 359 aa, Neisseria meningitidis serogroup A
MKTLTVHTPSHSYPIFIGNGLLPQAGSLLKPHLGKRAAIITNETVAPLYLGTLQTALDAAGVSHFSIILPDGEAHKNWQTLNLIFDGLMQNRAERKTTLIALGGGVIGDMTGFAAATYQRGAPFVQIPTTLLSQVDSSVGGKTAINHPLGKNMIGAFYQPQAVLADLDTLHTLPARELSAGMAEVIKYGTLGDISFFEWLEQHMPELMALERAPLIQAVYRCCQMKADIVAQDETEQGIRAWLNLGHTFGHAIETEMGYGTWLHGEAVAAGCVLAARLSEQLGKISAADTARLAALLEAAGLPSAPPVFAFEKWLEHMSHDKKVSGGIMRFIGLNRLGEANITEITDTDILRRTLQPYL

SEQ ID NO: 1168 - DNA, 1080 bp, Neisseria meningitidis serogroup B
  CDS (1)..(1080): transl_table=11
atgaaaacactgaccgtacacaccccgtcccacagctaccccatctttatcggcaacggactgctgccgcaggcaggaagcctgctcaaaccgcatttgggcaaacgcgccgccatcatcgccaacgaaaccgtcgccccgctctacctcggcacgcttcagacggcattggatgcggcaggcgtatcccatttcagcatcatcctgcccgacggcgaggcgcacaaaaactggcagacgctcaacctcatctttgacgggctgatgcaaaaccgcgccgaacgcaaaaccacattaatcgcactgggcggcggcgtgatcggcgacatggtcggctttgccgctgccacctaccagcgcggcgcaccgttcgttcaaataccgaccacgctgttgagtcaggtcgactcatcggtgggcggcaaaaccgccatcaaccacccgctcggcaaaaatatgattggcgcgttttaccagccgcaggcggtgcttgccgacttggacacgctgcacaccctgcccgcccgcgaattgtccgccggtatggcggaagtcatcaaatacggcgcgctcggcgacatcggcttttttgaatggctggaacagcatatgcccgaactgatgacgctcgatcgggaaaaactcgcccaagccgtgtaccgctgctgccaaatgaaggcagacatcgtcgcccaagacgaaaccgaacagggcatacgcgcatggctcaacctcggacacaccttcggacacgccattgaaaccgagatgggttacggcacttggctgcatggagaagccatcgccgccggctgcgtgttggcggcgcgtttgtccgaacaactgggcaaaacctccgccgcagataccgcgcggctcgccgccctgctcgaagccgccggactgccgtccgcgccacccgtgtttgcctttgaaaaatggctggaacacatgagccacgataaaaaagtcagcggcggcatcatgcgctttatcggtctgaaccggctgggcgaagccaacatcaccgaaattaccgacacggacatcctccgccgcaccctgcaaccgtatctctga

SEQ ID NO: 1169 - protein, 359 aa, Neisseria meningitidis serogroup B
MKTLTVHTPSHSYPIFIGNGLLPQAGSLLKPHLGKRAAIIANETVAPLYLGTLQTALDAAGVSHFSIILPDGEAHKNWQTLNLIFDGLMQNRAERKTTLIALGGGVIGDMVGFAAATYQRGAPFVQIPTTLLSQVDSSVGGKTAINHPLGKNMIGAFYQPQAVLADLDTLHTLPARELSAGMAEVIKYGALGDIGFFEWLEQHMPELMTLDREKLAQAVYRCCQMKADIVAQDETEQGIRAWLNLGHTFGHAIETEMGYGTWLHGEAIAAGCVLAARLSEQLGKTSAADTARLAALLEAAGLPSAPPVFAFEKWLEHMSHDKKVSGGIMRFIGLNRLGEANITEITDTDILRRTLQPYL

SEQ ID NO: 1170 - DNA, 1110 bp, Nitrosomonas europaea
  CDS (1)..(1110): transl_table=11
atgaatgcaatagaatcaatcgaagttgcgcttgacaccctcccggaaaaccgcagttactccattcatatcggacaggggttgctctccagaatggatctgctgcttccccatctgcctggtaaaaaggctgcaatcgtcaccaataccaccatagcaccgctctacctggaaaaactgcgtagcgcgcttgccgagcatcacgtggaaaccttcgcgatcaccctgcccgacggcgaacggtacaaacactgggaaacgctgaatctgatctttgatgcactgctggaacaccgctgcgagcgcaggacaccgctgattgcactgggaggcggagtcatcggcgacctgaccggttttgcggccgccacctatttgcgcggcgtaccgttcatccagattcccaccaccctgctcgcgcaagtagattcgtccgtaggcggaaagaccgggatcaaccatccgcttggcaaaaacatgattggcgccttttaccagccgcaactggttctgactgattcagccaccctcaccaccctgccggacagggaactgcgcgccggcatcgcagaaatcatcaaatacggtctgatctatgacgcagatttcttcgactggctggaacagcacatgaactcactgctggcgcgtgatcctgcagcagtgaattacgcaatccgccgcagttgtgaaatcaaggctgaaatcgtttcgctggatgaacgtgaaagcggtttgcgggcgctgctcaatctgggccatacttttggccatgcaatcgagaatgccatgggttacggcgcatggctgcacggtgaggctgttgccgccggcaccctcatggcggctgatctctcccggcgtttgcagcgcattacctctcaggaggtcgatcgtatccggtacttgttcgaaaataccggattaccggtaaaaggcccgcgcatctcgcctgaacgctacctggaatcgatgcagctcgataaaaaagtaaaggagggcgccatccgtttcatcctgctcgatagtatcggcaaagcatcaccgggcgataccgtccccactcccctgctgcttgaaacattgtcagcctgcgttgccgatgcgtag

SEQ ID NO: 1171 - protein, 369 aa, Nitrosomonas europaea
MNAIESIEVALDTLPENRSYSIHIGQGLLSRMDLLLPHLPGKKAAIVTNTTIAPLYLEKLRSALAEHHVETFAITLPDGERYKHWETLNLIFDALLEHRCERRTPLIALGGGVIGDLTGFAAATYLRGVPFIQIPTTLLAQVDSSVGGKTGINHPLGKNMIGAFYQPQLVLTDSATLTTLPDRELRAGIAEIIKYGLIYDADFFDWLEQHMNSLLARDPAAVNYAIRRSCEIKAEIVSLDERESGLRALLNLGHTFGHAIENAMGYGAWLHGEAVAAGTLMAADLSRRLQRITSQEVDRIRYLFENTGLPVKGPRISPERYLESMQLDKKVKEGAIRFILLDSIGKASPGDTVPTPLLLETLSACVADA

SEQ ID NO: 1172 - DNA, 1059 bp, Protochlamydia amoebophila
  CDS (1)..(1059): transl_table=11
atgttaaactcatcaaactatgtcattcaaagccattgtttagatgatttaaaatactatttagagtctttatcttactcaaaagttgtcatcataactcatcctcagttatgggtaatgtatgagcagaaaataacggagcagttgtttaagctcagctggaatttttccgttttactgatccctgaaggtgaaacgagtaaaagcttaaaacaaacaacaagatgctggcgacattttatcaaacaccaactagatcgatattctcttgtggtcgctttaggaggcggtgttatctgtgatttagcgggatttgtagcctcttgctatatgagaggaatcgatacgatttatcttccaactacccttcttgccatggttgatgctagtatcggtggaaaaacaggaattaacacaagtaaatctaaaaatattataggatcattccatctacctaaaaaaattttaatagatccttttactttaaaaacactttcaaaaaagcattatcaagcaggttttgcagaaattattaaatatggaatgattgcctcaccctcactttttgaatttcttgaaaattcttggtcccttatagaacaaagagatgaaggattactcgagattatcattcaacaatcatgtgcaattaaaaaaaaatatgttgaagctgattttaaagatttgggaataagagcccagctgaactacggccatacatttggtcatgtaattgaaatgatgagccgttatcaatatttacatggggaagcagtttctattggaatgagctgcgctgcttatttaagttgtcaaatgggtttaacaacgcaagaaactatgcaaaggcaagatgcactttgtcaacaagctcaattacctattcatttacctcattttccgcttacacgtttcacttatttaatggcaaaagataaaaagggacgaaatggttctattaatctcattctgcctgaaaaagttggtaaagtgacacaaatttttgatgtagaccctcatttaataaaaaatactctgtcaacaaaaatgacaaaataa

SEQ ID NO: 1173 - protein, 352 aa, Protochlamydia amoebophila
MLNSSNYVIQSHCLDDLKYYLESLSYSKVVIITHPQLWVMYEQKITEQLFKLSWNFSVLLIPEGETSKSLKQTTRCWRHFIKHQLDRYSLVVALGGGVICDLAGFVASCYMRGIDTIYLPTTLLAMVDASIGGKTGINTSKSKNIIGSFHLPKKILIDPFTLKTLSKKHYQAGFAEIIKYGMIASPSLFEFLENSWSLIEQRDEGLLEIIIQQSCAIKKKYVEADFKDLGIRAQLNYGHTFGHVIEMMSRYQYLHGEAVSIGMSCAAYLSCQMGLTTQETMQRQDALCQQAQLPIHLPHFPLTRFTYLMAKDKKGRNGSINLILPEKVGKVTQIFDVDPHLIKNTLSTKMTK

SEQ ID NO: 1174 - DNA, 1089 bp, Pasteurella multocida
  CDS (1)..(1089): transl_table=11
atgttgtgtgtaaatgttgagttaaaagagcgccgttatccaatttatattggttcgggattactttcggatgaaaaatgctatcctttaaaatctggcgacaaagtcatgattgtgacgaacccaacgattgcacaatattatctttctcaagtgacagacaccttggtgaaaaaaggctgtttggttgaacatgtagtcttatcagatggtgaacaatataaaacactagactcgttaaatcttatttttacagcactgttgcaaggaaatcatggcagagatacgacgattattgctctcggtggtggtgtgatcggcgatgttgcaggttatgcggcggcgagttatcaacgaggtgtgcgttttattcaaattccgacaaccttattagcgcaagttgattcgtccgtagggggaaaaaccgcggtcaatcatgcgcttggtaaaaatatgatcggtgcgttctatcaaccttgtacggtgatcatcgatacattaaccttaaacagtttaccaaaacgagaaatcaatgcaggcttagctgaagtgattaagtatggcgcgattttagatctaccattctttacttggttggaacaaaatattgatagtctagtggcacgagatccagacaatttacaaacctgtattgcacgttgttgtcaaattaaggcagatgttgtcgcgcgcgatgaaacggaaaaaggcgatcgcgctttattaaatttagggcatacatttggtcatgcgattgaaacccacttagggtatgggcattggttacacggtgaagcggtggcggttgggatgctaatggctgcggtactttcagaaaaactggggaatttgacgaagactgatgtggcacgtcttgaaagattgctagctcgagccaacttaccgacagtctcaccagatactatgcaacctgaagactatctaccacatatgctacgcgataaaaaagtgctcgctggaaaattgcgtctcgtcttattagcgtctttaggtcaggcttatgtcgcaacagataccgatccagcgttagtgctagatgctattcgttgttgcacgcaggttaattga

SEQ ID NO: 1175 - protein, 362 aa, Pasteurella multocida
MLCVNVELKERRYPIYIGSGLLSDEKCYPLKSGDKVMIVTNPTIAQYYLSQVTDTLVKKGCLVEHVVLSDGEQYKTLDSLNLIFTALLQGNHGRDTTIIALGGGVIGDVAGYAAASYQRGVRFIQIPTTLLAQVDSSVGGKTAVNHALGKNMIGAFYQPCTVIIDTLTLNSLPKREINAGLAEVIKYGAILDLPFFTWLEQNIDSLVARDPDNLQTCIARCCQIKADVVARDETEKGDRALLNLGHTFGHAIETHLGYGHWLHGEAVAVGMLMAAVLSEKLGNLTKTDVARLERLLARANLPTVSPDTMQPEDYLPHMLRDKKVLAGKLRLVLLASLGQAYVATDTDPALVLDAIRCCTQVN

SEQ ID NO: 1176 - DNA, 1101 bp, Photorhabdus luminescens subsp
  CDS (1)..(1101): transl_table=11
atggaaaagatcactgtcactttaggggaacgtagttacccaattaccattgcaaaagggctatttgacgatccttctgcttttgcaccattaaaagcaggccagcaagttatgctggtgacgaatcaaaccctagctccgctgtatctggcaaaagtaaaagctactttgcaacaagccaggattcgggtagatgaagtgattctacctgatggtgaacagtacaaatctctttctgtattaaatgacgtattttctgctttgctggaaaatagccacagccgggacacaacacttatcgctctcggtggcggcgtaatcggtgatttaactggttttgccgctgcctgttatcaacgtggtgtccgttttattcaaatgcctaccacccttcttgcccaagttgattcctctgtcggaggaaaaaccgcagtaaaccatccctttggcaagaatatgataggtgcattctatcaaccagcctctgtgatggtcgatctcaactgcctgcaaacgcttccagcccgcgaactctcttccggtctggcagaggtcatcaagtacggtatcattcttgacagcgcattttttagctggcttgaagataatatggataaactcctggctcttgacaaccaagcaatggctcactgcatccgtcgttgctgcgaattgaaagctgaagttgtcgccgcagatgagaaagaattgagtggcttgcgtgccctgctgaatcttggtcacaccttcggtcacgccatcgaaacagaaatgggatatggtgtctggttacatggggaagcagtttccgccggaatggtcatggcagcaagaacagctcaacttattgataatttctctgaacaggatactcaacgtattatccgattgttggagcgagcaaatctgccggtacacgggccacaaaacatgccaccagaagcctacctcccacatatgatgcgagataagaaagttatagcaggtaaattacgactggttcttccaacaaaaataggtaaagctgatcttcgctcagatattgaacacaactgtgttgttgacgctatccttcagtgtttaccgtatgaaaatgtgtaa

SEQ ID NO: 1177 - protein, 366 aa, Photorhabdus luminescens subsp
MEKITVTLGERSYPITIAKGLFDDPSAFAPLKAGQQVMLVTNQTLAPLYLAKVKATLQQARIRVDEVILPDGEQYKSLSVLNDVFSALLENSHSRDTTLIALGGGVIGDLTGFAAACYQRGVRFIQMPTTLLAQVDSSVGGKTAVNHPFGKNMIGAFYQPASVMVDLNCLQTLPARELSSGLAEVIKYGIILDSAFFSWLEDNMDKLLALDNQAMAHCIRRCCELKAEVVAADEKELSGLRALLNLGHTFGHAIETEMGYGVWLHGEAVSAGMVMAARTAQLIDNFSEQDTQRIIRLLERANLPVHGPQNMPPEAYLPHMMRDKKVIAGKLRLVLPTKIGKADLRSDIEHNCVVDAILQCLPYENV

SEQ ID NO: 1178 - DNA, 1080 bp, Photobacterium profundum
  CDS (1)..(1080): transl_table=11
atggaacggatcaacgtcaacctaggtgacagaagctaccctatctctatcggcgccgagttgtttaacaccccggcgttgtttgcgtctgcaataagtgcaggacgacgtgttgttgtggtcagcaatgaaactgttgcaccactttacgcagcgcaagtgatggctactattcgtgctttagagtgcgaagtatcattattagaattaccggatggcgagcaatataaaaccttagaaacatttaatcagatcatgacattcttactgcaaggtaattatggtcgcgatgtggtgatggtggcactagggggcggcgtcattggtgatgttgtcggttttgctgctgcaagttaccaacgtggtgttgattttgttcaagtaccaacgacattgttgtctcaggtcgattcatcagtaggtggtaaaactgctgtgaatcatcctttgggcaagaatatgattggtgcgttttatcaaccgaaagcggtagttattgataatcagtgtttgaaaacattaccagcccgtgagtttgcttcgggtatggctgaagtgatcaaatatggcattatcgctgactatgagtttttcgtttggttagaacagaatattgaaaagctacaagctttagacaatgaggccttgtgttatgcaattggtcgttgttgtcagattaaagctgatgttgttgcttctgatgaaaaagagtctggtgttcgtgccttgctcaatttaggtcatacattcggtcatgcaattgaagctgaaatgggttacggaaactggctacacggtgaagctgttgcagcgggtactgtgtttgcggcaaaaactgctcatgagcagggtttgttatcagaagaggatgttatccgtattacccgtttgcatgaacgagcgcagttgccaataagtaaaccgacgtcgatggattatgatagttttatcaagcatatgatgcgtgataaaaaagttttatcaggtcaattgcgcctcgttttacccacatctatcggtactgctgaagttgtatcagatgtaccacacgacgttttacgccgtgtgattaatgcataa

SEQ ID NO: 1179 - protein, 359 aa, Photobacterium profundum
MERINVNLGDRSYPISIGAELFNTPALFASAISAGRRVVVVSNETVAPLYAAQVMATIRALECEVSLLELPDGEQYKTLETFNQIMTFLLQGNYGRDVVMVALGGGVIGDVVGFAAASYQRGVDFVQVPTTLLSQVDSSVGGKTAVNHPLGKNMIGAFYQPKAVVIDNQCLKTLPAREFASGMAEVIKYGIIADYEFFVWLEQNIEKLQALDNEALCYAIGRCCQIKADVVASDEKESGVRALLNLGHTFGHAIEAEMGYGNWLHGEAVAAGTVFAAKTAHEQGLLSEEDVIRITRLHERAQLPISKPTSMDYDSFIKHMMRDKKVLSGQLRLVLPTSIGTAEVVSDVPHDVLRRVINA

SEQ ID NO: 1180 - DNA, 1017 bp, Picrophilus torridus
  CDS (1)..(1017): transl_table=11
atggatttgaaatacaagctcggtaacgatgttataagaattgttaccggtaaaaacatattaaaggattttgcatgtgaattaaattccggtggaaatatttcaataataagcagaaacgtttacaaaaagtacgatctatcatttataaaaaataggattataatcgatgatggcgagagggccaagagcatggaatatttaacattaataataaatgagcttttaaataaaagggttgagcgtggcgattcaattatttacataggtggtggtacaacaggcgatctttcagggtttgccgcatccatttacaagcgtggcatgggtttaatagcggtaccaacaaccctgcttgcacaggtggacagctcaatcggcgggaaaaacggcataaattatatgaacataaaaaatttaatcggaacattttacaatccgaagcttataatcgatgatatatcatttatagatgataaaaagttgatgatggatggccttgcagagtcattgaagatgggaataaccatagaaccagagctctttaatattataaacaacgatcctgattacattatagaaaacattgagagaataataacactgagcataaatgcaaagttaagcatcgtttcaaaagatttccatgataaaaaacatttaaggtacgttcttaattttggacataccataggtcatgcactggaatcatattttaataataatatatcacatggtgaggccgttgcaaatggcatgataatagaggcatatatatcaaaatgccttggaaacgctgatatatcaaatgaaataagatctataataaagaggctcggctttaaaatcattgatttcaggtcagttgatatcaacaggcttttagagtacataaaaaatgataaaaaatccgaatcaggatacataaatatcgttgcggttaacggcataggaagatataaaatagaggccttaagtcctgaggaaatgttaaagatcctcggtgggatgccatga

SEQ ID NO: 1181 - protein, 338 aa, Picrophilus torridus
MDLKYKLGNDVIRIVTGKNILKDFACELNSGGNISIISRNVYKKYDLSFIKNRIIIDDGERAKSMEYLTLIINELLNKRVERGDSIIYIGGGTTGDLSGFAASIYKRGMGLIAVPTTLLAQVDSSIGGKNGINYMNIKNLIGTFYNPKLIIDDISFIDDKKLMMDGLAESLKMGITIEPELFNIINNDPDYIIENIERIITLSINAKLSIVSKDFHDKKHLRYVLNFGHTIGHALESYFNNNISHGEAVANGMIIEAYISKCLGNADISNEIRSIIKRLGFKIIDFRSVDINRLLEYIKNDKKSESGYINIVAVNGIGRYKIEALSPEEMLKILGGMP

SEQ ID NO: 1182 - DNA, 1104 bp, Prochlorococcus marinus
  CDS (1)..(1104): transl_table=11
gtgaaccaagacaactgccgcattaaagtcaacttaaaaaacaatccatatgaggttgtagtaggttcggaaatcttgtatacaattggagaagaactacttcgaataaatataagaacaggcgagaaaattctcatagttacaaaccctgatgtatcaaaaccttatagtagaagatttataacaagccttaaagaagctggttatgatgccaatcttttaatattagaagcgggtgaaaataaaaaaaattatgaaagcatagctcttatacacaatgctgcttatgagcatcaacttgacagaggttcactgattattgcattggggggtggtgtgatcggagatatggcaggttttgcagcagctacatggctaagaggtattgattttgtacaagtaccaacaacattgcttgcaatggtagatgcttcagtcggaggcaaaactggggtgaatcatccaaagggtaaaaacttgataggagctttccaccaacctaaattagtcttaattgatattaatactctaaaaacacttcctcaaagggaattccgttcaggaatggctgaaataattaaatatggtgtaataaaagaccttgaattatttaataaactagagaatgaagaagatctaagtaatatatattcaataaaagaatgtgtattattagaactaataaaaatatcagtatcaatcaaagctaggattgtagaaaaagacgaaaaagaatctggattgagagcaatacttaattatggacatacttttggtcatgttatagaaacactttgtggttatgggcattggttacacggagaagctgtgtcaatgggaatggttttaattggtcaattagcactaagaaagaatttgtggaatgtggatgatgcgcttaggcaagaaaagttactaactaaagcaggtctgccaataagctggcctaaaataaacaatgaagacgtattaagaacattgaaaggagataagaaggtagataaaggtaatattagattaatagttcctttaggaatagggatggttgaaattttaaatgatgttagcgaaaatgaaattaaatctcttttggaaagtatttaa

SEQ ID NO: 1183 - protein, 367 aa, Prochlorococcus marinus
MNQDNCRIKVNLKNNPYEVVVGSEILYTIGEELLRINIRTGEKILIVTNPDVSKPYSRRFITSLKEAGYDANLLILEAGENKKNYESIALIHNAAYEHQLDRGSLIIALGGGVIGDMAGFAAATWLRGIDFVQVPTTLLAMVDASVGGKTGVNHPKGKNLIGAFHQPKLVLIDINTLKTLPQREFRSGMAEIIKYGVIKDLELFNKLENEEDLSNIYSIKECVLLELIKISVSIKARIVEKDEKESGLRAILNYGHTFGHVIETLCGYGHWLHGEAVSMGMVLIGQLALRKNLWNVDDALRQEKLLTKAGLPISWPKINNEDVLRTLKGDKKVDKGNIRLIVPLGIGMVEILNDVSENEIKSLLESI

SEQ ID NO: 1184 - DNA, 1119 bp, Prochlorococcus marinus
  CDS (1)..(1119): transl_table=11
atgtccgctttcgtgaatatcgacgcccaacgcatcccagtagcactgagccaccagccctacgaggtggtcattgggggggaaggcttgcggggtgttggtaaggagcttcgccgtgctgggctgaaagagggaatcaaggtattggttgtaagcaatgctgatgttgctgagccatatggtgatctttgcctccaaagccttaaggagagcggtttcaggcccactctgctggtgatcgaggccggagaagatcaaaagacgccagtgagcgtggcgttaattcacgatgcagcctatgaagcaaagctagaaagaggatccttgatggttgctcttggcggtggggtagtgggcgacatgactggatttgcagcagctacttggctaagaggtatctcggtggtgcaacttcctacaacccttctggcaatggtggatgccgcgattggtggcaagacaggcgtcaatcacccgggcggaaaaaatctgatcggagcatttcaccaaccaaggcttgtattaatcgatccctcaactctgaaaacattgccagaacgtgaattccgggcagggatggccgaagtgatcaaatacggggtgatcggtgattcagcactttttcaactcctagaaggcattcaagaactagacacaccatcacaactccatcaagaccttctggagaaaattctcgaacgttcagcactcgcgaagtcgagagtggtgagctcagatgaacgagagggcgggctgcgcgccatccttaactacgggcacaccttcgggcatgtggtggaaaccctctgtggctatggaaactggctgcatggtgaagctgtcgccatcggcatggtggcggttggggagctggcggtgttgcgacagagctggagcagggatgatgccaacaggcaaaagtcgctgatcgcaaaggcagggctgccgattgcttggcccaagctagatccagaggaggtgctgtataccctgcaaggggataaaaaggtcaaagatggaaagcttcgctttgtgattcccaccggcattggcaacgtcgaaatcaaaaatgacgtaagcagagaagaaatccgaaaatgcctatcagagctcagctaa

SEQ ID NO: 1185 - protein, 372 aa, Prochlorococcus marinus
MSAFVNIDAQRIPVALSHQPYEVVIGGEGLRGVGKELRRAGLKEGIKVLVVSNADVAEPYGDLCLQSLKESGFRPTLLVIEAGEDQKTPVSVALIHDAAYEAKLERGSLMVALGGGVVGDMTGFAAATWLRGISVVQLPTTLLAMVDAAIGGKTGVNHPGGKNLIGAFHQPRLVLIDPSTLKTLPEREFRAGMAEVIKYGVIGDSALFQLLEGIQELDTPSQLHQDLLEKILERSALAKSRVVSSDEREGGLRAILNYGHTFGHVVETLCGYGNWLHGEAVAIGMVAVGELAVLRQSWSRDDANRQKSLIAKAGLPIAWPKLDPEEVLYTLQGDKKVKDGKLRFVIPTGIGNVEIKNDVSREEIRKCLSELS

SEQ ID NO: 1186 - DNA, 1092 bp, Prochlorococcus marinus subsp
  CDS (1)..(1092): transl_table=11
gtgcataagaacaaaatactagttcctctaagtaataattcatacgaagttattataaaacaaggattaattaataacattggagaagaactaatccgaattggtattaatagtaatagaaaaatacttatagtttctaataaagaaatctcaacattatttgggaggaaacttcttaataatttaaaaaagaataattttaatgctgaaatattcaatattaaagctggagaatcacataagaactttgcaagtttaagtgagatatttaatgctgcttttgaggttggtttggataggaattccctactaattgcactcggtggcggaattgtaggggatgtcactggttttgccgccgctacatggttaagaggtattgaatatattcaaatccctacaacattattatctatggttgattcatctgtaggtggtaaaacagcggttaatcatcctaaagggaaaaatctaataggagctttttatcagccaaaagcagtttttattgaccctgaaactctaataactttaccaacgagggaattcaaggcaggtatggcggaagttatcaaatatggcgtcataaaagataaatcacttttcgaatacttagaaaatgaaaagaatagagataaaatcctcaatctcgagaacgaatcattaataaaaataatcaataaatcaattaaaactaaggcttgtatagtttctgaagacgagaaagaaaatggaattcgagcaatattaaattatggtcattcctttggccacgtaatagaaaatttgtgcggatatggagagtatttacatggcgaagccatctcgattggaatgaaaattgcaggagatattgcgactgaaaagaacttgtggtcaaaagagcattctttaaggcaagatcatcttattgaaagctatggtctaccaatacaaacacctaaaatcaaaaagaatgacgtaatgaaaatacttatgggtgataaaaaagtacgtaatgggaaaatgagatttatattacctatagagcttggagaagttgatatatttaatgatataaatgaatcgcaattcctaaaatatttcaattag

SEQ ID NO: 1187 - protein, 363 aa, Prochlorococcus marinus subsp
MHKNKILVPLSNNSYEVIIKQGLINNIGEELIRIGINSNRKILIVSNKEISTLFGRKLLNNLKKNNFNAEIFNIKAGESHKNFASLSEIFNAAFEVGLDRNSLLIALGGGIVGDVTGFAAATWLRGIEYIQIPTTLLSMVDSSVGGKTAVNHPKGKNLIGAFYQPKAVFIDPETLITLPTREFKAGMAEVIKYGVIKDKSLFEYLENEKNRDKILNLENESLIKIINKSIKTKACIVSEDEKENGIRAILNYGHSFGHVIENLCGYGEYLHGEAISIGMKIAGDIATEKNLWSKEHSLRQDHLIESYGLPIQTPKIKKNDVMKILMGDKKVRNGKMRFILPIELGEVDIFNDINESQFLKYFN

SEQ ID NO: 1188 - DNA, 1104 bp, Pseudomonas syringae pv
  CDS (1)..(1104): transl_table=11
atgcagacacttaaggtcgagcttggtgagcgtagctacccgatccatattggcgaaggcctgctggatcagccagagctcctgaccccgcatatcgtcgggcgtcaggtggctatcgtttccaacacgacagtggcaccgctgtatctggagcgtctgacgcagaccctggccggttacaacgttcttccgattgttctgcccgatggcgaggcgttcaagaactgggaaaccctgcagaccattttcgatggcctgctgaccgctcgtcatgatcgccgcaccacggtcatcgccctgggcggcggtgtgattggcgacatggccgggtttgctgccgcctgttatcagcgcggcgtgaatttcatccagatccccaccacgttgctgtcccaggtggactcctcggtcggcggcaagaccggcatcaatcacccgttgggcaagaacatggtgggggccttctatcagccaagcgtcgtgctgatcgataccacctcgctcaataccctgcccgagcgtgagctgtccgccgggctggcagaggtcatcaagtacggcctgatctgcgacgagccgtttctgacctggcttgaagagcacgtcgacgcgctgcgcggactggatcaggcggcgctgaccgtggccatcgaacgctcctgtgcagccaaggcgctggtggtcggcgccgacgagcgtgagtccggtgttcgcgccacattgaacctgggtcacacattcggtcacgccatcgagacgcatatgggctatggtgtctggctgcatggcgaggcggtagctgctggtacggtcatggcgctggaaatgtcctcgcgtctgggctggatcagcacgcaggatcgggatcgcggtattcgcctgtttcagcgcgccgggctgcctgtggtgccaccacaggacatgacggaagacaatttcctcgaacacatggcgatcgacaagaaagtcatcgacggtcgcttgcgtctggtgctgttgcgccagatgggtgaagcggttatcacggacgattatccaaaagaagtattacaggccactctggttgcggactatcgcgccctggtggatcagcttagaggttaa

SEQ ID NO: 1189 - protein, 367 aa, Pseudomonas syringae pv
MQTLKVELGERSYPIHIGEGLLDQPELLTPHIVGRQVAIVSNTTVAPLYLERLTQTLAGYNVLPIVLPDGEAFKNWETLQTIFDGLLTARHDRRTTVIALGGGVIGDMAGFAAACYQRGVNFIQIPTTLLSQVDSSVGGKTGINHPLGKNMVGAFYQPSVVLIDTTSLNTLPERELSAGLAEVIKYGLICDEPFLTWLEEHVDALRGLDQAALTVAIERSCAAKALVVGADERESGVRATLNLGHTFGHAIETHMGYGVWLHGEAVAAGTVMALEMSSRLGWISTQDRDRGIRLFQRAGLPVVPPQDMTEDNFLEHMAIDKKVIDGRLRLVLLRQMGEAVITDDYPKEVLQATLVADYRALVDQLRG

SEQ ID NO: 1190 - DNA, 1107 bp, Pseudomonas aeruginosa
  CDS (1)..(1107): transl_table=11
atgcgcacacttcacgtcgatctaggcgagcgtagctatcccatttacatcggtgaaaacctgctgggcgacgcccgctggttcgcgccgcatatcgtcggtcgccgggtcgcggtgatcagcaacgaaacggtcgctcctctctatctggaaaccctgctcaaggcactgcaaggccacgaggtcacccctgtggtgctgcccgacggcgaggcctacaagcagtgggaaaccctgcaactgatcttcgatgtcctgctgaaggagcggcatgaccgcaagactaccctgatcgccctgggcggcggcgtcatcggtgacatggccggtttcgccgcggcctgctaccagcgtggggtcaacttcatccaggtgccgaccaccctgttgtcccaggtcgactcctcggtgggcggcaagaccgggatcaaccatccgttgggcaagaacatgatcggtgcgttctaccagccccaggcggtggtcatcgacaccgcgtcgctgaagacgctgccgtcccgcgagctgtccgccgggctggcggaggtgatcaagtacggtttcatttgcgacgaaccgttcatcacctggctggaagcgcacatggatgccttgctggcactggagccgaccgttgtcaccgaggccatcgagcgctcttgcgcggcgaaggcccgcgtggtgggcgccgacgagcgcgagtcgggcgtgcgtgccacgctgaacctcggccataccttcggtcacgcgatcgagacccagcaaggttacggcgtctggttgcacggcgaagcggtaggggcgggaaccgtgatggcactcgagatgtcgcatcggttgggttggctgagcgccgccgagcgcgatcgcggtatccgtctgctgcgccgggctggcctgcccgtggtaccgccggccgagatgacggcggaagattttatggaacacatggccgtcgacaagaaagtgctcgatggccgcctgcgtctggttttgctgcaaggactggggaatgccgtggtcaccggcgattttccccgtgagatcttggacgcgaccctgcgcaccgactatcgggccttggccgaccagcttggagatgaatga

SEQ ID NO: 1191 - protein, 368 aa, Pseudomonas aeruginosa
MRTLHVDLGERSYPIYIGENLLGDARWFAPHIVGRRVAVISNETVAPLYLETLLKALQGHEVTPVVLPDGEAYKQWETLQLIFDVLLKERHDRKTTLIALGGGVIGDMAGFAAACYQRGVNFIQVPTTLLSQVDSSVGGKTGINHPLGKNMIGAFYQPQAVVIDTASLKTLPSRELSAGLAEVIKYGFICDEPFITWLEAHMDALLALEPTVVTEAIERSCAAKARVVGADERESGVRATLNLGHTFGHAIETQQGYGVWLHGEAVGAGTVMALEMSHRLGWLSAAERDRGIRLLRRAGLPVVPPAEMTAEDFMEHMAVDKKVLDGRLRLVLLQGLGNAVVTGDFPREILDATLRTDYRALADQLGDE

SEQ ID NO: 1192 - DNA, 1101 bp, Pseudomonas fluorescens
  CDS (1)..(1101): transl_table=11
atgcagacacttaaggtcgatctaggcgagcgcagctacccgattcacattggtgaaggtctgttggaccagcccgagctgctggtgccgcatatcgccgggcggcaagtggcgatcatttccaatgagaccgtcgcgccgctttaccttgagcgtctgacccgcagcctggggcagttctcggtgatctcggtggttctgcccgatggcgaggcctacaagaactgggaaacgctgcagttgatcttcgatggcctgctcactgctcgccacgatcgacgcactaccatcatcgccctcggtggcggcgtgatcggtgatatggccggctttgccgcggcctgctaccagcggggcgtggatttcatccagattcctaccaccctcctgtcccaggtggactcttcggtgggtggcaagaccggtatcaaccacccgctgggcaagaacatggtcggcgccttctaccagccgaacgtggtgctgatcgataccaccagccttaacaccctgcccagccgcgagctgtcggcaggtctggcggaagtgatcaagtacggcctgatctgcgacgagcccttccttacctggctggaagagaacgtcgaccgcctgcgggccctggaccagcaggccctgacttacgccatcgagcgctcctgtgcggccaaggccgcggtggtgggtgccgacgaacgtgaatcgggagtgcgggccaccctcaacctggggcataccttcggccacgccatcgaaacccacatggggtacggtgtgtggctgcacggtgaggcggtggctgctggcaccgtaatggccctggaaatgtccgcgcgcctgggctggatcaccagccaggagcgtgaccgcggtattcgcctgttccagcgcgcgggcttgccggtcatcccgccagaggaaatgagcgaagcggattttctcgaacacatggcaattgacaagaaagtgatcgacggtcgtttgcgtctggtgctgttgcgccgcatgggcgaagccgtagtgaccgacgattatccgaaagaggttttacaggccacgctgggagcggactaccgcgccctggctcagcttaaaggttaa

SEQ ID NO: 1193 - protein, 366 aa, Pseudomonas fluorescens
MQTLKVDLGERSYPIHIGEGLLDQPELLVPHIAGRQVAIISNETVAPLYLERLTRSLGQFSVISVVLPDGEAYKNWETLQLIFDGLLTARHDRRTTIIALGGGVIGDMAGFAAACYQRGVDFIQIPTTLLSQVDSSVGGKTGINHPLGKNMVGAFYQPNVVLIDTTSLNTLPSRELSAGLAEVIKYGLICDEPFLTWLEENVDRLRALDQQALTYAIERSCAAKAAVVGADERESGVRATLNLGHTFGHAIETHMGYGVWLHGEAVAAGTVMALEMSARLGWITSQERDRGIRLFQRAGLPVIPPEEMSEADFLEHMAIDKKVIDGRLRLVLLRRMGEAVVTDDYPKEVLQATLGADYRALAQLKG

SEQ ID NO: 1194 - DNA, 1101 bp, Pseudomonas fluorescens
  CDS (1)..(1101): transl_table=11
atgcagacactcaaggtcgacctaggcgaacgcagctacccgattcacattggcgagggactgctggaccagccagagttgctggccccgcatatccatgggcggcaagtggcaatcatctccaacgagaccgttgcgccgctctatctcgagcgtctgacccgcagcctggcgcagttctcggtggtttccgtggtgctgcccgacggcgaagccttcaagaactgggaaaccctgcaactgatcttcgacggcctgctgaccgcccgtcatgatcgccgcaccacagtgatcgccctcggtggcggtgtgatcggcgacatggccggtttcgcggccgcctgctaccagcgcggcgtcgatttcatccagatccctaccacgctgctttcccaggtcgattcgtcggtgggcggcaagaccgggatcaaccatccgctgggcaagaacatggtcggcgcgttctatcagccgaacgtggtgctgatcgataccgcgtccctgaagaccctgccagcgcgtgagctctcggctggcctggcggaggtcatcaagtacggtctgatctgcgatgaaccgttcctgacctggcttgaagacaacgtcgacgccctgcgtgcgctggatcaaacggccctgacctatgccatcgagcgctcctgtgccgccaaggcggcggtggtcggcgccgacgagaaggaaaccggcgtgcgcgccacgctcaatctcggccacacctttggtcacgccatcgaaacccacatgggctatggtgtctggttgcatggtgaagcggtcgccgctggcaccgtgatggcgctggaaatgtccgcgcgcctgggctggatcagcgagcaggagcgtgatcgcggcatccgcctgttccagcgtgccggtctgccggtgatcccgccggaagagatgaccgaagccgattttcttgaacacatggcaattgacaaaaaagtgatcgacggtcgcttgcgcttggtgctgctgcgccggatgggcgaagcggtggtgaccgacgattatccgaaagaggttctacaggccacgctgggagcggattaccgcgctctggctcagcttaaaggttaa

SEQ ID NO: 1195 - protein, 366 aa, Pseudomonas fluorescens
MQTLKVDLGERSYPIHIGEGLLDQPELLAPHIHGRQVAIISNETVAPLYLERLTRSLAQFSVVSVVLPDGEAFKNWETLQLIFDGLLTARHDRRTTVIALGGGVIGDMAGFAAACYQRGVDFIQIPTTLLSQVDSSVGGKTGINHPLGKNMVGAFYQPNVVLIDTASLKTLPARELSAGLAEVIKYGLICDEPFLTWLEDNVDALRALDQTALTYAIERSCAAKAAVVGADEKETGVRATLNLGHTFGHAIETHMGYGVWLHGEAVAAGTVMALEMSARLGWISEQERDRGIRLFQRAGLPVIPPEEMTEADFLEHMAIDKKVIDGRLRLVLLRRMGEAVVTDDYPKEVLQATLGADYRALAQLKG

SEQ ID NO: 1196 - DNA, 1098 bp, Pseudomonas putida
  CDS (1)..(1098): transl_table=11
atgcagacactaaaggtcgacctgggcgagcgtagctacccgatctacattggcgaaggcctgctggaccagcctgagctgctggcgccgcacattgcgggtcggcaggttgccatcgtctccaacgagaccgtcgcgccgctgtatctcgaacgcctgagcaaggcccttggtgcctactcggtactgcccgttgtgttgcccgatggtgaagcccacaagaactgggaaacattgcagctgatcttcgatggcctgctgacagctcggcatgatcgtcgtactactgtggtcgctctgggtggtggcgtgattggtgacatggctggtttcgcagccgcctgctaccagcgcggtgtcgatttcatccaggtgccgactaccctgttgtcccaggtcgactcttccgtgggtggcaagaccggcatcaatcatccgctgggcaagaacatggtcggtgcgttctatcagcccaaggcggtgctgatcgataccaccagcctcaagaccctgccagcgcgcgagctgtctgcaggtctggccgaagtgatcaagtacggcctgatttgcgacaagccgttcctcgcctggctcgaagacaatatgcaggcactacgtgccctcgattcggcagccctgaccgaggccatccgccgctcctgcgcggccaaggcagcagtggtgggtgccgacgagcgcgagtccggcctacgggccacgctgaacctggggcataccttcgggcatgctatcgaaacccatatgggctatggcgtgtggctgcacggcgaagccgtcgcggcgggcacagtgatggccctggaaatgtccatgcgccttggctggatcgaccaggctgagcgcgatcgtggaatccgcctgttgcaggacgcaggtttgccggtggtgccaccacaggaaatgaccccggcgcatttcatggagcacatggcggtcgacaagaaggtgctcgacggtcgtttgcgtctggtgctgctgcgccagatgggcgaggccgtggtgaccgacgactattcgaaagagattctccaggccacgctgtcggcggattaccgcgcgatcgtggcccagctttga

SEQ ID NO: 1197 - protein, 365 aa, Pseudomonas putida
MQTLKVDLGERSYPIYIGEGLLDQPELLAPHIAGRQVAIVSNETVAPLYLERLSKALGAYSVLPVVLPDGEAHKNWETLQLIFDGLLTARHDRRTTVVALGGGVIGDMAGFAAACYQRGVDFIQVPTTLLSQVDSSVGGKTGINHPLGKNMVGAFYQPKAVLIDTTSLKTLPARELSAGLAEVIKYGLICDKPFLAWLEDNMQALRALDSAALTEAIRRSCAAKAAVVGADERESGLRATLNLGHTFGHAIETHMGYGVWLHGEAVAAGTVMALEMSMRLGWIDQAERDRGIRLLQDAGLPVVPPQEMTPAHFMEHMAVDKKVLDGRLRLVLLRQMGEAVVTDDYSKEILQATLSADYRAIVAQL

SEQ ID NO: 1198 - DNA, 1104 bp, Pseudomonas syringae pv
  CDS (1)..(1104): transl_table=11
atgcagacacttaaggtcgagctgggcgagcgcagctacccgatccatataggcgaaggcctgctggatcagccagagctccttgccccgcacattgtcgggcgtcaggtggccatcgtctccaacacgacggtcgcgccgctgtatctggagcgcctgactcagacgctggctggttacaatgtcctgccgattgttctgcccgatggcgaggcgttcaagaactgggaaaccctgcagaccattttcgatggcctgctcactgcccgtcacgaccgtcgtaccacggtcattgcgctgggtggcggagtgattggcgacatggccggtttcgctgcggcgtgttatcagcgcggcgtgaatttcattcagatcccgaccacgctgttgtctcaggtggactcctcggtcggcggcaagaccggcatcaaccatccgctgggcaagaacatggtcggtgcgttctatcagccaagcgtcgtgctgatcgacaccacctcgctcaataccctgcctgagcgtgagttgtccgccgggctggccgaagtcatcaagtacggtctgatctgcgatgagccgtttctgacctggctcgaagaacacgtcgacgccctgcgcgggcttgatcaggccgcgctgaccgtggccattgaacgctcctgcgccgcgaaggcgctggtggtcggtgccgatgagcgtgagtccggtgtgcgcgccacattgaacctggggcacacattcggccacgccatcgagacgcatatgggctatggtgtctggctgcatggcgaagcggtggctgccggtacggtcatggcgctggaaatgtcctcgcgcctgggctggatcagcacgcaggaacgggatcgcggcattcgcctgtttcagcgcgccgggctgccggtggtgccgccgcaagaaatgacggaagacaattttctcgaacacatggcgatcgacaagaaagtcatcgacggtcgcctgcgtctggtgctgttgcgccagataggtgaagcggttatcacggacgattatccacaagaagtattacaggccaccctggttgcggactatcgcgccctggtggatcagcttagaggttaa

SEQ ID NO: 1199 - protein, 367 aa, Pseudomonas syringae pv
MQTLKVELGERSYPIHIGEGLLDQPELLAPHIVGRQVAIVSNTTVAPLYLERLTQTLAGYNVLPIVLPDGEAFKNWETLQTIFDGLLTARHDRRTTVIALGGGVIGDMAGFAAACYQRGVNFIQIPTTLLSQVDSSVGGKTGINHPLGKNMVGAFYQPSVVLIDTTSLNTLPERELSAGLAEVIKYGLICDEPFLTWLEEHVDALRGLDQAALTVAIERSCAAKALVVGADERESGVRATLNLGHTFGHAIETHMGYGVWLHGEAVAAGTVMALEMSSRLGWISTQERDRGIRLFQRAGLPVVPPQEMTEDNFLEHMAIDKKVIDGRLRLVLLRQIGEAVITDDYPQEVLQATLVADYRALVDQLRG

SEQ ID NO: 1200 - DNA, 1104 bp, Pseudomonas syringae pv
  CDS (1)..(1104): transl_table=11
atgcagacacttaaggtcgagcttggtgagcgtagctacccgatccatattggcgaaggcctgctggatcagccagagctcctgaccccgcatatcgtcgggcgtcaggtggctatcgtttccaacacgacagtggcaccgctgtacctggaacgcctgacgcaaaccctggccggttacaacgttctgccgattgttctgcccgatggcgaggcgttcaagaactgggagaccctgcagaccattttcgatggcctgctgaccgcccgtcatgatcgtcgtaccacggtcatcgccctgggtggcggggtgatcggcgacatggccgggttcgctgccgcctgctatcagcgtggcgtgaacttcatccagatcccgaccacgctgctgtctcaggtggactcgtcggtcggcggcaagaccggcatcaaccacccgctgggcaagaacatggtcggtgccttctatcagccgagtgtggtgctgatcgataccgcctcgctcaatactctgcccgagcgcgagctgtccgccgggctggcggaagtcatcaagtacggcctgatctgcgacgaaccctttctgacctggctcgaagagcacgtcgatgcactgcgcgggctggaccaggcggcgctgaccgtggccatcgaacgttcctgcgccgccaaggcgctggtggtcggcgccgatgagcgcgagtccggtgttcgtgcgacattgaacctgggtcacacattcgggcacgccatcgagacgcatatgggctatggtgtctggctgcatggcgaggcggttgctgccggtacggtcatggcgctggaaatgtcctcgcgcctgggctggatcagcacgcaggagcgggatcgcggcattcgcctgtttcagcgtgccgggctgccggtcgtgccgccgcaggacatgacgcaagacaatttcctcgaacacatggcgatcgacaagaaagtcatcgacggtcgcttgcgtctggtgctgttgcgccggatgggtgaagcggttatcacggacgaatatccaaaagaagtattacaggccactctggttgcggattatcgcgccctggtggatcagctcagaggttaa

SEQ ID NO: 1201 - protein, 367 aa, Pseudomonas syringae pv
MQTLKVELGERSYPIHIGEGLLDQPELLTPHIVGRQVAIVSNTTVAPLYLERLTQTLAGYNVLPIVLPDGEAFKNWETLQTIFDGLLTARHDRRTTVIALGGGVIGDMAGFAAACYQRGVNFIQIPTTLLSQVDSSVGGKTGINHPLGKNMVGAFYQPSVVLIDTASLNTLPERELSAGLAEVIKYGLICDEPFLTWLEEHVDALRGLDQAALTVAIERSCAAKALVVGADERESGVRATLNLGHTFGHAIETHMGYGVWLHGEAVAAGTVMALEMSSRLGWISTQERDRGIRLFQRAGLPVVPPQDMTQDNFLEHMAIDKKVIDGRLRLVLLRRMGEAVITDEYPKEVLQATLVADYRALVDQLRG

SEQ ID NO: 1202 - DNA, 1038 bp, Pyrobaculum aerophilum
  CDS (1)..(1038): transl_table=11
atgaggcgcttcttttatactcacagcagaggagtgacagaagttgtagtcggcagagggattccctatgataaatacgtcgagaggcctgtggtgttaattgaggaggggcttgaaaaccccttgccaaacgcccccgctctggcgcttaagggcggggagggagttaagtccctagaggcgctcagcaaagtatatgtatttctgcaagaggcggaggctgacagggggagtactttagtggccgtggggggcggggcgttgctcgacttagccacctttgccgccgggacgtatatgaggggcatcggccttgtacaagtgccgactactctcctggccatggtagacgcggcgcttggggggaagggggctgttgactgggggcttgtgaaaaacctcgtcggcgtgttctaccagcctaaggcgatattatgcgacttagagtggctccgctccctccccccgcgggtttaccgctctgcttttgctgaagtggtgaaatacgggcttgcccttgacgaggagttttacagctggctacgccagagcacaacggctttgttaaacagaggggaagacgcgctggaggaggcggtctaccgctcgcttaaactcaaagcctccgtcgtggaggccgacgaatttgaggagaggggaattagacaggtgttaaacgtggggcacacagttggccacgcattagagcgcgtgttaggtcttttacacggcgaagctgtgtctttaggaattgcggcagagctacgcctttcggccgagctgggatatttaagggagaaatatgtcgaggagactaagtcgttattaaaggcgtttgaactgcccactgaggctgggctgtccagcgagcaactggccgccgcaaagggccttattaaatacgacaagaaaagacgcagggattacgtatacctccccctagtgataaggccgggcaagtggatccttgaaaggctaagagtagaggaggtcgcccgcgcagttgagtatgttgtgcctcaaggccggacggcttga

SEQ ID NO: 1203 - protein, 345 aa, Pyrobaculum aerophilum
MRRFFYTHSRGVTEVVVGRGIPYDKYVERPVVLIEEGLENPLPNAPALALKGGEGVKSLEALSKVYVFLQEAEADRGSTLVAVGGGALLDLATFAAGTYMRGIGLVQVPTTLLAMVDAALGGKGAVDWGLVKNLVGVFYQPKAILCDLEWLRSLPPRVYRSAFAEVVKYGLALDEEFYSWLRQSTTALLNRGEDALEEAVYRSLKLKASVVEADEFEERGIRQVLNVGHTVGHALERVLGLLHGEAVSLGIAAELRLSAELGYLREKYVEETKSLLKAFELPTEAGLSSEQLAAAKGLIKYDKKRRRDYVYLPLVIRPGKWILERLRVEEVARAVEYVVPQGRTA

SEQ ID NO: 1204 - DNA, 1008 bp, Pyrococcus furiosus
  CDS (1)..(1008): transl_table=11
atggaagggataatttttggagatctttcaacacttcccgatttgctttcttctctttctccctacaaggtagtagttctaactaacacaactctaaaggaattatggctcgaagaagttctaacgtggttaaaagagttcaaaccccagacaatcgttgttccagatggggaaaaatacaaagatttagatacagttagatatatttgggaaaaattactagaaatgggatttacacgaagatcactcctaatagggttaggtggaggggttataacagacattgctggttttgttgcctcaacatatatgagaggaacatacctaggtctcgttcccacaacacttctagcccaagttgatgcagctattgggggaaaaactggcataaatttctacgggaagaatataattggaacattttaccttccgaaattcgtgctaatttgtagggactttctcaagaccctcccaatggtggaaattcttaatgggttagctgaagttgtgaagtatggaatactagacaaagaagtctacaatgcaattaaaacaatgaactctcccagggaaattgtagaaagggaggatataataaagaaatctgtagcggtaaaactgagaatcgtagaggaagatttaaaggaaaacggaaagaggagagttctaaacttgggtcacacagtaggacatgccatagagaaaatttctgactacaaaataaaacacggcttcgcagtttcaatgggattagttgtggaagcaaaaattggagaaatattgtatggctttgattcagggaaagttgttgagatactaactaaatttggtttgcctgtaaaaataccctttgatccatacacaactcttcaagccatgaaaatcgacaaaaaggcttggtacggaaagatagttattgttgttccggttgagattggaaaagccaatattgaggaggtagatgaaaagataattctacaagcgctggaggaagctaaaaatgcctaa

SEQ ID NO: 1205 - protein, 335 aa, Pyrococcus furiosus
MEGIIFGDLSTLPDLLSSLSPYKVVVLTNTTLKELWLEEVLTWLKEFKPQTIVVPDGEKYKDLDTVRYIWEKLLEMGFTRRSLLIGLGGGVITDIAGFVASTYMRGTYLGLVPTTLLAQVDAAIGGKTGINFYGKNIIGTFYLPKFVLICRDFLKTLPMVEILNGLAEVVKYGILDKEVYNAIKTMNSPREIVEREDIIKKSVAVKLRIVEEDLKENGKRRVLNLGHTVGHAIEKISDYKIKHGFAVSMGLVVEAKIGEILYGFDSGKVVEILTKFGLPVKIPFDPYTTLQAMKIDKKAWYGKIVIVVPVEIGKANIEEVDEKIILQALEEAKNA

SEQ ID NO: 1206 - DNA, 1026 bp, Pyrococcus kodakaraensis
  CDS (1)..(1026): transl_table=11
atggagggcctgagcttcggccccctctccatccttccctccctcgcggaggagctcaacccccacagagtcgcctttctgacgaacacgacggtggagaggctctggcttgaaaaggccgccgaagggatagaggagccgataaggatagtcatcccagacggcgagaagtacaagagccttgagactgccgtagccatctggaagaggctccaggaggagggcttcacgaggaagtccctccttataggcctcggtgggggagtcgtgacagacatagcgggcttcgtggcctcgacctacatgaggggaaccctcctcggcctcgtcccaacgacgcttttggcccaggtggacgcggccatagggggcaagacaggggtgaacttcaacgggaagaacatgatagggacgttttaccttccaaacttcgtcctgatagcccatgaaaccctctccacgctcccagaggaggagataaggaacggccttggggaagttgcaaagtatgctctgctcgacaggaaggtctacgccctcgccaggaactttgaagggataagcgagaccctcatcagggaatgcgccctcttcaaggtggaggtagttgagaaggacctgggggagagcgggctgaggaggatactcaacctcgggcatacagccggacacgcgatcgagaagctgtcgaattacagaataaagcacgggcttgcggtttcgatgggactcatggtggcctcgaaggtcggggaagagctctacggcttcgattctggaaagaccgaagagctcctgaagaagctcgggctccccacggggcacccctttagggcggaggagatactggaggagatgaggctcgacaagaaggcctggtacgggaggataaccttcgtcatcccggttgaaataggcgatgtcgtcgttgaggaagtcgatgaggctgttttgaaaagggccctggaggcaacgagggatgatagcgggagtggtgactgccagaaacccgggggaagcgcttga

SEQ ID NO: 1207 - protein, 341 aa, Pyrococcus kodakaraensis
MEGLSFGPLSILPSLAEELNPHRVAFLTNTTVERLWLEKAAEGIEEPIRIVIPDGEKYKSLETAVAIWKRLQEEGFTRKSLLIGLGGGVVTDIAGFVASTYMRGTLLGLVPTTLLAQVDAAIGGKTGVNFNGKNMIGTFYLPNFVLIAHETLSTLPEEEIRNGLGEVAKYALLDRKVYALARNFEGISETLIRECALFKVEVVEKDLGESGLRRILNLGHTAGHAIEKLSNYRIKHGLAVSMGLMVASKVGEELYGFDSGKTEELLKKLGLPTGHPFRAEEILEEMRLDKKAWYGRITFVIPVEIGDVVVEEVDEAVLKRALEATRDDSGSGDCQKPGGSA

SEQ ID NO: 1208 - DNA, 1107 bp, Ralstonia eutropha
  CDS (1)..(1107): transl_table=11
atgatcacgctacaagtcgacctgggagagcgcagctatcccatccatatcggtaccggcctgctcggcaacgccgagctgctgcgcccgcatgtgcgcggccagcacgccgttatcgtcaccaatgaaaccgtcggcccgctctacgcggcccgcgtcgaagcgagcctgaaggaactgggcaagaccgtgcgcgtggtcacgctgcccgacggcgaagccttcaagcagtgggaaacgctgaacctgatcttcgatgcgctgctttccgctggcgctgatcgcaagaccacgctggtcgcgctgggcggcggcgtggtgggcgacatgaccgggtttgcggcggcgtgctacatgcgcggcgtgccgttcgtgcaggtgccgaccacgctgctgtcgcaggtggattcgtcggttggcggcaagaccggcatcaatcacccgctcggcaagaacatgattggcgcgttccaccagcccaacgcggtgattgccgacatcgacacgctgcgtacgctgcctgcacgcgagctggcagccggcatggccgaagtcatcaagcacggcgcgatcgccgacgccgattacttcgcctggatcgagcgcaatatcgccgcgctgaacagttgcgacccggacctgatggcgctggccgtacagcgctcgtgcgagatcaaggctggtgtcgtggcccaggacgagcgcgaaggcggattgcgtgcaatcctgaacttcggccataccttcggccatgccatcgaagccggcatgggctacggcgaatggctgcatggcgaagcagtgggctgcggcatggtgatggcggcggacctgtcgcaccggctcggctttatcgacacggagacgcgtgcgcgcatccggcaactgacgcaggcggccatgctacccatcgtcgcgccggaactgggcaccgaccgctatatcgaactgatgaaggtggacaagaaggccgaagccggcagcatcaagttcatcctgctgaagaagcttggcgaagcgttcatcaccacggttcccgataccgatctgcgcgcgacactggcgcaggcagtccttaaaccccccaccgaggccacggtcgcgtaa

SEQ ID NO: 1209 - protein, 368 aa, Ralstonia eutropha
MITLQVDLGERSYPIHIGTGLLGNAELLRPHVRGQHAVIVTNETVGPLYAARVEASLKELGKTVRVVTLPDGEAFKQWETLNLIFDALLSAGADRKTTLVALGGGVVGDMTGFAAACYMRGVPFVQVPTTLLSQVDSSVGGKTGINHPLGKNMIGAFHQPNAVIADIDTLRTLPARELAAGMAEVIKHGAIADADYFAWIERNIAALNSCDPDLMALAVQRSCEIKAGVVAQDEREGGLRAILNFGHTFGHAIEAGMGYGEWLHGEAVGCGMVMAADLSHRLGFIDTETRARIRQLTQAAMLPIVAPELGTDRYIELMKVDKKAEAGSIKFILLKKLGEAFITTVPDTDLRATLAQAVLKPPTEATVA

SEQ ID NO: 1210 - DNA, 1107 bp, Ralstonia solanacearum
  CDS (1)..(1107): transl_table=11
atgattaccgttgatgtcgacctgggcgagcgcgcctatccgatccatatcggaaccgggctcctgtcccaagccgaactgtttgccccccatatccgcggcacccgtgccgtgatcgtcaccaatgagacggtggcgccgctctatgccgctcgggtcgaagccgcgatccgctcgctgggcaagaccgtcgacatggtggtgctgcccgacggtgaatcgttcaagacgtgggagacgctcaaccggatcttcgatgcactcctggcctcgggcgctgaccgcaagaccaccctcgtggcgctcggcggaggggtgatcggcgacatgaccggatttgccgccgccagctatatgcgcggcgtgccgttcatccaggtgccgaccacgttgctgtcccaggtcgattcgtcggtggggggcaagaccgggatcaatcacccgctcggcaagaacatgatcggtgcgttccaccaaccgcaggcggtgctggccgacatcgacacgctgcgcacgctgccgccgcgcgagctcgccgccggcatggccgaagtcatcaagcatggcgcgatcgccgatgccgactacttcgcctggatcgagcgccacattgccggcctcaatgcttgcgatgccgacctgatggcaggagccgtgcgcggctcggtgcagatcaaggcggccgtggtggcacaggacgagcgcgagtccggtctgcgcgccatcctcaacttcggccacaccttcggccacgccatcgaagcgggcctggggtacggcgaatggctgcacggcgaggctgtcggctgcggcatggcgatggcggcggatctgtcgcaccggctcgggttcatcgacatcgatacgcgcaaccgcgtgacggcgctgacacgcgcggccaacctgccggtggtggcgcccgatctgggcgtggcgcgcttcatcgacctgatgcgcgtcgacaagaaggccgaggcgggcgagatcaagttcgtcctgctgcgcaagctgggccaagcgttcgtgaccacggtacccgacaccgacctgcgcgccacgctgcagcatgccgtgctgcgtccgcccaccgaagcgccggtggcctga

SEQ ID NO: 1211 - protein, 368 aa, Ralstonia solanacearum
MITVDVDLGERAYPIHIGTGLLSQAELFAPHIRGTRAVIVTNETVAPLYAARVEAAIRSLGKTVDMVVLPDGESFKTWETLNRIFDALLASGADRKTTLVALGGGVIGDMTGFAAASYMRGVPFIQVPTTLLSQVDSSVGGKTGINHPLGKNMIGAFHQPQAVLADIDTLRTLPPRELAAGMAEVIKHGAIADADYFAWIERHIAGLNACDADLMAGAVRGSVQIKAAVVAQDERESGLRAILNFGHTFGHAIEAGLGYGEWLHGEAVGCGMAMAADLSHRLGFIDIDTRNRVTALTRAANLPVVAPDLGVARFIDLMRVDKKAEAGEIKFVLLRKLGQAFVTTVPDTDLRATLQHAVLRPPTEAPVA

SEQ ID NO: 1212 - DNA, 1137 bp, Rhizobium loti
  CDS (1)..(1137): transl_table=11
gtgagcgcggaccagccagtcaccgtcgaagtcggccttggcgaccgggcctacgacatattgatcggctccggccttttgtcgcgcgccggcgaagagatttcgcgccggctgccgggtacgcgcgcggctgtcgtcaccgacgagaatgtcgctgccgcgcatctcgatacgttgaaggcagggctcgagaagggtggcatccagcccaccgtcatcacgatgccgcccggcgagaagaccaagagctttgcccatctcgaagaggtggtcgatgggattctggccgcaaggctggagcgtggcgacgtcgtcatcgcgctgggcggcggcgtcatcggcgatctcaccggtttttccgcgggcatcgtgcggcgcggcatgaatttcgtacaggtcccgacctcgctgctggcgcaggtcgattcctcggtgggcggcaagaccggcatcaacagcccgcgcggcaagaaccttgtcggcgtcttcctgcagccgaaactggtgctggccgacacggaagtgctcgacacgctgccgatccgcgaattccgcgccggctatgccgaactcgccaagtacgggctgatcgaccggccggaacttttcgcttggctggaggcgaactggcagaaggtgttcgccggcgggccggagcgagcgcaggcgattgccgaagcctgccgcgccaaggccgatgtcgtcgcgcgcgacgagttcgagaccggcgaccgggcgctcctcaatctcggccacacattcggccatgcgctcgaagccgccacgcagtatgacggcgcccgcctcgtccatggcgagggggtcgccatcggcatggcgctggcgcatcgcttctcctcgcggctcaatctggccagccccgacgacgcggcacgcgtcgagacgcatctgcgcgccgttggcctgccgtggcggatggccgatattccaggtgaattgcccgatgccgaggcgctgcttgccttcatcacccaggacaagaaggtttcgcgcggcgcgctgaccttcatcctgacgcgcggcatcggccaggctttcatcgccaaggacgttccggcttcggaagtgctgtcgttcctgagggaaaaccatccaaccagccggaaagccggctga

SEQ ID NO: 1213 - protein, 378 aa, Rhizobium loti
MSADQPVTVEVGLGDRAYDILIGSGLLSRAGEEISRRLPGTRAAVVTDENVAAAHLDTLKAGLEKGGIQPTVITMPPGEKTKSFAHLEEVVDGILAARLERGDVVIALGGGVIGDLTGFSAGIVRRGMNFVQVPTSLLAQVDSSVGGKTGINSPRGKNLVGVFLQPKLVLADTEVLDTLPIREFRAGYAELAKYGLIDRPELFAWLEANWQKVFAGGPERAQAIAEACRAKADVVARDEFETGDRALLNLGHTFGHALEAATQYDGARLVHGEGVAIGMALAHRFSSRLNLASPDDAARVETHLRAVGLPWRMADIPGELPDAEALLAFITQDKKVSRGALTFILTRGIGQAFIAKDVPASEVLSFLRENHPTSRKAG

SEQ ID NO: 1214 - DNA, 1134 bp, Rhizobium meliloti
  CDS (1)..(1134): transl_table=11
atgaccagccatgtgatgccaaccgccgagcgcaaggtccgcgtcgatctcgcagagcgttcctacgatatcctcatcggccccggtctgatcgccgcggcaggcaaggagatcgcttcccggctcaagggccggaagatggcggtcatcaccgacgagaacgtcgcgccgcgttatctcgaaccactgatggcgagcctcggggaaagcggcatcgaggccgtctccctcatcctgccggcaggcgagaagaccaagagcttcgagcacctgatcccggtttgcgaagccatcctcggcgccagaatcgagcgcaacgacgcggtgatcgcgctcggcggcggcgtcatcggcgatcttaccggctttgccgccggtatcgtccgccgcggttcgcgcttcatccagatcccgacatcgctgctggcgcaggtcgattcctcggtcggaggcaagaccgggatcaattcggcgcatggcaagaacctgatcggcgtcttccatcagcccgacctcgtcctcgccgatactgccgcgctcgacacgctgagcccgcgcgaattccgcgcaggctatgccgaggtcgcgaaatacggccttatcgacaagccggagttcttcgaatggctcgagaaaaactggcaggcggtgtttgcaggcggacccgcccggatcgaggcgattgccgtcagctgccaggcaaaggctgacgtcgttgccgcggacgagcgcgaaaacggacgtcgcgccctcctcaacctcggccataccttcggtcatgcgctggaggccgccaccgattacgacagcaagcggctggtgcatggagagggcgttgcgatcggcatggttctggcgcatgagttttcagcccggatgaatcttgcgagccccgacgatgcgcggcgggtggaggcccacctgaaaaccgtcggcctgccgacgcgcctcgccgacattcccggtgcattgccaccggccgatcggctgatggaggcgatcgcccaggacaagaaggtgaagggaggcaagctcaccttcatccttacgaggggcataggccagtccttcgtggcggacgacgtgccctcctcggaggtgttgagctttcttacggaaaagcatccgcgatga

SEQ ID NO: 1215 - protein, 377 aa, Rhizobium meliloti
MTSHVMPTAERKVRVDLAERSYDILIGPGLIAAAGKEIASRLKGRKMAVITDENVAPRYLEPLMASLGESGIEAVSLILPAGEKTKSFEHLIPVCEAILGARIERNDAVIALGGGVIGDLTGFAAGIVRRGSRFIQIPTSLLAQVDSSVGGKTGINSAHGKNLIGVFHQPDLVLADTAALDTLSPREFRAGYAEVAKYGLIDKPEFFEWLEKNWQAVFAGGPARIEAIAVSCQAKADVVAADERENGRRALLNLGHTFGHALEAATDYDSKRLVHGEGVAIGMVLAHEFSARMNLASPDDARRVEAHLKTVGLPTRLADIPGALPPADRLMEAIAQDKKVKGGKLTFILTRGIGQSFVADDVPSSEVLSFLTEKHPR

SEQ ID NO: 1216 - DNA, 1287 bp, Rhodopirellula baltica; identical to SEQ ID NO: 836
  CDS (160)..(1287): transl_table=11

SEQ ID NO: 1217 - protein, 375 aa, Rhodopirellula baltica
MTEPIESIEVSLGDRSYPIWISTGLTESAEQPHFAKHFQAAVGDCTHVVLIHDAAVSNTIASRVEKQLEQAGIRITSISIPSGETSKSVSKLESIWNVMLESGTDRRSVVVAVGGGVVGDLAGFAAASFTRGLRFVQVPTTLLSMVDSSVGGKTGINLPGGKNMVGSFWQPQMVWIDTQSLSTLPDRDFISGMAEVIKYGVIEDAEFFCWLQDKAARLIEKDPETLRYAIRKSCESKARVVAEDERETSGRRAILNYGHTFAHAIEATAGYGVCLHGEAVSIGMQMAAHLAIDMELCDRSLLEEQTAVLSAAKLPLAWKDADPEKMLPVMSHDKKVSHGKLRFVLPDRIGHVAMVGDVPSEKVIAAILACRDEPN

SEQ ID NO: 1218 - DNA, 1146 bp, Rhodopseudomonas palustris
  CDS (1)..(1146): transl_table=11
atgaacgccccgcagaaacactccgccccgatcaccgtcgaagtcgccctcggcgaccgcgcctatgagatcgtgatcggccgcgacgtgatcgcctcgctgggcgagcggattgccaagctgcggcccggcgcacgcaccgcgatcgtcaccgatcgcaccgtggcgaagacctggctgaagcgcaccgaggaggtgctggatcaggccggcatcgcgcatgcgtcggtgattgtcggcgaaggcgaaagctccaaaagctatgcggggctcgagcaggtgtgcgaggcgctgatcgccgccaagatcgagcgcaacgatctggtgatcgcgctcggcggcggcgtgatcggcgatcttgccggtttctcggcctcgctgctgcgccgcggcgtcgatttcgtgcaggtgccgacctcgctgctggcgcaggtcgactcctcggtcggcggcaagaccggcatcaactcgccgcagggcaagaatctgatcggcacgttccatcagccggtgctggtcttggccgacaccgcgatcctcgacacgctgtcgccgcgccaattccgcgccggctacgccgaagtcgcgaaatatggcgcgctcggtgacgaggcgttcttcgcctggctcgaagccaaccatgccgagctgttcagcggcggcgccgcgcgcgagcacgcggtggccacctcatgccgagccaaggccgcgatcgtcgcccgcgacgaacgcgagaccggtgaccgcgcgctgctcaatctcggtcacaccttcggccatgccctggaagcggcgaccggattctccgaccggctgttccacggcgagggcgtggcgatcggcatggtgctggcggcggagttctccgccgaacgcggcatgatgccggccaccgacgcggagcggttggccaagcacctcgccgaagtcgggctgccgacgcggctgcaggacatcgcaggcttcacccaggaaggccttgccgacgccgaccgcctgatggcgctgatggcgcaggacaagaaggtcaagcgcggcgaactcaccttcatcctgatggaaggcatcggccgcgcggtgatcgcgagcaaggtcgagccggcgccggtgcgcgacttcctgcagcggaaactggcgcaagcctaa

SEQ ID NO: 1219 - protein, 381 aa, Rhodopseudomonas palustris
MNAPQKHSAPITVEVALGDRAYEIVIGRDVIASLGERIAKLRPGARTAIVTDRTVAKTWLKRTEEVLDQAGIAHASVIVGEGESSKSYAGLEQVCEALIAAKIERNDLVIALGGGVIGDLAGFSASLLRRGVDFVQVPTSLLAQVDSSVGGKTGINSPQGKNLIGTFHQPVLVLADTAILDTLSPRQFRAGYAEVAKYGALGDEAFFAWLEANHAELFSGGAAREHAVATSCRAKAAIVARDERETGDRALLNLGHTFGHALEAATGFSDRLFHGEGVAIGMVLAAEFSAERGMMPATDAERLAKHLAEVGLPTRLQDIAGFTQEGLADADRLMALMAQDKKVKRGELTFILMEGIGRAVIASKVEPAPVRDFLQRKLAQA

SEQ ID NO: 1220 - DNA, 1158 bp, Rhodospirillum rubrum
  CDS (1)..(1158): transl_table=11
gtgagcccagacacagccgccgatgccgccgccgaccccgccttgcagtcgtccgttctgaccgtttccctgggcgagcgcagctatcccattcatatcggcccgggcttgctgggccgcgccggggctttgatcgcccccctcttgcgcaagccccgggttttcgtcgtcaccgatgccaccgtcgccgcgctgcatctcgatcccttgctggcctccctcggcgcggcgggcattgcccatgatcacgtcgtgctgccggccggcgaggcgaccaaaagcttttcccagcttgaagagctgcttgatcttttgctggcggcgcggttcgagcgctcgaccaccctgctcgccctcggcggcggggtgatcggcgatctggtcggcttcgccgccgccatcttgctgcgcggcgtcgatttcatccagatccccaccaccttgctcgcccaggtcgacagcagcgttggcggcaagaccggcatcaatacggcctatggcaagaatctggtcggcgccttccaccagccgcgtctggtgctggccgacaccaccgtgctggataccctgccccgccgcgaattgctggcgggctatggcgaggtggtcaaatacggcgtcatcgatgatcccgccttcttcgactggcttgaagagcatggctccgccctgatcgccggtgacggcggggcgcgcatccacgccgttctgaccgcctgccgcgccaaggcccgggtggtcgccgaggacgaacgcgaaggcggacgccgcgccctgctcaaccttggccacaccttcggccacgcgctggaggccgaaaccggctttggtcccaccttgctccatggcgaggcggtggccctcggcatggtgatggcccttgatctgtcggtgcgcctggggctgtgtccgcccgccgacgccgcccgcttgcgcgcccatcttgatcacgtcggcctgcccaccgatccccggcgtctcgagggtgccccggcctggaacgccgagcgcctgctggcggcgatggatcacgacaagaaggtcgaggatggcaaggtgaccttcgtgctggcgcgcggcatcggccggtcgctgctgtggcgcgaggccgatacggccagcgtgctcgccaccctgcgcgccgccgtggcgccctga

SEQ ID NO: 1221 - protein, 385 aa, Rhodospirillum rubrum
MSPDTAADAAADPALQSSVLTVSLGERSYPIHIGPGLLGRAGALIAPLLRKPRVFVVTDATVAALHLDPLLASLGAAGIAHDHVVLPAGEATKSFSQLEELLDLLLAARFERSTTLLALGGGVIGDLVGFAAAILLRGVDFIQIPTTLLAQVDSSVGGKTGINTAYGKNLVGAFHQPRLVLADTTVLDTLPRRELLAGYGEVVKYGVIDDPAFFDWLEEHGSALIAGDGGARIHAVLTACRAKARVVAEDEREGGRRALLNLGHTFGHALEAETGFGPTLLHGEAVALGMVMALDLSVRLGLCPPADAARLRAHLDHVGLPTDPRRLEGAPAWNAERLLAAMDHDKKVEDGKVTFVLARGIGRSLLWREADTASVLATLRAAVAP

SEQ ID NO: 1222 - DNA, 1113 bp, Rhodobacter sphaeroides
  CDS (1)..(1113): transl_table=11
atgacggtcgatgcggtgcgggtagagctgggcgcgcgcgcctacgaggtgcggatcgggccggggctcatcgcgcgggcgggggccgagatcgcgccgctcctgcggcggccgaaggtggcgatcctcaccgacgagacggtggcggggctgcatctcgatcccttccggcaggcgctggccgaggcgggcatcgcctcctcggcgctggcgctgcccgcgggcgaggccaccaagggctggccgcagttcgcccgcgccgtcgaatggctgctcgaggagaaggtcgagcggcgcgacgtggtggtggcgctgggcggcggggtgatcggcgatctggcgggcttcgcggccgccgtcctgcgccgcggcgtgcgcttcgtgcaggtgccgacgacgcttctggcgcaggtcgacagctcggtcggcggcaagaccgggatcaacacggcccaaggcaagaacctcgtcggcgccttccaccagccctcgctggtgctggccgacatcggcgtcctcgagacgctgccgccgcgcgacttccgcgcgggttacggcgaggtggtgaaatacggcctgctcggcgacgccgatttctacgaatggctggaggaggcgggcccgcggctggccgctgacgccgaggcccgccagcgtgccgtgcgccgctcggtcgagatgaaggccgagatcgtggcccgcgacgagaccgaggagggcgaccgcgcgctgctgaacctcggccataccttctgccacgcgctggaaaaggccaccggctattccggccggctcctccatggggaaggcgtggccatcggctgcgcgctggccttcgagctgagccagcgtctcggcctctgcgcccaggaagcgccgagccgcctgcgcgcccatctgcgggccatgggcatgaaggtcgacctccgcgacatcccgggcgatctgccctccgccgaggcgctgctcgccctgatggcgcaggacaagaaggtggtggacggcaagctgcgcttcatcctcgcccgcggcatcggacaggccttcgtcgccgatgacgtgccgggagacgtggttcgcacgctgcttgaggatgccctggcacagcgttga

SEQ ID NO: 1223 - protein, 370 aa, Rhodobacter sphaeroides
MTVDAVRVELGARAYEVRIGPGLIARAGAEIAPLLRRPKVAILTDETVAGLHLDPFRQALAEAGIASSALALPAGEATKGWPQFARAVEWLLEEKVERRDVVVALGGGVIGDLAGFAAAVLRRGVRFVQVPTTLLAQVDSSVGGKTGINTAQGKNLVGAFHQPSLVLADIGVLETLPPRDFRAGYGEVVKYGLLGDADFYEWLEEAGPRLAADAEARQRAVRRSVEMKAEIVARDETEEGDRALLNLGHTFCHALEKATGYSGRLLHGEGVAIGCALAFELSQRLGLCAQEAPSRLRAHLRAMGMKVDLRDIPGDLPSAEALLALMAQDKKVVDGKLRFILARGIGQAFVADDVPGDVVRTLLEDALAQR

SEQ ID NO: 1224 - DNA, 1089 bp, Salmonella choleraesuis
  CDS (1)..(1089): transl_table=11
atggagaggattacagtcactctcggggaacgtagttacccgatcaccatcgcggctggtttgtttaacgaaccagcttcattcttgccgctgaaatcaggcgatcaggtcatgttagtgaccaacgaaaccctggcgccgctttatctggacaaggttcgcggcgtactcgaacgggcgggcgttaacgtagacagcgtgattcttcctgacggcgagcagtataagagcctgacggtgctggatacggtgtttacggcgttactgaaaaaaccgcatggtcgtgataccactctggtcgcgcttggcggcggcgtgattggcgatctcaccggttttgcggcggccagctaccagcgaggcgtacgtttcatccaggtaccaactaccttactgtcgcaggttgattcttccgtgggcgggaaaaccgccgtcaaccatccccttggcaaaaacatgattggcgcgttttaccaacccgcttctgtggttgtcgatcttgattgcctgaaaacgcttcccgcacgcgaactggcatcggggctggcagaggtgatcaaatacggcattatactcgacgcagacttcttcacctggcttgagggtaatctggatgcgctattgcgtctggacggcccggcgatggcgtactgtattcgccgttgttgcgagctgaaagccgaagttgttgccgccgacgagcgtgaagcgggcttacgtgctttactgaatcttggacatacctttggccacgccattgaagcggaaatgggatatggcaattggttacatggtgaagccgttgccgcaggtatagtgatggctgcgcgcgcatccgagcgtttggggcagttcagttctgctgatacgcagcgcatcatcgcgctactcgaacgggccgggttgccagtcaatggcccttgcgagatgtccgcgcaggactatttgccgcacatgctgcgagataaaaaagtgttagcgggggagctgcgtttagtgcttccgctggccatagggaaaagtgaagtgcgcggcggagtgtcgcacgaagtcgttcttagcgcgattgctgactgtcagcaggcgtaa

SEQ ID NO: 1225 - protein, 362 aa, Salmonella choleraesuis
MERITVTLGERSYPITIAAGLFNEPASFLPLKSGDQVMLVTNETLAPLYLDKVRGVLERAGVNVDSVILPDGEQYKSLTVLDTVFTALLKKPHGRDTTLVALGGGVIGDLTGFAAASYQRGVRFIQVPTTLLSQVDSSVGGKTAVNHPLGKNMIGAFYQPASVVVDLDCLKTLPARELASGLAEVIKYGIILDADFFTWLEGNLDALLRLDGPAMAYCIRRCCELKAEVVAADEREAGLRALLNLGHTFGHAIEAEMGYGNWLHGEAVAAGIVMAARASERLGQFSSADTQRIIALLERAGLPVNGPCEMSAQDYLPHMLRDKKVLAGELRLVLPLAIGKSEVRGGVSHEVVLSAIADCQQA

SEQ ID NO: 1226 - DNA, 1089 bp, Salmonella typhi
  CDS (1)..(1089): transl_table=11
atggagaggattacagtcactctcggggaacgtagttacccgatcaccatcgcggctggtttgtttaacgaaccagcttcattcttgccgctgaaatcaggcgatcaggtcatgttagtgaccaacgaaaccctggcgccgctttatctggacaaggttcgcggcgtactcgaacgggcgggcgttaacgtagacagcgtgattcttcctgacggcgagcagtataagagcctgacggtgctggatacggtgtttacggcgttactgaaaaaaccgcatggtcgtgataccacgctggtcgcgcttggcggcggcgtgattggcgatcttaccggttttgcggcggccagctaccagcgaggcgttcgtttcatccaggtgccaactaccttactgtcgcaggttgattcttccgtgggcgggaagaccgccgtcaaccatccccttggcaaaaacatgattggcgcgttttaccaacccgcttctgtggttgtcgatcttgattgcctgaaaacgcttcccgcacgcgaactggcatcgggactggcagaggtgatcaaatacggcattatactcgacgcagacttcttcacctggcttgagggtaatctggatgcgctattgcgtctggacggcccggcgatggcgtactgtattcgtcgttgttgcgagctgaaagccgaagttgttgccgccgacgagcgtgaagcgggcttacgtgctttactgaatcttgggcatacctttggccacgccattgaagcggaaatgggatatggcaattggttacatggtgaagccgttgccgcaggtatagtgatggctgcgcgcgcatccgagcgtttggggcagttcagttctgctgatacgcagcgcatcatcgcgctactcgaacgggccgggttgccagtcaatggcccttgcgagatgtccgcgcaggactatttgccgcacatgctgcgagataaaaaagtgttagcgggggagctgcgtttagtgcttccgctgaccatagggaaaagtgaagtgcgcggcggagtgtcgcacgaagtcgttcttagcgcgattgctgactgtcagcaggcgtaa

SEQ ID NO: 1227 - protein, 362 aa, Salmonella typhi
MERITVTLGERSYPITIAAGLFNEPASFLPLKSGDQVMLVTNETLAPLYLDKVRGVLERAGVNVDSVILPDGEQYKSLTVLDTVFTALLKKPHGRDTTLVALGGGVIGDLTGFAAASYQRGVRFIQVPTTLLSQVDSSVGGKTAVNHPLGKNMIGAFYQPASVVVDLDCLKTLPARELASGLAEVIKYGIILDADFFTWLEGNLDALLRLDGPAMAYCIRRCCELKAEVVAADEREAGLRALLNLGHTFGHAIEAEMGYGNWLHGEAVAAGIVMAARASERLGQFSSADTQRIIALLERAGLPVNGPCEMSAQDYLPHMLRDKKVLAGELRLVLPLTIGKSEVRGGVSHEVVLSAIADCQQA

SEQ ID NO: 1228 - DNA, 1089 bp, Salmonella typhimurium
  CDS (1)..(1089): transl_table=11
atggagaggattacagtcactctcggggaacgtagttacccgatcaccatcgcggctggtttgtttaacgaaccagcttcattcttgccgctgaaatcaggcgatcaggtcatgttagtgaccaacgaaaccctggcgccgctttatctggacaaggttcgcggcgtactcgaacgggcgggcgttaacgtagacagcgtgattcttcctgacggcgagcagtataagagcctgacggtgctggatacggtgtttacggcgttactgaaaaaaccgcatggtcgtgataccacgctggtcgcgcttggcggcggcgtgattggcgatctcaccggttttgcggcggccagctaccagcgaggcgttcgtttcatccaggtgccaactaccttactgtcgcaggttgattcttccgtgggcgggaagaccgccgtcaaccatccccttggcaaaaacatgattggcgcgttttaccaacccgcttctgtggttgtcgatcttgattgcctgaaaacgcttcccgcacgcgaactgacatcgggactggcagaggtgatcaaatacggcattatactcgacgcggacttcttcacctggcttgaaggtaatctggatgcgctattgcgtctggacggcccggcgatggcgtactgtattcgtcgttgttgcgagctgaaagccgaagttgttgccgccgacgagcgtgaagcgggcttacgtgctttactgaatcttggacatacctttggccacgccattgaagcggaaatgggatatggcaattggttacatggtgaagccgttgccgcaggtatagtgatggctgcacgcgcatccgagcgtttagggcagttcagttctgctgatacgcagcgcatcatcgctctactcgaacgggccgggttgccagtcaatggcccttgcgagatgtccgcgcaggactatttgccgcacatgctgcgagataaaaaagtgttagcgggggagctgcgtttagtgcttccgctggccatagggaaaagtgaagtgcgcggcggagtgtcgcacgaagtcgttcttagcgcgattgctgactgtcagcaggcgtga

SEQ ID NO: 1229 - protein, 362 aa, Salmonella typhimurium
MERITVTLGERSYPITIAAGLFNEPASFLPLKSGDQVMLVTNETLAPLYLDKVRGVLERAGVNVDSVILPDGEQYKSLTVLDTVFTALLKKPHGRDTTLVALGGGVIGDLTGFAAASYQRGVRFIQVPTTLLSQVDSSVGGKTAVNHPLGKNMIGAFYQPASVVVDLDCLKTLPARELTSGLAEVIKYGIILDADFFTWLEGNLDALLRLDGPAMAYCIRRCCELKAEVVAADEREAGLRALLNLGHTFGHAIEAEMGYGNWLHGEAVAAGIVMAARASERLGQFSSADTQRIIALLERAGLPVNGPCEMSAQDYLPHMLRDKKVLAGELRLVLPLAIGKSEVRGGVSHEVVLSAIADCQQA

SEQ ID NO: 1230 - DNA, 1080 bp, Shewanella oneidensis
  CDS (1)..(1080): transl_table=11
atggcacaacaaattcaggttgatttaggtgaacgtagttaccccatttacattggccagagtttgatgagtgatagcgagaccttgtctcgctacctgctgaaaaaacgtatccttatcgtcaccaatgaaactgtcgcgcccttgtatctaaagcaggtgcaagacacgatggcttcgtttggtgagatatctagcgtcattctttccgatggcgaacagtttaaagatttaacccacttagattcaatttttacggctttgctgcaacgcaattatggccgtgattcagtgctggtggccctcggaggtggggtaattggtgatatgacgggctttgccgcggcatgttatcaacgtggtatcgattttattcaaatccctacaacgctattatctcaggtggattcttcggtcggtggcaaaacggcggtcaatcatcctctgggcaaaaatatgataggggctttttaccaaccgcaaattgtcattatcgatactgaatgtttacagacattgccggcgcgtgaatttgcggctgggatggcggaagtcattaagtatggcattatgtgggatgctgatttttttcaatggcttgaaaataatgttcaggcactgaaaagcttagatactcaagccttagtctatgccatctcccgctgttgtgagattaaagcggatgtggtgagccaagatgaaacagagcagggcgtgcgcgcgcttttgaatcttggacatactttcggccatgccattgaagctgagatgggctatggtaattggttgcacggcgaagcggttgcggctggcacagtccttgctgcacaaacggctaagtctttaggattgattgatgagtcaattgtctgtcgtattgtgcaattgctccaagcattcgatcttcctgtaaaagcgccggaatccatggatttcgaaagttttattcaacatatgcgtcgcgataagaaagtgttaggcggtcagatccggttggtacttccgacggccattggtcgagcagaagtatttagccaagtcccggaatctaccctagaacaggttatctgctgcgcataa

SEQ ID NO: 1231 - protein, 359 aa, Shewanella oneidensis
MAQQIQVDLGERSYPIYIGQSLMSDSETLSRYLLKKRILIVTNETVAPLYLKQVQDTMASFGEISSVILSDGEQFKDLTHLDSIFTALLQRNYGRDSVLVALGGGVIGDMTGFAAACYQRGIDFIQIPTTLLSQVDSSVGGKTAVNHPLGKNMIGAFYQPQIVIIDTECLQTLPAREFAAGMAEVIKYGIMWDADFFQWLENNVQALKSLDTQALVYAISRCCEIKADVVSQDETEQGVRALLNLGHTFGHAIEAEMGYGNWLHGEAVAAGTVLAAQTAKSLGLIDESIVCRIVQLLQAFDLPVKAPESMDFESFIQHMRRDKKVLGGQIRLVLPTAIGRAEVFSQVPESTLEQVICCA

SEQ ID NO: 1232 - DNA, 1089 bp, Shigella flexneri
  CDS (1)..(1089): transl_table=11
atggagaggattgtcgttactctcggggaacgtagttacccaattaccatcgcatctggtttgtttaatgaaccagcttcattcttaccgctgaaatcgggcgagcaggtcatgttggtcaccagcgaaaccctggctcctctgtatctcgataaggtccgcggcgtacttgaacaggcgggtgttaacgtcgatagcgttatcctccctgacggcgagcagtataaaagcctagctgtactcgataccgtctttacggcgttgttacaaaagccgcatggtcgcgatactacgctggtggcgcttggcggcggcgtagtgggcgatctgaccggcttcgcggcggcgagttatcagcgcggtgttcgtttcattcaagtcccgacgacgttactgtcgcaggtcgattcctccgttggcggcaaaactgcggtcaaccatcccctcggtaaaaacatgattggcgcgttctaccagcctgcttcagtggtggtggatctcgactgtctgaaaacgcttcccccgcgtgagttagcgtcggggctggcagaagtcatcaaatacggcattattcttgacggtgcgttttttaactggctggaagagaatctggatgcgttgttgcgtctggacggtccggcaatggcgtactgtattcgccgttgttgtgaactgaaggcagaagttgtcgccgccgacgagcgcgaaaccgggttacgtgctttactgaatctgggacacacctttggtcatgccattgaagctgaaatggggtatggcaattggttacatggtgaagcggtcgctgcgggtatggtgatggcggcgcggacgtcggaacgtctcgggcagtttagttctgccgaaacgcagcgtattataaccctgctcacgcgggctgggttaccggtcaatgggccgcgcgaaatgtccgcgcaggcgtatttaccgcatatgctgcgtgacaagaaagtccttgcgggagagatgcgcttaattcttccgttggcaattggtaagagtaaagttcgcagcggcgtttcgcacgagcttgttcttaacgccattgccgattgtcaatcagcgtaa

SEQ ID NO: 1233 - protein, 362 aa, Shigella flexneri
MERIVVTLGERSYPITIASGLFNEPASFLPLKSGEQVMLVTSETLAPLYLDKVRGVLEQAGVNVDSVILPDGEQYKSLAVLDTVFTALLQKPHGRDTTLVALGGGVVGDLTGFAAASYQRGVRFIQVPTTLLSQVDSSVGGKTAVNHPLGKNMIGAFYQPASVVVDLDCLKTLPPRELASGLAEVIKYGIILDGAFFNWLEENLDALLRLDGPAMAYCIRRCCELKAEVVAADERETGLRALLNLGHTFGHAIEAEMGYGNWLHGEAVAAGMVMAARTSERLGQFSSAETQRIITLLTRAGLPVNGPREMSAQAYLPHMLRDKKVLAGEMRLILPLAIGKSKVRSGVSHELVLNAIADCQSA

SEQ ID NO: 1234 - DNA, 1113 bp, Silicibacter pomeroyi
  CDS (1)..(1113): transl_table=11
atgatgaagacggtgcatgtggcgctgggggcgcgcagctatgatgtggaaatcgggccgggcctgattgccgaggcgggcgcgcggatcgcgcccctgctggcgcgcaagcgggttgcggtgctgaccgacgagacggtggccgccctgcatctggaagcgctgcgcgaagggctggccgctggcggtgtcacgatggaggcgctggcgctgccgccgggcgaatccaccaagggctggccgcagttcgaacgcgccgccgactggctgctggaccagaaggtcgagcgccgcgatgtggtggtggcctttggcggcggggtaatcggcgatctggcgggctttgccgccgccgtgctgcgccggggggtgcggttcgtgcagatcccgacctcgcttctggcgcaggtggacagttcggtgggcggcaagaccggtatcaatgcgtcccacggcaagaacctgatcggcgcctttcaccagccctcgctggtgctggccgatactgcggtgctgggcacgctgacggcgcgcgatttcctcgctggctatggcgaggtggtgaaatacgggctgctgggcgatgcggcgttttttgactggctcgaagggcagggcccggcgctggcggcaggcgacatggccgcccgggtcgaggcggtgacccgttcggtgcagatgaaggccgatatcgtcgcccgcgacgagaccgaacagggcgaccgggcgctgttgaatctgggccataccttctgtcacgcgctcgaggcggcgaccggctattccgaccggctgttgcatggcgagggggtggcgatcggctgtgcgctggcattcgaactgtcggcgcggctgggcctgtgttcgcaagaggacccaagccgggtgcgcgcgcatctcaaggcgatggggatgaagaccgatctgaccgatatccccggcgatctgccgacagccgatgtgctggtcgacctgatggcacaggacaagaaggtggtggacgggcagttgcgctttatcctggcgcgcggcatcggtcaggcctttgtcacctcggacgtcccgcgcgaggcggtgctgactgtacttgaggatgcgctggcaagttgctga

SEQ ID NO: 1235 - protein, 370 aa, Silicibacter pomeroyi
MMKTVHVALGARSYDVEIGPGLIAEAGARIAPLLARKRVAVLTDETVAALHLEALREGLAAGGVTMEALALPPGESTKGWPQFERAADWLLDQKVERRDVVVAFGGGVIGDLAGFAAAVLRRGVRFVQIPTSLLAQVDSSVGGKTGINASHGKNLIGAFHQPSLVLADTAVLGTLTARDFLAGYGEVVKYGLLGDAAFFDWLEGQGPALAAGDMAARVEAVTRSVQMKADIVARDETEQGDRALLNLGHTFCHALEAATGYSDRLLHGEGVAIGCALAFELSARLGLCSQEDPSRVRAHLKAMGMKTDLTDIPGDLPTADVLVDLMAQDKKVVDGQLRFILARGIGQAFVTSDVPREAVLTVLEDALASC

SEQ ID NO: 1236 - DNA, 1065 bp, Staphylococcus aureus
  CDS (1)..(1065): transl_table=11
atgaaattacaaacaacctatccttcaaacaattatccaatatttgttgaacatggtgcaattgaccatattagcacgtatattgatcagtttgatcaaagttttatattaattgacgagcatgtaaatcaatattttgctgataaatttgatgatattttatcatatgaaaatgtgcataaagtcattattccagctggtgaaaagacgaaaacatttgagcaatatcaagaaacattagaatacattttgtcacatcatgtaacgcgtaatacagcgattatagctgttggtggtggtgcgacaggagattttgcaggatttgtagcagcaacactattaagaggtgtccattttatacaagttcctacaacgattttggcgcatgattctagtgttggcggtaaagtgggtattaactcaaaacaaggtaaaaaccttatcggtgcattttatcgtccaactgctgtgatttatgatttagactttttaaagacgttaccatttgagcaaatattaagtggctatgcagaagtttataagcatgcgttattgaatggtgaatcaacgacgcaagaaatcgaacagcactttaaagatagagagatattacagtcattaaatggtatggataaatatattgctaaaggtattgaaacgaagctggatattgttgttgcagatgaaaaagaacaaggtgtacgtaaatttttaaatttaggtcatacatttggtcatgccgtggagtataaccacaaaattgcacacggtcatgccgtaatgataggcataatatatcaatttattgttgcgaatatattgttcaattctaatcacgatatccaacattatattaattatttaacgaaattaggttatcctttagaaacaataaccgacatagatttcgaaacgatatatcaatacatgctaagtgataaaaagaacgacaaacaaggagttcaaatggtattgattaaacattttggcgatattgtagtgcaacacattgatcaaacaacactgcaacatgcgtgtgaacaactaaaaacatattttaagtag

SEQ ID NO: 1237 - protein, 354 aa, Staphylococcus aureus
MKLQTTYPSNNYPIFVEHGAIDHISTYIDQFDQSFILIDEHVNQYFADKFDDILSYENVHKVIIPAGEKTKTFEQYQETLEYILSHHVTRNTAIIAVGGGATGDFAGFVAATLLRGVHFIQVPTTILAHDSSVGGKVGINSKQGKNLIGAFYRPTAVIYDLDFLKTLPFEQILSGYAEVYKHALLNGESTTQEIEQHFKDREILQSLNGMDKYIAKGIETKLDIVVADEKEQGVRKFLNLGHTFGHAVEYNHKIAHGHAVMIGIIYQFIVANILFNSNHDIQHYINYLTKLGYPLETITDIDFETIYQYMLSDKKNDKQGVQMVLIKHFGDIVVQHIDQTTLQHACEQLKTYFK

SEQ ID NO: 1238 - DNA, 1092 bp, Streptomyces avermitilis
  CDS (1)..(1092): transl_table=11
atgagcgaggcagtcacccggatccacgtcggcggtaccgcggggacggacccgtacgaggtgctggtcggccgacagctcctgggcgaactcgccggtctgatcggggacagggtcaagcgcgtcgccgtcgtccaccccgaggcgctcgccgagaccggtgaggcgctgcgggccgacctggccgagcaggggtacgaggccgtcgccatccaggtgccgaacgcggaggaggccaagaccgtcgaggtcgccgcctactgctggaaggcgctcggccagtccgggttcacgcgcaccgacgtgatcgtcggcgtgggcggcggcgccaccaccgacctcgccggattcgtcgccgccacctggctgcgcggcgtgcgctggatcgccgtccccaccaccgtcctcggcatggtcgacgcggccgtcggcggcaagaccggtatcaacaccgccgagggcaagaacctcgtcggcgcgttccacccgcccgcgggcgtcctgtgcgacctcgcggcgctggactcgctgccggtcaacgactacgtctccgggctcgccgagatcatcaaggccggcttcatcgccgacccggcgatcctggagctcatcgaggccgacccgcaagcggcccgcactcccgcgggaccgcacaccgccgagctgatcgagcgctccatcaaggtcaaggccgaggtcgtctccggcgacctcaaggagtcgggcctgcgcgagatcctcaactacggccacaccctcgcgcacgccatcgagaagaacgagcgctacaagtggcggcacggcgcggccgtctccgtaggcatgcacttcgccgccgaactcggccgtctggcaggccggttggacgacgcgacggcggaccggcaccgcacggtcctggaatcggtcgggctgccgctgcactaccgctacgaccagtggcccaagctgctcgagaccatgaaggtcgacaagaagtcacgcggcgacctgctccgcttcatcgtcctcgacgggctcgccaagcccaccgtcctcgagggcccggacccggccgtcctgctcgccgcgtacggcgaagtgggggagtaa

SEQ ID NO: 1239 - protein, 363 aa, Streptomyces avermitilis
MSEAVTRIHVGGTAGTDPYEVLVGRQLLGELAGLIGDRVKRVAVVHPEALAETGEALRADLAEQGYEAVAIQVPNAEEAKTVEVAAYCWKALGQSGFTRTDVIVGVGGGATTDLAGFVAATWLRGVRWIAVPTTVLGMVDAAVGGKTGINTAEGKNLVGAFHPPAGVLCDLAALDSLPVNDYVSGLAEIIKAGFIADPAILELIEADPQAARTPAGPHTAELIERSIKVKAEVVSGDLKESGLREILNYGHTLAHAIEKNERYKWRHGAAVSVGMHFAAELGRLAGRLDDATADRHRTVLESVGLPLHYRYDQWPKLLETMKVDKKSRGDLLRFIVLDGLAKPTVLEGPDPAVLLAAYGEVGE

SEQ ID NO: 1240 - DNA, 1092 bp, Streptomyces coelicolor
  CDS (1)..(1092): transl_table=11
atgagcgaggcagtcacccggatccaggtcggcggcaccgcggggtccgagccctacgaggtcctggtgggccgtcagctcctgggcgagctgggcggtctgatcggggcgaaggcgaagcgggtcgcggtgatccaccccgaggcgctcgccgagaccggtgacgcgctgcgcgccgacctcgccgctcagggctacgaggcgatcgcgatccaggtgcccaacgccgaggaggccaagaccgccgaggtcgccgcgtactgctggaaggcgctgggccagtccgggttcacccgtaccgacgtcatcgtcggggtcggcggcggcgccagcaccgacctggccgggttcgtggccgcgacctggctgcgcggggtgcgctggatcgccgtccccaccaccgtgctgtccatggtggacgcggccgtcggcggcaagaccggcatcaacaccgccgagggcaagaacctcgtcggctccttccacccgccggccggtgtcctgtgcgacctcgccgccctggactccctcccggtcaacgactacgtctccggcctcgccgaggtcatcaaggccggcttcatcgcagacccggcgatcctcgacctgatcgaggccgacccgcaggccgcgcggacgccggccggtccgcacaccgccgagctgatcgtgcgctccatcaaggtcaaggccgaggtcgtctcgtccgacctgaaggaagcgggcctgagggagatcctgaactacggccacaccctcggccacgccatcgagaagaacgagcgctacaagtggcgccacggcgccgccgtatcggtcggcatgcacttcgccgccgaactcggccgcctcgcgggccgcctggacgacgccaccgccgaccgccaccgctccatcctcgaagcggtcggcctcccgctgcactaccgctacgaccagtggcccaagctcgtcgagaacatgaaggtcgacaagaagtcgcgcggcgacctgctgcgcttcatcgtcctggacggcctcgccaagcccaccgttctggagggccccgacccggccgtcctcctcgccgcctacggcgaggtgggcgagtag

SEQ ID NO: 1241 - protein, 363 aa, Streptomyces coelicolor
MSEAVTRIQVGGTAGSEPYEVLVGRQLLGELGGLIGAKAKRVAVIHPEALAETGDALRADLAAQGYEAIAIQVPNAEEAKTAEVAAYCWKALGQSGFTRTDVIVGVGGGASTDLAGFVAATWLRGVRWIAVPTTVLSMVDAAVGGKTGINTAEGKNLVGSFHPPAGVLCDLAALDSLPVNDYVSGLAEVIKAGFIADPAILDLIEADPQAARTPAGPHTAELIVRSIKVKAEVVSSDLKEAGLREILNYGHTLGHAIEKNERYKWRHGAAVSVGMHFAAELGRLAGRLDDATADRHRSILEAVGLPLHYRYDQWPKLVENMKVDKKSRGDLLRFIVLDGLAKPTVLEGPDPAVLLAAYGEVGE

SEQ ID NO: 1242 - DNA, 1068 bp, Streptococcus pneumoniae
  CDS (1)..(1068): transl_table=11
atgaaaatcagaatcgatattcctcatcatccttatgatattcagattgaaaaaggttgtatggcccaggctggtcagtggttgcgagaactctggcaaccgcaaaaggtagtcattgtgacagataaccatgtagcctctctctatgcagagaaggtcaagctcagcctagaagatgctggttttcaggtagctgtttttgatttcttagaaggtgaagaaagaaagaatttaactactgttcagaaagtctatgaatttctagtcaagcaaggtctgactcgtagcgatggaatcgttgctcttggtggtggcgttgttggggacctggctggctttgtagcctctacctatatgcggggtattcactttgttcagattccgactagtttgacagctcaggttgattcttctatcggtggaaagacaggcgttaacacaccatttgctaaaaatatggtggggacctttgcccaaccagatggggttctgattgatccacttgttcttgaaaccctcggaaaaagagagttgattgaagggatgggtgaagttatcaagtatggcttgattgaggatccagaactgtgggctctcttgacggggctgaatggttctgttgagagcattttggaacatgcagagaccttgattgaacattcttgtcaggtgaagcgcaagatggtggttgaagatgagttggacaatggtattcgtctttacctcaattttggccacactattggccatgccatcgaagcgactgccggttatggcaaggtcatgcatggagaggctgttgccatgggaatggtacagatttccaagattgctgaggaaaaaggcctcatgccagctggcattacccaatctatcacagagatgtgtcagaaattcggcttgcctgttgactatgaaaattgggaagttgacaagctttatcaggctcttactcatgacaagaaagcgcgtggcaacaccttgaaattggtcttggtgccagagcttggttcagcgaccattcatccagtttctctggaagagatgaaagactacttggtaaaataa

SEQ ID NO: 1243 - protein, 355 aa, Streptococcus pneumoniae
MKIRIDIPHHPYDIQIEKGCMAQAGQWLRELWQPQKVVIVTDNHVASLYAEKVKLSLEDAGFQVAVFDFLEGEERKNLTTVQKVYEFLVKQGLTRSDGIVALGGGVVGDLAGFVASTYMRGIHFVQIPTSLTAQVDSSIGGKTGVNTPFAKNMVGTFAQPDGVLIDPLVLETLGKRELIEGMGEVIKYGLIEDPELWALLTGLNGSVESILEHAETLIEHSCQVKRKMVVEDELDNGIRLYLNFGHTIGHAIEATAGYGKVMHGEAVAMGMVQISKIAEEKGLMPAGITQSITEMCQKFGLPVDYENWEVDKLYQALTHDKKARGNTLKLVLVPELGSATIHPVSLEEMKDYLVK

SEQ ID NO: 1244 - DNA, 1077 bp, Symbiobacterium thermophilum
  CDS (1)..(1077): transl_table=11
gtggaactcggcgaggaacgctacccgatttacgtgggcgccgggctgatggcgcagctgggcgcgctggtgcggcggcacctgccggagacccggcgggccctgctggtgaccgatgccaacgtcgcgcccctctacggggaggccgcccgcgcagctctggagcaggccgggatcaccaccgcccgggtgacggtgccggccggcgaggcgtccaagtcgctgtcccaggcttacagcctgtacagcagctgcgtccgggcggagctggaccgcaccagcgcggtcgtcgccctgggcggcggcgtggtcggtgacctggccgggttcgtcgcggccacctacctgcgggggatccccctggtgcaggtgcccaccaccctgctcgcacaggtggactcgtccatcggcgggaagaccggcgtcgacctgccccagggcaagaacctggtgggggcgttccaccagccctctctggtggtggccgacgtggagaccctgaagagcctgccccggcgggagctgtccgccgggatggccgaggtggtcaagcacggggtcatccgggacgaggaattcctgaagtacgtggaggtccaggtgggcaacgtgctcgccggcgaccccgcggtgctggagcgggtggtggcggagagctgccggatcaaggccgaggtggtggccgcggacccccgcgagaaggggctgcgggcgatcctcaacttcggccacaccgtgggccacgccctggaggcggccatcgggttccgctggcttcacggcgagtgcgtcgcggtcggcatggttgcggcggcgcacatcgcccggcacagcggcattgcacaggagggccggctggagctccggctgacgcgtctgctggagcgcctcgacctgcccaccacgctgccggagggcatggatcccaaggacctggagcccttcctgcggcgggacaagaagatcaagagcggagtgatccactgggtgatgcccgtgcggcccggcgaggtggtcgtcacgcccgacgtttcgcccgatgccatccggtggggactggaagcgctgaggaggtaa

SEQ ID NO: 1245 - protein, 358 aa, Symbiobacterium thermophilum
MELGEERYPIYVGAGLMAQLGALVRRHLPETRRALLVTDANVAPLYGEAARAALEQAGITTARVTVPAGEASKSLSQAYSLYSSCVRAELDRTSAVVALGGGVVGDLAGFVAATYLRGIPLVQVPTTLLAQVDSSIGGKTGVDLPQGKNLVGAFHQPSLVVADVETLKSLPRRELSAGMAEVVKHGVIRDEEFLKYVEVQVGNVLAGDPAVLERVVAESCRIKAEVVAADPREKGLRAILNFGHTVGHALEAAIGFRWLHGECVAVGMVAAAHIARHSGIAQEGRLELRLTRLLERLDLPTTLPEGMDPKDLEPFLRRDKKIKSGVIHWVMPVRPGEVVVTPDVSPDAIRWGLEALRR

SEQ ID NO: 1246 - DNA, 1107 bp, Synechococcus sp
  CDS (1)..(1107): transl_table=11
atgtccgttcaaatccctgttgctctgccgcaaaacgcctacgagattgcgatcgcgaatgggggattggccgcagcagggacttggttgcagcaagctgatctgaaggcgggcacgaaacttctgattgtgaccaacccggcgatcgggcggcgttacggcgatcgcctcgtggcagcactgcaagaagcaggtttcatcgtcgactgcctgaccctaccggctggcgaacgctacaaaacgccagcaacagttcaacgcatctatgacaaagccctagaactgcggctggagcgccgttcggccttggtcgccttgggtggcggcgtgattggtgacatgacaggttttgcggcggcaacctggttgcgcggcattagctttgtgcagatcccgacctccctgctggcaatggttgatgcttcgattgggggcaaaaccggcgtcaatcatccccgtggcaaaaacctgatcggggcgtttcatcaacccaagctggtgctaattgatccagaaacgctacaaaccctgcccgtacgggagttccgtgccggcatggctgaggtaattaagtatggcgtgatttgggatcgggatttgtttgagcggttggaagcaagcccctttctcgatcgcccgcgatcgctaccggccaatctcctaacgctgatcttagagcgctcctgtcgcgccaaagcagaggtggttgccaaggatgaaaaagaatcgggcttgcgggccatcctcaactacggccatacgattggccacgccgtcgaaagtctgacaggctatcgcatcgttaaccatggcgaagctgtggcgatcgggatggttgcggcgggacggctggctgtggcgctaggactctggaatcaggatgaatgtgatcgccaagaagccgtgattgctaaagcgggcttaccaacacgcctaccagaagggattgatcaagctgcaatcgtcgaggctctacaactcgacaaaaaagtgcaggcaggcaaggtacggtttattctgccaacgacgctcggccacgtcacgattaccgatcaggtaccgagccaaaccctgcaagaggtgctgcaggcgatcgccaacccctaa

SEQ ID NO: 1247 - protein, 368 aa, Synechococcus sp
MSVQIPVALPQNAYEIAIANGGLAAAGTWLQQADLKAGTKLLIVTNPAIGRRYGDRLVAALQEAGFIVDCLTLPAGERYKTPATVQRIYDKALELRLERRSALVALGGGVIGDMTGFAAATWLRGISFVQIPTSLLAMVDASIGGKTGVNHPRGKNLIGAFHQPKLVLIDPETLQTLPVREFRAGMAEVIKYGVIWDRDLFERLEASPFLDRPRSLPANLLTLILERSCRAKAEVVAKDEKESGLRAILNYGHTIGHAVESLTGYRIVNHGEAVAIGMVAAGRLAVALGLWNQDECDRQEAVIAKAGLPTRLPEGIDQAAIVEALQLDKKVQAGKVRFILPTTLGHVTITDQVPSQTLQEVLQAIANP

SEQ ID NO: 1248 - DNA, 1116 bp, Synechococcus sp
  CDS (1)..(1116): transl_table=11
atggtctcctcaccaaccctgcgtcggatcgccgtcgccttggaacgcaacccctatgaggtggtgatcggcgccggtggcctgagccgccttggggacgaactcctgaaggccggaattcagcccggccgacggatcctggtggtcagcaacccggacgtcgccgccccctatggagaggggtgcctgcaaagcctgcgtcaacagggcttccacgccgaccttctggtgattgatgcgggagaagagcgcaaaactccagccacggtggccgccatccatgattccgcctttgagcagcgtctggagcgcagctcgttgatgctggccttgggtggaggggttgtcggagacatgaccggatttgcagcagccacctggctgcgcgggatccaggtgattcaggtccccacgacccttctggccatggtcgatgccgccatcggcggcaaaacaggggtgaaccatcccggcggcaagaacctgatcggcgcctttcaccagccgagcctggtgctgatcgatcccgaaacgctcaacacattgcccgagcgggagttcagggccggcatggcggaggtgatcaagtacggaattcttggcgatcccgcgctgttccagtgcctggaggaggggccagaacccaactcagctgctggccttggcaacagccggctcgaaaccattctggaacgatcggcagcggccaaagcacgggtggttgctgcggacgaacgggaaggggggctgcgggccgtgctgaattacggccataccttcggtcatgtggtggaaaccctctgtggttacggcacctggctgcacggcgaggcagtggccatcgggatggtggcggtcgggcagttagccgtgaaccgcggcagctggacggcggacgaggccgggcgccagacgcagctgatccagcgctgtgggctaccgacggcctggccggatctggaccctgacgccgtgctgcgcacccttcagggagataagaaagtgaaagacggtcgcttgcgcttcgtgctgcccatggccatcggccgcgtggagatccgcgatgacatcagccgggatgaaatcctgcattgtctggaccagttgcgaggctga

SEQ ID NO: 1249 - protein, 371 aa, Synechococcus sp
MVSSPTLRRIAVALERNPYEVVIGAGGLSRLGDELLKAGIQPGRRILVVSNPDVAAPYGEGCLQSLRQQGFHADLLVIDAGEERKTPATVAAIHDSAFEQRLERSSLMLALGGGVVGDMTGFAAATWLRGIQVIQVPTTLLAMVDAAIGGKTGVNHPGGKNLIGAFHQPSLVLIDPETLNTLPEREFRAGMAEVIKYGILGDPALFQCLEEGPEPNSAAGLGNSRLETILERSAAAKARVVAADEREGGLRAVLNYGHTFGHVVETLCGYGTWLHGEAVAIGMVAVGQLAVNRGSWTADEAGRQTQLIQRCGLPTAWPDLDPDAVLRTLQGDKKVKDGRLRFVLPMAIGRVEIRDDISRDEILHCLDQLRG

SEQ ID NO: 1250 - DNA, 1086 bp, Synechocystis sp
  CDS (1)..(1086): transl_table=11
atggccaccactatccccgttcccctgccccagtccccctatcaagtacagattgtgccgggaggattagcggcaattgccgaccatttagctccccttggtttgggcaaaaaaattatggtggtgtccaatccggaaatttatgactactacggcgaagtagtgatccaagccttacaaagggctggctatgaagtttttcagcatttaattcccgctggggaaacccataaaaccctggcttccattaatgagctttacgatgtcgctttccaggccaatttggagcggaattccaccctgctgtccctggggggaggtgtcatcggtgatatgacggggtttggggcggccacttggctccggggcattaattttgttcaggtacccacttccttgctagccatggtggatgcttccattggcggcaaaacgggggtgaaccatccccagggcaaaaatttaattggtgctttttaccagccgcgcttggtgtatattgaccccgttgtgttaaaaaccctaccggaacgggaatttcgggcagggatggcggaggtaattaaatacggagtgatttgggattcagaattattcacagccctagaagaagcggaagatttgtctagcatcgatcgcctgccggacgaattattaaccaaaatcatccaacgttcctgccaagctaaagtggatgtggtcagccaagacgaaaaggaagcgggattacgggccatcctcaactacggtcatactgtcggccatggggtggaaagtctaacgggctatggagtgattaaccacggggaagcagtggccattggcatggaagcggcggccaaaattgcccattacctaggactttgtgaccaatccctcggcgatcgccaacggcaattattgcttaaaactaaattacccacggagatgcccccaaccctggcggtggagaacttgctagcgagtttactacacgacaaaaaagtcaaagcgggcaaggttcgtttcattctccccacggcgatcgggcaagtaactatcagtgatgctgtcaccgacgaagttattaaggcaaccctaggctaa

SEQ ID NO: 1251 - protein, 361 aa, Synechocystis sp
MATTIPVPLPQSPYQVQIVPGGLAAIADHLAPLGLGKKIMVVSNPEIYDYYGEVVIQALQRAGYEVFQHLIPAGETHKTLASINELYDVAFQANLERNSTLLSLGGGVIGDMTGFGAATWLRGINFVQVPTSLLAMVDASIGGKTGVNHPQGKNLIGAFYQPRLVYIDPVVLKTLPEREFRAGMAEVIKYGVIWDSELFTALEEAEDLSSIDRLPDELLTKIIQRSCQAKVDVVSQDEKEAGLRAILNYGHTVGHGVESLTGYGVINHGEAVAIGMEAAAKIAHYLGLCDQSLGDRQRQLLLKTKLPTEMPPTLAVENLLASLLHDKKVKAGKVRFILPTAIGQVTISDAVTDEVIKATLG

SEQ ID NO: 1252 - DNA, 1107 bp, Thermobifida fusca
  CDS (1)..(1107): transl_table=11
atgacggtcacccgcatcggagtcgggggcacctccacgccctacgacgtagtcgtgggcaacggcatcctgggagaactgcccgccctcgtgggggagcgcgcccagcgggtcgcagtcatccaccccgacaccctggaggagaaggcccggcccgtgtgcgagatcctgcgcaccgccggatacgacgtcttcccgctccccgtcccggacggggaggccgccaaagacgtctccgtggccgcagacctgtgggctcggctcggccaggctgccttcacccgcaccgacgtgatcgtgggcgtgggcggcggggccaccaccgacctggccggattcgttgcagccacctggctgcggggggtgcgcgccatcctcgtgcccaccaccctcctcggcatggtcgacgccgcggtcggcgggaagaccgggatcaacaccgctgaagggaagaacctcgtcggcgcgttccacccgcccgccggagtcgtgtgcgacctcgacaccctgccgtccctgccgcgggaggactacatcggcggcctcgccgaggtcatcaaagccgggttcatcgccgacccggtcatcctggacctggtcgaagccgacccggaggccgccacccggcccgacggcgcacacacgcgggaactcatcgaacgggccatcgcggtcaaagccgaggtggtctccgctgacctgcgcgaaagcggacgccgcgagatcctcaactacgggcacacgctcggccacgccattgaacgcgccgagaactacacgttccggcacggctacgcgatctccatcggcatggtctttgccgccgaactggcccgcctggacggccggatcgatgcggcgctcgtggcccggcaccgccgtatcctggaatcggtgggacttccggtgcgctaccgcgccgacgcctggcccgccctgcgggacacgatccgggtggacaagaagacccgcggcgcaaccctgcgcttcgtcgtcctcgacgacgtggccgcacccgcgatcctggccggtccctccgatgccctgctggcccaggcctaccaggcggtgagtggcgtcgcgccggacgcgcccgacaccgactag

SEQ ID NO: 1253 - protein, 368 aa, Thermobifida fusca
MTVTRIGVGGTSTPYDVVVGNGILGELPALVGERAQRVAVIHPDTLEEKARPVCEILRTAGYDVFPLPVPDGEAAKDVSVAADLWARLGQAAFTRTDVIVGVGGGATTDLAGFVAATWLRGVRAILVPTTLLGMVDAAVGGKTGINTAEGKNLVGAFHPPAGVVCDLDTLPSLPREDYIGGLAEVIKAGFIADPVILDLVEADPEAATRPDGAHTRELIERAIAVKAEVVSADLRESGRREILNYGHTLGHAIERAENYTFRHGYAISIGMVFAAELARLDGRIDAALVARHRRILESVGLPVRYRADAWPALRDTIRVDKKTRGATLRFVVLDDVAAPAILAGPSDALLAQAYQAVSGVAPDAPDTD

SEQ ID NO: 1254 - DNA, 1071 bp, Thermoanaerobacter tengcongensis
  CDS (1)..(1071): transl_table=11
atggatgaagtgattgttgaattgaaggaaaggtcttatcctatttattttgactatgaaggttttgatagagttggagatttaattaaaaaacatgtgagaagcagcaagacatttgttattactgattctaatgtttatcctttgtattttgaaaagattgaagaaagccttagaaaaagtggattcgatgtcttatatgaagttatacctgctggtgagacgagcaaaactatggaaatggcacaaagacttcttgaggtagcttatgacagtggtcttttaagggatagttctatcattgcactggggggaggagttgttggagatatagccgggtttgttgctgcgacctatatgagaggaattgattttattcagattcctacgacattgttagctcaggtagacagcagtgttggtggtaaggtagcggtaaatctaaaaaaaggtaagaatatagttggagctttttatcaacctaaaatggtgtatattgatacttcagttttggggactttgaataaaagagaagttcttggtggattagctgaagtaatcaagtatggagttatatgggactttgatttgtttacctatattgaagaaaatttgggtgatattttgagattaaaaaaggaggatttgacttatatagttaaaaggtcatgtgagataaaagctaaggttgtatcattggatgaaaaagaagagaatttaagagcgatattaaattttgggcatacaataggtcatgctattgaggctttaacagggtatgagagatatattcacggagaagctgtggcaataggaatggcgtatgaggcacggcttgcatttaacttgggatatattgatgaaggatatttagagcgcatattgaatttaattaaaagagcgggactgccagctgactatgagggtattgaaaagacggatatgctaaatgccataaagcttgataaaaaaatgagagaagggagaataaattttgttctacctgtaggtttaggcaaagtggatattgtgagtgtgaaagaagaagatgtattaaaagttttgaaataa

SEQ ID NO: 1255 - protein, 356 aa, Thermoanaerobacter tengcongensis
MDEVIVELKERSYPIYFDYEGFDRVGDLIKKHVRSSKTFVITDSNVYPLYFEKIEESLRKSGFDVLYEVIPAGETSKTMEMAQRLLEVAYDSGLLRDSSIIALGGGVVGDIAGFVAATYMRGIDFIQIPTTLLAQVDSSVGGKVAVNLKKGKNIVGAFYQPKMVYIDTSVLGTLNKREVLGGLAEVIKYGVIWDFDLFTYIEENLGDILRLKKEDLTYIVKRSCEIKAKVVSLDEKEENLRAILNFGHTIGHAIEALTGYERYIHGEAVAIGMAYEARLAFNLGYIDEGYLERILNLIKRAGLPADYEGIEKTDMLNAIKLDKKMREGRINFVLPVGLGKVDIVSVKEEDVLKVLK

SEQ ID NO: 1256 - DNA, 1083 bp, Thermoplasma volcanium
  CDS (1)..(1083): transl_table=11
gtggatacccagagatttgtaataacgatgaacggcgataatatatcctttatcgtgggagataacgcaatcaaccacttatccgaggaagctgggaagtatgatagtatcgttataatgataagcaagaccgtcgaggagatgtatgcaaaccatatacctgatgtaggtagctttggaaattccgtggtaaagatatccctcaacgatggagaatcattaaaatcgttaagaaactatcaaaagatcgttaaagtgctgctggagagaaaggtagacagacgatccctgctggtatacattggtggtggtacggtaggagaccttgctggctttgtagcttcaacatataaaagaggtgttatgatgatcgcagtgccgacgacattgcttgcacaagtcgatagctccataggtggcaagaacggcttggacttctcggatgtcaagaatgtgatagggactttctataatccgtacatggttattgacgataccgtgttcttgaagaacaattcgttcataataagggaggggatgtctgaagtcatcaagtacgctataatatcgggcggcgacatgtacgataccctgaatagatgttccatagacaattttgatgcttgcgcaactaatataataaaactgagcgtaaagataaaaagtgaaatagttaacagggacttttatgatcgcaccgggataaggagcgtattgaacctaggccatacaatagcccacggaatagagggcgcaacaaagggtagtatttcacatggaaaggcggtagcaactggaatgcttgtcgaagcccacataggagaaaaatacggaaatacaaaccatgaagtcatcgaagcaatacgcgatttaatgaaaagatatgggatagaggaattaaacttaaaggaaattgggccaggaaacatacttaggtatatttccaacgacaagaaaattatggagggctacatcaatatgccagtgccttcagaaatagggaaggttataacgatgaaggcgactgaacgcatgataagcgacggaataaacactttcataaaggaaaatgatgcctcctga

SEQ ID NO: 1257 - protein, 360 aa, Thermoplasma volcanium
MDTQRFVITMNGDNISFIVGDNAINHLSEEAGKYDSIVIMISKTVEEMYANHIPDVGSFGNSVVKISLNDGESLKSLRNYQKIVKVLLERKVDRRSLLVYIGGGTVGDLAGFVASTYKRGVMMIAVPTTLLAQVDSSIGGKNGLDFSDVKNVIGTFYNPYMVIDDTVFLKNNSFIIREGMSEVIKYAIISGGDMYDTLNRCSIDNFDACATNIIKLSVKIKSEIVNRDFYDRTGIRSVLNLGHTIAHGIEGATKGSISHGKAVATGMLVEAHIGEKYGNTNHEVIEAIRDLMKRYGIEELNLKEIGPGNILRYISNDKKIMEGYINMPVPSEIGKVITMKATERMISDGINTFIKENDAS

SEQ ID NO: 1258 - DNA, 1080 bp, Thiobacillus denitrificans
  CDS (1)..(1080): transl_table=11
atgcaaacccttaccgtcgatctcggcgaccgttcctatccgatccacatcggcgccgccctcttgacccgcgccgacctggtcctgccgcacctcgcgcagaaacgcgtgatggtcgtgaccaacacgaccgtcggccccttgtacctcgcgcagttgaaggccgcgctcgaggcggcgggcgtgcgcgtggccgaggtcgtccttcctgacggcgaggcctataagaactgggaaacgctgaacctggtgttcgacgcgctgctgcgtgagcgtgccgagcgcaagacgacgctgatcgcgctcggcggcggcgtgatcggcgacatgaccgggttcgccgcggcgtgctaccagcgcggcgtgcctttcatccagattccgacgacgctgctgtcacaggtcgattcctcggtcggcggcaagaccgggatcaaccatccgctcggcaagaacatgatcggcgccttctaccagcccaaactcgtgctcgccgatgccgccaccctgggcacgctgcccgcgcgcgaactctcggccggcctggccgaagtgatcaagtacgggctgatctgggacgtcgaattcctcgcctggctcgaggccaacatggaccggctgcgtgcgctcgacgccgaggcgatttcgcatgcgatctaccgctcctgcgagatcaaggcccaggtcgtcgccgaggacgagcgcgaaggcggcctgcgcgcgatcctcaacctcggccacaccttcggtcacgcgatcgagaccggcatgggctacggcgcctggctgcacggtgaagcggtggccgccggcatggtgctcgccgccgaaacctcgcaacgtctgggctggctcggcgaagccgacgtcgcgcggacccgcgcgctgatccgcgccgcggggctgccggacgtcgcgcccaatctcggtgtcgacgcctatctcgagtacatgggccacgacaagaaagtcgagggcggaaaaatgcgcttcgtgctgctgaaaaaactcggcgaggccgtgatcaccgacgccgtccccgccgacgtgctcaccgccgtgctgaccccgccgcactga

SEQ ID NO: 1259 - protein, 359 aa, Thiobacillus denitrificans
MQTLTVDLGDRSYPIHIGAALLTRADLVLPHLAQKRVMVVTNTTVGPLYLAQLKAALEAAGVRVAEVVLPDGEAYKNWETLNLVFDALLRERAERKTTLIALGGGVIGDMTGFAAACYQRGVPFIQIPTTLLSQVDSSVGGKTGINHPLGKNMIGAFYQPKLVLADAATLGTLPARELSAGLAEVIKYGLIWDVEFLAWLEANMDRLRALDAEAISHAIYRSCEIKAQVVAEDEREGGLRAILNLGHTFGHAIETGMGYGAWLHGEAVAAGMVLAAETSQRLGWLGEADVARTRALIRAAGLPDVAPNLGVDAYLEYMGHDKKVEGGKMRFVLLKKLGEAVITDAVPADVLTAVLTPPH

SEQ ID NO: 1260 - DNA, 1101 bp, Vibrio cholerae
  CDS (16)..(1101): transl_table=11
ttggagtgcaaaaccatggagcggattacggtcaacttaggtgaacgtagctacccaatctcaatcggtgccggattgtttgccaatccggctcttctttccctctctgctaagcagaaggtggtgatagtcaccaaccacactgtcgctccgctgtatgcgcctgcgatcatttcattacttgatcacatcggttgccagcatgctttgctggaactgcccgatggcgaacagtacaaaactctcgaaaccttcaacactgtgatgagctttttgcttgagcataactacagccgtgatgtggttgtcattgctttaggtgggggagtgattggtgatctggtcggtttcgcggcggcttgttatcagcgtggcgttgatttcattcaaataccgaccacactgctgtcgcaggtggattcttcggtcggtgggaaaaccgcggtcaatcatccgctcggtaaaaacatgattggtgctttttatcaacccaaagcggtagtgattgatacggactgtttgactacactgcccgcccgtgaatttgccgctggcatggcggaagtcatcaagtacggcatcatttacgactcagccttcttcgactggctagaagcacagatggaggccttgtacgcattggacgaacaagcgctcacttacgcaattgcgcgctgctgccaaatcaaagccgaggtggtcgcgcaagatgagaaagagtcgggcattcgtgcgttactcaatcttggtcacaccttcggccatgcaattgaagcacacatgggctatggcaattggctgcacggtgaagccgtatctgcgggtacagtaatggcggcgaaaacggctcaattacaaggccttatcgatgcatctcaatttgaacgtatcctagctatactgaaaaaagcgcatttgcctgtgcgaaccccagagaacatgacctttgccgatttcatgcagcacatgatgcgcgataaaaaagtgttggcaggggaactgcgtttggtgttaccgaccagtatcggcacgtcagcggtcgtaaaaggggtacctgaagccgtgattgcccaagcgatagagtattgtcgcacggtgtaa

SEQ ID NO: 1261 - protein, 361 aa, Vibrio cholerae
MERITVNLGERSYPISIGAGLFANPALLSLSAKQKVVIVTNHTVAPLYAPAIISLLDHIGCQHALLELPDGEQYKTLETFNTVMSFLLEHNYSRDVVVIALGGGVIGDLVGFAAACYQRGVDFIQIPTTLLSQVDSSVGGKTAVNHPLGKNMIGAFYQPKAVVIDTDCLTTLPAREFAAGMAEVIKYGIIYDSAFFDWLEAQMEALYALDEQALTYAIARCCQIKAEVVAQDEKESGIRALLNLGHTFGHAIEAHMGYGNWLHGEAVSAGTVMAAKTAQLQGLIDASQFERILAILKKAHLPVRTPENMTFADFMQHMMRDKKVLAGELRLVLPTSIGTSAVVKGVPEAVIAQAIEYCRTV

SEQ ID NO: 1262 - DNA, 1101 bp, Vibrio parahaemolyticus
  CDS (1)..(1101): transl_table=11
atggaacggattacggtcaatctagcagagcgtagctacccaatctctataggcgccgggttgtttgaggacccggcgtacctttctcaagttctctcaaacaaaaataccaatcaaaaagtcgttgtgatcagtaatgtcacagtggcacctttgtatgccgataaaatccttcatcaactaaaacaacttggttgtgatgcttcgttacttgagttgcctgatggcgagcagtacaaaaacctggatgtgtttaaccaagtcatgaatttcctgctagagggaagttatgctcgtgatgtggtcattatcgccctcggtggtggtgtaatcggagatctcgtcggttttgcttcagcctgttatcagcgaggtgtggactttatccaaattccaacgacgttgttgtcccaagtggattcttccgttggcggcaaaacagcagtcaatcatccgctaggtaaaaacatgattggcgcattttaccaaccgaaagcggtgatcatcgataccaactgtttatcgacgctacctgagcgtgaatttgctgctggtatagctgaagtgatcaaatacggcattatttatgatggtgcattctttgattggctggaagaaaatttagaccgtttgtacacgttggatgaagacgcgcttacctatgccattgcacgttgctgccaaattaaagctgaagtggttgcacaagacgaaaaagagtctggaattcgagcgttgctcaatttgggtcacactttcggtcatgcgatagaagctgaattaggctacggcaattggttacatggtgaggcggtgtcttctggtacggtgatggcggccaaaacgtcacttctgcgtggactgatttctgaagagcagtttgagcgtattgtggcattgttgcgcagagcgaaattgccagtccatacacccgacagcatgagttttgatgactttatcaagcatatgatgcgtgataaaaaagtgctgtcaggtcaattgcgcttagttctaccaaccggaattggcagtgcggaagtgatagccgatacttcacaagaagtgattcagcaggctattgatttcggtcgcaatatttaa

SEQ ID NO: 1263 - protein, 366 aa, Vibrio parahaemolyticus
MERITVNLAERSYPISIGAGLFEDPAYLSQVLSNKNTNQKVVVISNVTVAPLYADKILHQLKQLGCDASLLELPDGEQYKNLDVFNQVMNFLLEGSYARDVVIIALGGGVIGDLVGFASACYQRGVDFIQIPTTLLSQVDSSVGGKTAVNHPLGKNMIGAFYQPKAVIIDTNCLSTLPEREFAAGIAEVIKYGIIYDGAFFDWLEENLDRLYTLDEDALTYAIARCCQIKAEVVAQDEKESGIRALLNLGHTFGHAIEAELGYGNWLHGEAVSSGTVMAAKTSLLRGLISEEQFERIVALLRRAKLPVHTPDSMSFDDFIKHMMRDKKVLSGQLRLVLPTGIGSAEVIADTSQEVIQQAIDFGRNI

SEQ ID NO: 1264 - DNA, 1092 bp, Vibrio vulnificus
  CDS (1)..(1092): transl_table=11
atggaacggattacggtcaatttagctgaacgtagctacccaatcacaataggcgccgggttgtttgaagattcggcgcacctatcttctctcactgctgggcagaaagtggtcgtgattaccaatgtcacggtagcccctctctatgcggataaaattctttctttattgcaatctttaggttgtcaggcctcgttgcttgaactgcctgatggagagcaatacaagagtttagatacctttaaccaagtaatgagctttcttctcgagggaagctttgcccgtgatgtcgtggttatcgcactaggtggtggtgtaattggtgatttagtcggtttttctgccgcttgttatcaacgtggtgtggattttattcaaattccaaccacgctgttatcccaagtggactcttctgttggtggaaaaacggcagttaaccatccactaggcaaaaacatgattggtgcattctatcagccgaaatcggtgattattgataccaactgtttgaaaactcttcctgaacgagagtttgctgcgggtattgctgaagtgattaaatatggcatcatttatgacgctgagtttttcacttggctcgatgagcatcttgatgcgctgtattcattagatgaacaagcattaacttacgccatcgcacgctgttgcgaaattaaagcagaagtggtggcgcaagatgaaaaagagtcaggcattcgcgctttattgaacttgggccatacgtttggacacgcgatcgaagctgagctcggctacggcaactggttacacggtgaagccgttgctgcgggtactgtcatggcggcacgcaccgcacagttacagggtatgatcgatcagcagcaatttgataagattttctctatacttagcagagctaagctgccagtacatacaccagaaagtatgacgtttgacgatttcatgactcatatgatgcgcgataagaaagtgctatcagggaaactgagattagtcttaccaagcagtattggtaccgctgaggtcgtggctgatgttcctcaagaggtcattcgtcaagccattgaagattgtcgcacaatcaattaa

SEQ ID NO: 1265 - protein, 363 aa, Vibrio vulnificus
MERITVNLAERSYPITIGAGLFEDSAHLSSLTAGQKVVVITNVTVAPLYADKILSLLQSLGCQASLLELPDGEQYKSLDTFNQVMSFLLEGSFARDVVVIALGGGVIGDLVGFSAACYQRGVDFIQIPTTLLSQVDSSVGGKTAVNHPLGKNMIGAFYQPKSVIIDTNCLKTLPEREFAAGIAEVIKYGIIYDAEFFTWLDEHLDALYSLDEQALTYAIARCCEIKAEVVAQDEKESGIRALLNLGHTFGHAIEAELGYGNWLHGEAVAAGTVMAARTAQLQGMIDQQQFDKIFSILSRAKLPVHTPESMTFDDFMTHMMRDKKVLSGKLRLVLPSSIGTAEVVADVPQEVIRQAIEDCRTIN

SEQ ID NO: 1266 - DNA, 1107 bp, Vibrio vulnificus
  CDS (1)..(1107): transl_table=11
ttgtggagtgcaaccatggaacggattacggtcaatttagctgaacgtagctacccaatcacaataggcgccgggttgtttgaagattcggcgcacctatcttctctcactgctgggcagaaagtggtcgtgattaccaatgtcacggtagcccctctctatgcggataaaattctttctttattgcaatctttaggttgtcaggcctcgttgcttgaactgcctgatggagagcaatacaagagtttagatacctttaaccaagtaatgagctttcttctcgagggaagctttgcccgtgatgtcgtggttatcgcactaggtggtggtgtaattggtgatttagtcggtttttctgccgcttgttatcaacgtggtgtggattttattcaaattccaaccacgctgttatcccaagtggactcttctgttggtggaaaaacggcagttaaccatccactaggcaaaaacatgattggtgcattctatcagccgaaatcggtgattattgataccaactgtttgaaaactcttcctgaacgagagtttgctgcgggtattgctgaagtgattaaatacggcatcatttatgacgctgagtttttcacttggctcgatgagcatcttgatgcgctgtattcattagatgaacaagcattaacttacgccatcgcacgctgttgcgaaattaaagcagaagtggtggcgcaagatgaaaaagagtcaggcattcgcgctttattgaacttgggccatacgtttggacacgcgatcgaagctgagctcggctacggcaactggttacacggtgaagccgttgctgcgggtactgtcatggcggcacgcaccgcacagttacagggtatgatcgatcagcagcaatttgataagattttctctatacttagcagagctaagctgccagtacatacaccagaaagtatgacgtttgacgatttcatgactcatatgatgcgcgataagaaagtgctatcagggaaactgagattagtcttaccaagcagtattggtaccgctgaggtcgtggctgatgttcctcaagaggtcattcgtcaagccattgaagattgtcgcacaatcaattaa

SEQ ID NO: 1267 - protein, 368 aa, Vibrio vulnificus
MWSATMERITVNLAERSYPITIGAGLFEDSAHLSSLTAGQKVVVITNVTVAPLYADKILSLLQSLGCQASLLELPDGEQYKSLDTFNQVMSFLLEGSFARDVVVIALGGGVIGDLVGFSAACYQRGVDFIQIPTTLLSQVDSSVGGKTAVNHPLGKNMIGAFYQPKSVIIDTNCLKTLPEREFAAGIAEVIKYGIIYDAEFFTWLDEHLDALYSLDEQALTYAIARCCEIKAEVVAQDEKESGIRALLNLGHTFGHAIEAELGYGNWLHGEAVAAGTVMAARTAQLQGMIDQQQFDKIFSILSRAKLPVHTPESMTFDDFMTHMMRDKKVLSGKLRLVLPSSIGTAEVVADVPQEVIRQAIEDCRTIN

SEQ ID NO: 1268 - DNA, 1041 bp, Wolinella succinogenes
  CDS (1)..(1041): transl_table=11
gtgaaaaaaatagagattgaactaaacgagcgatcctatcctatccatcttggcacgatggagtgcttggagcacgctggagcggtgcttgtggtgactaaccctaaagtcggagggctctatctctcctatgtgctagagcgaattagggcgagagaggtttttgtctgcacgactcctgatggagaggcttacaagacattagagagtgttgagatgattttggaatcggccttcaaccatcgccttgatcgaaaatcgcttatgattgcgcttggcggaggagtgattggagatatggttggctttgcttcggggatttttcagcgagggattggttttgttcagattcccaccacgcttctctctcaagtggatgcgagcgtggggggtaaaacaggcgtcaataacgcttttggtaagaatctcatcggactttttcaccaacccaaagctgtctatatcgatcccctttttttaaaaagtctgcctcctagggagtttggcgcgggagtggctgagatggtgaagatggcagtcacttttgatcgagagttctttgaggagttggagcggggagatttgagggatcactcctttttgctgaaaggaattgagcgttgcgtgaagatcaaggctcgcgtggtggcgatggatgagagggagcagggcatcagggcggcgctcaattatggacacacttttggtcatgtgatcgaacatgagagcggctatgggcactacctccatggagaagccgtggggatgggaatggtgatggccaacacgctggcgtgcggactggggctgctcaaagagagcgaggcggagcggattgagaagcttttagcacgctatgagattcccacgcgttacgcgattggggatgtggagcgattctatgatctctttttcttggacaagaagagtgaaaatcaaaagatcaagttcatcctccctgagggaattggcggagttgcctttcgcgacgatctctccaaaagcatggttttgagtgtattggaggccttttgcgactaa

SEQ ID NO: 1269 - protein, 346 aa, Wolinella succinogenes
MKKIEIELNERSYPIHLGTMECLEHAGAVLVVTNPKVGGLYLSYVLERIRAREVFVCTTPDGEAYKTLESVEMILESAFNHRLDRKSLMIALGGGVIGDMVGFASGIFQRGIGFVQIPTTLLSQVDASVGGKTGVNNAFGKNLIGLFHQPKAVYIDPLFLKSLPPREFGAGVAEMVKMAVTFDREFFEELERGDLRDHSFLLKGIERCVKIKARVVAMDEREQGIRAALNYGHTFGHVIEHESGYGHYLHGEAVGMGMVMANTLACGLGLLKESEAERIEKLLARYEIPTRYAIGDVERFYDLFFLDKKSENQKIKFILPEGIGGVAFRDDLSKSMVLSVLEAFCD

SEQ ID NO: 1270 - DNA, 1113 bp, Xanthomonas axonopodis pv
  CDS (1)..(1113): transl_table=11
atgacactttcccgttcttcgcgcagcgtcgatgtcgacggtgcgcagccttacaccatcaccatcgccccgggcctgctggccgacggtgcgcgcctggccagccatgtgcgcggccgccacgcgctgctgctcagcgactcgcaggtggctccgcattacgcggccggcgtacgcgccgccttgtcgcgcgcgcggccggatctgcaggtcggcgaattggtgattgccgccggcgaagcctccaaaaccttggagacctttggttctgcgatcaccgcactggccgaactcggtgccacccgcgacgcctgcgtgttcgcgctgggcggcggcgtggtcggcgacctggccggctttgcggcggcgtgctggatgcgcggcgtggattgcgtgcaactgcccaccagcctgctggcaatggtggattcgtcggtcggcggcaagaccgcggtggacatcccgcagggcaagaacctggtcggcgccttccatccgccgcgcgcggtgatcgccgacaccgacaccttgcgcaccctgcccgcacgcgaactgcgcgccggcctggccgaggtgatcaagtacggcgccatccgcgacccgctgttcttccagtggctgcatgccgaacgccgcgccctgctcgatggcgatgcagcggcgctggcgcaggccatcgcccgcagctgcgagcacaaggccgagatcgtggcgcgcgacccgctggaaaaaggcgagcgcgccctgctcaacctgggccacaccttcggccacgccatcgaaaccgagcaaggctacggcgcacccggcaacgacaacctcaaccatggcgaggccgtcgcggtgggcatggtgctggcggcgcgcctgtcggccgcgctgggtatgagcgacgtgcaggacaccgagacgctacgcgccttgctgcacgacttcgacctgcccaccgagatcccgcccggcctgacccctcaggccctgctcgcgcgcatgcgcctggacaagaagaacatcgccggccgcctgcgcctggtgttgtggcgcggcatcggcaaggccgaggtggtgccggatgtggaagaggcagcggtgctggagatcctggccggataa

SEQ ID NO: 1271 - protein, 370 aa, Xanthomonas axonopodis pv
MTLSRSSRSVDVDGAQPYTITIAPGLLADGARLASHVRGRHALLLSDSQVAPHYAAGVRAALSRARPDLQVGELVIAAGEASKTLETFGSAITALAELGATRDACVFALGGGVVGDLAGFAAACWMRGVDCVQLPTSLLAMVDSSVGGKTAVDIPQGKNLVGAFHPPRAVIADTDTLRTLPARELRAGLAEVIKYGAIRDPLFFQWLHAERRALLDGDAAALAQAIARSCEHKAEIVARDPLEKGERALLNLGHTFGHAIETEQGYGAPGNDNLNHGEAVAVGMVLAARLSAALGMSDVQDTETLRALLHDFDLPTEIPPGLTPQALLARMRLDKKNIAGRLRLVLWRGIGKAEVVPDVEEAAVLEILAG

SEQ ID NO: 1272 - DNA, 1113 bp, Xanthomonas oryzae pv
  CDS (1)..(1113): transl_table=11
atgacacttccccgttcctcgcgcagcgtcgctgtcgacggcgcacagccttacaccatcacgattgcgcccggcctgctggccgacgacgcgcgcctggcccgccatgtgcgcggacgccacgcgttgttgctcagcgactcgcaggtggccccgcattacgcggccggcgtacgcgccgcgctgttgagcgcgcgcccggacctgcagatcggcgaactggtcatcgccgctggcgaagcctccaagacactggataccttcggctccgcgatcaccgcactggccgaactgggtgccacccgcgatgcctgcgtgttcgcgctgggcggcggggtggtcggcgacctggctggctttgcggcggcgtgctggatgcgcggcgtggactgcgtgcagctacccaccagcctgctggcgatggtggattcctcggtcggcggcaagaccgcggtggacatcccgcagggcaagaacctggtcggcgcgttccacccgccacgcgcggtacttgccgataccgacaccttgcgcaccctgcccgcgcgcgaactgcgcgccggcctggccgaggtgatcaagtacggcgccatccgcgacccgctgttcttccaatggctgcacgccgaacgccacgcactgctggacagcgacccggccgcgctggcacaggccattgcccgcagttgcgagcacaaggcagaaatcgtggcgcgcgatccactggaaaaaggcgagcgcgccttgctcaacctgggccacaccttcggccacgccatcgaaaccgagcaaggctacggcgcgcctggcaacgacaacctcaaccatggcgaagccgttgcagtgggcatggtgctggcggcgcgcctgtcagccaccctgggcatgagcgatgcgcaggacaccgaggccttgcgcgccctcctgcacgacttcgagctgcctaccgacattccacccggcctgcccccggaggccctgctcgcgcgcatgcggttggacaagaaaaacatcgccggccgcctgcgcctggtgctgtggcgcggtatcggcaaggccgaagtcgtgccggatgtggaagaagcagcggtgctgaagatcctggcgggataa

SEQ ID NO: 1273 - protein, 370 aa, Xanthomonas oryzae pv
MTLPRSSRSVAVDGAQPYTITIAPGLLADDARLARHVRGRHALLLSDSQVAPHYAAGVRAALLSARPDLQIGELVIAAGEASKTLDTFGSAITALAELGATRDACVFALGGGVVGDLAGFAAACWMRGVDCVQLPTSLLAMVDSSVGGKTAVDIPQGKNLVGAFHPPRAVLADTDTLRTLPARELRAGLAEVIKYGAIRDPLFFQWLHAERHALLDSDPAALAQAIARSCEHKAEIVARDPLEKGERALLNLGHTFGHAIETEQGYGAPGNDNLNHGEAVAVGMVLAARLSATLGMSDAQDTEALRALLHDFELPTDIPPGLPPEALLARMRLDKKNIAGRLRLVLWRGIGKAEVVPDVEEAAVLKILAG

SEQ ID NO: 1274 - DNA, 1185 bp, Xylella fastidiosa
  CDS (1)..(1185): transl_table=11
atgaccactctcacaccactacgcagcgtcaccgtcaacaacacctacccctataccatcgccattggtcccggcctattgcacgatcctctacgcctggccgccaccatccgcggtcgacatgcacttattctcagtgattctgaagtcgccccccgttatgccgcacaactgcaggaaacgctactgcgcgcacgccccgatctacacctcaacgtattcaccctgccagccggcgaaacatccaagtccctagaaaacttcagcgccgcaatcgcccaactcgccacactcggcgccacgcgtgatgcctgcctctttgcactcggcggcggcgtcatcggagatctggcaggctttaccgccgcctgctggatgcgtggcatcgactacgtacaagtgccaaccaccttattggcgatggtcgactcttccgtcggcggcaaaaccgccgtggacatcccccagggtaaaaacatggttggcgccttccatccgccacgtgcagtgatcgccgacaccgacactcttgccacactcccgctacgcgaactacgcgctggtctgagcgaagtcatcaaatacggcgcaatccgcgaccccgtattcttccactggctccaaaccacacgcgaagcacttctagcacgtgaccccgccgcactggcccaagcaatcgcacgtagctgcgaacacaaagccgatattgtcggacgtgacccactggaaaaaggggaacgcgtcctgctcaatctcggccataccttcggccacgccatcgaaacagcacagggctacagcacaccaggaagcaacaacctcaaccacggtgaagccgtcgccgtcggcatggtacttgccgcacgcttgtcaaacgcattaagtctggcacccgcacaagacaccgagacgctgaaaaacctactggatgcctacggcttgcccactgtcctgccctcgggtctaacacctgaaatgctcctggagcgtatgcgcctggacaaaaaaaacattgccggtcgcttacgcttggtcctatggcgcggcattggccacgccgaagccgtctccgacgttgatgaagcaaccgtgcgacagatcctggccaactcaaccaatcaacatacgacctacagcccccatcagcatgcgaccaccaagccaccaaaccgacgcccccattga

SEQ ID NO: 1275 - protein, 394 aa, Xylella fastidiosa
MTTLTPLRSVTVNNTYPYTIAIGPGLLHDPLRLAATIRGRHALILSDSEVAPRYAAQLQETLLRARPDLHLNVFTLPAGETSKSLENFSAAIAQLATLGATRDACLFALGGGVIGDLAGFTAACWMRGIDYVQVPTTLLAMVDSSVGGKTAVDIPQGKNMVGAFHPPRAVIADTDTLATLPLRELRAGLSEVIKYGAIRDPVFFHWLQTTREALLARDPAALAQAIARSCEHKADIVGRDPLEKGERVLLNLGHTFGHAIETAQGYSTPGSNNLNHGEAVAVGMVLAARLSNALSLAPAQDTETLKNLLDAYGLPTVLPSGLTPEMLLERMRLDKKNIAGRLRLVLWRGIGHAEAVSDVDEATVRQILANSTNQHTTYSPHQHATTKPPNRRPH

SEQ ID NO: 1276 - DNA, 1113 bp, Xylella fastidiosa
  CDS (1)..(1113): transl_table=11
atgaccactcccacaccactgcgcagcgtcaccgtcaacaccccccccccctataccatcgccattggtcccggcctattgcacgatcctccacgcctggccgccaccatccgcggcagacatgcactcattctcagtgattctgaagtcgccccccgttatgccgcacaactgcatgaaacgctactgcgcgcccgtcccgatctacacctcaacgtattcaccctgccagccggcgaaacatccaagtccctagagaacttcggcgccgcaatcgcccaactcgccacactgggcgccacgcgtgatgcctgcctctttgcactcggcggcggcgtcatcggggatctggccggctttaccgccgcctgctggatgcgtggcatcgactacgtacaagtgccaaccaccttattggcgatggtcgactcttccgtcggcggcaaaaccgccgtagacatcccccagggtaaaaacatggtcggtgccttccatccgccacgtgcagtgatcgccgataccgacacccttgccacactcccgctacgggaactacgcgctggtctgagcgaagtcatcaaatacggcgcaatccgcgaccccgtattcttccactggctccaaaccacacgcgaagcacttctagcacgtgaccccgccgcactggcccaagcaatcgcacgtagctgcgaacacaaagccgatattgtcggacgtgacccactggaaaaaggggaacgcgtcctgctcaatctcggtcataccttcggccacgccatagaaacaacacagggctacagcacaccaggaagcaacaacctcaaccacggtgaagccgtcgccgtcggcatggtacttgccgcacgcttgtcaaacacattaggtctggcacccgcagaagacaccgagacactgaaaaacctactggatgcctacggcttgcccactgtcctgccctcaggtctaacacctgaaatgctcctggagcgtatgcgcctggacaaaaaaaacattgccggccgcttacgcttggtcctatggcgcggtattggccacgccgaagccgtccccgacgttgatgaagcagccgtgcgacagatcctggccaactaa

SEQ ID NO: 1277 - protein, 370 aa, Xylella fastidiosa
MTTPTPLRSVTVNTPPPYTIAIGPGLLHDPPRLAATIRGRHALILSDSEVAPRYAAQLHETLLRARPDLHLNVFTLPAGETSKSLENFGAAIAQLATLGATRDACLFALGGGVIGDLAGFTAACWMRGIDYVQVPTTLLAMVDSSVGGKTAVDIPQGKNMVGAFHPPRAVIADTDTLATLPLRELRAGLSEVIKYGAIRDPVFFHWLQTTREALLARDPAALAQAIARSCEHKADIVGRDPLEKGERVLLNLGHTFGHAIETTQGYSTPGSNNLNHGEAVAVGMVLAARLSNTLGLAPAEDTETLKNLLDAYGLPTVLPSGLTPEMLLERMRLDKKNIAGRLRLVLWRGIGHAEAVPDVDEAAVRQILAN

SEQ ID NO: 1278 - DNA, 1089 bp, Yersinia pestis
  CDS (1)..(1089): transl_table=11
atggagaagattactgtcacgttaggggaacgtagctaccccattacgattgccgccgggttgtttaatgatccggcctcttttaagccgctaaaggcgggtgaccaggttatgctggtcactaaccaaacgttggctccgctctatctggattctctccgggcagtgttggaacacggtggcattaaagttgatcaggtgattttacctgatggtgagcagtataaatctctgagcgttatggagcaggttttttctgcccttctggaaaaaccgcacggtcgtgatactacgttggttgccttaggtggcggcgtagtgggcgacctgaccggttttgccgcagcttgctatcaacgcggtgtgcgctttattcaagttcctactactttactttctcaagtggattcttctgttggtggtaaaaccgccgttaaccatcccttgggtaaaaatatgattggtgccttctaccagcctgcatcggtggtggttgatcttaattgtcttaaaactctccccccgcgtgaactcgcttctggcttggctgaagtgatcaaatacggcatcatccttgatgcagctttcttcgattggttagaaaacaacattgacgctttattagcgctggatatgtcagcattagcttactgtattcgccgctgttgcgaattaaaggccgatgtcgttgctgctgatgaacgcgaagagagcggtgcgcgcgctttactcaatttgggtcacacctatggtcatgctatcgaagctgaaatgggctacggagtgtggttacacggtgaagcggttgctgctgggatggtgatggccgcacagacatcccgtcgtctggggcaactctctgtcagtgatgttgagcgtatcaagaaactcctattacgtgctggtctacccgtttgtgggcctaaagaaatggcaccagaatcttatctgccacacatgatgcgggataaaaaagtattggcgggtgaacttcgtctggtactgccaacggccatcggtaaatcagaaatccggggcggtgttgcgcatgatatggtgttggcatcgatagcggattgtcgaccatag

SEQ ID NO: 1279 - protein, 362 aa, Yersinia pestis
MEKITVTLGERSYPITIAAGLFNDPASFKPLKAGDQVMLVTNQTLAPLYLDSLRAVLEHGGIKVDQVILPDGEQYKSLSVMEQVFSALLEKPHGRDTTLVALGGGVVGDLTGFAAACYQRGVRFIQVPTTLLSQVDSSVGGKTAVNHPLGKNMIGAFYQPASVVVDLNCLKTLPPRELASGLAEVIKYGIILDAAFFDWLENNIDALLALDMSALAYCIRRCCELKADVVAADEREESGARALLNLGHTYGHAIEAEMGYGVWLHGEAVAAGMVMAAQTSRRLGQLSVSDVERIKKLLLRAGLPVCGPKEMAPESYLPHMMRDKKVLAGELRLVLPTAIGKSEIRGGVAHDMVLASIADCRP

SEQ ID NO: 1280 - DNA, 1140 bp, Zymomonas mobilis
  CDS (1)..(1140): transl_table=11
atgagcagtgaagtttcaaaaaccgtcaccgtgccgattgatcttggcaatcacagctataaaatcgacattggcgcaggcctttatcagcaggcggtctctattttgaccccttatgtccgtaatcggcgttttattgtcattacggatgaaaatgttgcccgctgtcagctacctgaatttgaaaaatcctttcatgaggcaggtgttacggtagattctattatcttgccagcaggtgaagccactaaaagttggcaccatctggccgaactttgcgatcagcttatccggcgtggtgttgaacggcgggatgctatcattgctttgggtggtggcgtgatcggtgatctggtcggatttgctgccgctattttgaaaagaggctgccaatttattcagatacccaccagccttttggcgcaggtggattcttcggttggcggaaaaacggcgatcaattgcgaagctgggaaaaacctgattggtgcattccatcaacctgtttttgttctgattgatcctgatgcccttcagacattgcctgctcggcagcttcgtgctggctatggcgagattatcaaatacggtcttattgatgatcccgatttctttgcatggtgtgaagagcatggtgcggctctgatcgaaggggataaagccagccgtctgtatgcaattgaacatagcatccgtgcaaaagcccttattgtcgctgatgacgaaaaagaaatcagcgggaaacgcgctctcttaaatttgggtcatactttcggtcatgcgttagaagcagataccggattttctgataaattattccacggtgaagccgtggctgctggttctgctctggcctttggcttttcctatgtcaaaaatctggcatctaaagaagatattcagcggattattaagcatttgagagaaacgggtcttcccgccagccttgaagaagccggtgtcaaagcctctggtaaagagttggttgcccatatgatgcatgacaaaaaaatggaagctggccgccttcctttccttttggcacggggcatcgggaaaagctttttggataaagaagttaatcttgaagaaattgccgcctttttggatagcccattggcgcgtaaaggcacgatttaa

SEQ ID NO: 1281 - protein, 379 aa, Zymomonas mobilis
MSSEVSKTVTVPIDLGNHSYKIDIGAGLYQQAVSILTPYVRNRRFIVITDENVARCQLPEFEKSFHEAGVTVDSIILPAGEATKSWHHLAELCDQLIRRGVERRDAIIALGGGVIGDLVGFAAAILKRGCQFIQIPTSLLAQVDSSVGGKTAINCEAGKNLIGAFHQPVFVLIDPDALQTLPARQLRAGYGEIIKYGLIDDPDFFAWCEEHGAALIEGDKASRLYAIEHSIRAKALIVADDEKEISGKRALLNLGHTFGHALEADTGFSDKLFHGEAVAAGSALAFGFSYVKNLASKEDIQRIIKHLRETGLPASLEEAGVKASGKELVAHMMHDKKMEAGRLPFLLARGIGKSFLDKEVNLEEIAAFLDSPLARKGTI

SEQ ID NO: 1282 - DNA, 1332 bp, Oryza sativa
  CDS (1)..(1332)
atggcggccgccgcctcctcctctctgctcgccgccgcctcgtcgtcctcccgcgcggcggccgtgtccgcccgccgcgcccccagcgcgagtccggccgcggcggcctccctcccctcgccgtctcgcgcctcctgcgctcctcccctccgcgcttccgcagcgaggaccctccgcagccgtgtcgtcgcgagcgcggcccccgctatgcagccgccgccggcgtcgagggtctccacggttgtcgacgtcgacctcggcgaccggagctacccgatctacatcggcgcaggccttctcgacgagcctgacctgctgcagaggcatgttcatgggaagagggttttggtggtgaccaacaccaccgtcgcgccgctctacctggagaaggtgacctgggcactcacgcacaacaacccgaatgtttctgtggagagcgtgatcctgcccgacggcgagaagtacaaggacatgggcacactgatgaaggttttcgacaaggcagtcgagtcccggctggaccggcggtgcacgtttgttgcgttgggaggtggcgttattggggacatgtgcggttttgcagctgctgcgttcctgcgtggtgtcaatttcatacagattcctactactctgatggcccaggtggattcatctgttggagggaagaccggcattaaccatccattggggaagaacttaattggggcgttctaccagccacagtgtgtactgatagacaccgagacactgaatacattgcctgacagggaactggcttcaggcatagctgaggtggtgaagtatggtctcataagagatgcaccgttctttgaatggcaagagaaaaacatgccagcattattagcaagagaaccaagtgctctggcctatgctattaagagatcgtgtgaaaacaaagctgaagtggttgctcaggacgagaaggaaagtggtctccgagcaacacttaatctcggccatacatttggccatgctatagaaacaggaactggttatggagcatggctccatggggaggctgttgcagctggaacagttatggcagctgacatgtctcaccgcctgggttggatagacgagtcaatcaagaaacgggcaattgacatactagagaaagcgaagcttccaattacacctccagaggccatgacagtggagaagttcaaaagtattatggccgttgataagaaggttgctgatggattgctgaggctcatcctcctgaaaggacctctgggaagctgtgttttcactggcgattacgacaggaatgccctcgacgaaaccctccgtgcattctgcgactgctga

SEQ ID NO: 1283 - protein, 443 aa, Oryza sativa
MAAAASSSLLAAASSSSRAAAVSARRAPSASPAAAASLPSPSRASCAPPLRASAARTLRSRVVASAAPAMQPPPASRVSTVVDVDLGDRSYPIYIGAGLLDEPDLLQRHVHGKRVLVVTNTTVAPLYLEKVTWALTHNNPNVSVESVILPDGEKYKDMGTLMKVFDKAVESRLDRRCTFVALGGGVIGDMCGFAAAAFLRGVNFIQIPTTLMAQVDSSVGGKTGINHPLGKNLIGAFYQPQCVLIDTETLNTLPDRELASGIAEVVKYGLIRDAPFFEWQEKNMPALLAREPSALAYAIKRSCENKAEVVAQDEKESGLRATLNLGHTFGHAIETGTGYGAWLHGEAVAAGTVMAADMSHRLGWIDESIKKRAIDILEKAKLPITPPEAMTVEKFKSIMAVDKKVADGLLRLILLKGPLGSCVFTGDYDRNALDETLRAFCDC

SEQ ID NO: 1284 - DNA, 1323 bp, Brassica napus
  CDS (1)..(1323)
atggctgcgaacgccgtctcgctatcaatctcatcatccgtcgcctcctcgaagtctctccactctcttcaagctcaagcccgcttcttgattcccccaccaaccatttccttcccaaagtcgtcgtctttatcttcttccaccactgtctccatctccaggtcgcgtgttcgagccggtcccagccagcttgttaacgaacccgctaacgccatggccactcctcccactatagtcgaggttgatttaggtagccggagctatcccatctacatcggcgccggcttgctcgatcaatcacatctccttcaaaggcatgttcacgggaagaaagtgctggtggtgactaacgaacgagttgctcctctatacctggacaagactgtacatgctttgactatagggaaccccaacgtgactgtggagtctgttattctccctgatggagagaaatacaaagacatggatactctcatgaaagtcttcgacaaggccattgagtctcgcctagatagacgatctacttttgttgctcttggtggcggtgttattggcgatatgtgtggctatgctgctgcttcttacctccgtggtgttaacttcatccagatccccaccactgtcatggcacaggttgattcttctgttggtggcaaaacaggcataaaccatcgtcttggaaagaatttgattggcgcgttttaccagccgcagtgtgtgctagttgacaccgacacgttgaacacgctgccggacagggagatggcttcgggtttagcggaagtgatcaagtatggacttatcagggatgctgacttctttgagtggcaggagaagaacattgaggctctccttgctagggatccggctgcattagcttatgcgataaagcgatcatgtgagaacaaggcggatgttgtgtcacaggatgagaaagaaagcggcttgcgagctacccttaatttgggtcatacctttggccatgccatagaaactggcttcgggtatggagagtggctccacggagaagctgttgccgctggcacggtgatggcagtggacatgtcatatcgtcttggctggatagatgactcaatcgtggagagagtgaacaacatcttgaaacgagcgaaattgcctacaacgccgccagagagcatgaccgtgagcatgttcaagtccataatggcggttgacaagaaagtggcagatggactgctgaggctgattctcctgaaaggtccgctgggaaactgcgttttcacgggagattatgatcgggaggcgttggatgctacgctacgtgcgttctccaaatcctga

SEQ ID NO: 1285 - protein, 440 aa, Brassica napus
MAANAVSLSISSSVASSKSLHSLQAQARFLIPPPTISFPKSSSLSSSTTVSISRSRVRAGPSQLVNEPANAMATPPTIVEVDLGSRSYPIYIGAGLLDQSHLLQRHVHGKKVLVVTNERVAPLYLDKTVHALTIGNPNVTVESVILPDGEKYKDMDTLMKVFDKAIESRLDRRSTFVALGGGVIGDMCGYAAASYLRGVNFIQIPTTVMAQVDSSVGGKTGINHRLGKNLIGAFYQPQCVLVDTDTLNTLPDREMASGLAEVIKYGLIRDADFFEWQEKNIEALLARDPAALAYAIKRSCENKADVVSQDEKESGLRATLNLGHTFGHAIETGFGYGEWLHGEAVAAGTVMAVDMSYRLGWIDDSIVERVNNILKRAKLPTTPPESMTVSMFKSIMAVDKKVADGLLRLILLKGPLGNCVFTGDYDREALDATLRAFSKS

SEQ ID NO: 1286 - DNA, 1314 bp, Glycine max
  CDS (1)..(1314)
atggcttccactgccaccaatttctctctttctctctgcgccaaccaacaaactccaatccccaaaccctctttcttctccaataacaaccatttgcacttcaactctaataataattgggcctgggcctctgtttccacctctcgcaagtcaaggatatgcgccacctcctctcaagttatggatccctccgcagcaaaatccgaacccgctcttcccaccatcgtcgaagtcgatttgggtagccggagctatcctatttacatcggatccgggttactaaaccaacccgactatctccagaggcatgtgcatggaaagagagtcctagttgtaactaacgaaaccgttgcgccactttatctagacaaggttgttgatgctttgacaaggggaaacccgaatgtttctgtggagagtgtaattttacctgatggtgagcagtacaaggacatggatactcttatgaaagtctttgacaaggccatcgagtcgcggctcgaccggcggtgtacgtttgttgctcttggtggtggtgtgattggcgacatgtgtggctttgctgcctctgccttcctacgtggtgttaattttattcagattcctacaactgtgatggcacaggtcgattcttcagttggtggaaaaactgggataaatcaccgccttgggaagaacatgatcggtaccttttaccaacctcagtgtgtgcttatagacacagacacattaaatacgctaccggatagggaactggcatcagggctagcagaggttataaagtatgggctcattagggatgcagagttttttgagtggcaagagaaaaatatgcacttattattggcaagagatcctagtgtaatggcatatgctataaagcgatcttgtgaaaacaaggctgaggttgtgtccttagatgagaaggaaagtggactgagggcaacattgaacttgggtcatacatttggtcatgcaatagaaactggggtaggctatgggcagtggcttcatggagaggctgttgcagctggcacggtaatggctgttgacatgtcatatcgcctaggttggattgatgattctcttgtgaaacgagttggagacattttaaaacaggctaagttacccacagcccctcctgagaccgtgactgtggacatgtttaaatctgtcatggcagtggataagaaggtagcagatgggttgctaaggcttatccttctaaagggtcctctaggcaattgtgttttcacaggggattatgacagaaaggctctagacaatacgcttcgtgcattctgtaaatcctga

SEQ ID NO: 1287 - protein, 437 aa, Glycine max
MASTATNFSLSLCANQQTPIPKPSFFSNNNHLHFNSNNNWAWASVSTSRKSRICATSSQVMDPSAAKSEPALPTIVEVDLGSRSYPIYIGSGLLNQPDYLQRHVHGKRVLVVTNETVAPLYLDKVVDALTRGNPNVSVESVILPDGEQYKDMDTLMKVFDKAIESRLDRRCTFVALGGGVIGDMCGFAASAFLRGVNFIQIPTTVMAQVDSSVGGKTGINHRLGKNMIGTFYQPQCVLIDTDTLNTLPDRELASGLAEVIKYGLIRDAEFFEWQEKNMHLLLARDPSVMAYAIKRSCENKAEVVSLDEKESGLRATLNLGHTFGHAIETGVGYGQWLHGEAVAAGTVMAVDMSYRLGWIDDSLVKRVGDILKQAKLPTAPPETVTVDMFKSVMAVDKKVADGLLRLILLKGPLGNCVFTGDYDRKALDNTLRAFCKS

SEQ ID NO: 1288 - DNA, 24 bp, Artificial sequence
  primer
atggagaggattgtcgttactctc

SEQ ID NO: 1289 - DNA, 22 bp, Artificial sequence
  primer
ttacgctgattgacaatcggca

SEQ ID NO: 1290 - protein, 382 aa, Artificial sequence
  consensus sequence
  Variant (2)..(4): Xaa in position 2 to 4 is any amino acid
  Variant (6)..(33): Xaa in position 6 to 33 is any amino acid
  Variant (34)..(51): Xaa in position 34 to 51 is any or no amino acid
  Variant (53)..(58): Xaa in position 53 to 58 is any amino acid
  Variant (59)..(72): Xaa in position 59 to 72 is any or no amino acid
  Variant (75)..(76): Xaa in position 75 to 76 is any amino acid
  Variant (78)..(94): Xaa in position 78 to 94 is any amino acid
  Variant (95)..(96): Xaa in position 95 to 96 is any or no amino acid
  Variant (98)..(102): Xaa in position 98 to 102 is any amino acid
  Variant (103)..(103): Xaa in position 103 is any or no amino acid
  Variant (110)..(110): Xaa in position 110 is any amino acid
  Variant (113)..(114): Xaa in position 113 to 114 is any amino acid
  Variant (117)..(117): Xaa in position 117 is any amino acid
  Variant (119)..(122): Xaa in position 119 to 122 is any amino acid
  Variant (125)..(128): Xaa in position 125 to 128 is any amino acid
  Variant (130)..(130): Xaa in position 130 is any amino acid
  Variant (136)..(137): Xaa in position 136 to 137 is any amino acid
  Variant (140)..(140): Xaa in position 140 is any amino acid
  Variant (142)..(142): Xaa in position 142 is any amino acid
  Variant (147)..(148): Xaa in position 147 to 148 is any amino acid
  Variant (150)..(151): Xaa in position 150 to 151 is any amino acid
  Variant (152)..(152): Xaa in position 152 is any or no amino acid
  Variant (156)..(157): Xaa in position 156 to 157 is any amino acid
  Variant (159)..(159): Xaa in position 159 is any amino acid
  Variant (161)..(161): Xaa in position 161 is any amino acid
  Variant (164)..(165): Xaa in position 164 to 165 is any amino acid
  Variant (167)..(168): Xaa in position 167 to 168 is any amino acid
  Variant (170)..(172): Xaa in position 170 to 172 is any amino acid
  Variant (174)..(174): Xaa in position 174 is any amino acid
  Variant (178)..(178): Xaa in position 178 is any amino acid
  Variant (181)..(182): Xaa in position 181 to 182 is any amino acid
  Variant (183)..(183): Xaa in position 183 is any or no amino acid
  Variant (185)..(185): Xaa in position 185 is any amino acid
  Variant (188)..(189): Xaa in position 188 to 189 is any amino acid
  Variant (191)..(191): Xaa in position 191 is any amino acid
  Variant (193)..(195): Xaa in position 193 to 195 is any amino acid
  Variant (197)..(214): Xaa in position 197 to 214 is any amino acid
  Variant (215)..(242): Xaa in position 215 to 242 is any or no amino acid
  Variant (245)..(246): Xaa in position 245 to 246 is any amino acid
  Variant (248)..(249): Xaa in position 248 to 249 is any amino acid
  Variant (252)..(252): Xaa in position 252 is any amino acid
  Variant (254)..(256): Xaa in position 254 to 256 is any amino acid
  Variant (257)..(262): Xaa in position 257 to 262 is any or no amino acid
  Variant (264)..(265): Xaa in position 264 to 265 is any amino acid
  Variant (268)..(268): Xaa in position 268 is any amino acid
  Variant (272)..(272): Xaa in position 272 is any amino acid
  Variant (276)..(276): Xaa in position 276 is any amino acid
  Variant (278)..(279): Xaa in position 278 to 279 is any amino acid
  Variant (280)..(281): Xaa in position 280 to 281 is any or no amino acid
  Variant (283)..(284): Xaa in position 283 to 284 is any amino acid
  Variant (285)..(291): Xaa in position 285 to 291 is any or no amino acid
  Variant (297)..(298): Xaa in position 297 to 298 is any amino acid
  Variant (300)..(302): Xaa in position 300 to 302 is any amino acid
  Variant (304)..(319): Xaa in position 304 to 319 is any amino acid
  Variant (320)..(330): Xaa in position 320 to 330 is any or no amino acid
  Variant (333)..(348): Xaa in position 333 to 348 is any amino acid
  Variant (349)..(362): Xaa in position 349 to 362 is any or no amino acid
  Variant (366)..(368): Xaa in position 366 to 368 is any amino acid
  Variant (370)..(373): Xaa in position 370 to 373 is any amino acid
  Variant (374)..(375): Xaa in position 374 to 375 is any or no amino acid
  Variant (377)..(379): Xaa in position 377 to 379 is any amino acid
  Variant (380)..(381): Xaa in position 380 to 381 is any or no amino acid
YXXXIXXXXXXXXXXXXXXXXXXXXXXXXXXXXXXXXXXXXXXXXXXXXXXLXXXXXXXXXXXXXXXXXXXXGEXXKXXXXXXXXXXXXXXXXXXXRXXXXXXALGGGVXGDXXGFXAXXXXRGXXXXQXPTTLLXXVDXSXGGKTXXNXXXGKNXXGXFXQPXXVXXDXXXLXTLPXREXXXGXAEXXKXGXXXDXXXXXXXXXXXXXXXXXXXXXXXXXXXXXXXXXXXXXXXXXXXXXXKAXXVXXDEXEXXXXXXXXXRXXLNXGHTXGHAXEXXXXYXXXXXXXXXHGEAVXXGXXXAXXXXXXXXXXXXXXXXXXXXXXXXXXXLPXXXXXXXXXXXXXXXXXXXXXXXXXXXXXXDKKXXXGXXXXXXLXXXXXG

SEQ ID NO: 1291 - protein, 34 aa, Artificial sequence
  protein pattern
  Variant (2)..(2): Xaa in position 2 is Phe, Leu or Val
  Variant (7)..(7): Xaa in position 7 is any amino acid
  Variant (10)..(10): Xaa in position 10 is Phe, Ile, Leu, Met or Val
  Variant (11)..(11): Xaa in position 11 is Ala, Cys, Gly, Ser, Thr or Val
  Variant (13)..(13): Xaa in position 13 is any amino acid
  Variant (14)..(14): Xaa in position 14 is any or no amino acid
  Variant (16)..(19): Xaa in position 16 to 19 is any amino acid
  Variant (20)..(20): Xaa in position 20 is any or no amino acid
  Variant (23)..(26): Xaa in position 23 to 26 is any amino acid
  Variant (28)..(28): Xaa in position 28 is any amino acid
  Variant (31)..(31): Xaa in position 31 is Ser or Thr
  Variant (32)..(32): Xaa in position 32 is Phe, Leu or Val
  Variant (33)..(33): Xaa in position 33 is any amino acid
  Variant (34)..(34): Xaa in position 34 is Ala or Ser
AXGGGVXGDXXGXXAXXXXXRGXXXXQXPTXXXX

SEQ ID NO: 1292 - protein, 26 aa, Artificial sequence
  protein pattern
  Variant (4)..(4): Xaa in position 4 is Leu or Met
  Variant (5)..(5): Xaa in position 5 is Ile, Leu or Val
  Variant (7)..(7): Xaa in position 7 is any amino acid
  Variant (8)..(8): Xaa in position 8 is Phe or Tyr
  Variant (9)..(10): Xaa in position 9 to 10 is any amino acid
  Variant (12)..(13): Xaa in position 12 to 13 is any amino acid
  Variant (15)..(16): Xaa in position 15 to 16 is any amino acid
  Variant (18)..(20): Xaa in position 18 to 20 is any amino acid
  Variant (22)..(22): Xaa in position 22 is any amino acid
  Variant (23)..(23): Xaa in position 23 is Ala, Ser or Thr
  Variant (25)..(25): Xaa in position 25 is any or no amino acid
GKNXXGXXXXPXXVXXDXXXLXXLXP

SEQ ID NO: 1293 - protein, 21 aa, Artificial sequence
  protein pattern
  Variant (2)..(2): Xaa in position 2 is any amino acid
  Variant (3)..(4): Xaa in position 3 to 4 is any or no amino acid
  Variant (6)..(6): Xaa in position 6 is any amino acid
  Variant (8)..(8): Xaa in position 8 is any amino acid
  Variant (9)..(9): Xaa in position 9 is any or no amino acid
  Variant (12)..(12): Xaa in position 12 is any amino acid
  Variant (16)..(16): Xaa in position 16 is Phe, Ile, Leu or Val
  Variant (17)..(17): Xaa in position 17 is Ala or Gly
  Variant (19)..(19): Xaa in position 19 is Ala, Gly or Val
  Variant (20)..(20): Xaa in position 20 is Phe, Ile, Leu, Met or Val
EXXXGXRXXLNXGHTXXHXXE

SEQ ID NO: 1294 - protein, 12 aa, Artificial sequence
  protein pattern
  Variant (3)..(4): Xaa in position 3 to 4 is Ala or Ser
  Variant (5)..(5): Xaa in position 5 is Ile or Val
  Variant (10)..(10): Xaa in position 10 is Ala or Gly
  Variant (11)..(11): Xaa in position 11 is Ile or Val
  Variant (12)..(12): Xaa in position 12 is Asp or Asn
VDXXXGGKTXXX

SEQ ID NO: 1295 - DNA, 1149 bp, Escherichia coli
  CDS (1)..(1149): transl_table=11
atgtttaaaagtgatgctgcccggactcgacaaagattatcggcgcgtaagggcagaactttaccgcctggccggggtaaatttcctcactccacaacggaatctttcaggaatacgttctggctcaaaaaaataatggaacactgttttaatatggttgaccagcaaaccaccacagcgcaaactaacgctaattttttacagatcaggttcacgactatgtccaaaaagattgccgtgattggcgaatgcatgattgagctttccgagaaaggcgcggacgttaagcgcggtttcggcggcgataccctgaacacttccgtctatatcgcccgtcaggtcgatcctgcggcattaaccgttcattacgtaacggcgctgggaacggacagttttagccagcagatgctggacgcctggcacggcgagaacgttgatacttccctgacccaacggatggaaaaccgtctgccgggcctttactacattgaaaccgacagcaccggcgagcgtacgttctactactggcggaacgaagccgccgccaaattctggctggagagtgagcagtctgcggcgatttgcgaagagctggcgaatttcgattatctctacctgagcgggattagcctggcgatcttaagcccgaccagccgcgaaaagctgctttccctgctgcgcgaatgccgcgccaacggcggaaaagtgattttcgacaataactatcgtccgcgcctgtgggccagcaaagaagagacacagcaggtgtaccaacaaatgctggaatgcacggatatcgccttcctgacgctggacgacgaagacgcgctgtggggtcaacagccggtggaagacgtcattgcgcgcacccataacgcgggcgtgaaagaagtggtggtgaaacgcggggcggattcttgcctggtgtccattgctggcgaagggttagtggatgttccggcggtgaaactgccgaaagaaaaagtgatcgataccaccgcagctggcgactctttcagtgccggttatctggcggtacgtctgacaggcggcagcgcggaagacgcggcgaaacgtgggcacctgaccgcaagtaccgttattcagtatcgcggcgcgattatcccgcgtgaggcgatgccagcgtaa

SEQ ID NO: 1296 - protein, 382 aa, Escherichia coli
MFKSDAARTRQRLSARKGRTLPPGRGKFPHSTTESFRNTFWLKKIMEHCFNMVDQQTTTAQTNANFLQIRFTTMSKKIAVIGECMIELSEKGADVKRGFGGDTLNTSVYIARQVDPAALTVHYVTALGTDSFSQQMLDAWHGENVDTSLTQRMENRLPGLYYIETDSTGERTFYYWRNEAAAKFWLESEQSAAICEELANFDYLYLSGISLAILSPTSREKLLSLLRECRANGGKVIFDNNYRPRLWASKEETQQVYQQMLECTDIAFLTLDDEDALWGQQPVEDVIARTHNAGVKEVVVKRGADSCLVSIAGEGLVDVPAVKLPKEKVIDTTAAGDSFSAGYLAVRLTGGSAEDAAKRGHLTASTVIQYRGAIIPREAMPA

SEQ ID NO: 1297 - DNA, 990 bp, Enterobacter cloacae
  CDS (1)..(990): transl_table=11
ttgaccataaaaaacacacagcgcacactacccttaattactttgttcaggttcacgactatgtctaaaaaaattgccgtgattggcgaatgcatgattgagctgtcccagaaaggcgcggaagtcagccgcggttttggtggcgatacattgaacacctccgtttacattgcccgtcaggtctcccccgacgcgctgagcgtgagctacgttaccgcgctgggaacggacagcttcagccagcagatgctggaagcctggcagggtgaaaacgttgggacctcgctgatccagcgaatggaaaaccgcctgccgggtttgtactacatcgaaaccgacagcaccggcgagcgcaccttctattactggcgtaatgaagcggccgccaaattctggctggaaagcgaggccgccgctgccatttgcgaagaactggcgaccttcgattatctctacctgagcgggatcagcctggcgatcctgagccaggagagccgtgaaaagctgctgtcactgctgcgcgaatgccgtgccaatggcggtaaggtgattttcgataacaactaccgtccacgtttgtgggccagccgcgaagagacgcagcaggtctaccagcagatgctcgaatgcaccgatatcgccttcctgacgctggatgatgaagatgctctgtggggcgaaaaaccggttgatgaggtcatcgcccggacgcaggctgccggggtcagcgaagtggtgatcaagcgcggggcggagtcttgcctggtggcggttgcaggtgaagccgtgacagaggtcccggcggtgaagctggcgaaagagaaagtgatcgataccactgcggcgggagattctttcagcgcggggtatctggcggtacgtctgacgggaggtacgccggaagcggcggcgcagcgcggtcatttaacggccagcacggtgattcagtatcgcggagcgattattccgcgcgaggcgatgcctgcttaa

SEQ ID NO: 1298 - protein, 329 aa, Enterobacter cloacae
LTIKNTQRTLPLITLFRFTTMSKKIAVIGECMIELSQKGAEVSRGFGGDTLNTSVYIARQVSPDALSVSYVTALGTDSFSQQMLEAWQGENVGTSLIQRMENRLPGLYYIETDSTGERTFYYWRNEAAAKFWLESEAAAAICEELATFDYLYLSGISLAILSQESREKLLSLLRECRANGGKVIFDNNYRPRLWASREETQQVYQQMLECTDIAFLTLDDEDALWGEKPVDEVIARTQAAGVSEVVIKRGAESCLVAVAGEAVTEVPAVKLAKEKVIDTTAAGDSFSAGYLAVRLTGGTPEAAAQRGHLTASTVIQYRGAIIPREAMPA

SEQ ID NO: 1299 - DNA, 1149 bp, Escherichia coli O157:H7 EDL933
  CDS (1)..(1149): transl_table=11
  misc_feature (823)..(823): r is g or a
gtgtttaaaagtgatgcagcccggactcgacaaagattatcggcgcgcaagggcagaactttaccgcctggccggggtaaatttccccactccacaacggaatctttcaggaatacgttctggctcaaaaaaataatggaacactgttttaatatggttgaccagcaaaccaccacagcgcaaactaacgctaattttttacagatcaggttcacgactatgtccaaaaagattgccgtgattggcgaatgcatgattgagctttccgagaaaggcgcggacgttaagcgcggtttcggcggcgataccctgaacacttccgtctatatcgcccgtcaggtcgatcctgcggcattaaccgttcattacgtaacggcgctgggaacggacagttttagccagcagatgctggacgcctggcacggcgagaacgttgatacttccctgacccaacggatggaaaaccgtctgccgggcctttactacattgaaaccgacagcaccggcgaacgtacgttctactactggcgtaacgaagccgccgccaaattctggctggagagcgatcaatccgcggcgatttgcgaagagctggcgaatttcgattatctctacctgagcgggattagcctggcgatcttaagcccgaccagccgcgaaaagctgctttccctgctgcgcgaatgccgcgccaacggcggaaaagtgattttcgacaataactatcgtccgcgcctgtgggccagcaaagaagagacacagcaggtgtaccaacaaatgctggaatgcacggatatcgccttcctgacgctggacgatgaaracgcgctgtggggtcaacagccggtggaagacgtcattgcgcgcacccataacgcgggcgtgaaagaagtggtggtgaaacgcggggcggattcttgcctggtgtccattgctggcgaagggttagtggatgttccggcggtgaaactgccgaaagaaaaagtgatcgataccaccgcagctggcgactctttcagtgccggttatctggcggtacgtttgacgggcggcagtgcggaaaacgcagcgaaacgcgggcacctgaccgcaagtaccgttattcagtatcgcggcgcgattatcccgcgtgaggcgatgccagcgtaa

SEQ ID NO: 1300 - protein, 382 aa, Escherichia coli O157:H7 EDL933
MFKSDAARTRQRLSARKGRTLPPGRGKFPHSTTESFRNTFWLKKIMEHCFNMVDQQTTTAQTNANFLQIRFTTMSKKIAVIGECMIELSEKGADVKRGFGGDTLNTSVYIARQVDPAALTVHYVTALGTDSFSQQMLDAWHGENVDTSLTQRMENRLPGLYYIETDSTGERTFYYWRNEAAAKFWLESDQSAAICEELANFDYLYLSGISLAILSPTSREKLLSLLRECRANGGKVIFDNNYRPRLWASKEETQQVYQQMLECTDIAFLTLDDEBALWGQQPVEDVIARTHNAGVKEVVVKRGADSCLVSIAGEGLVDVPAVKLPKEKVIDTTAAGDSFSAGYLAVRLTGGSAENAAKRGHLTASTVIQYRGAIIPREAMPA

SEQ ID NO: 1301 - DNA, 930 bp, Salmonella enterica subsp. enterica serovar Typhi str. CT18
  CDS (1)..(930): transl_table=11
atgtctaaaaagattgccgtgattggcgaatgcatgattgagctgtcgcagaaaggcgctgatgttcagcgcggcttcggcggcgacacgctgaatacctccgtttatattgcccgtcaggtcgattctgccgctctggccgttcactatgtaacggcgctgggtaccgacagtttcagccaacagatgctggaggcgtggcagcatgaaaatgtggatacctcgctaacgcagcggatggaaaatcgcctgccaggcctctattacatcgaaaccgatgacactggcgagcgtaccttctactactggcgtaacgaagcggcagcgaaattctggctggagagcgagcagtcagcggctatctgcgagacgctggcgaccttcgattatctctacctgagcggcattagcctcgcgattttaagcccgaccagccgtgataagctgctgtctttattgcgtgaatgccgggccaacggcgggaaagtcatttttgataataactatcgcccgcgtttatggacaagtcgcgaagaaacgcagcaggtctatcaaaagatgctggaatgtactgatatcgccttcctgacactggacgatgaagacgcgctatggggtaagcaaccggtggaagaggtcattgctcgcacccatgcggcaggcgtacaggaagtggtggtaaaacgcggggcggactcttgcctggtctcgattcagggcgaggcgctcattgacgttccggcagtaaaactgccgaaagagaaagtgatagacaccactgccgcaggcgactccttcagcgccggttatctggccgttcgtttgacgggcggcagcgcgacggatgccgcgaagcgcggacacctgacggccagcacggtgattcagtaccgtggggccattattccgcacgacgcgatgccgcagtaa

SEQ ID NO: 1302 - protein, 309 aa, Salmonella enterica subsp. enterica serovar Typhi str. CT18
MSKKIAVIGECMIELSQKGADVQRGFGGDTLNTSVYIARQVDSAALAVHYVTALGTDSFSQQMLEAWQHENVDTSLTQRMENRLPGLYYIETDDTGERTFYYWRNEAAAKFWLESEQSAAICETLATFDYLYLSGISLAILSPTSRDKLLSLLRECRANGGKVIFDNNYRPRLWTSREETQQVYQKMLECTDIAFLTLDDEDALWGKQPVEEVIARTHAAGVQEVVVKRGADSCLVSIQGEALIDVPAVKLPKEKVIDTTAAGDSFSAGYLAVRLTGGSATDAAKRGHLTASTVIQYRGAIIPHDAMPQ

SEQ ID NO: 1303 - DNA, 930 bp, Salmonella typhimurium LT2
  CDS (1)..(930): transl_table=11
atgtctaaaaagattgccgtgattggcgaatgcatgattgagctgtcgcagaaaggcgctgatgttcagcgcggcttcggcggcgacacgctgaatacctccgtttatattgcccgtcaggtcgattctgccgctctggccgttcactatgtgacggcgctgggtaccgacagtttcagccaacagatgctggaggcgtggcagcatgaaaatgtggatacctcgctaacgcagcggatggaaaatcgcctgccaggcctctattacatcgaaaccgatgacactggcgagcgtaccttctactactggcgtaacgaagcggcagcgaaattctggctggagagcgagcagtcagcggctatctgcgagacgctggcgaccttcgattatctctacctgagcggcattagcctcgcgattttaagcccgaccagccgtgataagctgctgtctttattgcgtgaatgccgggccaacggcgggaaagtcatttttgataataactatcgcccgcgtttatggacaagtcgcgaagaaacgcagcaggtctatcaaaagatgctggaatgtactgatatcgccttcctgacactggacgatgaagacgcgctatggggtcagcaaccagtggaagaggtcattgcccgcacccatgcggcaggcgtgcaggaagtggtggtaaaacgcggggcggactcttgcctggtctcgattcagggcgaggcgctcattgacgttccggcagtgaaactgccgaaagagaaagtgatagacaccactgccgcaggcgactccttcagcgccggttatctggccgttcgtttgacgggcggcagcgcgacggatgccgcgaagcgcggacacctgacggccagcacggtgattcagtaccgtggggccattattccgcacgacgcgatgccgcagtaa

SEQ ID NO: 1304 - protein, 309 aa, Salmonella typhimurium LT2
MSKKIAVIGECMIELSQKGADVQRGFGGDTLNTSVYIARQVDSAALAVHYVTALGTDSFSQQMLEAWQHENVDTSLTQRMENRLPGLYYIETDDTGERTFYYWRNEAAAKFWLESEQSAAICETLATFDYLYLSGISLAILSPTSRDKLLSLLRECRANGGKVIFDNNYRPRLWTSREETQQVYQKMLECTDIAFLTLDDEDALWGQQPVEEVIARTHAAGVQEVVVKRGADSCLVSIQGEALIDVPAVKLPKEKVIDTTAAGDSFSAGYLAVRLTGGSATDAAKRGHLTASTVIQYRGAIIPHDAMPQ

SEQ ID NO: 1305 - DNA, 1278 bp, Escherichia coli CFT073
  CDS (1)..(1278): transl_table=11
ttgatagatcggctgccaggtgtaagcacgctcacactgcaaccaaaaacgccgttcctgcaagctctcgatgcttgcttcagggttgcttattcgctggataacctgccttatcatcaaagatgtcctgtgtttaaaagtgatgctgcccggactcgacaaagattatcggcgcgcaaaggcagaactttaccgcctggccggggtaaatttccccactccacaatggaatctttcaggaatacgttctggctcaaaaaaataatggaacactgttttaatatggttgaccagcaaaccaccacagcgcaaactaacgctaattttttacagatcaggttcacgactatgtccaaaaagattgccgtgattggcgaatgcatgattgagctttccgagaaaggcgcggacgttaagcgcggtttcggcggcgataccctgaacacttccgtctatatcgcccgtcaggtcgatcctgcggcattaaccgttcattacgtaacggcgctgggaacggacagttttagccagcagatgctggacgcctggcgcggcgagaacgttgatacttccctgacccaacggatggaaaaccgtctgccgggcctttactacattgaaaccgacagcaccggcgaacgtacgttctactactggcgtaacgaagccgccgccaaattctggctggagagtgagcaatccgcggcgatttgcgaagagctggcgaatttcgattatctctacctgagcgggattagcctggcgatcttaagcccgaccagccgcgaaaagctgctttccctgctgcgcgaatgccgcgccaacggcggaaaagtgattttcgacaataactatcgtccgcgcctgtgggccagcaaagaagagacacagcaggtgtaccaacaaatgctggaatgcacggatatcgccttcctgacgctggacgatgaagacgcgctgtggggtcaacagccggtggaagacgtcattgcgcgcacccataacgcgggcgtgaaagaagtggtggtgaaacgcggggcggattcttgcctggtgtccattgctggcgaagggttagtggatgttccggcggtaaaactgccgaaagaaaaagtgatcgataccaccgcagctggcgactctttcagtgccggttatctggcggtacgtttgacgggcggaattgcggaagacgcagcgaaacgcgggcacctgaccgcaagtaccgttattcagtatcgcggcgcgattatcccgcgtgaagcgatgccagcgtaa

SEQ ID NO: 1306 - protein, 425 aa, Escherichia coli CFT073
MIDRLPGVSTLTLQPKTPFLQALDACFRVAYSLDNLPYHQRCPVFKSDAARTRQRLSARKGRTLPPGRGKFPHSTMESFRNTFWLKKIMEHCFNMVDQQTTTAQTNANFLQIRFTTMSKKIAVIGECMIELSEKGADVKRGFGGDTLNTSVYIARQVDPAALTVHYVTALGTDSFSQQMLDAWRGENVDTSLTQRMENRLPGLYYIETDSTGERTFYYWRNEAAAKFWLESEQSAAICEELANFDYLYLSGISLAILSPTSREKLLSLLRECRANGGKVIFDNNYRPRLWASKEETQQVYQQMLECTDIAFLTLDDEDALWGQQPVEDVIARTHNAGVKEVVVKRGADSCLVSIAGEGLVDVPAVKLPKEKVIDTTAAGDSFSAGYLAVRLTGGIAEDAAKRGHLTASTVIQYRGAIIPREAMPA

SEQ ID NO: 1307 - DNA, 930 bp, Vibrio vulnificus CMCP6
  CDS (1)..(930): transl_table=11
atgaatcacatcaatcgcgttgccattattggcgaatgcatggttgaactgaaaaaggtcaacggcgagctacaacaaggttttggtggggatacactcaacaccgcagtttacctttcccgtttgacccagcaatccggtgtttcaacctcttatgttacgggattaggacaggatccatttagccgagaaatgcttgccgcatggcaagacgaaggtattaacacggacatggtgtacctttctcaagacaaattgccaggcatttatgccatcgaaacggcagacaatggtgagcgtagcttcttctactggcgcaacgattcggcggcgaaatactggctgcgtgaccgtgccatcctgacgctggcgaaagagctgtgtcagcatcaaatgatttacctcagtggtatcagcttggcgatactgtcgcaagattgccgtgaagcgctgatcaaactgctcgcgctttgccgcagtgatggggtgaaaatcgcgtttgataataacttccgccctgcgctgtggagcaacgtggcggacgcacaagcgttctaccagcaaattctgcaagtcaccgatatggcatttctcacctttgatgatgagatgctgttgtggggcgatacccatgaagatcaagcgattgagcgcaccaaggggtttggtgtgagtgaaatcgtcatcaaacgtggtggggatgagtgttttgtcgttacagaagcgggccgtcatgcggttgcgccactcaaaattgaccatgttgtcgacaccaccgccgcgggagattcattcagtgctggctatcttgcaaagcgtattttgggtggtgattgtcagcaagctgcttttgctggtcacactgttgcaggtcatgttattcaacatcgtggcgcaattattcctcgcgaagcgatgccaactatttaa

SEQ ID NO: 1308 - protein, 309 aa, Vibrio vulnificus CMCP6
MNHINRVAIIGECMVELKKVNGELQQGFGGDTLNTAVYLSRLTQQSGVSTSYVTGLGQDPFSREMLAAWQDEGINTDMVYLSQDKLPGIYAIETADNGERSFFYWRNDSAAKYWLRDRAILTLAKELCQHQMIYLSGISLAILSQDCREALIKLLALCRSDGVKIAFDNNFRPALWSNVADAQAFYQQILQVTDMAFLTFDDEMLLWGDTHEDQAIERTKGFGVSEIVIKRGGDECFVVTEAGRHAVAPLKIDHVVDTTAAGDSFSAGYLAKRILGGDCQQAAFAGHTVAGHVIQHRGAIIPREAMPTI

SEQ ID NO: 1309 - DNA, 978 bp, Vibrio vulnificus CMCP6
  CDS (1)..(978): transl_table=11
atgaagcacatcgccattattggtgaatgtatgattgagttgaatggcaaaccgttcggctcaatgcatcaaacatttggtggggatacgctcaacgctgcggtttatttgagccgcggctgcgaagccaatagcaaacctgatgaagtcaaagtctcttatgttacggcgcttggcaatgacccaatcagtacgggcatgctgactcgctggcaagacgaaggcgtctcaacagacttagtgctacgcgatgagactcgcacgccgggtttgtacctgattcagcttgatgaccaaggcgagcgtacgttcctatattggcgtaaccaatcagctgcgcgttacttacttcaacatccaaactttggaatggttaagcaagcattaactcaagtagatgcagtgtttctcagcggtatctctttggccatcttgccagaggaagaccgaatttcactgcttaatttgttggtcgagcttaaagcccaaggcgttgaaatcgcttttgatagtaatttccgcccagcattgtggcctcaagacaataatctaaccgtcaaaaacgtgtaccaagccatgtatcaactgacggacgttgccttggtgacttttgatgatgagcaattgatctggggtgacgaaacaccagagcaaaccattgaacgccttacctctcttggtgtgggcaaatgcatcgtcaagctcggcgcagatggctgtttggttcaggactcaacaaatcagggggcgggcgcggctctggctccacaagccgtgccaacccaacctgtcgcccaagtggtggacaccacatcggcgggcgactcattcaatggtggctttttatcggcatacctcgctggcgccgatctcgcgacctcatgtcaaagaggcaacgcactggcaggtgctgtgattcaacatcgcggtgccatcattcccaaagcattcacacaaccggcgcttggcgtcgtttaa

SEQ ID NO: 1310 - protein, 325 aa, Vibrio vulnificus CMCP6
MKHIAIIGECMIELNGKPFGSMHQTFGGDTLNAAVYLSRGCEANSKPDEVKVSYVTALGNDPISTGMLTRWQDEGVSTDLVLRDETRTPGLYLIQLDDQGERTFLYWRNQSAARYLLQHPNFGMVKQALTQVDAVFLSGISLAILPEEDRISLLNLLVELKAQGVEIAFDSNFRPALWPQDNNLTVKNVYQAMYQLTDVALVTFDDEQLIWGDETPEQTIERLTSLGVGKCIVKLGADGCLVQDSTNQGAGAALAPQAVPTQPVAQVVDTTSAGDSFNGGFLSAYLAGADLATSCQRGNALAGAVIQHRGAIIPKAFTQPALGVV

SEQ ID NO: 1311 - DNA, 930 bp, Vibrio parahaemolyticus RIMD 2210633
  CDS (1)..(930): transl_table=11
atgaacccaatcagtcgtgtcgccatcatcggcgaatgtatggtggagcttaaaaaacatgacggcgtgctacagcaaggttttggcggtgatacgctcaataccgcggtgtatctttctcgtctaaccaaacaacacggggtcgaaacttcgtatgtgacgggattaggacatgatccgtttagtcgtgaaatgctaacggcatggcgtgaagaggggatcaatacggacatggtctacctttctgaagataagttgccaggcatttacgcgattgaaaccgccgaagatggcgagcgtagcttcttttactggcgtaatgatgcggcggcaaaatactggttgcgtgagcgagcattgttgtcgttggtgaaagatctttgtcagcatcaaatgatctacctgagtggcattagcttggcgatcatctcggacgattgtcgtcagatgttgattgagctgctaacaatgtgccgtaaagaaggtgtgaaaatcgcattcgataacaacttccgccctaagctttggcctaacatcgagcaagctcgtgatttttactcaaagatcctcagcgtcaccgacatggcatttttgaccttcgatgacgaggtcatgctgtggggagataagcacgaagatgaagcgatcagccgtacgaaaaactttggcgtgaaagagatcatcgtgaaacgtggcgcggacgactgttttgttgtaacacaagatcaacaacacaccgttgcggccttgaaggttgatgctgtggtggataccacggcggcaggtgattcttttagtgcgggttatcttgcaaaacgaattttaggcggagacgttgctgagtctgcgcttgctggccacaaagtggctggcacggttattcaacatcgcggcgcgatcattccaagccaagcgatgccaactatttaa

SEQ ID NO: 1312 - protein, 309 aa, Vibrio parahaemolyticus RIMD 2210633
MNPISRVAIIGECMVELKKHDGVLQQGFGGDTLNTAVYLSRLTKQHGVETSYVTGLGHDPFSREMLTAWREEGINTDMVYLSEDKLPGIYAIETAEDGERSFFYWRNDAAAKYWLRERALLSLVKDLCQHQMIYLSGISLAIISDDCRQMLIELLTMCRKEGVKIAFDNNFRPKLWPNIEQARDFYSKILSVTDMAFLTFDDEVMLWGDKHEDEAISRTKNFGVKEIIVKRGADDCFVVTQDQQHTVAALKVDAVVDTTAAGDSFSAGYLAKRILGGDVAESALAGHKVAGTVIQHRGAIIPSQAMPTI

SEQ ID NO: 1313 - DNA, 945 bp, Photorhabdus luminescens subsp. laumondii TTO1
  CDS (1)..(945): transl_table=11
atgaagcagattgcactccttggtgaatgtatgatcgaacttaatggtgcccctttttcgaccatgcatcagactttcggtggtgatgtcttgaacagtgcggtttatttagcacgtgcaagccgacagaagattgctgttcattttgtgactgcgttgggcttggattcgctcagtgaagggatgatcacacgttggcaagacgagggtattcgcacccatctgattttgcgtgatccggttcgccaaccgggactgtatttgattcaacttgatggacagggagagcgcacctttctgtactggcgtaataattccgctgcccgttatatggtgcgccatcctgatttctcttcggttatgcaagcattacagcagatggatgccatttatctcagtggtatcagtttggctatcttgcctgttgatgatcgtgaaaagctactaaacttgctggctgagctggctgctcaaggaaaaaccatcattttcgacagtaattatcgttcggcattatggcaaagtgtggaggaaacccaagtttgttatcagaaattactcgcctttacctcattggcactggtgacagatgacgatgaatgtaagctgtggggcgataaatcggttacagaaaccatgattcgtcttaaacaagcaggagttaaagaagccgtgattaaagcgggggctgccggttgctattatcagcatttggtacaggatactccgattgagctgatcccaacggtgccggttgttaacgtggccgataccacggcggcgggagacgcctttaatgctgggtttctggcaggatttctgacggattgtccgatacaacaagcggcaattatggggcattgtctggctggtaccgttattcagcataaaggggcgattattccaatcagtgcaactcaagcagtgactgacagtttcttttaa

SEQ ID NO: 1314 - protein, 314 aa, Photorhabdus luminescens subsp. laumondii TTO1
MKQIALLGECMIELNGAPFSTMHQTFGGDVLNSAVYLARASRQKIAVHFVTALGLDSLSEGMITRWQDEGIRTHLILRDPVRQPGLYLIQLDGQGERTFLYWRNNSAARYMVRHPDFSSVMQALQQMDAIYLSGISLAILPVDDREKLLNLLAELAAQGKTIIFDSNYRSALWQSVEETQVCYQKLLAFTSLALVTDDDECKLWGDKSVTETMIRLKQAGVKEAVIKAGAAGCYYQHLVQDTPIELIPTVPVVNVADTTAAGDAFNAGFLAGFLTDCPIQQAAIMGHCLAGTVIQHKGAIIPISATQAVTDSFF

SEQ ID NO: 1315 - DNA, 933 bp, Vibrio vulnificus YJ016
  CDS (1)..(933): transl_table=11
atgaatcatattaagcgtgtcgctgtcatcggcgaatgcatggtcgaattaagacgaaacaatggagtgctagagcaaggctttggtggtgatacattaaataccgccgtttatctttcacgcctaactcatgaacatggggtggcaagctcttatgtaaccgggcttgggcgcgacgcttttagccagcagatgcttagcgcgtggcaagtggaagcgcttgatacagagcatgtctttatctcagaagataagttaccgggcatctatgtgattgaaactgcagcagatggtgagcggagcttcttttattggcgcaatgactctgcggcaaagtattggctgcgtggtcaagagattcctcagctggcgcatgccttacgccatcaccaaatgatctatttaagtgggattagtctagccattttacccagcgattgttgtgatgctttgcttgagttgttacgtttactccgcgctcaaggcgcaaccattgcctttgataacaattaccgtccagcgttgtggccaagtcagcagcaagcgcagagtgtctatcgccaagtattggccttaaccgatatcgcctttttgacctttgacgatgagcaagcactatatggtgacgaaaccgaacaacaggcagtagaccgcacgcaaacgttaggtgttaaggaaattgtgattaagcgtggcgctgagccttgtatggtcgtcactcaagtgggtattgagtctatcgcttcacaaccggttgaaaagattgttgatacgaccgcagcgggggactcttttagtgctggctatctggccaagcgacttctaggtggtagcactggtgaatcggcccttgctggccacaccttagctggcgccgttattcaacagcgtggcgctttgattggcacagatgctatgccaactattatttaa

SEQ ID NO: 1316 - protein, 310 aa, Vibrio vulnificus YJ016
MNHIKRVAVIGECMVELRRNNGVLEQGFGGDTLNTAVYLSRLTHEHGVASSYVTGLGRDAFSQQMLSAWQVEALDTEHVFISEDKLPGIYVIETAADGERSFFYWRNDSAAKYWLRGQEIPQLAHALRHHQMIYLSGISLAILPSDCCDALLELLRLLRAQGATIAFDNNYRPALWPSQQQAQSVYRQVLALTDIAFLTFDDEQALYGDETEQQAVDRTQTLGVKEIVIKRGAEPCMVVTQVGIESIASQPVEKIVDTTAAGDSFSAGYLAKRLLGGSTGESALAGHTLAGAVIQQRGALIGTDAMPTII

SEQ ID NO: 1317 - DNA, 987 bp, Vibrio vulnificus YJ016
  CDS (1)..(987): transl_table=11
ttgtctcgaggttttgttgctgtaataatagcagcaattacgttaaggagacatcctatgaatcacatcaatcgcgttgccattattggggaatgcatggttgaactgaaaaaggtcaacggcgagctacaacaaggttttggtggggatacactcaacaccgcagtttacctttcccgtttgacccagcaatccggtgtttcaacctcttatgttacgggattaggacaggatccatttagccgagaaatgcttgccgcttggcaagacgaaggtattaacacggacatggtgtacctttctcaagacaaattgccgggcatttatgccatcgaaacggcagacaatggcgagcgtagcttcttctactggcgcaacgattctgcggcgaaatactggctgcgtgaccgtgccatcctgacgctggcgaaagagctgtgtcagcatcaaatgatttacctcagtggtatcagcttggcgatactgtcgcaagattgccgtgaagcgctgatcaaactgctcgcgctttgccgcagtgatggggtgaaaatcgcgtttgataataacttccgccctgcgctgtggagcaacgtggcggacgcacaagcgttctaccagcaaattctgcaagtcaccgatatggcatttctcacctttgatgatgagatgctgttgtggggcgatacccatgaagatcaagcgattgagcgcaccaaggggtttggtgtgagtgaaatcgtcatcaaacgtggtggggatgagtgttttgtcgttacagaagcgggccgtcatgcggttgcgccactcaaaattgaccatgttgtcgacaccaccgccgcgggagattcattcagtgctggctatcttgcaaagcgtattttgggtggtgattgtcagcaagctgctgttgctggtcacactgttgcaggtcatgttattcaacatcgtggcgcaattattcctcgcgaagcgatgccaactatttaa

SEQ ID NO: 1318 - protein, 328 aa, Vibrio vulnificus YJ016
MSRGFVAVIIAAITLRRHPMNHINRVAIIGECMVELKKVNGELQQGFGGDTLNTAVYLSRLTQQSGVSTSYVTGLGQDPFSREMLAAWQDEGINTDMVYLSQDKLPGIYAIETADNGERSFFYWRNDSAAKYWLRDRAILTLAKELCQHQMIYLSGISLAILSQDCREALIKLLALCRSDGVKIAFDNNFRPALWSNVADAQAFYQQILQVTDMAFLTFDDEMLLWGDTHEDQAIERTKGFGVSEIVIKRGGDECFVVTEAGRHAVAPLKIDHVVDTTAAGDSFSAGYLAKRILGGDCQQAAVAGHTVAGHVIQHRGAIIPREAMPTI

SEQ ID NO: 1319 - DNA, 897 bp, Bradyrhizobium sp. ORS278
  CDS (1)..(897): transl_table=11
gtggagttcgcgcaggaggacggaagtctgttccggcgcggttttggcggcgacacgctcaacacggcgctctatctgtcccgtctcggcgtgccgacgtcctatgtgacggccctcggcgacgatccgctgagcgcgatgatgctggcggcctggcgggccgagggcatcgacaccgcggaggtgctgcgggtcgagggccgcgtgcccggcctctacatgatcgagcgcgacgccaggggcgaacgcagcttcttgtattggcgcgaccgtgcgccggcgcgcgagctgttcgaccgcgccgaccgcgacatgctcgaccgactctcgcgcttcgactggatctatctctccggcatcagcctgtcgctgtatggcgagaccggcaaggccaagctgcgcgagctgctcacggtggcgcgcaagcgcggggcgcgcgtggtgttcgacggcaactaccggccgcgcggctgggccagccgcgagatggcgcagcgcgcgtttcgcgccatcatgccgctggtcgacatcgcgctgccgacgctcgaggacgagcagatgctgttcggcgacgtcgatgcctcggtctgcctgcgccgcttcagggacgcgggtgtcggcgaggtcgtcatcaagcgcggcccgcgtggctgcctgatccatgccgagggcgtgctggtcgacatcgcgccgcccgcggtgctgcagccgatcgacacgacggctgctggtgattccttcaacgcaggatacctcgctgctcggatcaagggcgcgccgccgcgcaaggcggcgttggcggggcatcggctcgcgggtgcggtgatcatggcgccaggcgcggtgattccggcggcggcgatgccgcgggacattctggcactgagcgaggcgtga

SEQ ID NO: 1320 - protein, 298 aa, Bradyrhizobium sp. ORS278
MEFAQEDGSLFRRGFGGDTLNTALYLSRLGVPTSYVTALGDDPLSAMMLAAWRAEGIDTAEVLRVEGRVPGLYMIERDARGERSFLYWRDRAPARELFDRADRDMLDRLSRFDWIYLSGISLSLYGETGKAKLRELLTVARKRGARVVFDGNYRPRGWASREMAQRAFRAIMPLVDIALPTLEDEQMLFGDVDASVCLRRFRDAGVGEVVIKRGPRGCLIHAEGVLVDIAPPAVLQPIDTTAAGDSFNAGYLAARIKGAPPRKAALAGHRLAGAVIMAPGAVIPAAAMPRDILALSEA

SEQ ID NO: 1321 - DNA, 930 bp, Klebsiella pneumoniae subsp. pneumoniae MGH 78578
  CDS (1)..(930): transl_table=11
atgtctaaaaaaattgccgttattggcgaatgcatgattgagctgtcagagaaaaacggggccgttaaccgcggctttggcggcgataccttaaacacctcggtctatatcgcgcggcagacggatgccagcgcattgagcgtccactacgtcaccgccctgggaaccgatgcgttcagccagcagatgctcgacagctggcaacaggaaaacgtcaacaccgatcttatccagcggatggccgaccgcctgccgggactgtattacattgaaaccgatgacaccggcgagcgcaccttctactactggcgcaacgaggcggcggcaaagttctggctggagagcgatcgcgcggcggcgatttgcgaagagctggccactttcgactatctctatctgagcggcatcagtctcgccattctcagcccggccagccgcgacaagctgttcacgctgctgcgtgagtgccgcgccaacggtggcaaggtgatcttcgacaacaactatcgtccgcgcctgtgggccagccaggcggaaacgcagcaggtctatcaggagatgctcgcctgcaccgatatcgcgtttctgaccctcgatgatgaagacgcgctgtggggagaaaaaccggttgctgaggtgatcgcccgcacgcacgccgccggcgtggaagaggtggtggtgaagcgcggcgcggatgcctgcctggtctcggttagcgggcaaccgctgcgggaagtgccggccgtcaggctggccaaagagaaggtggtggataccaccgccgccggagactccttcagcgccggctacctggccgttcgcctgaccggcggcgatgccgaatccgccgccagacgcggacacctgaccgccagcacggtgatccagtatcgcggggcgatcatcccgcgggaagcgatgccgcagtaa

SEQ ID NO: 1322 - protein, 309 aa, Klebsiella pneumoniae subsp. pneumoniae MGH 78578
MSKKIAVIGECMIELSEKNGAVNRGFGGDTLNTSVYIARQTDASALSVHYVTALGTDAFSQQMLDSWQQENVNTDLIQRMADRLPGLYYIETDDTGERTFYYWRNEAAAKFWLESDRAAAICEELATFDYLYLSGISLAILSPASRDKLFTLLRECRANGGKVIFDNNYRPRLWASQAETQQVYQEMLACTDIAFLTLDDEDALWGEKPVAEVIARTHAAGVEEVVVKRGADACLVSVSGQPLREVPAVRLAKEKVVDTTAAGDSFSAGYLAVRLTGGDAESAARRGHLTASTVIQYRGAIIPREAMPQ

SEQ ID NO: 1323 - DNA, 930 bp, Salmonella enterica subsp. arizonae serovar 62:z4,z23:--
  CDS (1)..(930): transl_table=11
atgtctaaaaagattgccgtgattggcgaatgcatgattgagctgtcgcagaaaggcgctgatgttcagcgcggattcggcggcgacacgttgaatacctccgtttatattgcccgtcaggtcgattctgccgccttgactgttcactatgtgacggcactgggtaccgacagtttcagccaacagatgctggattcatggcagggagaaaacgtcgatatctctctgacacaacgtatggaaaaccgtctgccaggcctctattacatcgaaaccgacgacactggcgaacgtaacttctactactggcgtaacgaggcggcggcgaaattctggctggagagcgagcagactgcggctatctgcaaagcgctggcgtccttcgattatctctacctgagcggcattagcctcgcgattttaagcccggccagccgtgataagctgctgtctttattgcgtgaatgccgcgccaacggcggaaaagtgatttttgataataactatcgcccgcgtttatggacaagccgcgaagagacgcagcaggtctatcaaaagatgctggaatgcaccgacatcgccttcctgacactggatgatgaagacgcgctatggggtaaaaaaccggtggaagaggtcattgcccgcacccatacggcaggcgtacacgaagtcgtggtaaaacgcggggcggactcttgcctggtttcgactcagggcgaggcgctcgttgacgttccggcggtaaaactcccgaaagagaaagtgatagacaccactgccgcaggcgactccttcagcgccggttatctggccgttcgtttaacgggcggtagcgcggcggatgccgcgaaacgcgggcacctgacggccagcacggtgattcagttccgtggggcgattattccgcacgacgcgatgccgcagtaa

SEQ ID NO: 1324 - protein, 309 aa, Salmonella enterica subsp. arizonae serovar 62:z4,z23:--
MSKKIAVIGECMIELSQKGADVQRGFGGDTLNTSVYIARQVDSAALTVHYVTALGTDSFSQQMLDSWQGENVDISLTQRMENRLPGLYYIETDDTGERNFYYWRNEAAAKFWLESEQTAAICKALASFDYLYLSGISLAILSPASRDKLLSLLRECRANGGKVIFDNNYRPRLWTSREETQQVYQKMLECTDIAFLTLDDEDALWGKKPVEEVIARTHTAGVHEVVVKRGADSCLVSTQGEALVDVPAVKLPKEKVIDTTAAGDSFSAGYLAVRLTGGSAADAAKRGHLTASTVIQFRGAIIPHDAMPQ

SEQ ID NO: 1325 - DNA, 930 bp, Salmonella enterica subsp. enterica serovar Paratyphi B str. SPB7
  CDS (1)..(930): transl_table=11
atgtctaaaaagattgccgtgattggcgaatgcatgattgagctgtcgcagaaaggcgctgatgttcagcgcggcttcggcggcgacacgctgaatacctccgtttatattgcccgtcaggtcgattctgccgctctggccgttcactatgtgacggcgctgggtaccgacagtttcagccaacagatgctggaggcgtggcagcatgaaaatgtggatacctcgctaacgcagcggatggaaaatcgcctgccaggcctctattacatcgaaaccgatgacactggcgagcgtaccttctactactggcgtaacgaagcggcagcgaaattctggctggagagcgaacagtcagcggctatctgcgaggcgctggcgaccttcgattatctctacctgagcggcattagcctcgcgattttaagcccaaccagccgtgttaagctgctgtctttattgcgtgaatgccgggccaacggcgggaaagtcatttttgataataactatcgcccgcgtttatggacaagtcgcgaagaaacgcagcaggtctatcaaaagatgctggaatgtactgatatcgccttcctgacactggacgatgaagacgcgctatggggtcagcaacccgtggaagaggtcattgcccgcacccatgcggcaggcgtgcaggaagtggtggtaaaacgcggggcggactcttgcctggtctcgattcagggcgaggcgctcattgacgttccggcagtcaaactgccgaaagagaaagtgatagacaccactgccgcaggcgactccttcagcgccggttatctggccgttcgtttgacgggcggcagcgcgacggatgccgcgaagcgcggacacctgacggccagcacggtaattcagtaccgtggggccattattccgcacgacgcgatgccgcagtaa

SEQ ID NO: 1326 - protein, 309 aa, Salmonella enterica subsp. enterica serovar Paratyphi B str. SPB7
MSKKIAVIGECMIELSQKGADVQRGFGGDTLNTSVYIARQVDSAALAVHYVTALGTDSFSQQMLEAWQHENVDTSLTQRMENRLPGLYYIETDDTGERTFYYWRNEAAAKFWLESEQSAAICEALATFDYLYLSGISLAILSPTSRVKLLSLLRECRANGGKVIFDNNYRPRLWTSREETQQVYQKMLECTDIAFLTLDDEDALWGQQPVEEVIARTHAAGVQEVVVKRGADSCLVSIQGEALIDVPAVKLPKEKVIDTTAAGDSFSAGYLAVRLTGGSATDAAKRGHLTASTVIQYRGAIIPHDAMPQ

SEQ ID NO: 1327 - DNA, 933 bp, Pectobacterium atrosepticum SCRI1043
  CDS (1)..(933): transl_table=11
atgacaactactaacattgccgtaatcggcgaatgcatgatcgaactgtcgcagaaaggcacggatcttaaccgtggatttggtggcgatacgctgaacaccgctgtttacattgcgcgtcaagtgaatgccgataagctgggcgtacattatgtgaccgcactcggcaccgatagcttcagtaccgagatggttgccgcctggcaaaaagaaggggtgaaaaccgacctgatccagcgactggacaataaattacccggtttatacttcattgaaaccgacgatagcggcgagcgtacgttctactattggcgcaatgacgcggctgcccgctactggctggacagcccggaagcagaaaagatcggtcaggggctggcacagtttgactatctctacctgagtggtatcagcctggcaattctgaacgccgaaagccgtcagcgtcttctcgcgctgctacgtgcctgccgcgctaacggcggtaaagtgatttttgataataactaccgtccacgtttgtggcagagcaaggaagagacgcagcagtcctacaccgacatcctgtcttgtacggatatcgctttcctgacgctggatgatgaagacatgctgtggggcacgaagccgctggaagcggtgctcgagcggacgcacggtttgggcgttaacgaagtggtcatcaaacgcggtgccgattcctgcatcgtgtcagaacgcggacaagcgctggtcgatgtccccgcgataaaattgtcaaaagagaaagtggtcgataccaccgcagcgggcgactctttcagcgcaggctacctggcagtacgcctgaatggcggcagcacgcaggaagccgcacagcgcggtcacctgacagccagcacggtcattcaataccgtggcgcgattatcccgcttgaggcaatgcctgcgtaa

SEQ ID NO: 1328 - protein, 310 aa, Pectobacterium atrosepticum SCRI1043
MTTTNIAVIGECMIELSQKGTDLNRGFGGDTLNTAVYIARQVNADKLGVHYVTALGTDSFSTEMVAAWQKEGVKTDLIQRLDNKLPGLYFIETDDSGERTFYYWRNDAAARYWLDSPEAEKIGQGLAQFDYLYLSGISLAILNAESRQRLLALLRACRANGGKVIFDNNYRPRLWQSKEETQQSYTDILSCTDIAFLTLDDEDMLWGTKPLEAVLERTHGLGVNEVVIKRGADSCIVSERGQALVDVPAIKLSKEKVVDTTAAGDSFSAGYLAVRLNGGSTQEAAQRGHLTASTVIQYRGAIIPLEAMPA

SEQ ID NO: 1329 - DNA, 924 bp, Pseudomonas syringae pv. syringae B728a
  CDS (1)..(924): transl_table=11
atgagccttccacgggtcgccctgatcggcgaatgcatgatcgaactgcaacagcatgctgatggcagcctgcgccagagcttcggcggcgacacgctcaataccgcggtctacctttcccgattgctgggtgagcgggccaaggtcgactacgtcactgcgctgggcgacgacagcttcagcgatgcgatgtgccggatctgggcggacgagggcatcggtctgggcaaggtgcagcgcctgcctggacgcttgccggggctctactgcatccagaccgacgccaacggtgagcggcgtttcctctactggcgcaacgaagctgccgtgcgcgactgcttcatgaccccggcggccgagccgatcctggcagcgctggccagctatgacgtgctgtatttcagtggcatcaccctggcagtgcttggcgagcaggggcgtgccaaactgctggaggcattggcgcgtgcgcgtcagcgcggagtcagggtcgccttcgacaacaactatcgtccgcggctgtgggccagtgtcgagcaggcccgcgaagcctaccttgcgtgtctgcagcatgtagacctggccttgctgaccgaagacgacgagcaggcactgtatggctatgccgacagcgaacaactgctggccgcctatcgcgggcgcggcatcggtgaaatcgtcgtcaagcgtggcgcccagagttgcctcgtcgaagccggcggcgaacgtttcgacatcgcagcgcagaaggtcgagcgtgtggtcgataccacggctgcgggtgactcgttcagtgctggttatctcgcggcccggctcacgggtcaacacccgctgcaggcagcggaagcagggcatcgcctggccagtatcgtgatccagcatccaggcgcgctggtaccgaagtcggtcatgccagtctga

SEQ ID NO: 1330 - protein, 307 aa, Pseudomonas syringae pv. syringae B728a
MSLPRVALIGECMIELQQHADGSLRQSFGGDTLNTAVYLSRLLGERAKVDYVTALGDDSFSDAMCRIWADEGIGLGKVQRLPGRLPGLYCIQTDANGERRFLYWRNEAAVRDCFMTPAAEPILAALASYDVLYFSGITLAVLGEQGRAKLLEALARARQRGVRVAFDNNYRPRLWASVEQAREAYLACLQHVDLALLTEDDEQALYGYADSEQLLAAYRGRGIGEIVVKRGAQSCLVEAGGERFDIAAQKVERVVDTTAAGDSFSAGYLAARLTGQHPLQAAEAGHRLASIVIQHPGALVPKSVMPV

SEQ ID NO: 1331 - DNA, 909 bp, Pseudomonas fluorescens Pf-5
  CDS (1)..(909): transl_table=11
atggacaggaagaaacgcatcgcggccatcggcgaatgcatgatcgagctgcagcagcatcatgacggcagcctgcaacagagctttggcggcgacaccctgaacgccgcggtgtacctagcgcgggaaatgggcgaggccgggcgggtggattacgtcaccgccctgggcgatgacagcttcagtgatgccatgtgccaggggtgggcggcggagggcatcggcctggagcgggtgcagcgcttgccggggcgcctgcctgggctgtattgcatccagactgacgcccggggcgagcggcgctttctctactggcgcaacgaggcggcagtgcgcgactgcttcaccacggtggcggccgggccgatcctcgaagcgctgaagcattacgatgtgctgtatttcagcggcatcaccctggcggtgctgggggaggtggggcgcgggaagttgttgcagaccctggccgaggcgcgccagcgccaggcgctgatagtcttcgacaacaactaccggccgcgcctgtgggcgtcggtcgaacaggcccgggcggcgtaccgcgaagtattgccccaggtggatctggcattgctgaccctggaggatgagcaagcgctgtttgcctatccggatgccgaagcggtgttcgcggcgtatcagggcattccggaagtggtgctcaagcggggcgccgagccctgcctgattcgcgtggcgggcggtgctttcgaggtgccggcccagcgggtggagcaggtagtggactccacggcggccggggattcgttcagcgcagcctatctggcccggcgcctgctgggcggcagcccggtgcaagcggcagaggccgggcaccggctggcgagccaggtcatccagcatcccggcgccctgataccccgccattga

SEQ ID NO: 1332 - protein, 302 aa, Pseudomonas fluorescens Pf-5
MDRKKRIAAIGECMIELQQHHDGSLQQSFGGDTLNAAVYLAREMGEAGRVDYVTALGDDSFSDAMCQGWAAEGIGLERVQRLPGRLPGLYCIQTDARGERRFLYWRNEAAVRDCFTTVAAGPILEALKHYDVLYFSGITLAVLGEVGRGKLLQTLAEARQRQALIVFDNNYRPRLWASVEQARAAYREVLPQVDLALLTLEDEQALFAYPDAEAVFAAYQGIPEVVLKRGAEPCLIRVAGGAFEVPAQRVEQVVDSTAAGDSFSAAYLARRLLGGSPVQAAEAGHRLASQVIQHPGALIPRH

SEQ ID NO: 1333 - DNA, 924 bp, Pseudomonas syringae pv. phaseolicola 1448A
  CDS (1)..(924): transl_table=11
atgagctttccacgggtcgccctgatcggcgaatgcatgatcgagttacagcagcatgccgacggcagcctgcgtcagagcttcggcggtgacacgctcaatacggcggtttaccttgcccgattgttgggtgagcgggccaaggtggattacgtcacggcgctgggtgacgacagcttcagcgatgcaatgtgccggatctgggccgatgaaggcattggtctgggcaaggtgcaacgcctgccggggcgtttacccgggctctactgcattcagaccgatgccaatggcgagcgtcgtttcctctactggcgcaacgaagccgccgtgcgggactgtttcatgacgcctgcggccgagccgatcctcgcggcgctggccagctacgacgtgctgtatttcagtggtatcaccctggcggtacttggcgagcaaggccgcgcccgattgctggaagcactggaccgtgctcgtcaacgtggggtcagggttgccttcgacaataactatcggcctcggctgtgggccagcgtggagcaggctcgcgaggcctatcaggcatgcctgcagcatgtggatctggcgttgctcaccgaagacgatgagcaggcgctctatggttatgccgacagtgagcaattactggcggcctatcgaggtcgcggcatcggtgagatcgtcgtcaagcgcggcgcgcaaagttgtcttgtggaagccggcggcgagcgtttcgacattgcgtcgcaaaaggtcgagcatgtcgtcgataccacggcagcaggggactcgttcagcgctgcctatctggccgcccggctcatgggggaacacccgcgacaggctgccgaagcaggtcatcgtctggccagtgtggtgattcaacacccgggtgcgctggtaccaaaatcggtcatgccagtctga

SEQ ID NO: 1334 - protein, 307 aa, Pseudomonas syringae pv. phaseolicola 1448A
MSFPRVALIGECMIELQQHADGSLRQSFGGDTLNTAVYLARLLGERAKVDYVTALGDDSFSDAMCRIWADEGIGLGKVQRLPGRLPGLYCIQTDANGERRFLYWRNEAAVRDCFMTPAAEPILAALASYDVLYFSGITLAVLGEQGRARLLEALDRARQRGVRVAFDNNYRPRLWASVEQAREAYQACLQHVDLALLTEDDEQALYGYADSEQLLAAYRGRGIGEIVVKRGAQSCLVEAGGERFDIASQKVEHVVDTTAAGDSFSAAYLAARLMGEHPRQAAEAGHRLASVVIQHPGALVPKSVMPV

SEQ ID NO: 1335 - DNA, 936 bp, Pseudomonas fluorescens PfO-1
  CDS (1)..(936): transl_table=11
atgagcgcgctcagtcctttgagtccgaacaccccgcgcatcgccctgatcggcgaatgcatgatcgaactccagcaacgtgccgacggcagcctgcaacagagttttggcggtgacacgctgaacacggcggtctatctgtcccgcgcgatgggcggcaaggcgcaggtcgattacgtcacggcgctgggcgacgacagcttcagcgatgcgatgtgccgcatttgggccgacgaaggcattggtctggatctggtccagcgcttgcccggtcgtttgccgggcctgtattgcattcaaacggacgctgccggcgaacgtcgtttcctttactggcgcaacgaagccgctgtgcgcgactgcttcaccacgccggcgtccgcgccgattctggcggcgctggcggattacgacgtgctgtatttcagcggtatcacgctggcggtactcggagccctgggtcgggaaaaactgatcgagaccttgatcgaagcccgtcagcgtgacgcgcgaatcgtcttcgacaacaactaccgcccacgcctgtgggcttcagtggaggaggcgcgagcggcgtatcgcagcgtgttgcctcacgtcgatctggcattgctgacggtggacgacgaacaggcgctgttccatttcgaagactgtgacgcggtgtttgcagcgtacgcgcagatcggcacgccggaagtggtgctcaagcgtggcgccgaagcgtgcttgatccgttgtgacggggaagcgtttgaagtcccggcgcagaaggtcgagacagtggtggacaccacggcggcgggggattcgttcagtgcggcgtatctggcgagtcgcttgtccggcgcaagccctgtgcgggcggcggaggcggggcatcgcttggccagtcaggtcattcaagtgcctggggcgttgatccccaaggattga

SEQ ID NO: 1336 - protein, 311 aa, Pseudomonas fluorescens PfO-1
MSALSPLSPNTPRIALIGECMIELQQRADGSLQQSFGGDTLNTAVYLSRAMGGKAQVDYVTALGDDSFSDAMCRIWADEGIGLDLVQRLPGRLPGLYCIQTDAAGERRFLYWRNEAAVRDCFTTPASAPILAALADYDVLYFSGITLAVLGALGREKLIETLIEARQRDARIVFDNNYRPRLWASVEEARAAYRSVLPHVDLALLTVDDEQALFHFEDCDAVFAAYAQIGTPEVVLKRGAEACLIRCDGEAFEVPAQKVETVVDTTAAGDSFSAAYLASRLSGASPVRAAEAGHRLASQVIQVPGALIPKD

SEQ ID NO: 1337 - DNA, 939 bp, Saccharophagus degradans 2-40
  CDS (1)..(939): transl_table=11
atgaataatagtgtggctgtaattggcgaaagcatgctcgaattaatgcgtgctgagtctgactctagttgtcgctctatgcctgcgatgctttcgtacggcggtgacacccttaattcatctgtatatatgtcgcgcctaggcgcaaaagttgaatacattaccgctgttggtaaagataaaaacagtgagtggttagttaagcagtggcagagtgaaggcgtaggtacgcgttttgtgcgtacagatgaaaagaaagtgcctggcctgtacatggtaaccaatgatgaaagtggtgagcgctatttcacttattggcgcaacgattcagctgcgcgctacatcattgattctgaagaaaagaaacaagcattgtatgcagatttagaaggattcgactggattgttatatccggtatatccatagctattttggacgaggcgtccaaaaagcgcatgtacgaattactccagcagtgtaaagctcgcggtgcaaaaatcgcgtttgatggcaattaccggccagcactgtgggaaagcaaagagcaaacacgacaggcatatcaaactgttacagcctttgcagatattattttacctaccattgacgatgagtttcagttgtacggtgaagagcctaaagacgaagtgatcgatagattgctgagctatggcgcgaaagaaattgtattaaaaatgggtggcgaaggttgttataccgttgccgataatgaacgcaccctagtaccaggacgaaaagtggttgtagttgataccaactctgctggtgactcatttaatgcgggctacttaaccggccgcatgcaaggtatgtctgttgaggaatctgctctacgcggtcatctgctggcttcaacggtagtgcaatatcgcggtgcgattatcccaaaaacagccatgcccaaaatggtcggttaa

SEQ ID NO: 1338 - protein, 312 aa, Saccharophagus degradans 2-40
MNNSVAVIGESMLELMRAESDSSCRSMPAMLSYGGDTLNSSVYMSRLGAKVEYITAVGKDKNSEWLVKQWQSEGVGTRFVRTDEKKVPGLYMVTNDESGERYFTYWRNDSAARYIIDSEEKKQALYADLEGFDWIVISGISIAILDEASKKRMYELLQQCKARGAKIAFDGNYRPALWESKEQTRQAYQTVTAFADIILPTIDDEFQLYGEEPKDEVIDRLLSYGAKEIVLKMGGEGCYTVADNERTLVPGRKVVVVDTNSAGDSFNAGYLTGRMQGMSVEESALRGHLLASTVVQYRGAIIPKTAMPKMVG

SEQ ID NO: 1339 - DNA, 936 bp, Photobacterium sp. SKA34
  CDS (1)..(936): transl_table=11
atggcagatatcaccattagcgttattggagaatgtatggttgagctccaaaagtcgggggatttatataaacctaactttggtggcgataccttaaatacagccttgtatctcgctcgtttagttgatggaaaaaatatcagtattaattatgttactggtattggtgaagatatttttagtcagaaaatggttaaagcttggcaagctgaaaacattaacactgatttagtacatacctcagcaactaaaaatgctggtttatatgtaattgatacggattctgatggcgagcgtagtttccattattggcgaagtgattctgccgcgcgatattggttacaagatgtcagtatgtcagatttagtcagtaagctcagccaaagccagtggatttatttaagtggtatcagcttagcgatattgccccaaaaagcgcttgaaattttgtttgatgttttacatgaatgccatcgacaaggaactaagattgcttttgataacaactatcgagcaaatttgtggtcttcgaaagaggaagctcaatctgcttatcgccgtatattaaagatgacagatcttgcttttttaactttcgatgatgagcaagcattgtttggtgatgcaagcgaatcacaatcaatagaacgagcgcaaacaatgggaattgatgagatcgttatcaagcgaggtagtcaagcttgttttgttgttaaagatgaccaccttcatgaggtccctgctagacatatctcaaatatcattgatacaacggctgctggtgactcgtttagtgcgggttatatggcaagtcgattgatagaatgtgatgcaccaaaagctgctgcaatggggcacttacttgcaggcactgttattcaatatcccggtgccatcattccgttagatgtaatgccacaactcaatgataattag

SEQ ID NO: 1340 - protein, 311 aa, Photobacterium sp. SKA34
MADITISVIGECMVELQKSGDLYKPNFGGDTLNTALYLARLVDGKNISINYVTGIGEDIFSQKMVKAWQAENINTDLVHTSATKNAGLYVIDTDSDGERSFHYWRSDSAARYWLQDVSMSDLVSKLSQSQWIYLSGISLAILPQKALEILFDVLHECHRQGTKIAFDNNYRANLWSSKEEAQSAYRRILKMTDLAFLTFDDEQALFGDASESQSIERAQTMGIDEIVIKRGSQACFVVKDDHLHEVPARHISNIIDTTAAGDSFSAGYMASRLIECDAPKAAAMGHLLAGTVIQYPGAIIPLDVMPQLNDN

SEQ ID NO: 1341 - DNA, 960 bp, Photobacterium sp. SKA34
  CDS (1)..(960): transl_table=11
atgtttaactccgctgaaaccaagatcgcattttttggtgaatgtatgattgaactaagcggcgatcctattcgcaaaagctttggtggcgatacattaaatactgcgctttatctttcacgattaactcgccaacacgcagtacatgtttcttatgcgacaggattaggtgtcgacacattatctcaagaactgctggaatcatggcatcaagaaggtatccacactaatttggttgaaacctttgctaagcaattacccggtttatacatggtacaaacggataaagttggtgagcgtagctttctctattggcgagataactcgccagcaaaaaactatttttcaacctcatcgctgaataaattagaaattgcattacgagataagcaatacgattacttttacctgagtggtattagtcttgccattttagaccaagcaagccgcctgcgacttaaacacctgcttgaagctttctcgctagcaggtggaaagatcatcttcgataataactatcgtcctaaattatggtcgaaccaagaagcgaaatattggtatagccaaatcttaccgcttgttgatatcgcgttaatcacacaagacgatgatgtattggtgtggggggatgatgaaagcgttgctgctcgttgtctacgtatgggctgcaatgaaatagtgatcaaacgaggttgtgaaccttgccagcttatttggcggcaagatcagtatgtttaccacacttatgttgcggcagagcaagttagtaatgtgattgatacctgtgcagcaggtgattcttttgctgcgggttatttagctgggcgagttacagggcaaagttatcaagattcagcaacgttagggcatactttagcggcgattgtgatccaacattcaggtgcgattatccccgaaaatgcaatgaaaaatttaaccttaccctcaaaaagtgagtaa

SEQ ID NO: 1342 - protein, 319 aa, Photobacterium sp. SKA34
MFNSAETKIAFFGECMIELSGDPIRKSFGGDTLNTALYLSRLTRQHAVHVSYATGLGVDTLSQELLESWHQEGIHTNLVETFAKQLPGLYMVQTDKVGERSFLYWRDNSPAKNYFSTSSLNKLEIALRDKQYDYFYLSGISLAILDQASRLRLKHLLEAFSLAGGKIIFDNNYRPKLWSNQEAKYWYSQILPLVDIALITQDDDVLVWGDDESVAARCLRMGCNEIVIKRGCEPCQLIWRQDQYVYHTYVAAEQVSNVIDTCAAGDSFAAGYLAGRVTGQSYQDSATLGHTLAAIVIQHSGAIIPENAMKNLTLPSKSE

SEQ ID NO: 1343 - DNA, 948 bp, Photobacterium sp. SKA34
  CDS (1)..(948): transl_table=11
atgtcggcatctgcacaatgcaatatagttttttttggcgaatgtatggtcgaaatcagcggctctccattaaccaaaaaatatggtggtgatacgctaaatacagcgctttacctgtctcgtttaactcaacataccgatctatcagtacattacgctacaggtcttggtcgtgatgaactgtctcaaaacatgatgaatagttggcagttagagggtattcaaactcatttagtagaacgtattgcgaacaagcttcctggtctttatatggtcgaaactgacggggcaggtgagcggcattttcattattggcgcaacgatgcggcggtaaaatattactttcaatttgacggtctgaataagtttgaaattgcgctaatagataaccgagtcgacgcggtttatatcagtggcattagtatcgcaattttaaatgatgcttcacgagagcgtctattaaaagcaattaaccttttctcaaaccaaggcggtaaggtaatttttgataataactaccgcccacaactttggactactgaacaagctcagcactggtacgctaagtttctcccgttcgtagatatcgcgttgattaccgaagacgacgatttgctagtttggggtaacttcgagagtgttcaacaacgctgccttcgtttgggttgccaagagatcgttatcaaacgtggttgcgaaccttgtaaactcgtgcatgcgaaagaaggcataatcgaagagagttacgtatcagcaatacctgttccaaatgttgttgatacctgcgctgctggcgattcatttgcggcggggtatttggctgcacacttcaatggcgagagtgcaagggaagctgcagatttaggtcatcggttagcttccactgttattcaatactcaggcgccatcatcccggtaagcgctatgaatcacttaattaaaaaataa

SEQ ID NO: 1344 - protein, 315 aa, Photobacterium sp. SKA34
MSASAQCNIVFFGECMVEISGSPLTKKYGGDTLNTALYLSRLTQHTDLSVHYATGLGRDELSQNMMNSWQLEGIQTHLVERIANKLPGLYMVETDGAGERHFHYWRNDAAVKYYFQFDGLNKFEIALIDNRVDAVYISGISIAILNDASRERLLKAINLFSNQGGKVIFDNNYRPQLWTTEQAQHWYAKFLPFVDIALITEDDDLLVWGNFESVQQRCLRLGCQEIVIKRGCEPCKLVHAKEGIIEESYVSAIPVPNVVDTCAAGDSFAAGYLAAHFNGESAREAADLGHRLASTVIQYSGAIIPVSAMNHLIKK

SEQ ID NO: 1345 - DNA, 978 bp, Photobacterium sp. SKA34
  CDS (1)..(978): transl_table=11
atgaagcacatcgctataataggtgaatgtatgattgagctgaatggcaaaccgttcggctcaatgcatcaaacatttggtggagatactctcaatgctgcggtttatttaagccgcggctgcgaagccaatagcaaatctgatgaggttaaggtctcttacgttacagcgcttggcaatgacccaatcagtacgggcatgctgactcgctgggaagaggaaggcgtttcgacagacttagtactgcgcgatgagactcgtacaccgggcttatacttgattcaacttgatgaccaaggcgaacgtacgtttctatattggcgtaaccaatcagcagcacgttacctacttcaacatcctaactttgaactagttaagcaagcattaacccaagtggatactgtgtttctcagcggtatctctttagccatcttgccagaagaagaccaaatttcactactcaatttattggttgagcttaaagcccaaggcgttgaaatcgcgtttgatagtaatttccgccctgcactgtggcctgaagacaataatcaagccgtcaaaaacgtttaccaagccatgtatcaactgacagacgttgctttggtcacttttgatgatgagcatttgctctggggagacgaaacaccagaacaaacgattgaacaccttacgactcttggcgtgggaaaatgtatcgtcaaactaggtgcagatggctgtttgattcaagactcgaaaaatcagggttcgagcgcggctctggctccacaagctgtgccaacccaacccgtcgctcaagtagtggacaccacatcagcaggcgactcattcaatggtggttttttatctgcatacctcactggtgcagatctagtgacctcatgtcaaagaggcaacgcactggcaagtactgtgattcaacatcgcggtgccatcattcctaaagcattaacacaaccggcgcttgacgtcgtttaa

SEQ ID NO: 1346 - protein, 325 aa, Photobacterium sp. SKA34
MKHIAIIGECMIELNGKPFGSMHQTFGGDTLNAAVYLSRGCEANSKSDEVKVSYVTALGNDPISTGMLTRWEEEGVSTDLVLRDETRTPGLYLIQLDDQGERTFLYWRNQSAARYLLQHPNFELVKQALTQVDTVFLSGISLAILPEEDQISLLNLLVELKAQGVEIAFDSNFRPALWPEDNNQAVKNVYQAMYQLTDVALVTFDDEHLLWGDETPEQTIEHLTTLGVGKCIVKLGADGCLIQDSKNQGSSAALAPQAVPTQPVAQVVDTTSAGDSFNGGFLSAYLTGADLVTSCQRGNALASTVIQHRGAIIPKALTQPALDVV

SEQ ID NO: 1347 - DNA, 927 bp, Serratia marcescens
  CDS (1)..(927): transl_table=11
atgactatccgaaacctcgccgtgatcggcgaatgcatgatcgagctgtcacagcagggcgcacagctgacgcgcggctttggcggcgataccctcaacaccgccgtatacctcgcccgccaaatgccgaaacagacgttgcaggtggattacgtcactgcgctcggcaccgacagcttcagcggcgagatggcctggcggcaggagaagatcgagaccgggttgattcagcagttcgacaacaagctgccgggcctgtacgtgatcgaaaccgacgccgccggcgaacgcactttctactattggcgcaatgacgccgccgcccgctattggcttgctggaccgcaggccgacgcactgtgcgcgcggctggcgcagttcgattacctgtacctcagcggcattagccttgcgatcctcgcgcctgccgaccgcacgaagctgctgacgttgctgcgccgctgtcgcgccaacggaaaacaggtgatcttcgacaacaactaccgcccgcgtctgtggccaagccgtgaggaaactcagcaggcctaccgcgaggtgctggcctgcaccgacatcgcctttttgacgctggatgacgaagaattgctgtggggcaagcagccggttgaacagatagtgacgcgcacgcaggcgctcggcgtaggcgagatcgttatcaaacgcggcgcggatgcctgtctggtgttcaatctggagggggagcggcttgaggtgccggcgatcgcgctgccgccggagcgcgtggtggataccactgcgtggggcgactctttcagcgccggctacctggaggtgcccctgaacggcggcggcgcccggcaggcggcgcagcgcggccaccagcttgctgcgacggtgatccaacatcgcggcgccatcattcccgcagcggcgatgcccgcataa

SEQ ID NO: 1348 - protein, 308 aa, Serratia marcescens
MTIRNLAVIGECMIELSQQGAQLTRGFGGDTLNTAVYLARQMPKQTLQVDYVTALGTDSFSGEMAWRQEKIETGLIQQFDNKLPGLYVIETDAAGERTFYYWRNDAAARYWLAGPQADALCARLAQFDYLYLSGISLAILAPADRTKLLTLLRRCRANGKQVIFDNNYRPRLWPSREETQQAYREVLACTDIAFLTLDDEELLWGKQPVEQIVTRTQALGVGEIVIKRGADACLVFNLEGERLEVPAIALPPERVVDTTAWGDSFSAGYLEVPLNGGGARQAAQRGHQLAATVIQHRGAIIPAAAMPA

SEQ ID NO: 1349 - DNA, 930 bp, Escherichia coli
  CDS (1)..(930): transl_table=11
atgtccaaaaagattgccgtgattggcgaatgcatgattgagctttccgagaaaggcgcggacgttaagcgcggtttcggcggcgataccctgaacacttccgtctatatcgcccgtcaggtcgatcctgcggcattaaccgttcattacgtaacggcgctgggaacggacagttttagccagcagatgctggacgcctggcacggcgagaacgttgatacttccctgacccaacggatggaaaaccgtctgccgggcctttactacattgaaaccgacagcaccggcgagcgtacgttctactactggcggaacgaagccgccgccaaattctggctggagagtgagcagtctgcggcgatttgcgaagagctggcgaatttcgattatctctacctgagcgggattagcctggcgatcttaagcccgaccagccgcgaaaagctgctttccctgctgcgcgaatgccgcgccaacggcggaaaagtgattttcgacaataactatcgtccgcgcctgtgggccagcaaagaagagacacagcaggtgtaccaacaaatgctggaatgcacggatatcgccttcctgacgctggacgacgaagacgcgctgtggggtcaacagccggtggaagacgtcattgcgcgcacccataacgcgggcgtgaaagaagtggtggtgaaacgcggggcggattcttgcctggtgtccattgctggcgaagggttagtggatgttccggcggtgaaactgccgaaagaaaaagtgatcgataccaccgcagctggcgactctttcagtgccggttatctggcggtacgtctgacaggcggcagcgcggaagacgcggcgaaacgtgggcacctgaccgcaagtaccgttattcagtatcgcggcgcgattatcccgcgtgaggcgatgccagcgtaa

SEQ ID NO: 1350 - protein, 309 aa, Escherichia coli
MSKKIAVIGECMIELSEKGADVKRGFGGDTLNTSVYIARQVDPAALTVHYVTALGTDSFSQQMLDAWHGENVDTSLTQRMENRLPGLYYIETDSTGERTFYYWRNEAAAKFWLESEQSAAICEELANFDYLYLSGISLAILSPTSREKLLSLLRECRANGGKVIFDNNYRPRLWASKEETQQVYQQMLECTDIAFLTLDDEDALWGQQPVEDVIARTHNAGVKEVVVKRGADSCLVSIAGEGLVDVPAVKLPKEKVIDTTAAGDSFSAGYLAVRLTGGSAEDAAKRGHLTASTVIQYRGAIIPREAMPA

SEQ ID NO: 1351 - DNA, 945 bp, Haemophilus influenzae
  CDS (1)..(945): transl_table=11
atgaaaaaaatagcatttatcggcgagtgtatgattgaactcaatgggaaaccctttgcggaaatgtggcaaagttatggtggagataccttaaattctgcaacttatcttagtcgagtaagttcatcaaaagagattcaagttcattatgtctctgcattaggaaccgataatttaagcaagcaaatgcttaaatattggcaagctgatggcatccaaacaaattgggttttacaggatgaacagcaccaaccaggtctttatctaatccaattagatgctcaaggcgaacgcacgttcctttattggcgtaatcaatctgcagcacgttatatggttcaacatccggattttgctaaggttattgcagaacttcagcaagttgatgtgatttatttaagtggtatttcattagcaatcttacctaaaaatgaccgcacttttttaattgaacaattatcttctttagctaaaaaaggcacagaaattgtttttgatagtaattatcgcccaaaactttgggattcattagaagaagcacaagattgttatttgcagcttttgcctagtgtcaatatagcgttggtgacttttgatgatgaacaagcattatggaaagataaaacatctagggatactttagagcgattacataaaattggtataccaaaagtgattgtgaagtgcggtaagaatggtgctattttttcagataggtatttatctcaatatgggcaagtgatacctgaacctattttaaatgtagtggatacaacctcggctggtgattcttttaatgctggatttctgaacggttatttacgaaataaatctctcgaaatttgttgtcagcaaggcaatcgtattgctggtatcgtcattcaacataaaggtgcgattatagataaagtcgcaatttctcatcttcaatctgaatttaattaa

SEQ ID NO: 1352 - protein, 314 aa, Haemophilus influenzae
MKKIAFIGECMIELNGKPFAEMWQSYGGDTLNSATYLSRVSSSKEIQVHYVSALGTDNLSKQMLKYWQADGIQTNWVLQDEQHQPGLYLIQLDAQGERTFLYWRNQSAARYMVQHPDFAKVIAELQQVDVIYLSGISLAILPKNDRTFLIEQLSSLAKKGTEIVFDSNYRPKLWDSLEEAQDCYLQLLPSVNIALVTFDDEQALWKDKTSRDTLERLHKIGIPKVIVKCGKNGAIFSDRYLSQYGQVIPEPILNVVDTTSAGDSFNAGFLNGYLRNKSLEICCQQGNRIAGIVIQHKGAIIDKVAISHLQSEFN

SEQ ID NO: 1353 - DNA, 24 bp, Artificial sequence
  primer
atgtttaaaagtgatgctgcccgg

SEQ ID NO: 1354 - DNA, 21 bp, Artificial sequence
  primer
ttacgctggcatcgcctcacg

SEQ ID NO: 1355 - protein, 319 aa, Artificial sequence
  consensus sequence
  Variant (2)..(2): Xaa in position 2 is any amino acid
  Variant (8)..(8): Xaa in position 8 is any amino acid
  Variant (11)..(18): Xaa in position 11 to 18 is any amino acid
  Variant (19)..(27): Xaa in position 19 to 27 is any or no amino acid
  Variant (35)..(36): Xaa in position 35 to 36 is any amino acid
  Variant (39)..(40): Xaa in position 39 to 40 is any amino acid
  Variant (42)..(47): Xaa in position 42 to 47 is any amino acid
  Variant (48)..(55): Xaa in position 48 to 55 is any or no amino acid
  Variant (59)..(59): Xaa in position 59 is any amino acid
  Variant (62)..(62): Xaa in position 62 is any amino acid
  Variant (64)..(65): Xaa in position 64 to 65 is any amino acid
  Variant (67)..(68): Xaa in position 67 to 68 is any amino acid
  Variant (70)..(70): Xaa in position 70 is any amino acid
  Variant (71)..(72): Xaa in position 71 to 72 is any or no amino acid
  Variant (74)..(75): Xaa in position 74 to 75 is any amino acid
  Variant (77)..(79): Xaa in position 77 to 79 is any amino acid
  Variant (81)..(90): Xaa in position 81 to 90 is any amino acid
  Variant (95)..(95): Xaa in position 95 is any amino acid
  Variant (97)..(98): Xaa in position 97 to 98 is any amino acid
  Variant (100)..(101): Xaa in position 100 to 101 is any amino acid
  Variant (105)..(105): Xaa in position 105 is any amino acid
  Variant (107)..(107): Xaa in position 107 is any amino acid
  Variant (112)..(113): Xaa in position 112 to 113 is any amino acid
  Variant (116)..(129): Xaa in position 116 to 129 is any amino acid
  Variant (130)..(131): Xaa in position 130 to 131 is any or no amino acid
  Variant (133)..(135): Xaa in position 133 to 135 is any amino acid
  Variant (136)..(137): Xaa in position 136 to 137 is any or no amino acid
  Variant (139)..(140): Xaa in position 139 to 140 is any amino acid
  Variant (142)..(142): Xaa in position 142 is any amino acid
  Variant (151)..(154): Xaa in position 151 to 154 is any amino acid
  Variant (156)..(157): Xaa in position 156 to 157 is any amino acid
  Variant (159)..(161): Xaa in position 159 to 161 is any amino acid
  Variant (163)..(168): Xaa in position 163 to 168 is any amino acid
  Variant (170)..(173): Xaa in position 170 to 173 is any amino acid
  Variant (176)..(176): Xaa in position 176 is any amino acid
  Variant (181)..(181): Xaa in position 181 is any amino acid
  Variant (184)..(191): Xaa in position 184 to 191 is any amino acid
  Variant (192)..(194): Xaa in position 192 to 194 is any or no amino acid
  Variant (196)..(198): Xaa in position 196 to 198 is any amino acid
  Variant (200)..(202): Xaa in position 200 to 202 is any amino acid
  Variant (204)..(204): Xaa in position 204 is any amino acid
  Variant (206)..(207): Xaa in position 206 to 207 is any amino acid
  Variant (209)..(209): Xaa in position 209 is any amino acid
  Variant (213)..(214): Xaa in position 213 to 214 is any amino acid
  Variant (216)..(216): Xaa in position 216 is any amino acid
  Variant (218)..(224): Xaa in position 218 to 224 is any amino acid
  Variant (225)..(226): Xaa in position 225 to 226 is any or no amino acid
  Variant (228)..(231): Xaa in position 228 to 231 is any amino acid
  Variant (233)..(233): Xaa in position 233 is any amino acid
  Variant (234)..(234): Xaa in position 234 is any or no amino acid
  Variant (236)..(236): Xaa in position 236 is any amino acid
  Variant (238)..(238): Xaa in position 238 is any amino acid
  Variant (242)..(244): Xaa in position 242 to 244 is any amino acid
  Variant (246)..(262): Xaa in position 246 to 262 is any amino acid
  Variant (263)..(271): Xaa in position 263 to 271 is any or no amino acid
  Variant (273)..(273): Xaa in position 273 is any amino acid
  Variant (283)..(283): Xaa in position 283 is any amino acid
  Variant (289)..(292): Xaa in position 289 to 292 is any amino acid
  Variant (294)..(299): Xaa in position 294 to 299 is any amino acid
  Variant (301)..(302): Xaa in position 301 to 302 is any amino acid
  Variant (305)..(306): Xaa in position 305 to 306 is any amino acid
  Variant (308)..(309): Xaa in position 308 to 309 is any amino acid
  Variant (313)..(314): Xaa in position 313 to 314 is any amino acid
  Variant (317)..(317): Xaa in position 317 is any amino acid
AXIGECMXELXXXXXXXXXXXXXXXXXFGGDTLNXXVYXXRXXXXXXXXXXXXXXYVTXLGXDXXSXXMXXXWXXEXXXTXXXXXXXXXXPGLYXIXXDXXGERXFXYWRNXXAAXXXXXXXXXXXXXXXXLXXXXXDXXYXSGISLAILXXXXRXXLXXXLXXXXXXGXXXXFDXNYRPXLWXXXXXXXXXXXYXXXLXXXDXAXXTXDDEXXLXGXXXXXXXXXRXXXXGXXEXVXKRGXXXCXXXXXXXXXXXXXXXXXXXXXXXXXXVXDTTAAGDSFXAGYLAXXXXGXXXXXXAXXGHXXAXXVIQXXGAXIP

SEQ ID NO: 1356 - protein, 43 aa, Artificial sequence
  protein pattern
  Variant (2)..(3): Xaa in position 2 to 3 is any amino acid
  Variant (5)..(5): Xaa in position 5 is Ala, Gly or Asn
  Variant (6)..(6): Xaa in position 6 is Ile, Leu or Val
  Variant (7)..(16): Xaa in position 7 to 16 is any amino acid
  Variant (17)..(17): Xaa in position 17 is Lys or Arg
  Variant (18)..(18): Xaa in position 18 is any amino acid
  Variant (21)..(21): Xaa in position 21 is Ile or Leu
  Variant (23)..(23): Xaa in position 23 is any amino acid
  Variant (24)..(24): Xaa in position 24 is Ile or Val
  Variant (25)..(25): Xaa in position 25 is Glu, Gln or Thr
  Variant (26)..(26): Xaa in position 26 is any amino acid
  Variant (27)..(27): Xaa in position 27 is Ala or Asp
  Variant (28)..(28): Xaa in position 28 is Ala, Asp, Glu, Gly or Ser
  Variant (29)..(29): Xaa in position 29 is any amino acid
  Variant (33)..(33): Xaa in position 33 is any amino acid
  Variant (35)..(35): Xaa in position 35 is any or no amino acid
  Variant (37)..(37): Xaa in position 37 is any or no amino acid
  Variant (41)..(41): Xaa in position 41 is any amino acid
  Variant (42)..(42): Xaa in position 42 is any or no amino acid
WXXEXXXXXXXXXXXXXXPGXYXXXXXXXGERXFXYXWRNXXA

SEQ ID NO: 1357 - protein, 50 aa, Artificial sequence
  protein pattern
  Variant (2)..(7): Xaa in position 2 to 7 is any amino acid
  Variant (8)..(9): Xaa in position 8 to 9 is any or no amino acid
  Variant (13)..(13): Xaa in position 13 is Ser or Thr
  Variant (16)..(16): Xaa in position 16 is Ile or Val
  Variant (18)..(18): Xaa in position 18 is Ala, Gly, Asn, Pro or Ser
  Variant (19)..(20): Xaa in position 19 to 20 is any amino acid
  Variant (21)..(21): Xaa in position 21 is Ala, Cys, Asp, Gly or Ser
  Variant (22)..(24): Xaa in position 22 to 24 is any amino acid
  Variant (26)..(26): Xaa in position 26 is Phe, Ile or Leu
  Variant (27)..(28): Xaa in position 27 to 28 is any amino acid
  Variant (30)..(35): Xaa in position 30 to 35 is any amino acid
  Variant (36)..(36): Xaa in position 36 is Asp, Gly or Gln
  Variant (37)..(38): Xaa in position 37 to 38 is any amino acid
  Variant (39)..(39): Xaa in position 39 is Ile or Val
  Variant (40)..(40): Xaa in position 40 is Ala, Ile or Val
  Variant (43)..(43): Xaa in position 43 is Asn or Ser
  Variant (45)..(45): Xaa in position 45 is Phe or Tyr
  Variant (47)..(47): Xaa in position 47 is Ala, Pro or Ser
  Variant (48)..(48): Xaa in position 48 is any amino acid
LXXXXXXXXSGIXLAXLXXXXXXXLXXXLXXXXXXXXXXXFDXNXRXXLW

SEQ ID NO: 1358 - protein, 23 aa, Artificial sequence
  protein pattern
  Variant (2)..(2): Xaa in position 2 is Ile or Val
  Variant (5)..(5): Xaa in position 5 is any amino acid
  Variant (6)..(6): Xaa in position 6 is any or no amino acid
  Variant (8)..(8): Xaa in position 8 is any or no amino acid
  Variant (13)..(13): Xaa in position 13 is Ala, Asn or Ser
  Variant (14)..(15): Xaa in position 14 to 15 is Ala or Gly
  Variant (16)..(16): Xaa in position 16 is Phe or Tyr
  Variant (18)..(18): Xaa in position 18 is Ala, Glu, Asn, Ser or Thr
  Variant (19)..(20): Xaa in position 19 to 20 is any amino acid
  Variant (21)..(21): Xaa in position 21 is Phe, Ile, Leu, Met or Val
  Variant (22)..(22): Xaa in position 22 is any amino acid
  Variant (23)..(23): Xaa in position 23 is Gly or Asn
VXDTXXAXGDSFXXXXLXXXXXX

SEQ ID NO: 1359 - protein, 22 aa, Artificial sequence
  protein pattern
  Variant (2)..(7): Xaa in position 2 to 7 is any amino acid
  Variant (8)..(8): Xaa in position 8 is Thr or Val
  Variant (9)..(9): Xaa in position 9 is Asp, Asn or Ser
  Variant (10)..(10): Xaa in position 10 is Ile, Leu, Met or Val
  Variant (12)..(12): Xaa in position 12 is any or no amino acid
  Variant (14)..(14): Xaa in position 14 is any or no amino acid
  Variant (16)..(16): Xaa in position 16 is any amino acid
  Variant (20)..(20): Xaa in position 20 is any amino acid
  Variant (21)..(21): Xaa in position 21 is any or no amino acid
YXXXXXXXXXAXLXTXDDEXXL

SEQ ID NO: 1360 - protein, 20 aa, Artificial sequence
  protein pattern
  Variant (2)..(3): Xaa in position 2 to 3 is any amino acid
  Variant (6)..(7): Xaa in position 6 to 7 is any amino acid
  Variant (9)..(9): Xaa in position 9 is Ala, Gly or Ser
  Variant (10)..(10): Xaa in position 10 is any amino acid
  Variant (14)..(15): Xaa in position 14 to 15 is any amino acid
  Variant (18)..(18): Xaa in position 18 is Ile or Leu
  Variant (19)..(19): Xaa in position 19 is Ile or Val
  Variant (20)..(20): Xaa in position 20 is Gly or Pro
AXXGHXXAXXVIQXXGAXXX

SEQ ID NO: 1361 - protein, 14 aa, Artificial sequence
  protein pattern
  Variant (8)..(8): Xaa in position 8 is Ala or Thr
  Variant (9)..(9): Xaa in position 9 is Ala or Ser
  Variant (10)..(10): Xaa in position 10 is Leu or Val
  Variant (12)..(12): Xaa in position 12 is Ile or Leu
  Variant (13)..(13): Xaa in position 13 is Ala or Ser
FGGDTLNXXXYXXR

SEQ ID NO: 1362 - protein, 18 aa, Artificial sequence
  protein pattern
  Variant (2)..(2): Xaa in position 2 is any amino acid
  Variant (3)..(4): Xaa in position 3 to 4 is any or no amino acid
  Variant (7)..(7): Xaa in position 7 is Ser or Thr
  Variant (8)..(8): Xaa in position 8 is Ala or Gly
  Variant (11)..(11): Xaa in position 11 is any amino acid
  Variant (13)..(14): Xaa in position 13 to 14 is any or no amino acid
  Variant (16)..(17): Xaa in position 16 to 17 is any amino acid
VXXXYVXXLGXDXXSXXM

SEQ ID NO: 1363 - protein, 11 aa, Artificial sequence
  protein pattern
  Variant (2)..(2): Xaa in position 2 is Ile or Val
  Variant (4)..(4): Xaa in position 4 is Ile, Leu or Val
  Variant (6)..(6): Xaa in position 6 is any amino acid
  Variant (8)..(8): Xaa in position 8 is any amino acid
  Variant (9)..(9): Xaa in position 9 is Asp, Glu, Gln or Arg
  Variant (10)..(10): Xaa in position 10 is any amino acid
EXVXKXGXXXC

SEQ ID NO: 1364 - protein, 10 aa, Artificial sequence
  protein pattern
  Variant (2)..(2): Xaa in position 2 is any amino acid
  Variant (6)..(6): Xaa in position 6 is Cys or Ser
  Variant (8)..(8): Xaa in position 8 is Ile, Leu or Val
AXIGEXMXEL

SEQ ID NO: 1365 - DNA, 432 bp, Escherichia coli
  CDS (1)..(432): transl_table=11
atgcaagaaattatgcaatttgttggccgtcatcccatactgagtatcgcctggatcgcgttactggtggcggttcttgtgactacgtttaagagcctgacctcgaaagtgaaggtgattactcgtggtgaagctacgcgtctgatcaacaaagaagacgctgtggttgtggatttacgtcagcgtgatgacttccgtaaaggccatatcgcaggttctattaatctgttgccgagcgaaatcaaagccaacaatgttggtgagcttgagaagcacaaagacaaaccggttatcgtggtagacggttctggcatgcagtgccaggagcctgcaaacgcactgacgaaagctggttttgcgcaagtattcgtgctgaaagaaggcgtcgctggctgggctggcgaaaacttgcctttggtgcgcggcaaataa

SEQ ID NO: 1366 - protein, 143 aa, Escherichia coli
MQEIMQFVGRHPILSIAWIALLVAVLVTTFKSLTSKVKVITRGEATRLINKEDAVVVDLRQRDDFRKGHIAGSINLLPSEIKANNVGELEKHKDKPVIVVDGSGMQCQEPANALTKAGFAQVFVLKEGVAGWAGENLPLVRGK

SEQ ID NO: 1367 - DNA, 438 bp, Xanthomonas campestris pv. campestris
  CDS (1)..(438): transl_table=11
gtgaatttcgaagagctgcaggcctttgtgggccgcaaccccatgctgtcgctggccctggtgggcctgaccatcgccatcatcgtcaccgagatcgcgcgcctgttccgcggctatcgcgcgctcaagccggccgagctgacccgcctgatcaacagcgaaaatgcgctggtgattgatctgtcgcccaccgccgatttcgaaaaaggccacatcgccggcagccgcaacgtggcgctggccaagttcgacccagccggcaagttgctcgccaatgccaagtcctcgccggtggtggtggtctgccgcagcggcaacgcctctgccggcgctgccaagacgctgaagaaggccggcttcgagcaggtctactggctggagggtggcattgccgcctggcagatggccgagctgccgctggtcaagggccgcgcctga

SEQ ID NO: 1368 - protein, 145 aa, Xanthomonas campestris pv. campestris
MNFEELQAFVGRNPMLSLALVGLTIAIIVTEIARLFRGYRALKPAELTRLINSENALVIDLSPTADFEKGHIAGSRNVALAKFDPAGKLLANAKSSPVVVVCRSGNASAGAAKTLKKAGFEQVYWLEGGIAAWQMAELPLVKGRA

SEQ ID NO: 1369 - DNA, 441 bp, Pasteurella multocida subsp. multocida str. Pm70
  CDS (1)..(441): transl_table=11
atgcaagaatttattccaatggcaaaagcctttgcccaaaaccatactttaatggtacttgcgtgggtaatggtcttttttatggttatttatacttttgtgaaagatttcacctcaaaagtcaaagtagtgacaaatgcggaagcggtaagcttgatgaataatgaagatgccgttgtggtggatttacgctctattgatgagtttgagcgtggtcatattattaacagtttgaatattttacccgcagaaatcaaaaagaataatgtcggtaaaattcatcatcataaagacacgcctgtgattctggcttgtgcaaccggtatgagtgccggtgcgtctgccgagttattaagtaaacaaggatttaaccgtgtttataccttaaaagaaggcattacaggttggcgttctgcaaatttacctttaattaaaaaatag

SEQ ID NO: 1370 - protein, 146 aa, Pasteurella multocida subsp. multocida str. Pm70
MQEFIPMAKAFAQNHTLMVLAWVMVFFMVIYTFVKDFTSKVKVVTNAEAVSLMNNEDAVVVDLRSIDEFERGHIINSLNILPAEIKKNNVGKIHHHKDTPVILACATGMSAGASAELLSKQGFNRVYTLKEGITGWRSANLPLIKK

SEQ ID NO: 1371 - DNA, 432 bp, Salmonella typhimurium LT2
  CDS (1)..(432): transl_table=11
atgcaagaaattatgcaatttgttggccgtcatcccatactgagtatcgcctggattgcgttactggtggcggttttatttaccacgttcaaaggtctgacttcaaaagttaaggtgattacacgcggcgaagccacgcgccttatcaacaaagaggacgccgttgttgtggatttacgtcaacgtgacgatttccgtaaaggccatatcgctggcgcgaccaatttgctgccgagcgaaatcaaagccaacaatgttggcgaactggaaaagcacaaagacaagccgattatcgtggtcgacggttctggtatgcagtgccaggaatccgctaacgcgctgacaaaagccggctttgaaaaggtctttgtgttgaaagaaggcgtagcaggctggagcggcgagaatctgcctctggtgcgcggtaagtga

SEQ ID NO: 1372 - protein, 143 aa, Salmonella typhimurium LT2
MQEIMQFVGRHPILSIAWIALLVAVLFTTFKGLTSKVKVITRGEATRLINKEDAVVVDLRQRDDFRKGHIAGATNLLPSEIKANNVGELEKHKDKPIIVVDGSGMQCQESANALTKAGFEKVFVLKEGVAGWSGENLPLVRGK

SEQ ID NO: 1373 - DNA, 435 bp, Shewanella oneidensis MR-1
  CDS (1)..(435): transl_table=11
atgcaagaatatatcgaattttttaaggctcacactctgctaagtctggcttgggtgggtttgtttgtaatgcttgtggtcagtgtgatcaaatcgagcttctctaaaatcaaaaatgtcactcatcaagaactcactattatggtgaacagacaagacgccaaagtcgtggatgtgcgttctaatgatgatttccgtaagggccatattgttggtgcagttaacgttacgctcgcggatattaaaaataatcaggtttcagcccttgaaaagtttaaaggtagtcccattatactggtatgcaatgctggcatgacctcgtctcaagcggctcagcttttaagtaaacaaggttttgaaaacctgtataacttgaaaggtggtatgggtgaatggcaggcagccaatatgcctgtttcaaaaagcaaaagataa

SEQ ID NO: 1374 - protein, 144 aa, Shewanella oneidensis MR-1
MQEYIEFFKAHTLLSLAWVGLFVMLVVSVIKSSFSKIKNVTHQELTIMVNRQDAKVVDVRSNDDFRKGHIVGAVNVTLADIKNNQVSALEKFKGSPIILVCNAGMTSSQAAQLLSKQGFENLYNLKGGMGEWQAANMPVSKSKR

SEQ ID NO: 1375 - DNA, 414 bp, Pseudomonas putida KT2440
  CDS (1)..(414): transl_table=11
atggttgctcacctgattcaattcgcgacagatcactacatcctggttgcgatcttcctcattctgctggtcctgctgctcatcaatgaaatccgtcgtggtggccaaagcctgaccaacggccaactgacagccctggtcaatgccgagaaggccctggtgatcgacattcgcccggccaaggaatactccgccggtcatatcgtcggcgcggtgaacatcccgcaggacaagctggccaaccgcatgaccgagctgggcaagcataaagaaaagaccttgatcgtcgtcgacgcgatgggccagcagtccggcaccatttgccgcgagctgctcaaagctggttacaacgccgccaaactgagcggtggcgtttccagctggaaagccgataacctgcccctggtgaagtga

SEQ ID NO: 1376 - protein, 137 aa, Pseudomonas putida KT2440
MVAHLIQFATDHYILVAIFLILLVLLLINEIRRGGQSLTNGQLTALVNAEKALVIDIRPAKEYSAGHIVGAVNIPQDKLANRMTELGKHKEKTLIVVDAMGQQSGTICRELLKAGYNAAKLSGGVSSWKADNLPLVK

SEQ ID NO: 1377 - DNA, 435 bp, Vibrio vulnificus CMCP6
  CDS (1)..(435): transl_table=11
atgcaagagtacatcgactttattcagcaaaatatgatcatgtttttggcatgggttggcctagtgatcgccgtgataatgagcttcgtgaaatcggctaccgccgcgtacaagatcattactgtcaacgaacttaccgcattggtaaaccgtgaaaacggccaagtgatcgatattcgtgcgaaagacgagttcagaaaaggtcacatcaccgacgcagttcacattttgccatcagacatcaagaacggtaacttcggtagccttgaaaaccgtaaatctgacccaatcatcgtagtatgcaaaacaggccaaaccgcgcaagaaagcgctaacctgttggctaaagcgggttttgaaaacgtcagcgtattgaaaaacggtctgatttcgtggagcgaagcaaacttacctttggtacgtagcaaacgttaa

SEQ ID NO: 1378 - protein, 144 aa, Vibrio vulnificus CMCP6
MQEYIDFIQQNMIMFLAWVGLVIAVIMSFVKSATAAYKIITVNELTALVNRENGQVIDIRAKDEFRKGHITDAVHILPSDIKNGNFGSLENRKSDPIIVVCKTGQTAQESANLLAKAGFENVSVLKNGLISWSEANLPLVRSKR

SEQ ID NO: 1379 - DNA, 414 bp, Pseudomonas syringae pv. tomato str. DC3000
  CDS (1)..(414): transl_table=11
atggttgctcacctgcttgaattcgccactacccactatttgatcaccggtgccttcgtcattctgctgggcctgctgattgcttacgaactgagcaagggcggcgccagcctgagcactcgcgagctgaccgcactggtcaacagcgatcagggcgtggtcatcgacgtgcgctcgaaaaaggacttcaccgccggccacatcgttggctccctgaattttccgcaggacaaggtgctgacccgcaccgccgaactgcagaaatacaaggacaagacgttgatcatagtcgatgcaatggggcagcatgcgggctctaccgcccgcgagctgctcaaaaccggcttcaaggcggccaagctgtccggcggtatttccagctggcgcggcgataatcttcctctggtgaaatga

SEQ ID NO: 1380 - protein, 137 aa, Pseudomonas syringae pv. tomato str. DC3000
MVAHLLEFATTHYLITGAFVILLGLLIAYELSKGGASLSTRELTALVNSDQGVVIDVRSKKDFTAGHIVGSLNFPQDKVLTRTAELQKYKDKTLIIVDAMGQHAGSTARELLKTGFKAAKLSGGISSWRGDNLPLVK

SEQ ID NO: 1381 - DNA, 435 bp, Vibrio parahaemolyticus RIMD 2210633
  CDS (1)..(435): transl_table=11
atgcaagagtacattgaatttttccaacagaacatgattctatctttggtttgggtaggtcttcttgtcgcatttatcatgaacatcgtgaagtcagcgacggcagcatacaaagaaatcaacgtaaaccaactgactcacctaatgaaccgtgaaaacggcgttgttgtggatatccgcacaaaagatgagttcaaaaaaggtcatatcaccgactcacttcacattttaccttcagacatcaaagctggtaacttgggtagccttgaaaaccataaatcagacccaatcattgttgtatgcaagacgggccaaaccgctcaagaaagcgcgaaccttctagtaaaagcgggctttgaaaaagttagcctacttaagaatggtttgattgcatggaacgaagcaaacctacctttagttcgtggtaaaaagtag

SEQ ID NO: 1382 - protein, 144 aa, Vibrio parahaemolyticus RIMD 2210633
MQEYIEFFQQNMILSLVWVGLLVAFIMNIVKSATAAYKEINVNQLTHLMNRENGVVVDIRTKDEFKKGHITDSLHILPSDIKAGNLGSLENHKSDPIIVVCKTGQTAQESANLLVKAGFEKVSLLKNGLIAWNEANLPLVRGKK

SEQ ID NO: 1383 - DNA, 435 bp, Coxiella burnetii RSA 493
  CDS (1)..(435): transl_table=11
atggttactatggaacaattacctgagtttattgcacgtcattggcttttagtggccgctttcatcgttgctttgatggctttactgatcgtcgaggcgcgcagtaaagggcttagtggcaaatatcggctcacgccgcaacatgcgattcgcttaattaatagtgaaaaggcggtgatcgtcgatattcgggatgcgaatgcttatagcaaagggcacatcacgaatgcaattaacattcctgcgactgaattagacaaacacccccaacgtctggaacaatataaacagcagccaatcattcttgtatgtgcaatgggtcaaaagtcagggcctctcaggaacaagctgcacaaaaaggggtatgaaaaagtttacctcatgatcggtggtatgaatgcgtggaacagtgctaacatgcccatagtgaaatag

SEQ ID NO: 1384 - protein, 144 aa, Coxiella burnetii RSA 493
MVTMEQLPEFIARHWLLVAAFIVALMALLIVEARSKGLSGKYRLTPQHAIRLINSEKAVIVDIRDANAYSKGHITNAINIPATELDKHPQRLEQYKQQPIILVCAMGQKSGPLRNKLHKKGYEKVYLMIGGMNAWNSANMPIVK

SEQ ID NO: 1385 - DNA, 447 bp, Haemophilus ducreyi 35000HP
  CDS (1)..(447): transl_table=11
atggacttaacatttactcagcaactacaacaatttgtaagtgctcattccattcttgtggctatttggatagggttatttgttactgttatctttaatttttataaagctgctactagcaaatttaaaattattgatcaccctcaagcaacccagttagtcaacaatgaagaaggtgtttttcttgatctgcgcaccgaagaccaattccacacaggtcatattgtaggcagtattcatattctaccaagcgagataaaagcactaaatactcaccatattgataaatataaagatcgccccgtgatcttagttgacggtaatggcttttccgctggagcagatgccgacttacttgtcaaacaaggatttaataaagtttacgttttaaaagcaggaatattaggctggaaatcagccaatcttccaaccgtaacacataaataa

SEQ ID NO: 1386 - protein, 148 aa, Haemophilus ducreyi 35000HP
MDLTFTQQLQQFVSAHSILVAIWIGLFVTVIFNFYKAATSKFKIIDHPQATQLVNNEEGVFLDLRTEDQFHTGHIVGSIHILPSEIKALNTHHIDKYKDRPVILVDGNGFSAGADADLLVKQGFNKVYVLKAGILGWKSANLPTVTHK

SEQ ID NO: 1387 - DNA, 444 bp, Candidatus Blochmannia floridanus
  CDS (1)..(444): transl_table=11
atgttttttcaagaaatgttgttgttttgtaaaaaccatttagtgttaatgttagtatggtgttttttgttagttataatattgtatattttttatatgaattggatgtatagtggatttaaaatttcgtgtgagaaagcagtttttttaataaataaaaaaggtgctgtagtggttgatatgcgtaattcggaagagtattattctggatatattgttaatagtattaatatatctattaaagatataaaggagaatgattttattttgggtagtcggttgaagaataatccgttgattcttgtgtataattcgagtgacagatttttgtattcagttaaaaaagatctaaatagattaggatttacgcaagtatatgtattagaagggggtatttcttcttgggtagatggtggatttcctttattgaatttgaaaaaatag

SEQ ID NO: 1388 - protein, 147 aa, Candidatus Blochmannia floridanus
MFFQEMLLFCKNHLVLMLVWCFLLVIILYIFYMNWMYSGFKISCEKAVFLINKKGAVVVDMRNSEEYYSGYIVNSINISIKDIKENDFILGSRLKNNPLILVYNSSDRFLYSVKKDLNRLGFTQVYVLEGGISSWVDGGFPLLNLKK

SEQ ID NO: 1389 - DNA, 438 bp, Photorhabdus luminescens subsp. laumondii TTO1
  CDS (1)..(438): transl_table=11
atgctgcaagaaatcatgcaatttattaaccagcatatgaccttaagcctcatttggattgcgctgctggttgctgttattgtgacgacaacgagaggtttcttctctaaaaccaaagagataactcgtgctcaagctattaatctgatcaataaagaagaagccatcgtcgtggatttacgttcccgtgaagatttccgcaaagggcatattattggtgcagtaaacctgactccctctgaaattaaagacaacaattttgctgagttggaaaaacataaaaagcagcctgtaattgttgtttctgcgaatggcactgaatctcgtactccggcagagaatcttcttcgtgctggttttgaacgcgtatgttccttgaaagaaggtttggttggttggacaggcgaaaatttgccattggcacgtggtaaaaagtaa

SEQ ID NO: 1390 - protein, 145 aa, Photorhabdus luminescens subsp. laumondii TTO1
MLQEIMQFINQHMTLSLIWIALLVAVIVTTTRGFFSKTKEITRAQAINLINKEEAIVVDLRSREDFRKGHIIGAVNLTPSEIKDNNFAELEKHKKQPVIVVSANGTESRTPAENLLRAGFERVCSLKEGLVGWTGENLPLARGKK

SEQ ID NO: 1391 - DNA, 435 bp, Vibrio vulnificus YJ016
  CDS (1)..(435): transl_table=11
atgcaagagtacatcgactttattcagcaaaatatgatcatgtttttggcatgggttggcctagtgatcgccgtgataatgagcttcgtgaaatcggctaccgccgcgtacaagatcattactgtcaacgaacttaccgcattggtaaaccgtgaaaacggccaagtgatcgatattcgtgcgaaagacgagttcaaaaaaggtcacatcaccgacgcagttcacattttgccatcagacatcaagaacggtaacttcggtagccttgaaaaccgtaaatctgacccaatcatcgtagtatgcaaaacaggccaaaccgcgcaagaaagcgctaacctgttggctaaagcgggttttgaaaacgtcagcgtattgaaaaacggtctgatttcgtggagcgaagcaaacttacctttggtacgtagcaaacgttaa

SEQ ID NO: 1392 - protein, 144 aa, Vibrio vulnificus YJ016
MQEYIDFIQQNMIMFLAWVGLVIAVIMSFVKSATAAYKIITVNELTALVNRENGQVIDIRAKDEFKKGHITDAVHILPSDIKNGNFGSLENRKSDPIIVVCKTGQTAQESANLLAKAGFENVSVLKNGLISWSEANLPLVRSKR

SEQ ID NO: 1393 - DNA, 432 bp, Klebsiella pneumoniae subsp. pneumoniae MGH 78578
  CDS (1)..(432): transl_table=11
atgcaagaaattatgcaattcatcggccgtcacccggtcctgagcatcgcgtggatcgcgctgctgggtgcggtagtgttcaccaccttcaaggggctgatgtcgaaagttaaagtcatcacccgtggtgaagcgacgcgtcttatcaataaagaagatgcggtggtggtcgacctgcgtcagcgtgacgatttccgtaaaggccatattgccggcgctattaacctgctgcccagcgatatcaaagccaataacgtcggcgagttggaaaaacacaaatcgcaacccattattgtggtagacggttccggcatgcaggcgcaagagcccgccagcgcgctgaacaaagccgggtttgaaaaagtctttgtactgaaagagggcattgctggctggagcggcgaaaacctccctctggtacgcggcaaataa

SEQ ID NO: 1394 - protein, 143 aa, Klebsiella pneumoniae subsp. pneumoniae MGH 78578
MQEIMQFIGRHPVLSIAWIALLGAVVFTTFKGLMSKVKVITRGEATRLINKEDAVVVDLRQRDDFRKGHIAGAINLLPSDIKANNVGELEKHKSQPIIVVDGSGMQAQEPASALNKAGFEKVFVLKEGIAGWSGENLPLVRGK

SEQ ID NO: 1395 - DNA, 414 bp, Pseudomonas putida GB-1
  CDS (1)..(414): transl_table=11
atggttgctcacctgattcaattcgcgacagatcactacatcctggttgcgatcttcctcattctgctggtcctgctgctgatcaacgaaatccgtcgcggcggccagagcctgagcaatggccagctgacggccctggtcaatgccgagaagggcctggtggtcgacattcgcccggccaaggaatattcggccggtcacatcgtcggtgcgatcaacattccgcaggacaaactggccgcccgcatgagcgagctggagaagcacaaagaaaagaccctgatcgtcgtcgacgcaatgggccagcagtccggcacccactgccgcgaactgctcaaggctggctacaccgccgccaaactgagcggtggcgtttccagctggaaagccgataacctgcccctggtgaagtga

SEQ ID NO: 1396 - protein, 137 aa, Pseudomonas putida GB-1
MVAHLIQFATDHYILVAIFLILLVLLLINEIRRGGQSLSNGQLTALVNAEKGLVVDIRPAKEYSAGHIVGAINIPQDKLAARMSELEKHKEKTLIVVDAMGQQSGTHCRELLKAGYTAAKLSGGVSSWKADNLPLVK

SEQ ID NO: 1397 - DNA, 447 bp, Haemophilus somnus 2336
  CDS (1)..(447): transl_table=11
atgcaagaatatctccctttagcaacagagtttgcaaaaaatcatagcctaatggtaatagcatggattgccgtatttgtcatgttaatttatacatcggtaaaatcatttaccagtaaagttacggcagtagaaaacgccgaagcgactcgtttaattaataatgaagaggctattgttattgatttacgcacaatagatgaatttcaacgtggtcatattatcaacagtatcaacgtattgccaacagagattaaaaatcaaaatttaggaaaaattgaacaacataaagatacccctgtaattctagtttgtgcaacaggtatgaatgcaggtgcatcagcagaattattagttaaacaaggatttagtcgagtttactcactgaaagatggtatcagtggctggattgcggcaaatttacctttagtcaaaaaacataaataa

SEQ ID NO: 1398 - protein, 148 aa, Haemophilus somnus 2336
MQEYLPLATEFAKNHSLMVIAWIAVFVMLIYTSVKSFTSKVTAVENAEATRLINNEEAIVIDLRTIDEFQRGHIINSINVLPTEIKNQNLGKIEQHKDTPVILVCATGMNAGASAELLVKQGFSRVYSLKDGISGWIAANLPLVKKHK

SEQ ID NO: 1399 - DNA, 438 bp, Acinetobacter sp. ADP1
  CDS (1)..(438): transl_table=11
ttgagtttaattaggtggcttgtggaacgttggttggaatttatggggaatcacccctttttatttggtacgcttgcgattctgatcgttttgttctttatttttgaagggcaacgtaacggacgcaaaatctccccacaatcgcttggtattttaatcaaagctaaaaatgcccagttaattgatttacgcgatgccaaagatttccgtgaaggtcatatcagcggaagtcgtaatattccgtatagccagatcacaagtcatgttgatgagctaaaagcaagtgagcgcccattggtcttcatttgtaatttaggtcaggttgctggcagtgccctacaaaagataggccatgccgacagctaccgccttgatggtggaatcagcaattggaaagcacaaggcttacctttagttaaagcaaaaaccaaagcttaa

SEQ ID NO: 1400 - protein, 145 aa, Acinetobacter sp. ADP1
MSLIRWLVERWLEFMGNHPFLFGTLAILIVLFFIFEGQRNGRKISPQSLGILIKAKNAQLIDLRDAKDFREGHISGSRNIPYSQITSHVDELKASERPLVFICNLGQVAGSALQKIGHADSYRLDGGISNWKAQGLPLVKAKTKA

SEQ ID NO: 1401 - DNA, 432 bp, Pectobacterium atrosepticum SCRI1043
  CDS (1)..(432): transl_table=11
atgcaagagattatgccattcgttagcaagaaccctattttgagcatcgcctgggttgcgctgttggttgcggtaattgttcttactgtgaagagtaaactgtcgaacgtgaaagaagtggttcgtggtgaagcgatccgactgattaataaagaagatgctgtcgtcgttgatatccgtaaccgtgatgactatcgccgtggccatattgccagcgcatttaacctgttgccgaacgacattaaaaacggcagcgtaggtgaactcgaaaaacataagtcgcagccgattatcgtggtctgcgccaacggcctctcttcacgcgaagcggccgataatttgcacaaagccggttttgagcgtgtgcaggtgctgaaagacggcttggctggctggagcggtgagaatctgcctttagtccgcggcaaataa

SEQ ID NO: 1402 - protein, 143 aa, Pectobacterium atrosepticum SCRI1043
MQEIMPFVSKNPILSIAWVALLVAVIVLTVKSKLSNVKEVVRGEAIRLINKEDAVVVDIRNRDDYRRGHIASAFNLLPNDIKNGSVGELEKHKSQPIIVVCANGLSSREAADNLHKAGFERVQVLKDGLAGWSGENLPLVRGK

SEQ ID NO: 1403 - DNA, 438 bp, Mannheimia succiniciproducens MBEL55E
  CDS (1)..(438): transl_table=11
atggaagaatttatgccgatggcaaccgagtttgccaaaaatcatacccttttaattgcagcctgggttgcaattttcgtaattgtgatttttcaattagtaaaatcctttaccagtaaagtaaaaatcctgtcaaatgccgaagcgacaagcttaattaataatgaagatgcggtggtaattgatttacgcagtattgatgagtttaagcgcggacatattgcaggtagtctggagtttattccgaccgatatcaaaaaccggaatctcggcaagcttgaacaacataaagaccgtcatgttattttagtttgtgcaaacggttttactgcacgttcatcggcgcagcttttaacaaaacaaggcttcgctcatgtttatgtcttaaatgaaggcattatgggctggaaatcgcaaaatttaccattagttaaataa

SEQ ID NO: 1404 - protein, 145 aa, Mannheimia succiniciproducens MBEL55E
MEEFMPMATEFAKNHTLLIAAWVAIFVIVIFQLVKSFTSKVKILSNAEATSLINNEDAVVIDLRSIDEFKRGHIAGSLEFIPTDIKNRNLGKLEQHKDRHVILVCANGFTARSSAQLLTKQGFAHVYVLNEGIMGWKSQNLPLVK

SEQ ID NO: 1405 - DNA, 414 bp, Pseudomonas syringae pv. syringae B728a
  CDS (1)..(414): transl_table=11
atggttgctcacctgcttgaattcgccactaaccactatttgatcaccggtgccttcgtcattctgctgggactgctgattgcttacgaaatgagcaagggcggcgccagcctgagcactcgcgagctgaccgcgctggtcaacagcgatcagggcgtggtcatcgacgtgcgctcgaaaaaggattacaccgcagggcacatcgtcggctccctgaatttcccgcaggacaaggtactgacccgtaccgccgaactggagaaatacaaggacaagacgttgatcatagtcgatgcaatggggcagcatgctggcagcaccgcccgcgagctgctcaagtccggcttcaaggcggccaagctgtccggcggtatttccagctggcgcggcgataaccttcctctggtgaagtga

SEQ ID NO: 1406 - protein, 137 aa, Pseudomonas syringae pv. syringae B728a
MVAHLLEFATNHYLITGAFVILLGLLIAYEMSKGGASLSTRELTALVNSDQGVVIDVRSKKDYTAGHIVGSLNFPQDKVLTRTAELEKYKDKTLIIVDAMGQHAGSTARELLKSGFKAAKLSGGISSWRGDNLPLVK

SEQ ID NO: 1407 - DNA, 414 bp, Pseudomonas fluorescens Pf-5
  CDS (1)..(414): transl_table=11
atggttgctcacctgattcaattcgccactgaacactacttgctcgtcggcgccttcgccatcctgctggctctgttgatcgctcatgaattgagccgcggtggccgcagcctcagcacccgtgaactgaccgcgctggtcaacagcgagcagggcgtcgtgatcgatatccgtccatccaaggactatgccgccggccatatcgtcggtgcactgaacattccccaggacaagctggccgcccgtgtcggcgagctggagaagcacaagtccaagaccatcatcctggtggacgctcagggtcagcacgccggcacccacgcccgcgagctgctcaagtccggtttcaccgcggccaagctgtccggcggcgtggccagctggaaggccgataacctgccattggtgaagtaa

SEQ ID NO: 1408 - protein, 137 aa, Pseudomonas fluorescens Pf-5
MVAHLIQFATEHYLLVGAFAILLALLIAHELSRGGRSLSTRELTALVNSEQGVVIDIRPSKDYAAGHIVGALNIPQDKLAARVGELEKHKSKTIILVDAQGQHAGTHARELLKSGFTAAKLSGGVASWKADNLPLVK

SEQ ID NO: 1409 - DNA, 426 bp, Colwellia psychrerythraea 34H
  CDS (1)..(426): transl_table=11
atggaacaattaattacttttgcaagcgataatggcatgctgagcgcggtttgggttgccttagtggtaatgataatcgtcacgacagttaaaatgaaaatgtcaccgattaaacaaatcagtactcaagatttaacttttttgatgaataaggaagaaggtattgcgcttgatatccgcaaggaaaaagagtttaaagcgggacatattctcgatgcaatcaatttaccaagtgaaaaaatcaacaaaaatgacttcactagtcttgaaaaatataaagacaagcccatcatagtagtatgtgctgcgggtatgagtgctgtgcaaattgctaatgatttatataaaggtggtttcactcgagctagcgtacttaaaggtggcatgaatagctggactagtgcaggtttacctgtagctaaatag

SEQ ID NO: 1410 - protein, 141 aa, Colwellia psychrerythraea 34H
MEQLITFASDNGMLSAVWVALVVMIIVTTVKMKMSPIKQISTQDLTFLMNKEEGIALDIRKEKEFKAGHILDAINLPSEKINKNDFTSLEKYKDKPIIVVCAAGMSAVQIANDLYKGGFTRASVLKGGMNSWTSAGLPVAK

SEQ ID NO: 1411 - DNA, 426 bp, Dechloromonas aromatica RCB
  CDS (1)..(426): transl_table=11
atgccgatggaatttatcaatcaaaacgttttgctgatttcgctggtggttgtcagcggcttgtcgatgctctggccactattggcccgtccttccggcaacgcggtcactcctgccgaggcgacgcagctcattaatcgcgaagatgcccatatcgtcgatgtgcgcgaggcggacgaatatgcgtcggggcatctgccggatgcaaaaaacatcccggtggccaagctggctgatcgtattggagagcttgagaaattcaaggacaagccgattatcgtttgctgcgcgactggcatgcgttcaaacaaggcttgtgcagagctcaagaagcaaggtttcgacaagttgcacaatctggctggcggtgtcgatgcctgggttggcgcgggttatccgatcaagaagggtagcaagagcaaatga

SEQ ID NO: 1412 - protein, 141 aa, Dechloromonas aromatica RCB
MPMEFINQNVLLISLVVVSGLSMLWPLLARPSGNAVTPAEATQLINREDAHIVDVREADEYASGHLPDAKNIPVAKLADRIGELEKFKDKPIIVCCATGMRSNKACAELKKQGFDKLHNLAGGVDAWVGAGYPIKKGSKSK

SEQ ID NO: 1413 - DNA, 417 bp, Thiobacillus denitrificans ATCC 25259
  CDS (1)..(417): transl_table=11
atggacatgcaattcctgcaggacaactggatgctcgtcgccctcgcgctgatatcgggcgcgatgctcgtctggtccttcgtcggcggctcgctttccggcgtcgaacaggccgacacgctcaaggcgacgcggctgttcaacgacgacgccctcgtcctcgacgtgcgcgaagacaaggaatacgcggccggccacattccgaaggccaagcacatcccgctcgggcagcttcagagccggctcagcgagctcgacaagcacaagaacaagcccgtgctcgtcacctgtcgcagcggcaaccgctcggcgcacgcctgccgcatcctgaagaaggccggtttcgaatccgtgtacaaccaggccggcggcatcctcgcgtgggaacgcgccaatcttccggtcactcagaaataa

SEQ ID NO: 1414 - protein, 138 aa, Thiobacillus denitrificans ATCC 25259
MDMQFLQDNWMLVALALISGAMLVWSFVGGSLSGVEQADTLKATRLFNDDALVLDVREDKEYAAGHIPKAKHIPLGQLQSRLSELDKHKNKPVLVTCRSGNRSAHACRILKKAGFESVYNQAGGILAWERANLPVTQK

SEQ ID NO: 1415 - DNA, 414 bp, Pseudomonas fluorescens PfO-1
  CDS (1)..(414): transl_table=11
atggttgctcacctgattgaatttgccactaaccactacattcttgtcggtatcttcgtcgtactgctggctttgctgctggcgcatacggtgcagggcggcggtaaaagcctgagcacgggcgagctgaccgcgctggtcaacaaggaagccggcgtggtggtggacatccgtccgagcaaggactacgccgccggtcacatcgttggcgcggtgaacattccccaggacaaactggccgcccgcatcggcgagctggaaaaacacaaggccaagaccatcattctggtcgacgccctgggccagaccgccggcacccacgcccgcgagctgatgaaggccggcttcaccgccgccaagctgtccggcgggatttccagctggaaaggcgacaacctgccgttggtgaagtga

SEQ ID NO: 1416 - protein, 137 aa, Pseudomonas fluorescens PfO-1
MVAHLIEFATNHYILVGIFVVLLALLLAHTVQGGGKSLSTGELTALVNKEAGVVVDIRPSKDYAAGHIVGAVNIPQDKLAARIGELEKHKAKTIILVDALGQTAGTHARELMKAGFTAAKLSGGISSWKGDNLPLVK

SEQ ID NO: 1417 - DNA, 435 bp, Shewanella sp. MR-4
  CDS (1)..(435): transl_table=11
atgcaagaatatatcgaattttttaaggctcacactatgctaagtctggcttgggtgggtttgtttgtaatgcttgtggtcagtgtgatcaaatcgagcttctctaaaatcaaaaatgtcactcatcaagaactcaccactatggtgaacagacaagacgctaaagtcgtggatgtgcgttcaaatgacgagttccgtaagggccatattgttgatgcagttaacgttacgctcgcggatatcaaaaataatcaggtttcagcccttgaaaagttcaaaggcagtcccattatactggtatgcaatgctggcatgacctcgtctcaagcggctcagcttttaagtaaacaaggttttgaaaacctgtataacttgaaaggtggtatgggtgaatggcaggcagcgaatatgcctgtttcaaaaagcaaaagataa

SEQ ID NO: 1418 - protein, 144 aa, Shewanella sp. MR-4
MQEYIEFFKAHTMLSLAWVGLFVMLVVSVIKSSFSKIKNVTHQELTTMVNRQDAKVVDVRSNDEFRKGHIVDAVNVTLADIKNNQVSALEKFKGSPIILVCNAGMTSSQAAQLLSKQGFENLYNLKGGMGEWQAANMPVSKSKR

SEQ ID NO: 1419 - DNA, 435 bp, Shewanella sp. MR-7
  CDS (1)..(435): transl_table=11
atgcaagaatatatcgaattttttaaggctcacactctgctaagtctggcttgggtgggtttgtttgtaatgcttgtggtcagtgtgatcaaatcgagcttttcaaaaatcaaaaatgtcactcatcaagaactcactattatggtgaaccgacaagacgctaaagtcgtggatgtgcgttcaaatgacgagttccgtaagggccatattgttgatgcagttaatgttacgctcgcggatatcaaaaataatcaggtttcagcccttgaaaagttcaaaggcagtcccattatactggtatgcaatgctggcatgacctcgtctcaagcggctcagcttttaagtaaacaaggttttgaaaacctgtataacttgaaaggtggtatgggtgaatggcaggcagcgaatatgcctgtttcaaaaagcaaaagataa

SEQ ID NO: 1420 - protein, 144 aa, Shewanella sp. MR-7
MQEYIEFFKAHTLLSLAWVGLFVMLVVSVIKSSFSKIKNVTHQELTIMVNRQDAKVVDVRSNDEFRKGHIVDAVNVTLADIKNNQVSALEKFKGSPIILVCNAGMTSSQAAQLLSKQGFENLYNLKGGMGEWQAANMPVSKSKR

SEQ ID NO: 1421 - DNA, 456 bp, Alkalilimnicola ehrlichei MLHE-1
  CDS (1)..(456): transl_table=11
atggagcagttgctggaattcatcaccgacaactggatgctcgtgctggccttcgtgctcatcctgggctactgggtcggcgccgagatctaccacttcagcagcggcgtcaagaccatcaccccggagacggcgacccagctctacaaccgcgacaatgcgctgttcgtggatatccgcaacaacaccgagtaccgcaaatcgcatctgcccggggcgtttcacatgccgtccaccgaggtggatcaactgctggaaaagctgcgccgccacgagtcccggccgctgatcgtctatgatgccaatggactgcaggccaacaagacggcgcggcgactccgcaaggccggcttcgagacggtctaccagctcaagaccgggctcaccggctgggagagcgccggctacccgatggagcgcggcaggaccaagcccaagcccaaccccaagggctga

SEQ ID NO: 1422 - protein, 151 aa, Alkalilimnicola ehrlichei MLHE-1
MEQLLEFITDNWMLVLAFVLILGYWVGAEIYHFSSGVKTITPETATQLYNRDNALFVDIRNNTEYRKSHLPGAFHMPSTEVDQLLEKLRRHESRPLIVYDANGLQANKTARRLRKAGFETVYQLKTGLTGWESAGYPMERGRTKPKPNPKG

SEQ ID NO: 1423 - DNA, 477 bp, Shewanella sp. ANA-3
  CDS (1)..(477): transl_table=11
gtgcccttatcgaatttttcgccatttatacgggctgtaaccatgcaagaatatatcgaattttttaaggctcacactatgctaagtctggcttgggtgggtttgtttgtaatgcttgtggtcagtgtgatcaaatcgagcttctctaaaatcaaaaatgtcactcatcaagaactcaccactatggtgaacagacaagacgctaaagtcgtggatgtgcgttcaaatgacgagttccgtaagggccatattgttgatgcagttaacgttacgctcgcggatatcaaaaataatcaggtttcagcccttgaaaagttcaaaggcagtcccattatactggtatgcaatgctggcatgacctcgtctcaagcggctcagcttttaagtaaacaaggttttgaaaacctgtataacttgaaaggtggtatgggtgaatggcaggcagcaaatatgcctgtttcaaaaagcaaaagataa

SEQ ID NO: 1424 - protein, 158 aa, Shewanella sp. ANA-3
MPLSNFSPFIRAVTMQEYIEFFKAHTMLSLAWVGLFVMLVVSVIKSSFSKIKNVTHQELTTMVNRQDAKVVDVRSNDEFRKGHIVDAVNVTLADIKNNQVSALEKFKGSPIILVCNAGMTSSQAAQLLSKQGFENLYNLKGGMGEWQAANMPVSKSKR

SEQ ID NO: 1425 - DNA, 441 bp, Xylella fastidiosa Ann-1
  CDS (1)..(441): transl_table=11
gtgaattttgaagagctacaggccttcgctggccgcaacccgatcctttcgctggctttcgttggtctgaccattgcgattgtggttacagaaactacacttctgtttcgtcgttataccgcgttgaagccggctgatctgactaggctgatcaatagtgagaatgctttagtcgtagatttgtcgcctagcagcgatttcgaaaaaggacatattgctggtagtcgcagtgtggttgagagtaagtttgatcctgaaagcaataagctgctactgagtgctaaacaatccccattggttgttgtgtgtcgtaatggacatatttctgctgcggcagccaagcgtcttaagaatgctggctttgagaaagtctattggcttgacggtggtatcgctacttggaaaatggctgaaatgccgctcatcaagggacgtacctga

SEQ ID NO: 1426 - protein, 146 aa, Xylella fastidiosa Ann-1
MNFEELQAFAGRNPILSLAFVGLTIAIVVTETTLLFRRYTALKPADLTRLINSENALVVDLSPSSDFEKGHIAGSRSVVESKFDPESNKLLLSAKQSPLVVVCRNGHISAAAAKRLKNAGFEKVYWLDGGIATWKMAEMPLIKGRT

SEQ ID NO: 1427 - DNA, 432 bp, Pseudoalteromonas tunicata D2
  CDS (1)..(432): transl_table=11
atggcacaattcgtagaatttatcggaaatcatccgatcttaagtttgatctggatcggtttagttatggcgattgtcttaggttggttcaaagcgagattttcagcaattaagcatattaatcctcagcaattaacgttgttaatcaatcgtgaaaatgcaactgcggttgatattcgtgctttaaaagattttaatacaggtcacattgcaagctcagttcatttaagtgctgaaaaagcgaaagaaaaagagttttctgcgcttgaaaagctaaaaaatgcgcccattatagtcgtatgcaatacaggaatgactgcttcaggcgtagctgataatttacacaaagctggttttgagcacgtttttattctttcaggtgggatcggtgcttggcaaagtgctggtttaccaatgaccacggagcgttaa

SEQ ID NO: 1428 - protein, 143 aa, Pseudoalteromonas tunicata D2
MAQFVEFIGNHPILSLIWIGLVMAIVLGWFKARFSAIKHINPQQLTLLINRENATAVDIRALKDFNTGHIASSVHLSAEKAKEKEFSALEKLKNAPIIVVCNTGMTASGVADNLHKAGFEHVFILSGGIGAWQSAGLPMTTER

SEQ ID NO: 1429 - DNA, 441 bp, Photobacterium sp. SKA34
  CDS (1)..(441): transl_table=11
atgcaacaatatattgaatttttaaccagtaaccctattttatctctagtttggatcggtttagttgtcgctatcatcggttcgatgatcaaagagaaaactgcaacctataaaacaattggtattaacgacgcgacagtattagtcaatcgtgaagaaggagtgtttgttgatattcgctctcgtgacgaataccgtaaaggtcatattgctggctcacttcacgctttaccaagccaaattaaagaacaaaacattacagagcttgaaaaacataaaacagccccaatcattgtcgtatgtaagacaggtcaaaccgctcaaacaacggcaaatgatttgagtaaagcgggttttaccaatgttaatgtactaaaagatggtctgattgcttggaacgaagcaaacctaccgctagtaaaaagcaaaggtaaaaaataa

SEQ ID NO: 1430 - protein, 146 aa, Photobacterium sp. SKA34
MQQYIEFLTSNPILSLVWIGLVVAIIGSMIKEKTATYKTIGINDATVLVNREEGVFVDIRSRDEYRKGHIAGSLHALPSQIKEQNITELEKHKTAPIIVVCKTGQTAQTTANDLSKAGFTNVNVLKDGLIAWNEANLPLVKSKGKK

SEQ ID NO: 1431 - DNA, 414 bp, Oceanobacter sp. RED65
  CDS (1)..(414): transl_table=11
atggaacagttatttgaatttgtcaccaaccattggatgctggtctcagcactggtcgtgctgctgattttactgggctgggatagtggtcaaaagtctgggcctaaggtcacgactcatgaagcaacgcgtctgattaaccagcaaaatgctttggtgctcgatgttcgtgaaaagtcggaatttaagaaaggtcgcattgtggactctgttaacattccgaataaccaagtagctgatcgtgtatctgaactagaaaagcacaaagatgcccccatcattgtggtatgcaagtctggtcaaacagcatcggcggcgagcaaaatactcaaagaccaagggttcgacgtgtaccgtctgggtggcggcatcatggagtggacaaataacaatctgccattggttaaaagctaa

SEQ ID NO: 1432 - protein, 137 aa, Oceanobacter sp. RED65
MEQLFEFVTNHWMLVSALVVLLILLGWDSGQKSGPKVTTHEATRLINQQNALVLDVREKSEFKKGRIVDSVNIPNNQVADRVSELEKHKDAPIIVVCKSGQTASAASKILKDQGFDVYRLGGGIMEWTNNNLPLVKS

SEQ ID NO: 1433 - DNA, 435 bp, Vibrio sp. Ex25
  CDS (1)..(435): transl_table=11
atgcaagagtacattgaatttttccaacagaacatgattctatctttggtttgggtaggtcttcttgtcgcctttatcatgaacatcgtgaagtcagcgacggccgcatacaaagaaatcaacgtaaaccaactgactcatcttatgaaccgtgaaaacggcgttgtagtggatatccgcacaaaggacgagttcaaaaaaggtcatatcaccgactcacttcacattttaccgtcagatatcaaagcaggtaactttggtagccttgaaaaccacaaatcagacccaatcattgtggtatgcaagacagggcaaaacgctcaagaaagcgcgaacctattagtaaaagcaggctttgaaaaagtaagcctactgaagaacggcttgattgcatggaacgaagcgaacctgcctttagtacgtggtaaaaagtaa

SEQ ID NO: 1434 - protein, 144 aa, Vibrio sp. Ex25
MQEYIEFFQQNMILSLVWVGLLVAFIMNIVKSATAAYKEINVNQLTHLMNRENGVVVDIRTKDEFKKGHITDSLHILPSDIKAGNFGSLENHKSDPIIVVCKTGQNAQESANLLVKAGFEKVSLLKNGLIAWNEANLPLVRGKK

SEQ ID NO: 1435 - DNA, 432 bp, Alteromonadales bacterium TW-7
  CDS (1)..(432): transl_table=11
atggatcaatatattgaatttataagcaatcaccctatcttaagccttgcttgggttggtattgtttttcttattgtcagtggttggataaaaagtaaattttcagctattcgtcaaataaaccctcagcaactaacgctacttattaaccgtgaagatggtcaagtagtggatatgcgcgcacaaaaagagtttacgtctggccgtatttcgggtgctgaacacttaagccctgaaaatgccaaaaaatctgacttttcaggccttgaaaagtacaagactaaacccattatattggtatgtactacaggtatgacagcccaaggcacggccacagcaatgcataaagctggttttgaacaggtttatgtattagcgggcggaatgggtgcatggcaatctgctagcttaccaacgataacaggtcgctaa

SEQ ID NO: 1436 - protein, 143 aa, Alteromonadales bacterium TW-7
MDQYIEFISNHPILSLAWVGIVFLIVSGWIKSKFSAIRQINPQQLTLLINREDGQVVDMRAQKEFTSGRISGAEHLSPENAKKSDFSGLEKYKTKPIILVCTTGMTAQGTATAMHKAGFEQVYVLAGGMGAWQSASLPTITGR

SEQ ID NO: 1437 - DNA, 417 bp, Marinobacter sp. ELB17
  CDS (1)..(417): transl_table=11
atggatcgcttgtttgaatttgttgttaaccattacattctggtgtcggtattcgttgccttgcttctggcgctgctggccctggaaacccgccgcggtggtgccaaaatttccgcccaaggcgctgtgagccttattaaccgggacgaagcggtggtggtggatatccgtgagcgcaaagaatttaacgaagggcgcatcacgggctcgatgaatattccattgagtgctttgaaaagccgcagcagtgagctgtccaagcacaaagaaaagcagctgattgtggtcgacaagatggggcagcattctgctatggcggtcaaacagcttaatactgaaggttttaccaatgtagtgcgcctgagcggcgggattgccgactggaaagccagcaatttgccgctggtaaagaaataa

SEQ ID NO: 1438 - protein, 138 aa, Marinobacter sp. ELB17
MDRLFEFVVNHYILVSVFVALLLALLALETRRGGAKISAQGAVSLINRDEAVVVDIRERKEFNEGRITGSMNIPLSALKSRSSELSKHKEKQLIVVDKMGQHSAMAVKQLNTEGFTNVVRLSGGIADWKASNLPLVKK

SEQ ID NO: 1439 - DNA, 429 bp, Moritella sp. PE36
  CDS (1)..(429): transl_table=11
atgcaagaatatattgaatttgcttcaaataatccagccttatctctcgcttgggtagctattgctggtttccttatttattcatttggcaccagtgccctgtcaaaagtgaagtcggtgaacaatcaagaagcgacaactttgatgaataaagaaaatgctattgttgttgatgttcgcgctgcagaacattatcgtaagtcacatattttaaacgcaattaacgttcctactgctgatatcgaagcaaataagctaacgatgattgaaaaatacaaaaataccccaattatcgttatgtgtgacacaggaatgagttcaggtcgcgctgcgaatcgtctatctaaaatggactttactactgtttataatttatctggtggcatggcagcttggcaagaagccaacttaccgactgttaaaaaataa

SEQ ID NO: 1440 - protein, 142 aa, Moritella sp. PE36
MQEYIEFASNNPALSLAWVAIAGFLIYSFGTSALSKVKSVNNQEATTLMNKENAIVVDVRAAEHYRKSHILNAINVPTADIEANKLTMIEKYKNTPIIVMCDTGMSSGRAANRLSKMDFTTVYNLSGGMAAWQEANLPTVKK

SEQ ID NO: 1441 - DNA, 426 bp, Rickettsiella grylli
  CDS (1)..(426): transl_table=11
atgcaacaatttattgaatttggtttacgacactgggagctttggttagcattttgtgttattttagtattattattaaccttcgaattacatgctaaactaacaggcacactcccgcttagcgttcaagaagctattttcaagatcaacagagaggatgctatttttttagatgttcgtgatgcgctgagctataaaaagggacatattgcaaaatccattaatatccctttttctgagcttaaatcgaaattaagtgatttagaaccttatcgagaaaggcctattatcattaattataagccgggacaatcgcatcataaactaggtcgattgttaaagaatgccggatttttaaaatgttaccatcttaaaggcggaataatgagttggcagaacgcggctttacctctcattaaaggataa

SEQ ID NO: 1442 - protein, 141 aa, Rickettsiella grylli
MQQFIEFGLRHWELWLAFCVILVLLLTFELHAKLTGTLPLSVQEAIFKINREDAIFLDVRDALSYKKGHIAKSINIPFSELKSKLSDLEPYRERPIIINYKPGQSHHKLGRLLKNAGFLKCYHLKGGIMSWQNAALPLIKG

SEQ ID NO: 1443 - DNA, 435 bp, Buchnera aphidicola subsp
  CDS (1)..(435): transl_table=11
atgcaggatgtaatatttttcttgagtaaacacattttactaattagtatatggattttttgttttattgcagccgttttttttataactagaactcttttgtcgaaatctaaaatgattaataattttcaagcaattaaattaattaatcaagataaagctattgttgttgatactcgttctttagaatcattcaaagagggtcatattcttaattctattaatgttccgttaaaaaatatttttttaggaaaaattaaagagatagaaatatataaaatgtttcctattattcttgtattaagtgacacatataaagttaatgcatgtattaaaaagttttttgaatatggatttaatcgtgtttatattttaaaaaatggtctatattattggaagacagacaatcttccacttattgttaacgataaatga

SEQ ID NO: 1444 - protein, 144 aa, Buchnera aphidicola subsp
MQDVIFFLSKHILLISIWIFCFIAAVFFITRTLLSKSKMINNFQAIKLINQDKAIVVDTRSLESFKEGHILNSINVPLKNIFLGKIKEIEIYKMFPIILVLSDTYKVNACIKKFFEYGFNRVYILKNGLYYWKTDNLPLIVNDK

SEQ ID NO: 1445 - DNA, 447 bp, Haemophilus influenzae
  CDS (1)..(447): transl_table=11
atgcaagaatttatctcaatggcaacagagtttgctcaaaaacatacgcttttagcagtttcttggtttgcgattttcgtaatggtaatttatacattctacaaaggcgcaacgagtaaatttaaagtaattacgcacaatgaagttattcggttaataaattccgatgaagccattgtggtagatttacgtagtcttgaagaatttcaacgtggacatatcattaatagtattaatgtgcttccaagcgaaattaaaaatcaaaatatcggaaaattagagtcgcataaagagaacgctcttatattagtcgatacaaatggtacttcagcctctgcttctgcagtatttttaaccaaacaaggttttaattctgtatttgtgttgaaagaaggcctttccgcgtgggtagcagcaaatttacctttagttaaaaaacataaataa

SEQ ID NO: 1446 - protein, 148 aa, Haemophilus influenzae
MQEFISMATEFAQKHTLLAVSWFAIFVMVIYTFYKGATSKFKVITHNEVIRLINSDEAIVVDLRSLEEFQRGHIINSINVLPSEIKNQNIGKLESHKENALILVDTNGTSASASAVFLTKQGFNSVFVLKEGLSAWVAANLPLVKKHK

SEQ ID NO: 1447 - DNA, 462 bp, Oryza sativa
  CDS (1)..(462)
atgatgatgatggtgagattgcctgctatgttcgtgatctgcatcttggctgttccgctgctgccagcgctcggctcggagccgccgtcgacaccggtgccgaccgttggcgtgacggcggcgagccacctcgtcggctccggtggccacagctacttggacgtcaggacagaagaggaattcaagaagggacatgtggagaattctcttaatgtgccattcctcttctttacccctcaagggaaggaaaagaacacaaagttcatagagcaggtggcattgcattatgataaggaggacaacataattgtgggttgcctaagtggagtaagatctgaactagcatctgccgatctcatagcagccggattcaaaaatgtaaagaacatggaaggaggttacatggcatgggtggaaaatggccttgcggtgaataaacctctagtgcaagaagagctctag

SEQ ID NO: 1448 - protein, 153 aa, Oryza sativa
MMMMVRLPAMFVICILAVPLLPALGSEPPSTPVPTVGVTAASHLVGSGGHSYLDVRTEEEFKKGHVENSLNVPFLFFTPQGKEKNTKFIEQVALHYDKEDNIIVGCLSGVRSELASADLIAAGFKNVKNMEGGYMAWVENGLAVNKPLVQEEL

SEQ ID NO: 1449 - DNA, 24 bp, Artificial sequence
  primer
atgcaagaaattatgcaatttgtt

SEQ ID NO: 1450 - DNA, 22 bp, Artificial sequence
  primer
ttatttgccgcgcaccaaaggc

SEQ ID NO: 1451 - protein, 143 aa, Artificial sequence
  consensus sequence
  Variant (2)..(7): Xaa in position 2 to 7 is any amino acid
  Variant (9)..(38): Xaa in position 9 to 38 is any amino acid
  Variant (39)..(42): Xaa in position 39 to 42 is any or no amino acid
  Variant (44)..(44): Xaa in position 44 is any amino acid
  Variant (46)..(51): Xaa in position 46 to 51 is any amino acid
  Variant (52)..(52): Xaa in position 52 is any or no amino acid
  Variant (54)..(54): Xaa in position 54 is any amino acid
  Variant (56)..(62): Xaa in position 56 to 62 is any amino acid
  Variant (66)..(82): Xaa in position 66 to 82 is any amino acid
  Variant (83)..(92): Xaa in position 83 to 92 is any or no amino acid
  Variant (94)..(96): Xaa in position 94 to 96 is any amino acid
  Variant (98)..(101): Xaa in position 98 to 101 is any amino acid
  Variant (103)..(103): Xaa in position 103 is any amino acid
  Variant (105)..(107): Xaa in position 105 to 107 is any amino acid
  Variant (109)..(114): Xaa in position 109 to 114 is any amino acid
  Variant (115)..(118): Xaa in position 115 to 118 is any or no amino acid
  Variant (120)..(120): Xaa in position 120 is any amino acid
  Variant (122)..(122): Xaa in position 122 is any amino acid
  Variant (125)..(128): Xaa in position 125 to 128 is any amino acid
  Variant (129)..(129): Xaa in position 129 is any or no amino acid
  Variant (131)..(132): Xaa in position 131 to 132 is any amino acid
  Variant (134)..(136): Xaa in position 134 to 136 is any amino acid
  Variant (138)..(142): Xaa in position 138 to 142 is any amino acid
FXXXXXXLXXXXXXXXXXXXXXXXXXXXXXXXXXXXXXXXXXLXNXXXXXXXDXRXXXXXXXGHIXXXXXXXXXXXXXXXXXXXXXXXXXXXLXXXKXXXXIXVXXXGXXXXXXXXXXLXKXGFXXXXXLXXGXXXWXXXXXP

SEQ ID NO: 1452 - protein, 39 aa, Artificial sequence
  protein pattern
  Variant (2)..(4): Xaa in position 2 to 4 is any amino acid
  Variant (5)..(9): Xaa in position 5 to 9 is any or no amino acid
  Variant (11)..(11): Xaa in position 11 is any amino acid
  Variant (12)..(12): Xaa in position 12 is Asp, Glu or Gln
  Variant (13)..(13): Xaa in position 13 is any amino acid
  Variant (14)..(14): Xaa in position 14 is Ala or Gly
  Variant (15)..(16): Xaa in position 15 to 16 is any amino acid
  Variant (17)..(17): Xaa in position 17 is Ile, Leu or Val
  Variant (19)..(19): Xaa in position 19 is Ile, Leu, Met or Val
  Variant (20)..(20): Xaa in position 20 is Arg or Ser
  Variant (21)..(24): Xaa in position 21 to 24 is any amino acid
  Variant (25)..(25): Xaa in position 25 is Phe or Tyr
  Variant (26)..(27): Xaa in position 26 to 27 is any amino acid
  Variant (28)..(28): Xaa in position 28 is Gly or Ser
  Variant (29)..(29): Xaa in position 29 is His or Arg
  Variant (30)..(30): Xaa in position 30 is Ile or Leu
  Variant (31)..(31): Xaa in position 31 is any amino acid
  Variant (32)..(32): Xaa in position 32 is Asp, Gly, Asn or Ser
  Variant (33)..(33): Xaa in position 33 is Ala or Ser
  Variant (34)..(38): Xaa in position 34 to 38 is any amino acid
  Variant (39)..(39): Xaa in position 39 is Ala, Asp, Glu, Asn, Ser or Thr
TXXXXXXXXNXXXXXXXDXXXXXXXXXXXXXXXXXXXXX

SEQ ID NO: 1453 - DNA, 993 bp, Escherichia coli
  CDS (1)..(993): transl_table=11
atgaaaaccgcttacattgccaaacaacgtcaaattagcttcgtgaaatctcacttttctcgtcaactggaagaacgtctggggctgatcgaagtccaggcgccgattcttagccgtgtgggggatggcacgcaggataacttgtcgggctgtgaaaaagcggtgcaggtaaaagtgaaagctctgcctgatgcccagttcgaagtggttcattcactggcgaagtggaaacgtcagaccttagggcaacacgacttcagcgcgggcgaagggctgtacacgcacatgaaagcccttcgccccgatgaagaccgtctttctccgttgcactcggtctatgttgaccagtgggactgggaacgcgtaatgggcgacggtgagcgtcaattctcgactctgaaaagcacggtagaggcgatctgggcgggaattaaagcaaccgaagctgcggttagcgaagagtttggcctggcaccgttcctgccggatcagatccacttcgtacacagccaggagttactgtctcgttatccggatcttgatgccaaagggcgtgagcgggcgatagcgaaagatcttggcgcggtattccttgtcgggattggcggcaagctgagcgatggtcatcgccacgacgtgcgcgcaccggattatgatgactggagcaccccgtcagagctgggccatgcgggtctgaacggcgatattctggtgtggaacccggtactggaagatgcgtttgagctttcctccatggggatccgtgtagatgccgacacgctgaagcatcaactggcgctgaccggtgacgaagatcgcctggagctggagtggcatcaggcgctgctgcgcggtgaaatgccgcagaccatcggcggcggtatcggccagtctcgtttgactatgctgctgctgcaactgccgcatatcggccaggttcagtgtggagtatggccagctgctgttcgcgagagcgtcccttctctgctgtaa

SEQ ID NO: 1454 - protein, 330 aa, Escherichia coli
MKTAYIAKQRQISFVKSHFSRQLEERLGLIEVQAPILSRVGDGTQDNLSGCEKAVQVKVKALPDAQFEVVHSLAKWKRQTLGQHDFSAGEGLYTHMKALRPDEDRLSPLHSVYVDQWDWERVMGDGERQFSTLKSTVEAIWAGIKATEAAVSEEFGLAPFLPDQIHFVHSQELLSRYPDLDAKGRERAIAKDLGAVFLVGIGGKLSDGHRHDVRAPDYDDWSTPSELGHAGLNGDILVWNPVLEDAFELSSMGIRVDADTLKHQLALTGDEDRLELEWHQALLRGEMPQTIGGGIGQSRLTMLLLQLPHIGQVQCGVWPAAVRESVPSLL

SEQ ID NO: 1455 - DNA, 999 bp, Streptococcus pneumoniae R6
  CDS (1)..(999): transl_table=11
ttgtctatgaagaaaagttttatccatcaacaagaagaaatttcctttgtcaaaaacacttttacccagtatttgaaagataagctagaagttgtcgaagttcaaggtcctatcttgagtaaggtcggtgacggaatgcaggacaacctgtctggtgtggaaaatccagtatcggtcaaggttctccaaatccctgatgctacttatgaagtggtgcactcacttgctaaatggaaacgccacaccttggctcgttttggctttggtgaaggagagggtctctttgtccacatgaaagcccttcgtccagatgaggattccttggatgcaacccactctgtttatgttgaccagtgggactgggagaaggttatcccaaatggtaagcgtaacatcgtttatctaaaagaaacagttgagaagatttataaggctattcgcctgactgagctagctgttgaagctcgctatgacatcgagtctatcttgccaaaacaaatcacctttatccatacagaagaattggtagaacgctatccagacttgacatcgaaagaacgtgaaaatgcgatttgtaaagaatttggagccgtctttttgattggtatcggtggcgagttgccagatggtaaaccgcacgatggacgtgcaccagactatgatgactggacaagcgagtctgagaatggctacaagggtctaaatggtgatattcttgtctggaatgagtctttaggtggagcctttgagttgtcttctatgggaattcgtgtagatgaagaaactcttagacgtcaggtggaaattacaggtgatgaagaccgcttggaattggaatggcacaagtctttgttgaatggcctattcccattgacaatcggtggaggaattggacaatctcgtatggccatgttcctacttcgcaagagacacatcggagaagtgcaaacaagtgtttggcctcaagaagtacgcgatacttacgaaaatattttgtag

SEQ ID NO: 1456 - protein, 332 aa, Streptococcus pneumoniae R6
MSMKKSFIHQQEEISFVKNTFTQYLKDKLEVVEVQGPILSKVGDGMQDNLSGVENPVSVKVLQIPDATYEVVHSLAKWKRHTLARFGFGEGEGLFVHMKALRPDEDSLDATHSVYVDQWDWEKVIPNGKRNIVYLKETVEKIYKAIRLTELAVEARYDIESILPKQITFIHTEELVERYPDLTSKERENAICKEFGAVFLIGIGGELPDGKPHDGRAPDYDDWTSESENGYKGLNGDILVWNESLGGAFELSSMGIRVDEETLRRQVEITGDEDRLELEWHKSLLNGLFPLTIGGGIGQSRMAMFLLRKRHIGEVQTSVWPQEVRDTYENIL

SEQ ID NO: 1457 - DNA, 981 bp, Mycoplasma mycoides subsp. mycoides SC str. PG1
  CDS (1)..(981): transl_table=4
atgtataaatctaaactaagtattaaacaaactcaacaagctattcaagatattaaatttggtttaactaagcaattaaaacaaaatttaaacttaacaagagtttcagctccactttttgtaacttcagaatctaaaattaatgatggattaaatggtgatattccagttgtatttactcctaatcaatgaaaagaagacttagaaatagttcactcacttgctaaatgaaaacgttatgcactagataaatataattttaattttggtgaaggtatttgagcagatatgaatgctattagaaaagatgatgttgttgattataaacactcattatatgttgatcaatgagattgagaattgattataagtaaagaacaaagaaatcttgagtttttaaaacaaattgctactaaaatttatgactcaattagatatgttgaacacaaaatcaattttaaatatcctgatttagtagataagttaccaaaacaattaacatttattgattctttagatttatataataaatatcctaatttaacagctgaacaaagagaagatgaagttgcaagagaatataaagccgtattcatttataaaattggttatgatttaccagataaaaaacctcattcaaaaagagcatttgattatgatgattgaaatctaaatggtgatttaattttttatgatttagttaatgataaagctttagaaattagttctatgggtattagagttgatgctaaaagtttaagtgaacaaactaaaatattaaataaaacagattctgatttaggtttatatcacgatcaagtacttaatgataaattgcctttaactattggtggaggaattggacaaagtcgattaagtatgtttttattagaaaaagctcatattggtgaagtacaagttagtgtgtgagaaaaacaatataaagaagatttaaaaaaacaaggaatagttttattgtaa

SEQ ID NO: 1458 - protein, 326 aa, Mycoplasma mycoides subsp. mycoides SC str. PG1
MYKSKLSIKQTQQAIQDIKFGLTKQLKQNLNLTRVSAPLFVTSESKINDGLNGDIPVVFTPNQWKEDLEIVHSLAKWKRYALDKYNFNFGEGIWADMNAIRKDDVVDYKHSLYVDQWDWELIISKEQRNLEFLKQIATKIYDSIRYVEHKINFKYPDLVDKLPKQLTFIDSLDLYNKYPNLTAEQREDEVAREYKAVFIYKIGYDLPDKKPHSKRAFDYDDWNLNGDLIFYDLVNDKALEISSMGIRVDAKSLSEQTKILNKTDSDLGLYHDQVLNDKLPLTIGGGIGQSRLSMFLLEKAHIGEVQVSVWEKQYKEDLKKQGIVLL

SEQ ID NO: 1459 - DNA, 1023 bp, Clostridium thermocellum ATCC 27405
  CDS (1)..(1023): transl_table=11
gtggttgagaagatagacaggcttataattccgccggattaccatccgactttgtcggttagagagacggaagcggcaattaaaaaaataaaggacttttttgagacggcactggcagcggagttgaacttaagcagggtttctgcgcctctttttgtaagacctgagacaggcatgaatgataacctcaacggagtggaaagaccggtatcttttgatgtaaaggctatcggcggaaatacagtggagattgtgcattcccttgcaaaatggaagcgtatggctttggcaaaatacggatttaaagtgggagaagggctttataccgacatgaatgccataagaagggacgaggatttggacaaccttcattccatatatgtggaccaatgggactgggaattggtgattaataaagaagacagaaatgaagagactttgaaaaatatagtgaaaaaaatatataatgttcttaaaaagaccgaagactttattgctgaacaatatcctcaaataccaaaatttttgccggaagatatattctttattacgacccaggagctggaggacatgtatcccgagctttctccgaaggagagagaggatgcaattgcaaaggagaaaaaagcgatatttctcatgaaaataggaggtgttctcaaatcagggaagaaacatgacggaagggcaccggattacgatgactggacgttgaacggggacataattttgtggtatcctttgctggaaaggtcttttgagatatcttccatgggaataagagtggatgaaaattcattgctaagtcagctgaaagaagccggttgcgaggaaagaaaagaaatgaaattccacaaagatttgcttcaaggaaagctcccttacaccattggagggggtatcggacagtcgaggatttgcatgtattttctgaagaaggctcatataggagaggttcaatcttcggtatggccggattcaatgattgaaatttgcgaaaatgcaaatattaatttattatag

SEQ ID NO: 1460 - protein, 340 aa, Clostridium thermocellum ATCC 27405
MVEKIDRLIIPPDYHPTLSVRETEAAIKKIKDFFETALAAELNLSRVSAPLFVRPETGMNDNLNGVERPVSFDVKAIGGNTVEIVHSLAKWKRMALAKYGFKVGEGLYTDMNAIRRDEDLDNLHSIYVDQWDWELVINKEDRNEETLKNIVKKIYNVLKKTEDFIAEQYPQIPKFLPEDIFFITTQELEDMYPELSPKEREDAIAKEKKAIFLMKIGGVLKSGKKHDGRAPDYDDWTLNGDIILWYPLLERSFEISSMGIRVDENSLLSQLKEAGCEERKEMKFHKDLLQGKLPYTIGGGIGQSRICMYFLKKAHIGEVQSSVWPDSMIEICENANINLL

SEQ ID NO: 1461 - DNA, 1011 bp, Clostridium difficile 630
  CDS (1)..(1011): transl_table=11
gtgaatgatatgagcacaataataccaaaggattataaaagtagtttgaacgtaattgatacacaaatagctataaaaaaattaaaagatttttttgaaatgagactaagtaatgaattaaatcttataagagtttcttctccgttatttgtattgccagaaacaggtgcaaatgataatttaaatggagaaaaggctgtaagctttgatataccatttatgaataaaaatgcagaaattgttcaatcacttgcaaaatggaaaagattagcccttaaaaaatatgggtttgaagttggtagtggtttatatacagatatgaatgcaataagaaaaaatgaagaattagacaatatacattctctttatgtagaccaatgggattgggaattggttatagataaaagtagtagaaatgaaaagactctaaaagatgttgtaaaaagattgtatggagtatttaaagatactgaaatttttgtatgtagtatgtatgaaggtataaaagaaatattaccagaagaaataacttttataacatcacaagagttagaagatatgtatccagaattatcaccaaaggaaagagaagataaaattgtaaaagagaagaaagcagtatttataactcaaataggaaaaacattaatatcaggagaaaaacatgatggaagaagtcctgattatgatgattgggaattgaatggggatatattattttacaatcctgttttagattcagcattagaattatcttcaatgggaattagagttgatgaagaatctcttgatagacaattgaaacttgctggatgtgaagagagaaaagagtttgactatcataagatgcttttaaatggcgaacttccgtatacaattggtggaggaattggtcagtcaagaatatgtatgtatttcttacaaaaagctcatataggagaagtacaagttggagtatggccacaggatatgattcaaaattgtagtagtgcaggaattgaattattataa

SEQ ID NO: 1462 - protein, 336 aa, Clostridium difficile 630
MNDMSTIIPKDYKSSLNVIDTQIAIKKLKDFFEMRLSNELNLIRVSSPLFVLPETGANDNLNGEKAVSFDIPFMNKNAEIVQSLAKWKRLALKKYGFEVGSGLYTDMNAIRKNEELDNIHSLYVDQWDWELVIDKSSRNEKTLKDVVKRLYGVFKDTEIFVCSMYEGIKEILPEEITFITSQELEDMYPELSPKEREDKIVKEKKAVFITQIGKTLISGEKHDGRSPDYDDWELNGDILFYNPVLDSALELSSMGIRVDEESLDRQLKLAGCEERKEFDYHKMLLNGELPYTIGGGIGQSRICMYFLQKAHIGEVQVGVWPQDMIQNCSSAGIELL

SEQ ID NO: 1463 - DNA, 1053 bp, Salmonella enterica subsp. arizonae serovar 62:z4,z23:--
  CDS (1)..(1053): transl_table=11
ttgaatagtgacctcattttgttgcttaatcataggcaacaggacgcaggagtaaaaataatgaaaaccgcttacattgccaaacaacgccaaattagcttcgttaaatcacatttctctcgccaactcgaggagcgtctgggactgattgaagtccaggctcctatcctgagtcgggtaggagatggcacgcaggataatttgtccggctgtgaaaaagcggtacaggtaaaagtgaaagcgttgcctgacgcccagttcgaagtcgtgcattcactggcgaagtggaaacgtcaaaccctggggcaacatgacttcagcgcgggcgaagggctctacacgcacatgaaagcccttcgccccgatgaagaccgtctctctccgctccactcggtctatgttgatcaatgggactgggagcgtgtcatgggcgacggcgagcgccaattctccaccctgaaaagcacggtagaggcgatctgggcgggaattaaagcgacggaagcggaagtgcataaacagtttggtctggcgccgttcctgccggagaggatccactttgttcatagtcaggatctgttgtcacgctatcccgatctcgatgccaaaggtcgtgaacgtgcgatagtgaaagcgttaggcgcggtatttctggttgggattggcggcacgcttagcgatggcaaacgtcatgacgttcgcgcgccggactatgacgactggagctccgcatctgagctgggctacgccggtctgaacggcgatatcctggtgtggaacccggtgctggaagatgcgtttgagctttcgtctatggggatccgcgtggatgctgatacgctgatgcgtcagcttcagcttaccggtgacgaagatcgcctacagcttgagtggcaccaggcgctgttgcgcggcgaaatgccgcagaccatcggcggcgggattggccagtcgcgtctgaccatgttgctgctgcaattgccgcatattggtcaggtgcagtgcggcgtatggcccgcacaggttcgggaaagcattcctgctattttataa

SEQ ID NO: 1464 - protein, 350 aa, Salmonella enterica subsp. arizonae serovar 62:z4,z23:--
MNSDLILLLNHRQQDAGVKIMKTAYIAKQRQISFVKSHFSRQLEERLGLIEVQAPILSRVGDGTQDNLSGCEKAVQVKVKALPDAQFEVVHSLAKWKRQTLGQHDFSAGEGLYTHMKALRPDEDRLSPLHSVYVDQWDWERVMGDGERQFSTLKSTVEAIWAGIKATEAEVHKQFGLAPFLPERIHFVHSQDLLSRYPDLDAKGRERAIVKALGAVFLVGIGGTLSDGKRHDVRAPDYDDWSSASELGYAGLNGDILVWNPVLEDAFELSSMGIRVDADTLMRQLQLTGDEDRLQLEWHQALLRGEMPQTIGGGIGQSRLTMLLLQLPHIGQVQCGVWPAQVRESIPAIL

SEQ ID NO: 1465 - DNA, 975 bp, Exiguobacterium sibiricum 255-15
  CDS (1)..(975): transl_table=11
atgacaacactcgtatcgatgaaacagacacaggaagctatcacacttgtaaaaaaacgctttgaggagcaattctcagcccaactcggattgacacgcgtcgaagcaccgttattcgtcgaaagcacactcggagtcaacgatcacctgaacggaactgaacgcgtcatccgctttgatgcgattgatcatcaggcagaactcgaaatcgttcaatcgcttgcgaagtggaaacgccaggcactccacacatacggattcgcaaaaggcgaaggcttgtacacattgatgcatgccatccgccgcgacgaagtattggatgaaacgcattcgatccatgtcgatcagtgggactgggaacgtgtgatttcaaaagaagagcggacaatcgactacttgcagaaaacggtgcaagcgatttacgcatcgattcgtcaagtggaacgtgaagtcgaagaacagctcgcgattgaagcgatcttaccggaaacgatccatttcatgacgacacaggaactggaagatgcgtacccgacgctttcgacgaaagagcgtgagacggaagtgactaaagaatacggggctgtcttcttgatgcaaatcggtggagccttagcgtccggagaaaaacatgacggccgagcggctgactacgatgactggacactcaacggcgatattctagtccatcatccggaaatcggtgcatttgaactttcatcgatgggcattcgtgtcgaccgtgaaacgttactcgcacaaatcgagacgacaggcgagcatgcgaaactcgatttcccgttccatcaaggggtactggcagaaacacttccactgacaatcggcggcggaatcggacaatcccggatggcgatgttcctcttgaagaaacgtcacatcggtgaagttcaggcgtcggtctggtcggaagaaacacgcgcgtcgtaccgtgagcaaggtgtgcacctgctgtaa

SEQ ID NO: 1466 - protein, 324 aa, Exiguobacterium sibiricum 255-15
MTTLVSMKQTQEAITLVKKRFEEQFSAQLGLTRVEAPLFVESTLGVNDHLNGTERVIRFDAIDHQAELEIVQSLAKWKRQALHTYGFAKGEGLYTLMHAIRRDEVLDETHSIHVDQWDWERVISKEERTIDYLQKTVQAIYASIRQVEREVEEQLAIEAILPETIHFMTTQELEDAYPTLSTKERETEVTKEYGAVFLMQIGGALASGEKHDGRAADYDDWTLNGDILVHHPEIGAFELSSMGIRVDRETLLAQIETTGEHAKLDFPFHQGVLAETLPLTIGGGIGQSRMAMFLLKKRHIGEVQASVWSEETRASYREQGVHLL

SEQ ID NO: 1467 - DNA, 1140 bp, Acidobacteria bacterium Ellin345
  CDS (1)..(1140): transl_table=11
atggcaacaacgctatcgaaggtggcagatctcgcagggcccggcatcggcaactataccgaactcgaaaagatcctgcccaaggactatcactcactgctcgatcgcaaacaaacccagaaggcgatctatgcggtgaagacgtacattgaagagcacctctgccaggaattgaacctgattatgacgtccgtgccgctgattgtggatatggagagtggcgtgaacgactatctcgatcgcgacggatcgaggacgccaatcaccttccacatcccgaacgatcatgacgtgcacccaatcgacgcacaggtggtgcaggccgcgaccaagtggaagagaatggcgctcaaacagttcgatatgaagcccggcgaagggctttgcaccgacatgcatgcggtgcgcaaggactatttcctcgatcacgaccacagcgtgtacgtggaccagtgggactgggagcggacaattacggcccagcagcgcagcctcgaattcctgaagacgattgtcagcaagatttggacggtgattgtcggagcggagcggttcgcgctgaacaaattcccggaactgaatgatccacgctgtcccaagctaccggagaagctgaccttcctgcatgcggaagacattctcgagatgtatccggacctgccgcggaaacagcgcgagacgatgatcctgcaaaaatatccggcggtgttcattatcgggattggatggacgctgaaggatggctatccgcatgaaatgcgcgcggcggattatgacgactgggtcaccgagacagagtcggccgagggcaagatgatgcacggcctgaacggtgacatcctggtctggaacccggtaacgaagcgtcggcacgagctgtcgtccatgggcatccgggtgaatgcggagacgctgaaacagcaactgaaggcgacgaaccaggagcactttctgaacttcccatatcacaaggcgattctggacggcacgattccgctcagcattggcggcggtattgggcagtcacggacgttgatgcagattttgcggaaggcacatcttggcgaagtgacggtatcggtgtggccgaagatcctgaaggagatttgcgcgaagaagaatattttcgttttggagtaa

SEQ ID NO: 1468 - protein, 379 aa, Acidobacteria bacterium Ellin345
MATTLSKVADLAGPGIGNYTELEKILPKDYHSLLDRKQTQKAIYAVKTYIEEHLCQELNLIMTSVPLIVDMESGVNDYLDRDGSRTPITFHIPNDHDVHPIDAQVVQAATKWKRMALKQFDMKPGEGLCTDMHAVRKDYFLDHDHSVYVDQWDWERTITAQQRSLEFLKTIVSKIWTVIVGAERFALNKFPELNDPRCPKLPEKLTFLHAEDILEMYPDLPRKQRETMILQKYPAVFIIGIGWTLKDGYPHEMRAADYDDWVTETESAEGKMMHGLNGDILVWNPVTKRRHELSSMGIRVNAETLKQQLKATNQEHFLNFPYHKAILDGTIPLSIGGGIGQSRTLMQILRKAHLGEVTVSVWPKILKEICAKKNIFVLE

SEQ ID NO: 1469 - DNA, 1002 bp, Haemophilus somnus 129PT
  CDS (1)..(1002): transl_table=11
atgtatgtcatgaaaaaatcatttattttacaacaacaagaaattagttttgctaaaaacacttttacagaaaaattaatcgaacatttaggcatcattgaagtgcaaggacctatcttaagtcaagtgggaaatggtattcaagataatctttcaggtacagagaaagcggttcaagtaaatgtgaaacagatcactgatgccaaatttgaagtggtgcattcattggcaaaatggaaacgtcatacattagctcgttttaactttgcagagaatgaaggcttatttgtacatatgaaagcattacgtcccgatgaagatagtctggatcaaacccactctgtttatgttgatcaatgggattgggaaaaagttattccaacgggacgtcgtaaccttgcttatttaaaagaaactgtacgttcaatttatcaagctattttggaaacggaagatgcagtacaccaaaaatttgggttgagtaaatttttacctagagagattacttttatacacagtgaggaacttgttcaacgttatcctgaattgaacgataaacaacgtgaaaatgcgatttgcaaagaatatggtgcagtattcttaataggaattgggggagtattatcagatggcaaaccacatgataagcgtgcacctgattatgatgactggacaacaccgtctgaaggtgagtatttaggtttgaatggcgatattcttgtttggaatcctgtattggagcgtgcatttgaagtatcttctatgggcattcgtgtagatgaaaccgcattacgtaaacaactggcattaaccggtgatgaagatcggttgcaatttgactggcatcaagatcttgtcaacggacgtttaccgctttctattggtggtgggattggtcaatctcgcttggcgatgttgcttttacagaaaaaacatattggcgaagtgcaatcaagtgtttggccaaaagttgttacagaacagtttgaaaacattctgtag

SEQ ID NO: 1470 - protein, 333 aa, Haemophilus somnus 129PT
MYVMKKSFILQQQEISFAKNTFTEKLIEHLGIIEVQGPILSQVGNGIQDNLSGTEKAVQVNVKQITDAKFEVVHSLAKWKRHTLARFNFAENEGLFVHMKALRPDEDSLDQTHSVYVDQWDWEKVIPTGRRNLAYLKETVRSIYQAILETEDAVHQKFGLSKFLPREITFIHSEELVQRYPELNDKQRENAICKEYGAVFLIGIGGVLSDGKPHDKRAPDYDDWTTPSEGEYLGLNGDILVWNPVLERAFEVSSMGIRVDETALRKQLALTGDEDRLQFDWHQDLVNGRLPLSIGGGIGQSRLAMLLLQKKHIGEVQSSVWPKVVTEQFENIL

SEQ ID NO: 1471 - DNA, 1131 bp, Solibacter usitatus Ellin6076
  CDS (1)..(1131): transl_table=11
atgctcgacaagaaagcggacctggccggtcccggcattggcgactatgaggaactggagaaaatcctgccccaggattactcctccctgctctccatcagggacacccagcgcgccatcttcgcaggaaagaactttatcgaggagcacctttgtcaggcgctcaacctcatgatggtcaccgtaccgctcgtcgtggataccgagagcgggttgaacgacctattggatcgcgacggctcccgtactccgatccagttccacatcgccaacgatcacgacaagcatcccatcgacgcgcagatcgtgcaggccgccaccaagtggaaacgcctcgccctgcagcgcttcggcatgaaggcgggcgaaggcctctgcaccgatatgcgcgccatccgcaaggactattttctcgaccacgaccacagcgcttatgttgaccagtgggattgggagaaggtcattcatttctacgaacacgacctcgactttttgaagcaggcggtcaacgcaatttggaaggtgctggtcgatgctgaaagctacctgcagaaggagttccccgcgctcaaggattcgcggtatccgaacctgccgcgcaaactcacgttccttcatgccgaagacgtgctcgacatgtaccccgacctgccgcgcaagcaacgcgagacaagattgctacaggagtgtcccgccgtcttcctgatcggcatcggctggacgctgaaggatggctatccgcacgaaatgcgcgccgccgattacgacgattggtgcaccgagacgcgctccatcgacggccgcccctgccacggtctcaatggcgacattttggtgtggaatcacgtgacccggcgccgccatgagctgagctcgatgggcattcgcgtgaacgcggagacgctgcagaagcagttgcgcattaccaatcaactggacttcctgcggtatccgtatcaccaggccgtggttcgccatgaactgccggtttccatcggcggcggcatcggccaatcgcgcaccttgatgctcctgctgcggaaagcgcacttgggcgaagtcaccgtgagtgtatggccgaagatcctcaaggagatctgcgcggcgaagaatattcacgtactcgagtaa

SEQ ID NO: 1472 - protein, 376 aa, Solibacter usitatus Ellin6076
MLDKKADLAGPGIGDYEELEKILPQDYSSLLSIRDTQRAIFAGKNFIEEHLCQALNLMMVTVPLVVDTESGLNDLLDRDGSRTPIQFHIANDHDKHPIDAQIVQAATKWKRLALQRFGMKAGEGLCTDMRAIRKDYFLDHDHSAYVDQWDWEKVIHFYEHDLDFLKQAVNAIWKVLVDAESYLQKEFPALKDSRYPNLPRKLTFLHAEDVLDMYPDLPRKQRETRLLQECPAVFLIGIGWTLKDGYPHEMRAADYDDWCTETRSIDGRPCHGLNGDILVWNHVTRRRHELSSMGIRVNAETLQKQLRITNQLDFLRYPYHQAVVRHELPVSIGGGIGQSRTLMLLLRKAHLGEVTVSVWPKILKEICAAKNIHVLE

SEQ ID NO: 1473 - DNA, 984 bp, Fusobacterium nucleatum subsp. vincentii ATCC 49256
  CDS (1)..(984): transl_table=11
atggcttacatttcaagtttagatattttagaaacagaaattgctattaaaaaagttaaagatttttttgaaagtcgtcttgcaaaagaattagatttattaagagtttcagcaccactatttgttattccagaatctggattaaatgacaatttgaatggaacagaaagaccagtatcttttgatactaaaagtggagaaagagttgagatagttcattcacttgcaaaatggaaaagaatggcattgtatagatataatattgaaaatcataaaggtatctacacagatatgaatgctattagaagagatgaagatacagattttattcattcttactatgttgaccaatgggattgggaaaaaataatttctaaggaagatagaaatgaagaatatttaaaagaaacagttagaaaaatttattgtgtatttaaagaaacagaagaatatattactactgaatatccaaaacttactaaaaagttgccagaagaaataacttttataacttcacaagaacttgaaaataaatatcctaacttaactcctaaaaatagagaacatgctgctgcaaaagagtatggagctatatttttgatgaagataggtgggaaattatcttctggtgaaaaacatgatggtagagcacctgactatgatgattgggacttgaatggagatataatatttaactatccacttttaggaataggacttgaattatcttctatgggaataagagttgatgaaaagtcattagatgagcaattaaaaattgctaattgcgaagatagacgatctttaccatatcatcaaatgatattaaataaagttctaccttataccataggtggaggaataggacaatctcgtatatgtatgttcttcttagataaattacatataggagaagtacaagcatctatatggtcacaagaagttcatgaaatttgtagacaaatgaatattaaattattataa

SEQ ID NO: 1474 - protein, 327 aa, Fusobacterium nucleatum subsp. vincentii ATCC 49256
MAYISSLDILETEIAIKKVKDFFESRLAKELDLLRVSAPLFVIPESGLNDNLNGTERPVSFDTKSGERVEIVHSLAKWKRMALYRYNIENHKGIYTDMNAIRRDEDTDFIHSYYVDQWDWEKIISKEDRNEEYLKETVRKIYCVFKETEEYITTEYPKLTKKLPEEITFITSQELENKYPNLTPKNREHAAAKEYGAIFLMKIGGKLSSGEKHDGRAPDYDDWDLNGDIIFNYPLLGIGLELSSMGIRVDEKSLDEQLKIANCEDRRSLPYHQMILNKVLPYTIGGGIGQSRICMFFLDKLHIGEVQASIWSQEVHEICRQMNIKLL

SEQ ID NO: 1475 - DNA, 984 bp, Bacillus cereus G9241
  CDS (1)..(984): transl_table=11
atgtatcaatcattaatgacagtaagagagactcaaatcgcaattaaggaagttaaaacattttttgaggatcaattagcaaaacgccttgaactattccgcgtatctgcaccattattcgtaacgaaaaaatcaggattaaacgatcatctaaacggtgtagaacgtccaattgaatttgatatgttacattcaggagaagaattagaaattgttcactcactagcgaagtggaaacgatttgcactgcatgaatatggatatgaagctggtgaaggtttatatactaacatgaacgcgattcgtcgtgatgaagaacttgatgcaacacattctatttacgttgaccaatgggattgggaaaaaatcgttcaaaaagaatggcgtactgtagattacttacaaaaaacagtactaacaatttatggaatattcaaagatttagaaaatcatttatttgaaaaatatccgttccttgggaagtatttaccagaagaaattgtgttcgttacttctcaagaactagaagataaatatccagaattaacaccgaaagatcgtgaacatgcaattgcaaaagaacacggtgcagtcttcattatcggaattggtgatgcacttcgttcaggtgaaaagcatgatggacgcgcagctgattatgatgattggaaattaaacggtgatattttattctggcacccagtactacaatcttcattcgaattatcatcaatgggaattcgtgttgatagtaaatcacttgatgagcagttaacaaaaacaggtgaagactttaaacgtgagtacgatttccataaaggtattttagaagacgtactaccattaacaattggcggtggtatcggacaatcaagaatgtgcatgtacttcttacgtaaagcacatattggtgaagttcaatcttctgtatggcctgatgatttacgtgaagcttgcaagaaagaaaacattcatctgttttaa

SEQ ID NO: 1476 - protein, 327 aa, Bacillus cereus G9241
MYQSLMTVRETQIAIKEVKTFFEDQLAKRLELFRVSAPLFVTKKSGLNDHLNGVERPIEFDMLHSGEELEIVHSLAKWKRFALHEYGYEAGEGLYTNMNAIRRDEELDATHSIYVDQWDWEKIVQKEWRTVDYLQKTVLTIYGIFKDLENHLFEKYPFLGKYLPEEIVFVTSQELEDKYPELTPKDREHAIAKEHGAVFIIGIGDALRSGEKHDGRAADYDDWKLNGDILFWHPVLQSSFELSSMGIRVDSKSLDEQLTKTGEDFKREYDFHKGILEDVLPLTIGGGIGQSRMCMYFLRKAHIGEVQSSVWPDDLREACKKENIHLF

SEQ ID NO: 1477 - DNA, 969 bp, Bacillus anthracis str. A2012
  CDS (1)..(969): transl_table=11
atgacagtaagagagactcaaatcgcaattaaggaagttaaaacatttttcgaggatcaattagcaaaacgacttgaactattccgcgtatctgcaccattattcgtaacgaaaaaatcaggattaaacgatcacctaaacggtgtagaacgtccaattgaatttgatatgttacactcaggagaagaattagaaattgtgcactcactagcgaagtggaaacgatttgcactccatgaatatggatatgaagctggtgaaggtttgtatacaaacatgaacgcgatccgtcgtgatgaagaacttgatgcaacacattctatttacgttgaccaatgggattgggaaaaaatcgttcaaaaagaatggcgtactgtagattacttacaaaaaacagtactaacaatttatggaatattcaaagatttagaagaccacttatttgaaaagtatccgttccttgggaagtatttaccagaagaaattgtattcgttacttctcaagaactagaagataaatatccagaattaacaccgaaagatcgtgaacatgcaattgcaaaagaacacggtgcagtcttcattatcggaattggtgatgcacttcgttcaggtgaaaagcatgatggacgcgcagctgattatgatgattggaaattaaacggtgatattttattctggcacccagtactacaatcttcattcgaattatcatcaatgggaattcgtgttgatagtaaatcacttgatgagcagttaacgaaaacaggtgaagacttcaaacgtgagtacgatttccataaagggattttagaagacgtactaccattaacaattggtggtggtatcggacaatcaagaatgtgcatgtacttcttacgtaaagcacatattggtgaagttcaatcttctgtatggcctgatgatttacgtgaagcttgcaagaaagaaaacattcatctattttaa

SEQ ID NO: 1478 - protein, 322 aa, Bacillus anthracis str. A2012
MTVRETQIAIKEVKTFFEDQLAKRLELFRVSAPLFVTKKSGLNDHLNGVERPIEFDMLHSGEELEIVHSLAKWKRFALHEYGYEAGEGLYTNMNAIRRDEELDATHSIYVDQWDWEKIVQKEWRTVDYLQKTVLTIYGIFKDLEDHLFEKYPFLGKYLPEEIVFVTSQELEDKYPELTPKDREHAIAKEHGAVFIIGIGDALRSGEKHDGRAADYDDWKLNGDILFWHPVLQSSFELSSMGIRVDSKSLDEQLTKTGEDFKREYDFHKGILEDVLPLTIGGGIGQSRMCMYFLRKAHIGEVQSSVWPDDLREACKKENIHLF

SEQ ID NO: 1479 - DNA, 996 bp, Pseudoalteromonas tunicata D2
  CDS (1)..(996): transl_table=11
atggcatcacagtatattcagacgcagcagcagatcagtaaagcaaaagcattgtttgcaacgcaactcgaaagcaaattagggcttattgaagttcaagcgccgcttttggctcaagtagggaatggtattcaagataacttaagtggtcatgagcaagcggtagcagtaaaaataaaaaccatgccagatgcgcaatatgaagtggtgcattcactggcaaaatggaaacgtaaaacgttggccgatcatggtttttcagttggtgaagggctttacaccaatatgaaagcactgcgcccagatgaagataaactaactccaattcattcggtgtatgttgatcagtgggattgggaaaaagtaatttgcattgaaactgaacgtagtttgagcttcttaaaaaccacagttgaaacgatttatcagtcaatcaaggcaaccgaattacagctcgcaactttatatggcttaacgccttttttaccacaacacattcaatttgtgcatgctgaacagttagcgcgtgattacccagcacttagtggcaaagaaagagagcaaaaagtagcgaaagaatttggtgcggtgtttttaattggcattggtgggcagcttagtgatggtgctattcatgatgtacgtgcccctgattatgatgattggtctacggcaacatgtgagcaattttccggtttaaacggtgatattttggtttggaacccaattttgaatgatgtatttgaaatttcatcaatgggtattcgagttgatgcaaaagcgcttcagcatcagctggcaattaccggagatgaagaccgcttagcgtttgcttggcaccagcaattattagcagataaattaccgcaaacgatcggggggggcattggtcaatcgcggttagtgatgctgttgctacaaaagcagcatattggtgaagtgcaagtcggtatttggcctgatgaagtattagcgcactacagcgctatattataa

SEQ ID NO: 1480 - protein, 331 aa, Pseudoalteromonas tunicata D2
MASQYIQTQQQISKAKALFATQLESKLGLIEVQAPLLAQVGNGIQDNLSGHEQAVAVKIKTMPDAQYEVVHSLAKWKRKTLADHGFSVGEGLYTNMKALRPDEDKLTPIHSVYVDQWDWEKVICIETERSLSFLKTTVETIYQSIKATELQLATLYGLTPFLPQHIQFVHAEQLARDYPALSGKEREQKVAKEFGAVFLIGIGGQLSDGAIHDVRAPDYDDWSTATCEQFSGLNGDILVWNPILNDVFEISSMGIRVDAKALQHQLAITGDEDRLAFAWHQQLLADKLPQTIGGGIGQSRLVMLLLQKQHIGEVQVGIWPDEVLAHYSAIL

SEQ ID NO: 1481 - DNA, 996 bp, Alteromonadales bacterium TW-7
  CDS (1)..(996): transl_table=11
atgagttcacactatgtgcagcagcagttgcaaataagcagcgtaaagcaatttttttcacggcaattggaaaaacagttagggctagtagaagtgcaggcacctattcttgcaaaagtaggtgatggcacacaagataatttaagcggtcatgaaaacgctgtagcagtaaatgtaaaagcgattgccgatagccaatacgaagttgtgcattcgctagcaaagtggaaacgtaaaacgttaggtgagtatggatttagtaaaggtgaaggcctttacactcaaatgaaggcactgcgccctgatgaagagtcgctaagtcctatccactcggtttacgttgatcagtgggattgggaaaaggtaatttgtgaatcaacagaacgttctttaactaccctcaaacgtacagttgaatcaatttataaaggcataaaagaaacagagcaatttgttagcgaacacttttcgcttgatccttttttaccaagtgatattcaatttgtgcacagtgaagagcttcgtaaaatataccctgaccttacggctaaaaatcgcgaaaaagcaatagcaaaaaaatatggtgctgtatttttaattgggattggcggtcaattaggcgatggtcaaattcacgatgtaagagcgcctgattatgacgattggtctacaccaacgagcgaacaatatatagggcttaatggtgatattttagtatggaatccaatacttgaagattcctttgagatatcttcaatggggattcgtgtaagccccgaggtactaaaaactcagttgaggattacaggagatgatgaccgcctgcaattggattggcataaggcattattaaaaagtcagtttccacaaactattggtggaggtattgggcaatcacgtttggctatgttattgctgcaaaagggacatattggacaagttcaagttggagtatggtcaacacaaacacatgcaagtgttgacggtatactctaa

SEQ ID NO: 1482 - protein, 331 aa, Alteromonadales bacterium TW-7
MSSHYVQQQLQISSVKQFFSRQLEKQLGLVEVQAPILAKVGDGTQDNLSGHENAVAVNVKAIADSQYEVVHSLAKWKRKTLGEYGFSKGEGLYTQMKALRPDEESLSPIHSVYVDQWDWEKVICESTERSLTTLKRTVESIYKGIKETEQFVSEHFSLDPFLPSDIQFVHSEELRKIYPDLTAKNREKAIAKKYGAVFLIGIGGQLGDGQIHDVRAPDYDDWSTPTSEQYIGLNGDILVWNPILEDSFEISSMGIRVSPEVLKTQLRITGDDDRLQLDWHKALLKSQFPQTIGGGIGQSRLAMLLLQKGHIGQVQVGVWSTQTHASVDGIL

SEQ ID NO: 1483 - DNA, 984 bp, Bacillus cereus
  CDS (1)..(984): transl_table=11
atgtatcaatcattaatgacagtaagagagactcaaatcgcaattaaggaagttaaaacatttttcgaggatcaattagcaaaacgacttgaactattccgtgtatctgcaccattattcgtaacgaaaagatcaggactaaacgatcatctaaacggtgtagaacgtccaattgaatttgatatgttacactcaggagaagaattagaaattgtacactcactagcgaagtggaaacgatttgcactgcatgaatatggatatgaagctggtgaagggttatatacaaacatgaacgcgatccgtcgtgatgaagaacttgatgcaacacattctatttacgttgaccaatgggattgggaaaaaatcgttcaaaaagaatggcgtactgtagattacttacaaaaaacagtattaacaatttatggaatattcaaagatttagaagaccacttatttgaaaaatatccgttccttgggaagtatttaccagaagaaattgtgttcgttacttctcaagaactagaagataaatatccagaattaacaccgaaagatcgtgaacatgcaattgcaaaagagcacggtgcagtcttcattatcggaattggtgatgcacttcgttcaggtgaaaagcatgatggacgcgcagctgattatgatgattggaaattaaacggtgacatcttattctggcacccagtactacaatcttcatttgaattatcatcaatgggaattcgtgttgatagtaaatcacttgatgagcagttaacgaaaacaggtgaagacttcaaacgtgagtacgatttccataaaggtattttagaagacgtactcccattaacaattggcggtggtatcggacaatcaagaatgtgcatgtacttcttacgtaaagcacatatcggtgaagttcaatcttctgtatggcctgatgatttacgtgaagcttgcaagaaagaaaacattcatctgttttaa

SEQ ID NO: 1484 - protein, 327 aa, Bacillus cereus
MYQSLMTVRETQIAIKEVKTFFEDQLAKRLELFRVSAPLFVTKRSGLNDHLNGVERPIEFDMLHSGEELEIVHSLAKWKRFALHEYGYEAGEGLYTNMNAIRRDEELDATHSIYVDQWDWEKIVQKEWRTVDYLQKTVLTIYGIFKDLEDHLFEKYPFLGKYLPEEIVFVTSQELEDKYPELTPKDREHAIAKEHGAVFIIGIGDALRSGEKHDGRAADYDDWKLNGDILFWHPVLQSSFELSSMGIRVDSKSLDEQLTKTGEDFKREYDFHKGILEDVLPLTIGGGIGQSRMCMYFLRKAHIGEVQSSVWPDDLREACKKENIHLF

SEQ ID NO: 1485 - DNA, 984 bp, Bacillus cereus
  CDS (1)..(984): transl_table=11
atgtatcaatcattaatgacagtaagagagactcaaattgcaattaaggaagttaaaacatttttcgaggaccaattagcaaaacgccttgaactattccgcgtatctgcaccattattcgtaacgaaaaaatcaggattaaacgatcacctaaacggtgtagaacgtccaattgaatttgatatgttacattcaggagaagaattagaaattgttcattcactagcgaaatggaaacgatttgcattacatgaatacggatatgaagctggtgaaggtttatatacaaacatgaacgcgattcgtcgtgatgaagaacttgatgcaacgcattccatttatgttgaccaatgggattgggaaaaaatcgttcaaaaagaatggcgtactgttgaatacttacaaaaaacagtacaaacaatttatggaatattcaaagatttagaagatcacttatttgaaaaatatccgttccttggaaagtatttaccggaagaaattgttttcgttacttctcaagaattagaagataaatatccagaattaacaccgaaagatcgtgaacatgcaattgcaaaagaacacggtgcagtcttcattatcggaattggtgatgcacttcgttcaggtgaaaagcatgacggacgcgcagctgattatgacgattggaaattaaacggtgacattttattctggcacccagtactacaatcttcatttgagttatcatcaatgggaattcgtgttgatagtaaatcacttgatgagcagttaacgaaaactggtgaagacttcaaacgtgagtatgatttccataaaggtatactagaagacgtactaccattaacaattggcggtggcattggacaatcaagaatgtgcatgtacttcttacgtaaagcacatatcggtgaagttcaatcttctgtatggcctgacgatttacgtgaagcttgcaagaaagaaaacattcatctgttttaa

SEQ ID NO: 1486 - protein, 327 aa, Bacillus cereus
MYQSLMTVRETQIAIKEVKTFFEDQLAKRLELFRVSAPLFVTKKSGLNDHLNGVERPIEFDMLHSGEELEIVHSLAKWKRFALHEYGYEAGEGLYTNMNAIRRDEELDATHSIYVDQWDWEKIVQKEWRTVEYLQKTVQTIYGIFKDLEDHLFEKYPFLGKYLPEEIVFVTSQELEDKYPELTPKDREHAIAKEHGAVFIIGIGDALRSGEKHDGRAADYDDWKLNGDILFWHPVLQSSFELSSMGIRVDSKSLDEQLTKTGEDFKREYDFHKGILEDVLPLTIGGGIGQSRMCMYFLRKAHIGEVQSSVWPDDLREACKKENIHLF

SEQ ID NO: 1487 - DNA, 1038 bp, Bacteroides fragilis
  CDS (1)..(1038): transl_table=11
atgagttacctaataaaacctcagaattataaacctttgcttgacctgaaacagacagaactgggcatcaaacaaattaaagagttcttccagctgaatctttcttcggagctgcgtctacgccgtgtcacagccccactcttcgtactcaaaggaatgggtatcaatgatgacctgaacggtatagaacgtcctgtctcatttcccatcaaggacctgggcgatgcacaagcggaagtagtacactcactcgctaaatggaagcgcctgaccttggcagattatcacattgaaccgggttatggtatttatacggacatgaatgccatccgctcggacgaagaactgggcaatctgcattcactttatgtagaccagtgggactgggaacgggtaattactgccgaagaccgtaatgccgacttcttaaaagagatcgtaaaccgcatttatgccgctatgatccgtacggaatatatggtgtacgaaatgtacccgcaaatcaaaccttgcctgccacagaagttgcactttatccattcggaagaattacgccagttgtatcccgatatggaacctaaatgccgcgaacatgccatctgtaaaaagtatggagccgtatttatcatcggcatcggttgcaagctgagtgatggcaagaaacatgacggacgcgccccggactatgacgactataccagcaaagggttgaacgacctacccggactgaatggtgacctgttgctctgggacgatgtgctgcaacgctccattgagttgtcctcaatgggtatccgtgtagacaaagaggctcttttacgccaggtgaagcaagagaatcaggaacaaagactggaactctatttccataaaagattattgaatgatacgcttccactctctatcggcggcggtatcggacaatcacgcttgtgcatgttctacttacgcaaagctcatatcggcgagattcaggcaagtatctggccagaagaaatgcgtcgtgaatgtacagcccttaatatacaccttatttaa

SEQ ID NO: 1488 - protein, 345 aa, Bacteroides fragilis
MSYLIKPQNYKPLLDLKQTELGIKQIKEFFQLNLSSELRLRRVTAPLFVLKGMGINDDLNGIERPVSFPIKDLGDAQAEVVHSLAKWKRLTLADYHIEPGYGIYTDMNAIRSDEELGNLHSLYVDQWDWERVITAEDRNADFLKEIVNRIYAAMIRTEYMVYEMYPQIKPCLPQKLHFIHSEELRQLYPDMEPKCREHAICKKYGAVFIIGIGCKLSDGKKHDGRAPDYDDYTSKGLNDLPGLNGDLLLWDDVLQRSIELSSMGIRVDKEALLRQVKQENQEQRLELYFHKRLLNDTLPLSIGGGIGQSRLCMFYLRKAHIGEIQASIWPEEMRRECTALNIHLI

SEQ ID NO: 1489 - DNA, 1038 bp, Bacteroides thetaiotaomicron
  CDS (1)..(1038): transl_table=11
atgagttacttgataaaaccaaagaactataaaccgttactcgacttaaaacaaacagagttgggaatcaaacaaataaaagagttcttccagttaaacttgtcatccgaattacgcctcagacgcgtgacagcccctcttttcgtattgaaagggatgggtatcaatgacgatttgaatggtatagaacgtcccgtttcattccctatcaaggatttaggtgacgcacaagcagaagtcgttcattcattagccaaatggaaaagattaactctcgccgattacaatatcgaaccgggatacggtatctataccgacatgaacgccatccgttctgatgaagaactcggaaacctccattcgctctatgtagaccaatgggactgggaacgtgtcatcaccaacgaggacagaaacgtagaattcctgaaagagatcgtaaatcgtatctacgctgccatgatccgtacagaatacatggtatatgaaatgtatccgcagatcaaaccttgtctgccccagaaattacattttatccattcggaagaactacgccaactctatccgaacctggaacccaaatgccgcgagcatgccatctgccaaaaatacggtgccgtatttatcatcggtatcggttgcaagctaagcgacggcaaaaaacatgacggacgtgcaccggactatgatgactacacatccaccggcctgaacaacctgcccggactgaacggtgaccttttactttgggatgatgtactgcaacgctccatcgaactatcctctatgggtgttcgtgtagacagagaagcgctacaacgccagctcaaagaagaaaacgaagaagagagactgaaactttatttccacaaacgattaatggacgacacacttccactatctatcggtggcggtatcggtcaatcccgtttgtgtatgttctaccttcgcaaagctcatatcggagaaatacaagccagcatctggccggaagatatgcgcaaagaatgtgaggaacttgatatacaccttatataa

SEQ ID NO: 1490 - protein, 345 aa, Bacteroides thetaiotaomicron
MSYLIKPKNYKPLLDLKQTELGIKQIKEFFQLNLSSELRLRRVTAPLFVLKGMGINDDLNGIERPVSFPIKDLGDAQAEVVHSLAKWKRLTLADYNIEPGYGIYTDMNAIRSDEELGNLHSLYVDQWDWERVITNEDRNVEFLKEIVNRIYAAMIRTEYMVYEMYPQIKPCLPQKLHFIHSEELRQLYPNLEPKCREHAICQKYGAVFIIGIGCKLSDGKKHDGRAPDYDDYTSTGLNNLPGLNGDLLLWDDVLQRSIELSSMGVRVDREALQRQLKEENEEERLKLYFHKRLMDDTLPLSIGGGIGQSRLCMFYLRKAHIGEIQASIWPEDMRKECEELDIHLI

SEQ ID NO: 1491 - DNA, 1011 bp, Clostridium perfringens
  CDS (1)..(1011): transl_table=11
atggaaaaattatttataccaaagggctataaacctttattatcacttagagaaacagaagttgctattaaagaacttaaagactttttcgaagattctttagctaaaaacttaaacttaacaagagtttctgctccacttttcgtaaataaaggttcaggattaaatgatgatctaaatggaattgaaagacctgtaagttttgatatgaaagctatgccagagtttaacattcaaatagttcattctctagctaaatggaaaagactagctcttcatagatatgaatttgaacatggtgaaggtctttatactgatatgaacgctataagaagagatgaagatttagataacattcactctatttatgttgaccaatgggattgggaaaaaataatagataaagaagaaagaaacttagaaactttaaaagaaactgtaagatcaatatatggtacttttaaagcaacagaagattttatagtagcaaaataccctcacatagaaaaaattcttcctgaagatataacatttataacatcacaggaattagaagatcgttatccagatcttacttctaaagagagagaaactgctatatgtaaagaatttggcgctgtattcataataggaattggtggaaaattagcttctggtgaaaaacatgatgatagaagtccagactatgatgattggacattaaatggagatttattattctactaccctctatttgatgaggctgtagaactttcatcaatgggaataagagttgatgaggaaagccttttaaaacaattaaaaatagcagaatgtgaggaaagaaaagaactaccattccatcaaatgcttcttgaaggaaaattaccatatactataggtggtggaattggtcaatctagaatatgtatgttcttccttagaaaagctcacattggagaagttcaagcatctatgtgggatgaagatatgataagaacttgtgaagaaaacaacatacatttattataa

SEQ ID NO: 1492 - protein, 336 aa, Clostridium perfringens
MEKLFIPKGYKPLLSLRETEVAIKELKDFFEDSLAKNLNLTRVSAPLFVNKGSGLNDDLNGIERPVSFDMKAMPEFNIQIVHSLAKWKRLALHRYEFEHGEGLYTDMNAIRRDEDLDNIHSIYVDQWDWEKIIDKEERNLETLKETVRSIYGTFKATEDFIVAKYPHIEKILPEDITFITSQELEDRYPDLTSKERETAICKEFGAVFIIGIGGKLASGEKHDDRSPDYDDWTLNGDLLFYYPLFDEAVELSSMGIRVDEESLLKQLKIAECEERKELPFHQMLLEGKLPYTIGGGIGQSRICMFFLRKAHIGEVQASMWDEDMIRTCEENNIHLL

SEQ ID NO: 1493 - DNA, 1011 bp, Clostridium perfringens
  CDS (1)..(1011): transl_table=11
atggaaaaattatttataccaaagggctataaacctttattatcacttagagaaactgaagttgctattaaagaacttaaagactttttcgaagattctttagctaaaaacttaaacttaacaagagtttctgctccacttttcgtaaataaaggttcaggattaaatgatgatctaaatggaattgaaagacctgtaagttttgatatgaaagctatgccagagtttaacattcaaatagttcattctctagctaaatggaaaagactagctcttcatagatatgaatttgaacatggtgaaggtctttacactgatatgaacgctataagaagagatgaagatttagataacattcactctatttatgttgaccaatgggattgggagaaaataatagataaagaagaaagaaatttagaaactttaaaagaaactgtaaaatcaatatatggtacttttaaagcaacagaagattttatagtagcaaaataccctcacatagaaaaaattcttcctgaagatataacatttataacatcacaggaattagaagatcgttatccagatcttacttctaaagagagagaaactgctatatgtaaagaatttggcgctgtattcataataggaattggtggaaaattagcttctggtgaaaaacatgatgatagaagtccagactatgatgattggacattaaatggagatttattattctactaccctctatttgatgaggctgtagaactttcatcaatgggaataagagttgatgaggaaagccttttaaaacaattaaaaatagcagaatgtgaagaaagaaaagaactaccattccatcaaatgcttcttgaaggaaaattaccgtatactataggtggtggaattggtcaatctagaatatgtatgttcttccttagaaaagctcacattggagaagttcaagcatctatgtgggatgaagatatgataagaacttgtgaagaaaacaacatacatttattataa

SEQ ID NO: 1494 - protein, 336 aa, Clostridium perfringens
MEKLFIPKGYKPLLSLRETEVAIKELKDFFEDSLAKNLNLTRVSAPLFVNKGSGLNDDLNGIERPVSFDMKAMPEFNIQIVHSLAKWKRLALHRYEFEHGEGLYTDMNAIRRDEDLDNIHSIYVDQWDWEKIIDKEERNLETLKETVKSIYGTFKATEDFIVAKYPHIEKILPEDITFITSQELEDRYPDLTSKERETAICKEFGAVFIIGIGGKLASGEKHDDRSPDYDDWTLNGDLLFYYPLFDEAVELSSMGIRVDEESLLKQLKIAECEERKELPFHQMLLEGKLPYTIGGGIGQSRICMFFLRKAHIGEVQASMWDEDMIRTCEENNIHLL

SEQ ID NO: 1495 - DNA, 1026 bp, Clostridium tetani
  CDS (1)..(1026): transl_table=11
atggaaatcaaatgtagcgaaagacttataataccaaaagagtataaaactgaattagatttaaaagaaactgctattgcaattaaggaagtgaaggattgttttgaaagagctttagcaaaacagctaaatcttataagagtatcagcacctctttttgtaagatgtgacaagggattaaatgataacttaaatggagtagagagaccagtaaagttcactgtgaaggatgataatgaagcagcagtagaaattgttcattctctagcaaagtggaagagaatggctctttacagatataattttaatgctgacgaaggtctatatacagatatgaatgctataagaagggatgaggaattagataatacacattccatatatgttgaccaatgggattgggagagaataataaaaaaagaagatagaaatgaggaatatttaaaagatatagttagaaaaatatttaaagcttttaaagaaacagaggagcatataaacaaattgtatccatttttaggagaagttttaccagaagaagtattttttatgactactcaagaacttgaggatatgtttccagatcttacagctaaagaaagagaagatgctataactaaagaaaagaaagcagtatttttaatgaaaataggaaaaacattagaatcaggagaaaaacatgatggaagagctccagactatgatgactgggaattaaatggagatatacttttttggaatccagttctaaataaagcttttgaattatcttctatgggaataagggtagatgaagaatcccttttaaaacaattaaaattagctaattgcgaagaaagaaaggaattacaatttcataaaatgcttttagagaaaaaactaccatatacaataggtggtggaataggtcaatctagaatgtgtatgcttttcctaaaaaaagctcatataggagaggttcaatcctcaatatggccagaagaaatgataaagttttgtgaagaaaaaggaatgacaatattataa

SEQ ID NO: 1496 - protein, 341 aa, Clostridium tetani
MEIKCSERLIIPKEYKTELDLKETAIAIKEVKDCFERALAKQLNLIRVSAPLFVRCDKGLNDNLNGVERPVKFTVKDDNEAAVEIVHSLAKWKRMALYRYNFNADEGLYTDMNAIRRDEELDNTHSIYVDQWDWERIIKKEDRNEEYLKDIVRKIFKAFKETEEHINKLYPFLGEVLPEEVFFMTTQELEDMFPDLTAKEREDAITKEKKAVFLMKIGKTLESGEKHDGRAPDYDDWELNGDILFWNPVLNKAFELSSMGIRVDEESLLKQLKLANCEERKELQFHKMLLEKKLPYTIGGGIGQSRMCMLFLKKAHIGEVQSSIWPEEMIKFCEEKGMTIL

SEQ ID NO: 1497 - DNA, 993 bp, Escherichia coli O157
  CDS (1)..(993): transl_table=11
atgaaaaccgcttacattgccaaacaacgccaaattagcttcgtgaaatctcacttttctcgtcaactggaagaacgtctggggctgatcgaagtccaggcgccgattcttagccgtgtgggggatggcacgcaggataacttgtcgggctgtgaaaaagcggtacaggtaaaagtgaaagctctgcctgatgcccagttcgaagtggttcattcactggcgaagtggaaacgtcagaccttagggcaacacgacttcagcgcgggcgaagggctgtacacgcacatgaaagcccttcgccccgatgaagaccgtctttctccgttgcactcggtctatgttgaccagtgggactgggaacgcgtaatgggcgacggtgagcgtcaattctcgactctgaaaagcacggtagaggcgatttgggcgggaattaaagcaaccgaagctgcggttagcgaagagtttggcctggcaccgttcctgccggatcagatccacttcgtacacagccaggagttactgtctcgttatccggatcttgatgccaaagggcgtgagcgggcgatagcgaaagatcttggtgcggtattccttgtcgggattggcggcaagctgagcgatggtcatcgccacgacgtgcgcgcaccggattatgatgactggagcaccccgtcagagctgggccatgcgggtctgaacggcgatattctggtgtggaaccctgtactggaagatgcgtttgagctttcttccatggggatccgcgtggatgccgacacgttgaagcatcagttggcgctgaccggtgatgaagatcgtctgcagctggaatggcatcaggcgttgctgcgcggtgaaatgccgcagaccatcggcggcggtatcggccagtctcgtttgaccatgctgctgctgcaactgccgcatatcggccaggtccagtgtggagtatggccagctgctgttcgcgagagcgtcccttctctgctgtaa

SEQ ID NO: 1498 - protein, 330 aa, Escherichia coli O157
MKTAYIAKQRQISFVKSHFSRQLEERLGLIEVQAPILSRVGDGTQDNLSGCEKAVQVKVKALPDAQFEVVHSLAKWKRQTLGQHDFSAGEGLYTHMKALRPDEDRLSPLHSVYVDQWDWERVMGDGERQFSTLKSTVEAIWAGIKATEAAVSEEFGLAPFLPDQIHFVHSQELLSRYPDLDAKGRERAIAKDLGAVFLVGIGGKLSDGHRHDVRAPDYDDWSTPSELGHAGLNGDILVWNPVLEDAFELSSMGIRVDADTLKHQLALTGDEDRLQLEWHQALLRGEMPQTIGGGIGQSRLTMLLLQLPHIGQVQCGVWPAAVRESVPSLL

SEQ ID NO: 1499 - DNA, 993 bp, Erwinia carotovora subsp
  CDS (1)..(993): transl_table=11
atgaaaaagcagtacatcgaaaagcaacagcaaatcagcttcgttaaatctttcttctccagtcaactggagcagcttctgggattgattgaagtccaggcaccgattctcagccgtatcggcgatggcacacaggataacttgtctggtacagaaaaagcggtgcaggttaaggtaaaagccttaccggatgccacatttgaagtggtgcactcactggcaaaatggaaacgcaaaacgctgggcgcgtatgattttagcttcggtgaaggcatttatactcacatgaaggcgctgcgtccggacgaagatcgcctgagcccgatccactcggtttatgtcgatcagtgggattgggagcgcgtgatggaggatggcgagcgcaatgctgaatatctgaaatcgacggtcacgcgtatttatcaaggcattaaagcgactgaggctgcggtacatcaggcgtttggcattcagcctttcctgccagagcagattcattttgtgcataccgaaaccttgctgaagcgttatcccgatctggacgccaaagggcgtgagcgagctatagctaaagagctgggtgcggtcttcctgattgggattggcggtaagctgtccagcggacactctcacgatgtgcgtgcaccggattatgatgactggacgacaccaggcgagcaggaattggcgggtttgaacggcgatatcgtcgtctggaacccagtcctgaacgatgcgtttgagatttcatccatgggtatccgcgtggacgcagaggcgctaacacgccaactggcactgacgcaggatgaggaacgtctgaagcttgaatggcatcaggcgctgctgcgcggtgagatgccacaaacgatcggtgggggaatcggtcagtctcgcttggtcatgctactgctgcaattgccgcacattggtcaggttcagtgcggtgtatggccacagccgctgcgtgagtcggtttctggcctgctttaa

SEQ ID NO: 1500 - protein, 330 aa, Erwinia carotovora subsp
MKKQYIEKQQQISFVKSFFSSQLEQLLGLIEVQAPILSRIGDGTQDNLSGTEKAVQVKVKALPDATFEVVHSLAKWKRKTLGAYDFSFGEGIYTHMKALRPDEDRLSPIHSVYVDQWDWERVMEDGERNAEYLKSTVTRIYQGIKATEAAVHQAFGIQPFLPEQIHFVHTETLLKRYPDLDAKGRERAIAKELGAVFLIGIGGKLSSGHSHDVRAPDYDDWTTPGEQELAGLNGDIVVWNPVLNDAFEISSMGIRVDAEALTRQLALTQDEERLKLEWHQALLRGEMPQTIGGGIGQSRLVMLLLQLPHIGQVQCGVWPQPLRESVSGLL

SEQ ID NO: 1501 - DNA, 984 bp, Fusobacterium nucleatum subsp
  CDS (1)..(984): transl_table=11
atggcttacatttcaagtctagatattttagaaacagaaattgctattaaaaaagttaaagatttttttgaaagtcatctatcaaaagaattagatttactaagggtttcagcaccattatttgttattccagaatctgggttaaatgataatttgaatggaacagaaagaccagtatcctttgatactaaaagtggagaaagagttgagatagtccattcacttgcaaaatggaaaaggatggcactatacagatacaacattgaaaatgataaaggtatttatacagatatgaatgctatcagaagagatgaggatacagattttattcattcttattatgttgaccaatgggactgggaaaaaataatttctaaggaagatagaaatgaagaatatttaaaagatgtagttagaaaaatttattctgtatttaagaaaacagaagaatatataactactgaatatccaaaacttactaaaaagttaccagaagaaataacttttataactgcacaagaattagaaaataaatatcctaacttaactccaaaaaatagagaacatgctgctgcaaaagagtatggagctatatttttaatgaaaataggtggaaaattatcttctggtgaaaaacatgatggtagagcacctgactatgatgattgggatttaaatggtgatataatatttaattatcctcttttaggaataggtcttgaattatcttctatgggaataagagtagatgaaaaatcgttagatgagcaattaaaaattgctaattgtgaagatagaagatctttaccatatcatcaaatgattttaaataaagttctaccttatacaataggtggaggaataggacaatctcgtatatgtatgtttttcttagataaattacatattggagaagtacaagcatctatatggtcacaagaagttcatgaaatttgtagacaaatgaatattaaattattataa

SEQ ID NO: 1502 - protein, 327 aa, Fusobacterium nucleatum subsp
MAYISSLDILETEIAIKKVKDFFESHLSKELDLLRVSAPLFVIPESGLNDNLNGTERPVSFDTKSGERVEIVHSLAKWKRMALYRYNIENDKGIYTDMNAIRRDEDTDFIHSYYVDQWDWEKIISKEDRNEEYLKDVVRKIYSVFKKTEEYITTEYPKLTKKLPEEITFITAQELENKYPNLTPKNREHAAAKEYGAIFLMKIGGKLSSGEKHDGRAPDYDDWDLNGDIIFNYPLLGIGLELSSMGIRVDEKSLDEQLKIANCEDRRSLPYHQMILNKVLPYTIGGGIGQSRICMFFLDKLHIGEVQASIWSQEVHEICRQMNIKLL

SEQ ID NO: 1503 - DNA, 993 bp, Haemophilus ducreyi
  CDS (1)..(993): transl_table=11
atgaaaaagagctttattttacaacaacaagaaattagttttgttaaaaacacttttacgcaatacctgatcgatcaattagatattattgaagtacaagggccgattttgagccaagtgggcaatggtatgcaagataacttatccggcatcgaaaaagcggtacaggtaaatgtaaaatgcattcctggcgcagtgtttgaagttgtacattcattagccaaatggaaacgccacactttagctcgttttggttttaaacaaggcgaaggtttatttgtacatatgaaagcattgcgtcccgatgaagattctttagacccaacacattctatttatgttgatcaatgggattgggaaaaagtaattcctgaaggccaacgtaactttgcttatttaaaacagactgttaatcaaatttataaagccattcgtttaactgaattagcggttgaagcgcgctttgatatcccatcaagtttgccaaaacaaattacgttcatacatagcgaagaattagcacagcgttatccaaatatgtccagtaaagaacgtgaaaatgcgatttgtaaagaacacggtgcgatctttttaatcggcattggaggtaaattatctgacggtaaagcgcatgatggtcgtgcacctgattatgacgattggacaactgaatctgaaaatggctataaaggtttaaacggcgatattttagtttggaatgaagaattaggctctgcctttgaattatcctcaatgggcattcgtgttgatcaacaagcattacgtttacaagtcagcttaactggtgatgaagatcgattaacgatggattggcatcaagatttattagcgggtcgtttaccgctttctatcggcggtggtattggtcagtcacgtttagtgatgtttctactacataaaaaacacattggtgaagtacaatcaagtgtatggccaactgaaatgcttacccaatttgaaaacattctttaa

SEQ ID NO: 1504 - protein, 330 aa, Haemophilus ducreyi
MKKSFILQQQEISFVKNTFTQYLIDQLDIIEVQGPILSQVGNGMQDNLSGIEKAVQVNVKCIPGAVFEVVHSLAKWKRHTLARFGFKQGEGLFVHMKALRPDEDSLDPTHSIYVDQWDWEKVIPEGQRNFAYLKQTVNQIYKAIRLTELAVEARFDIPSSLPKQITFIHSEELAQRYPNMSSKERENAICKEHGAIFLIGIGGKLSDGKAHDGRAPDYDDWTTESENGYKGLNGDILVWNEELGSAFELSSMGIRVDQQALRLQVSLTGDEDRLTMDWHQDLLAGRLPLSIGGGIGQSRLVMFLLHKKHIGEVQSSVWPTEMLTQFENIL

SEQ ID NO: 1505 - DNA, 993 bp, Haemophilus influenzae
  CDS (1)..(993): transl_table=11
atgaaaaagacatttattttacaacaacaagaaatcagctttgtgaagaacacttttacccaaaatcttattgagcaacttggcattattgaagtgcaaggcccaattttgagccaagtgggtaacggaatgcaagataacttatcaggcattgaaaaagccgtacaggttaatgtgaaatgtattccaaatgccatatttgaagttgtgcattctcttgcgaaatggaaacgccatacattagctcgtttcaactttaaagaagacgaaggcttgtttgttcatatgaaagcattgcgtcccgatgaagattctcttgatccaacgcactctgtttatgtagatcaatgggactgggaaaaagtgattcctgaaggtcgtcgtaattttgcatacttaaaagaaacggtaaattctatttatcgtgctattcgtttaacagaattagccgtagaagcacgttttgatattccttccattcttccaaaacagattacctttgtgcatagcgaagatttagtaaaacgctatccagatttaagcagtaaagagcgtgaaaacgcaatttgtaaagaatacggtgcagtattcttaatcgggattggcggcaaactttcagatggcaaacctcatgatggtcgtgcacctgactatgatgactggacaacagaatctgaaaatggctacaaaggcttaaatggcgacattttggtatggaacgaccaattaggcaaagcctttgaactatcctcaatgggtatccgcgtagatgaaagtgcattacgtttacaagttggcttaacaggcgatgaagaccgtttaaaaatggattggcaccaagatttattaaacgggaaattgccattaactatcggcggtggtatcggtcaatctcgcttagcgatgcttttacttcgtaaaaaacatatcggtgaagtgcaatcaagcgtatggccaaaagaaatgttagaagaattttcaaacattctttaa

SEQ ID NO: 1506 - protein, 330 aa, Haemophilus influenzae
MKKTFILQQQEISFVKNTFTQNLIEQLGIIEVQGPILSQVGNGMQDNLSGIEKAVQVNVKCIPNAIFEVVHSLAKWKRHTLARFNFKEDEGLFVHMKALRPDEDSLDPTHSVYVDQWDWEKVIPEGRRNFAYLKETVNSIYRAIRLTELAVEARFDIPSILPKQITFVHSEDLVKRYPDLSSKERENAICKEYGAVFLIGIGGKLSDGKPHDGRAPDYDDWTTESENGYKGLNGDILVWNDQLGKAFELSSMGIRVDESALRLQVGLTGDEDRLKMDWHQDLLNGKLPLTIGGGIGQSRLAMLLLRKKHIGEVQSSVWPKEMLEEFSNIL

SEQ ID NO: 1507 - DNA, 993 bp, Haemophilus influenzae
  CDS (1)..(993): transl_table=11
atgaaaaagacatttattttacaacaacaagaaatcagctttgtgaagaacacttttacccaaaatcttattgagcaacttggcattattgaagtgcaaggcccaattttgagccaagtgggtaacggaatgcaagataacttatcaggcattgaaaaagccgtacaggttaatgtgaaatgtattccaaatgccgtatttgaagttgtgcattctcttgcgaaatggaaacgccatacattagctcgtttcaactttaaagaagacgaaggcttgtttgttcatatgaaagcattgcgtcccgatgaagattctcttgatccaacgcactctgtttatgtagatcaatgggactgggaaaaagtgattcctgaaggtcgtcgtaattttgcatacttaaaagaaacggtaaattctatttatcgtgctattcgtttaacagaattagccgtagaagcacgttttgatattccttccattcttccaaaacagattacctttgtgcatagcgaagatttagtaaaacgctatccagatttaagcagtaaagagcgtgaaaacgcaatttgtaaagaatacggtgcagtattcttaatcgggattggcggcaaactttcagatggcaaacctcatgatggtcgtgcacctgactatgatgactggacaacagaatctgaaaatggctacaaaggcttaaatggcgacattttggtatggaacgaccaattaggcaaagcctttgaactttcctcaatgggtatccgcgtagatgaaagtgcattacgcttacaagttggcttaacaggcgatgaagaccatttaaaaatggattggcaccaagatttattaaacgggaaattgccattaactatcggcggtggtatcggtcaatctcgcttagcgatgcttttacttcgtaaaaaacatatcggtgaagtgcaatcaagcgtatggccaaaagaaatgttagaagaattttcaaacattctttaa

SEQ ID NO: 1508 - protein, 330 aa, Haemophilus influenzae
MKKTFILQQQEISFVKNTFTQNLIEQLGIIEVQGPILSQVGNGMQDNLSGIEKAVQVNVKCIPNAVFEVVHSLAKWKRHTLARFNFKEDEGLFVHMKALRPDEDSLDPTHSVYVDQWDWEKVIPEGRRNFAYLKETVNSIYRAIRLTELAVEARFDIPSILPKQITFVHSEDLVKRYPDLSSKERENAICKEYGAVFLIGIGGKLSDGKPHDGRAPDYDDWTTESENGYKGLNGDILVWNDQLGKAFELSSMGIRVDESALRLQVGLTGDEDHLKMDWHQDLLNGKLPLTIGGGIGQSRLAMLLLRKKHIGEVQSSVWPKEMLEEFSNIL

SEQ ID NO: 1509 - DNA, 993 bp, Haemophilus somnus
  CDS (1)..(993): transl_table=11
atgaaaaaatcatttattttacaacaacaagaaattagttttgctaaaaacacttttacagaaaaattaatcgaacatttaggcatcattgaagttcaaggacctatcttaagtcaagtgggaaatggtattcaagataatctttcaggtacagagaaagcggttcaagtaaatgtgaaacagatcactgatgccaaatttgaagtggtgcattcattggcaaaatggaaacgtcatacattagctcgttttaactttgcagagaatgaaggcttatttgtacatatgaaagcattacgtcccgatgaagatagtctggatcaaacccactctgtttatgttgatcaatgggattgggaaaaagttattccaacaggacgtcgcaaccttgcttatttaaaagaaactgtacgttcaatttatcaagctattttggaaacggaagatgcagtacaccaaaaatttgggttgagtaaatttttacctagagagattacttttatacacagtgaggaacttgttcaacgttatcctgaattgaacgataaacaacgtgaaaatgcgatttgtaaagaatatggtgcagtattcttaatgggaattgggggagtattatcagatggcaaaccacatgataagcgtgcacctgattatgatgactggacaacaccgtctgaaggtgagtatttaggtttgaatggtgatattcttgtttggaatcctgtattggagcgtgcatttgaagtatcttctatgggcattcgtgtagatgaaaccgcattacgtaaacaactggcattaactggtgatgaagatcggttgcaatttgactggcatcaagatcttgtcaacggacgtttaccgctttctattggtggtgggattggtcaatctcgcttggcgatgttgcttttacagaaaaaacatattggcgaagtgcaatcaagtgtttggccaaaagttgttacagaacagtttgaaaacattctgtag

SEQ ID NO: 1510 - protein, 330 aa, Haemophilus somnus
MKKSFILQQQEISFAKNTFTEKLIEHLGIIEVQGPILSQVGNGIQDNLSGTEKAVQVNVKQITDAKFEVVHSLAKWKRHTLARFNFAENEGLFVHMKALRPDEDSLDQTHSVYVDQWDWEKVIPTGRRNLAYLKETVRSIYQAILETEDAVHQKFGLSKFLPREITFIHSEELVQRYPELNDKQRENAICKEYGAVFLMGIGGVLSDGKPHDKRAPDYDDWTTPSEGEYLGLNGDILVWNPVLERAFEVSSMGIRVDETALRKQLALTGDEDRLQFDWHQDLVNGRLPLSIGGGIGQSRLAMLLLQKKHIGEVQSSVWPKVVTEQFENIL

SEQ ID NO: 1511 - DNA, 993 bp, Klebsiella pneumoniae subsp
  CDS (1)..(993): transl_table=11
atgaaaaccgcatatatcgcaaaacaacgccagatcagtttcgttaaatcccacttttcccgtcagctggaagagaagcttggcctgattgaagtccaggcgccaatcttaagccgcgtgggcgatgggacgcaggataacttgtccggctgcgagaaagcggttcaggtaaaagtgaaaacactgcccgacgcccagttcgaagtggttcattcgctggcgaagtggaagcgtcaaaccctgggacaacacgacttcagcgcgggcgaagggctgtacacgcacatgaaagcccttcgccccgatgaagaccgtctgacgcctatccattccgtctatgttgaccagtgggactgggagcgcgtgatgggggatgaagagcgtcacgtcggcaccctgaaggcaaccgtcgaggcgatctacgccgggatcaaagccaccgagctggcggtcagccaggagtttggcctgacgccgttcctgccggaacagatccattttgttcacagccaggagctgctgagccgctatccggagcttgatgccaaaggtcgtgagcgggctattgccaaagagctgggcgccgtcttcttaattggtatcggcggcaaactagctgatggcaagcgccacgacgtgcgtgcgccggattatgatgactggagtactgaggtttctgaaggttttgccggcctgaacggcgatatcctggtgtggaacccggtgctggaggatgcgttcgagatctcctcgatggggatccgcgttgacgccgaggcgctaaagcgccagctggcgctgaccggcgatgaagatcgcctgaaactggagtggcaccaggcgctgctgcgcggcgagatgccgcagactatcggcggcggcattggccagtctcgtttgacgatgctgttgctgcagcttgaccatatcggtcaggtgcagtgcggcgtatggccggcgcaggttcgcgaaagcgtttccgcgctgctgtaa

SEQ ID NO: 1512 - protein, 330 aa, Klebsiella pneumoniae subsp
MKTAYIAKQRQISFVKSHFSRQLEEKLGLIEVQAPILSRVGDGTQDNLSGCEKAVQVKVKTLPDAQFEVVHSLAKWKRQTLGQHDFSAGEGLYTHMKALRPDEDRLTPIHSVYVDQWDWERVMGDEERHVGTLKATVEAIYAGIKATELAVSQEFGLTPFLPEQIHFVHSQELLSRYPELDAKGRERAIAKELGAVFLIGIGGKLADGKRHDVRAPDYDDWSTEVSEGFAGLNGDILVWNPVLEDAFEISSMGIRVDAEALKRQLALTGDEDRLKLEWHQALLRGEMPQTIGGGIGQSRLTMLLLQLDHIGQVQCGVWPAQVRESVSALL

SEQ ID NO: 1513 - DNA, 1011 bp, Lactobacillus acidophilus
  CDS (1)..(1011): transl_table=11
atgaaacttattttacctaaagattaccatccaacattaactgttcgtgatactgaagcagctattgtttatattcgtgaaactttccaagataagctcgcttctattcttggagtacaaagaatgtctgctccaatgtttgttgaaaaagctagtggattgaacgacaacttaaacggtgttgaacgtcctgttggctttgatatgaaggctattcctgattcagaaattgaagttgtgcattctcttgccaaatggaaaagattagcacttaaaagatatggtttcggcatgcacgaaggtttatacaccaacatgaatgctattcgccgtgatgaagatttagataacttccactctatctacgttgatcaatgggactgggaaaagattatcgctaaagaagaacggaatacagatacacttgaagttactgtaatgaaaatcttcaaagctatcaaagctacagaaaaattagttacagctcgttatcctggttctacttaccgtttaggtgatcacgtatcatttattactacccaagaattagaagatcgttggcctgagctttcaccagaagaacgtgaaaataaaattgctaaagaagaaaaagccgtcttcattatgaaaattggtgataaattaaagcgtagtggcaagccacatgatggtcgtgcacctgactacgatgactggcaattaaacggtgatttaattttctggtatgaaccacttcaaagtaaaattgaagtctcatcaatgggtattcgtgttagtgaagaaagtttacgtgaacaacttaagaaagctcattgtgaagatcgtgaaaaattaccattccacaagatgcttttagaaggtaaattaccttacaccatcgggggtggtatcggtcaatcacgtctctgcatgcttttactcggtaaggctcatatcggtgaggtacaagcaagtatttggccagaagaaatgattgaaaagtgcgaatctgaccacattcatttactttaa

SEQ ID NO: 1514 - protein, 336 aa, Lactobacillus acidophilus
MKLILPKDYHPTLTVRDTEAAIVYIRETFQDKLASILGVQRMSAPMFVEKASGLNDNLNGVERPVGFDMKAIPDSEIEVVHSLAKWKRLALKRYGFGMHEGLYTNMNAIRRDEDLDNFHSIYVDQWDWEKIIAKEERNTDTLEVTVMKIFKAIKATEKLVTARYPGSTYRLGDHVSFITTQELEDRWPELSPEERENKIAKEEKAVFIMKIGDKLKRSGKPHDGRAPDYDDWQLNGDLIFWYEPLQSKIEVSSMGIRVSEESLREQLKKAHCEDREKLPFHKMLLEGKLPYTIGGGIGQSRLCMLLLGKAHIGEVQASIWPEEMIEKCESDHIHLL

SEQ ID NO: 1515 - DNA, 1011 bp, Lactobacillus johnsonii
  CDS (1)..(1011): transl_table=11
atgacattaatattacctaaggactaccatccaagtttaaccattcgtgatactgaagccgcaattgttttcattagagaaaattttcaagataaaattgctgacaaattaaaccttcaaagaatgtcagcaccaatgtttgttgaaaaatctactggattaaatgataacttaaatgggattgaacgtccggttgcttttgatatgaaggctatgccagatgatacaatcgaagttgtacactcattagcaaaatggaaacgtctagcacttaagcgttatggttttggaatgcatgaaggtctttatactaacatgaacgcaattcggcgtgatgaagatttagataattttcactcaatctacgtagatcaatgggactgggaaaagattattgctaaagaagaaagaaatattgagactcttaaaactactgtcaaacaaatttttaaagcaattaaagaaactgaaaaagagctcagcgcacgctatccgggttctacttaccgcttacctagcgatattacttttattactacacaagaactggaagaccgctggccagatttagcaccagaagaacgtgaagataaaatagctaaagagaaaaaagcagtattcttaatgaaaattggtgataaattaaagcgtagtggtaagccacatgatggccgtgcaccagattacgatgactgggaattaaacggtgacttactattttggtatgaacctttaaaacgtaaaatagaaatttcttcaatgggaattcgagttagcgaagaatcgctgaaagagcaactcaaaaaagctcatactgaagaaagatctgatttacctttccacaaaatgcttttagaaggtaaacttccttatacaattggtgggggtattggccaatctcgtttatgtatgcttttgcttggaaaagctcatattggcgaagtccaagcaagtatttggcctcccgaaatgattgaatcatgtaaagctgccgacataaaaattctatag

SEQ ID NO: 1516 - protein, 336 aa, Lactobacillus johnsonii
MTLILPKDYHPSLTIRDTEAAIVFIRENFQDKIADKLNLQRMSAPMFVEKSTGLNDNLNGIERPVAFDMKAMPDDTIEVVHSLAKWKRLALKRYGFGMHEGLYTNMNAIRRDEDLDNFHSIYVDQWDWEKIIAKEERNIETLKTTVKQIFKAIKETEKELSARYPGSTYRLPSDITFITTQELEDRWPDLAPEEREDKIAKEKKAVFLMKIGDKLKRSGKPHDGRAPDYDDWELNGDLLFWYEPLKRKIEISSMGIRVSEESLKEQLKKAHTEERSDLPFHKMLLEGKLPYTIGGGIGQSRLCMLLLGKAHIGEVQASIWPPEMIESCKAADIKIL

SEQ ID NO: 1517 - DNA, 969 bp, Lactobacillus plantarum
  CDS (1)..(969): transl_table=11
atgcatttaattattccaaaggattacgatcctaaattatccgttaaagaaacccaacaggccattcgttacattcgtgaaacgttccaagatgaatttgggaagcaactaaacttatctcggctttcagcaccgatgttcgttgaaaagaaaactggtctgaacgataacttaaacggtgtcgaaaaacctgtctccttcactatgcaagacatgggtgatgaacaaatcgaaatcgttcactcacttgctaagtggaaacgggtcgctttaaagcgctacggttttgatatgcatgaaggtctctacacgaacatgaacgctattcgtaaggatgaagatttagacaactaccactccgcctacgtcgatcaatgggattgggaaaaagtgatcagtaaggaagaacgaaccgttgaaactttgaaagccgcggtacgtcaaatctttaaagtgatcaagcacatggaacacgaagtttggtacaagttcccacaagccgttcaccacttaccagacgaaattcacttcttaaccacacaagagctcgaagacatgtaccctgacatgacgccgcgcgaacgcgaaaacgccatttgcaagaaactcggctgtgtcttcttaatgcaaattggctggaagcttgattccggcgaacgtcacgatggccgcgcccccgactatgatgactggaagttgaacggcgatatcctcttctggtatgaaccattagaccaagctatcgaaatctcaagtatgggaatccgggtcgatgctgaatcaatgaagaaacaacttaaagacgtggacgccgaagaccggcttagcttgccataccaccaaatgatcttgaacgcggacgtcccttacacgatcggtggcgggattggtcaatcacggctctgcatgttattacttggcaaagcccatgtcggtgaagtacaagctgccttgtggcacaagccatga

SEQ ID NO: 1518 - protein, 322 aa, Lactobacillus plantarum
MHLIIPKDYDPKLSVKETQQAIRYIRETFQDEFGKQLNLSRLSAPMFVEKKTGLNDNLNGVEKPVSFTMQDMGDEQIEIVHSLAKWKRVALKRYGFDMHEGLYTNMNAIRKDEDLDNYHSAYVDQWDWEKVISKEERTVETLKAAVRQIFKVIKHMEHEVWYKFPQAVHHLPDEIHFLTTQELEDMYPDMTPRERENAICKKLGCVFLMQIGWKLDSGERHDGRAPDYDDWKLNGDILFWYEPLDQAIEISSMGIRVDAESMKKQLKDVDAEDRLSLPYHQMILNADVPYTIGGGIGQSRLCMLLLGKAHVGEVQAALWHKP

SEQ ID NO: 1519 - DNA, 993 bp, Mannheimia succiniciproducens
  CDS (1)..(993): transl_table=11
atgaaaaaatcattcattttacagcagcaagaaattagctttacaaagaatacgtttacggaaaaattagccgaacatttaggtttggttgaagttcaaggtcctatcctaagtcaagttggtaatggtattcaagataatctttcgggaacggagaaagctgttcaagtaaatgtgaagatgatcacagatgcggcttttgaagtcgtgcactctttagcaaaatggaaacgtcacaccttggctcgttttggtttcgcggaaggcgaagggttattcgtacatatgaaagcgctacgtccggatgaagatagtctggatcaaacgcattccgtttatgtggatcaatgggactgggaaaaagtgatccctgaaggtcgccgcaatttggattatttaaaagaaaccgtgcgtgaaatttatgcggcgattttagaaacggaagcggcggtagataaaaaatacggtttgaaatcatttttaccaaaagaaattacttttattcattccgaagatttagttaaagattatccgggtatgacggataaagaacgtgaaaacgaactttgtaaaaaatacggtgcggtttttttaatcggtatcggcggagtattgcctgacggcaaacctcatgacggtcgcgcgccggattatgatgactggacaaccacatcggaaggcgaatataaaggattgaacggcgatattttagtttggaacccgattctaaaccgcgcttttgaggtttcttccatgggtattcgcgtggatgaaacagcgttacgcaaacagctttcaattaccggtgatgaagatcgcttaaaattcgattggcatcaggatttaattaacggccgtatgccgctttcaatcggtggcggcatcggtcagtctcgtttagcaatgttattattacaaaaacgccatatcggcgaagtacagtcaagcgtatggccgaaagcggttatggaacaatacgaaaatattctttaa

SEQ ID NO: 1520 - protein, 330 aa, Mannheimia succiniciproducens
MKKSFILQQQEISFTKNTFTEKLAEHLGLVEVQGPILSQVGNGIQDNLSGTEKAVQVNVKMITDAAFEVVHSLAKWKRHTLARFGFAEGEGLFVHMKALRPDEDSLDQTHSVYVDQWDWEKVIPEGRRNLDYLKETVREIYAAILETEAAVDKKYGLKSFLPKEITFIHSEDLVKDYPGMTDKERENELCKKYGAVFLIGIGGVLPDGKPHDGRAPDYDDWTTTSEGEYKGLNGDILVWNPILNRAFEVSSMGIRVDETALRKQLSITGDEDRLKFDWHQDLINGRMPLSIGGGIGQSRLAMLLLQKRHIGEVQSSVWPKAVMEQYENIL

SEQ ID NO: 1521 - DNA, 990 bp, Mycoplasma gallisepticum
  CDS (1)..(990): transl_table=4
ttaattatgaaaaaattaacattgctagaaacagaattagccattaaatatattaaggatctgtttcaaaacgctttatcaaaagaactaaatttactaagagtgagcgctcctttgattatcgctcctgactcagggttaaatgacaaccttaatggttgagaagctccggtttcatttaaatcaaaaactaatggtgttagttcgcaagttgttcaatctttagcaaaatgaaaaagatattcaattgctagatatgaaattcctctatatcaaggtttatacactgatatgaacgcaatcagaatggatgaaactcttgatgctacacactcaatgtacgtggatcaatgagattgagaattaagaatcagtgaaaatgatcgtaacgtcgagtttttaaagaacactgttaataaaatttacaaagttcttaaagaagcacaactaaaagttaacgaaaaatacggtatttttgaacaaaaagacttgttacctgaacatattcactttgtaactactcaagaattattagatcaatatcctgataaaaatccatctgaaagagaacaacttgtatgtgagaaatacaaagcagtgtttgtaatgcaagtaggtaaaaaactatctaacaatcaagtacatgacggtagatctccagactatgacgactgatcactaaatggtgatattatggtttacaaccctagatctaaaaaagcattagaattatcatcaatgggaattcgcgtaaataaagaagttttacttaaacaattagaagaatctaaacaaaatgagcgtttagaactaatgttccacaagaaattagttaatggtgaattgcatcaaactattggcggtggaatcggccaatcaagattatgttacttcttgttacaaaaagatcatattggtgaagtacaagcttcgcactgaagtgatgaaattgttgttgaagctaaagcaaaagggattaagttactttaa

SEQ ID NO: 1522 - protein, 329 aa, Mycoplasma gallisepticum
MIMKKLTLLETELAIKYIKDLFQNALSKELNLLRVSAPLIIAPDSGLNDNLNGWEAPVSFKSKTNGVSSQVVQSLAKWKRYSIARYEIPLYQGLYTDMNAIRMDETLDATHSMYVDQWDWELRISENDRNVEFLKNTVNKIYKVLKEAQLKVNEKYGIFEQKDLLPEHIHFVTTQELLDQYPDKNPSEREQLVCEKYKAVFVMQVGKKLSNNQVHDGRSPDYDDWSLNGDIMVYNPRSKKALELSSMGIRVNKEVLLKQLEESKQNERLELMFHKKLVNGELHQTIGGGIGQSRLCYFLLQKDHIGEVQASHWSDEIVVEAKAKGIKLL

SEQ ID NO: 1523 - DNA, 981 bp, Mycoplasma penetrans
  CDS (1)..(981): transl_table=4
atgtataacttatctattttagaaacacaaaaagcaatcaaatttattaaggatttgttccaagttaatttggctcacgctttaaaactacatagagttacagcacctttagttttagaaagaaataaaggtataaatgatgatttaaatggatcagaaaacccagtaacctttacaagtgatggtaatggaatttcaggagaaatcccacaatcattagctaaatgaaaaagaatgatgttgggtaaatatgaaattcctttacatgaaggaatttatgcagatatgaatgcaattagaaaagatgaatctttatctagtatccattcaatttatgttgatcaatgagactgagaactacatattaaaaaaactgaaagaaatttagaaaccttaaaagtagtggttaaaaaaatctatgaaattattagattatgtcaaaaagaagtaaataaaaaatatgaatgatttgcagaaaatttacttcctgaagaaatcacttttatatcatcagaagatttattacaaagatacccaaataaaacccctaaagaaagagaaagattaattgcatcaaaatataaggctgtatttattattggaattggggacaatttatcagatggtaaaccacatgatttaagagcaccagattatgatgattgaaaattaaatggagatattatagtttgaaatgaaactactaaatcagctttagaattaagttcaatgggaattagagttgatgaagttagtcttgtagaacaacttgataaatctaataacaattctagaaaagaattagactttcataaaaaattaattaataaagaattcccttattcaattggtggaggaattggacaaagcagactttgttatttccttcttcacaaacaacatattggtgaagttcaatcttctttatggcctaaagacattttagaagaagcagaaaaaaataacattaaacttttataa

SEQ ID NO: 1524 - protein, 326 aa, Mycoplasma penetrans
MYNLSILETQKAIKFIKDLFQVNLAHALKLHRVTAPLVLERNKGINDDLNGSENPVTFTSDGNGISGEIPQSLAKWKRMMLGKYEIPLHEGIYADMNAIRKDESLSSIHSIYVDQWDWELHIKKTERNLETLKVVVKKIYEIIRLCQKEVNKKYEWFAENLLPEEITFISSEDLLQRYPNKTPKERERLIASKYKAVFIIGIGDNLSDGKPHDLRAPDYDDWKLNGDIIVWNETTKSALELSSMGIRVDEVSLVEQLDKSNNNSRKELDFHKKLINKEFPYSIGGGIGQSRLCYFLLHKQHIGEVQSSLWPKDILEEAEKNNIKLL

SEQ ID NO: 1525 - DNA, 993 bp, Pasteurella multocida
  CDS (1)..(993): transl_table=11
atgaagaaatcatttattttacaacaacaagaaattagttttgcgaagaacacgttcacagaaaaattagcagaacatttgggtattgttgaagttcaaggtcctatcctaagccaagttggtaatggtattcaagataatctttcaggtgcagagaaagcggtgcaagtaaatgtgaaacagatcacagatgccacctttgaggttgttcactctttagccaaatggaaacgtcatacacttgcgcgctttaattttgcacaaggtgaagggctatttgtgcatatgacggcacttcgtccagatgaagattctttagatcaaacccattctgtgtatgtagatcaatgggactgggaaaaagtgatttcagcagagcaacgtaaccttgcctatttgaaagaaactgttcgtgctatttatgccgcgattttagaaacggaagaagcggtaagtaaaaaattcggtttagccacctttttgccaaaggatattcagtttgtacacagtgaagaattagtacaacgttttccgaacatgaatgataaagagcgtgagaatgcgatttgtaaagaatatggcgcggtgttcttaatcgggattggtggcaaattgtctgatgggaaaccacatgatgtacgtgcacctgattatgatgactggacaacgccatcagaaggtgaatacaaaggattaaacggggatattttggtttggaacccaattttagaacgtgcttttgaattatcttccatggggatccgtgtggatgaaaccgcattacgtaaacagcttgctttaaccaacaatgaagaccgtttaaaatttgattggcaccaagatttagtcaatggtcgtttaccgttatctatcggtggtgggattgggcgctcacgcttagtgatgttgctattacagaaaaaacacattggtgaagtccaatccagtgtgtggccaaaatgggtgatggagcagtttgataatattctttaa

SEQ ID NO: 1526 - protein, 330 aa, Pasteurella multocida
MKKSFILQQQEISFAKNTFTEKLAEHLGIVEVQGPILSQVGNGIQDNLSGAEKAVQVNVKQITDATFEVVHSLAKWKRHTLARFNFAQGEGLFVHMTALRPDEDSLDQTHSVYVDQWDWEKVISAEQRNLAYLKETVRAIYAAILETEEAVSKKFGLATFLPKDIQFVHSEELVQRFPNMNDKERENAICKEYGAVFLIGIGGKLSDGKPHDVRAPDYDDWTTPSEGEYKGLNGDILVWNPILERAFELSSMGIRVDETALRKQLALTNNEDRLKFDWHQDLVNGRLPLSIGGGIGRSRLVMLLLQKKHIGEVQSSVWPKWVMEQFDNIL

SEQ ID NO: 1527 - DNA, 1008 bp, Pediococcus pentosaceus
  CDS (1)..(1008): transl_table=11
atggatttaattattcctgcatcatacgatccaaaattatcagtacgtcaaacccaagaggccattcgctacatccgcgaaacttttcaagatgaatttggaaaagaactcaacctctcacgtctctctgcaccaatgttcgttcctagtgccactgggttaaacgataatttaaatggagttgaaaccccagtttccttctctatgcaagatatgcctgaaaccagcatcgaaatcgtccactctctagctaaatggaaaagagttgctttgaaacgctttgatttcgagatgcacagtggactttatactaatatgaatgccattcgtaaagacgaagatcttgataatattcattccatctatgttgatcaatgggactgggaaaaagttatcgatcaaagtgagcgtaatctaactacccttaaagaaacagttcaaacaatttttaaagtaatcaaacacatggagcacgaagtttggtataaatatcctgaagccgtctatcatcttcctgatcaaattcattttgtcactacccaagaattagaggatcgttttccgaaattaactcctaaagaacgcgaggacgccatctgtaaagaactgggttgcgttttcttaatgcaaattggtgggacgctaaaaagtggtgaacgtcatgatggacgcgcaccagattacgatgattggcaattaaacggcgatattttattttggtatgaacctcttcaaaaagcccttgaaatttctagcatgggaatcagagttagtgaagagtcgatgctaaaacaactaaaaatagctaacgcagaggatcgaatccatctcccttatcatcaaatgttgttgaatcatcaactgccctacaccattggcggtggaattggtcaatcacgtctttgcatgttgctattaggtaaagcccatgttggtgaagttcaagctagtgtctggcctcaatcgatgattgatcaatgtgaagaaaatcaaattcatattttataa

SEQ ID NO: 1528 - protein, 335 aa, Pediococcus pentosaceus
MDLIIPASYDPKLSVRQTQEAIRYIRETFQDEFGKELNLSRLSAPMFVPSATGLNDNLNGVETPVSFSMQDMPETSIEIVHSLAKWKRVALKRFDFEMHSGLYTNMNAIRKDEDLDNIHSIYVDQWDWEKVIDQSERNLTTLKETVQTIFKVIKHMEHEVWYKYPEAVYHLPDQIHFVTTQELEDRFPKLTPKEREDAICKELGCVFLMQIGGTLKSGERHDGRAPDYDDWQLNGDILFWYEPLQKALEISSMGIRVSEESMLKQLKIANAEDRIHLPYHQMLLNHQLPYTIGGGIGQSRLCMLLLGKAHVGEVQASVWPQSMIDQCEENQIHIL

SEQ ID NO: 1529 - DNA, 993 bp, Photorhabdus luminescens subsp
  CDS (1)..(993): transl_table=11
atgaaaaagtcgtttattgaaaagcagcaacaaatcagttttgttaaatccttcttttcccgtctgctggaaagcaaactgggtctgattgaagtacagggaccaatcctaagttgtttgggagatggtattcaggacaacttgtccggccatgaaaaagctgttcaggtgaaagtaaaaactttaccggattcaactttcgaagtcgtacattcgttggctaaatggaaacgtaggacactgggtcgttttggctttcagcctgaacaagggctttacactcacatgaaagcattgcgtccagatgaggatcgcttaacaccaattcactctgtttatgttgatcaatgggattgggaaaaagtgatggaagatgggcaacgctcacttgcttatcttaaacagacagtaggtaaaatctacgaagcaataaaagaaacagaaaaagctgtcaacaaagagtttggtctggcaccgttcctgccagatcaaattcactttgttcatagcgaaacgcttctgagccgttatccggatctggatgcaaaaggccgtgaacgggctattgctaaagaattgggtgctgttttcctcattggtattggtgcgaaattatctgatggtcaatctcatgatgtgcgtgcgcctgattatgatgactggacgacaccaaacagcgatggtttcgttggtctaaatggcgacatcattgtctggaaccctgttttggaagatgcgtttgagatctcttctatgggtatccgtgttgatgcagaagcattggagcgccagttagctctgactagtgatgaagagcgtttacaatatgattggcatcaggcgttactcaaaggcgacatgccgcagtcgattggtggcggtattggtcaatcccgcttagtgatgttactgctgcaaatgaaacacattggtcaagttcagtgcagtatctggtcacctgaagtacgcgaaactgtagaagatatgctttaa

SEQ ID NO: 1530 - protein, 330 aa, Photorhabdus luminescens subsp
MKKSFIEKQQQISFVKSFFSRLLESKLGLIEVQGPILSCLGDGIQDNLSGHEKAVQVKVKTLPDSTFEVVHSLAKWKRRTLGRFGFQPEQGLYTHMKALRPDEDRLTPIHSVYVDQWDWEKVMEDGQRSLAYLKQTVGKIYEAIKETEKAVNKEFGLAPFLPDQIHFVHSETLLSRYPDLDAKGRERAIAKELGAVFLIGIGAKLSDGQSHDVRAPDYDDWTTPNSDGFVGLNGDIIVWNPVLEDAFEISSMGIRVDAEALERQLALTSDEERLQYDWHQALLKGDMPQSIGGGIGQSRLVMLLLQMKHIGQVQCSIWSPEVRETVEDML

SEQ ID NO: 1531 - DNA, 993 bp, Salmonella choleraesuis
  CDS (1)..(993): transl_table=11
atgaaaaccgcttacattgccaaacaacgtcaaattagcttcgtgaaatcacatttctctcgccagcttgaggagcgtctgggtctgattgaggtccaggcgccgatcctgagtcgcgtaggagatggtacgcaggataatttgtccggctgtgaaaaagcggtgcaggtaaaagtgaaagcgttgcctgacgcccagttcgaagtggtgcattcactggcgaagtggaaacgtcaaaccctggggcaacatgacttcagcgcgggcgaagggctgtacacgcacatgaaagcccttcgccccgatgaagaccgactctctccgctccactcggtctatgtggatcagtgggactgggagcgtgtcatgggcgatggcgagcgccaattttccaccctgaaaagcacagtagaggctatatgggctggaattaaggcgacggaagcagaagtgcataaacagtttggtctggcgccgttcctgccagagcaaattcagtttgttcacagccaggagctgttgtctcgctatccggatctggatgcgaaagggcgcgaacgcgcgatcgccaaagaacttggcgccgtttttctggtggggatcggcggtaaactgagcgatggccaccgccatgatgtacgcgcgccggattatgatgactggagctccgcatctgagctgggctacgccggtctgaacggcgatatcctggtgtggaacccggtgctggaagatgcgtttgagctttcctctatgggtatccgcgtagatgccgatacgctgatgcgccagctggcgttgaccggtgatgaagatcgcctgcaactggagtggcatcaggcgctgctgcgcggcgaaatgccgcagaccatcggcggcgggattgggcagtcgcgtctgacgatgttgctgctgcaattgccgcatattggtcaggtgcagtgcggcgtgtggcccgcgcaggttcgcgaaagcattcctgctattttataa

SEQ ID NO: 1532 - protein, 330 aa, Salmonella choleraesuis
MKTAYIAKQRQISFVKSHFSRQLEERLGLIEVQAPILSRVGDGTQDNLSGCEKAVQVKVKALPDAQFEVVHSLAKWKRQTLGQHDFSAGEGLYTHMKALRPDEDRLSPLHSVYVDQWDWERVMGDGERQFSTLKSTVEAIWAGIKATEAEVHKQFGLAPFLPEQIQFVHSQELLSRYPDLDAKGRERAIAKELGAVFLVGIGGKLSDGHRHDVRAPDYDDWSSASELGYAGLNGDILVWNPVLEDAFELSSMGIRVDADTLMRQLALTGDEDRLQLEWHQALLRGEMPQTIGGGIGQSRLTMLLLQLPHIGQVQCGVWPAQVRESIPAIL

SEQ ID NO: 1533 - DNA, 993 bp, Salmonella paratyphi A
  CDS (1)..(993): transl_table=11
atgaaaaccgcttacattgccaaacaacgtcaaattagcttcgtgaaatcacatttctctcgccagctggaggagcgtctgggtctgattgaggtccaggcgccgatcctgagtcgcgtaggggatggtacgcaggataatttgtccggctgtgaaaaagcggtgcaggtaaaagtgaaagcgttgcctgacgcccagttcgaagtggtgcattcactggcgaagtggaaacgtcaaaccctggggcaacatgacttcagcgcgggcgaaggactgtacacgcacatgaaagcccttcgccccgatgaagaccgactctctccgctccactcggtctatgtggatcagtgggactgggagcgtgtcatgggcgatggcgagcgccaattttccaccctaaaaagcacagtagaggctatatgggcaggaattaaggcgacggaagcggaagtgcataaacagtttggtctggcgccgttcctgccggatcagatccattttgttcacagtcaggaactgctggcgcgtttcccggatctggatgcgaaagggcgcgaacgcgcgatcgccaaagaacttggcgccgtttttctggtggggatcggcggtaaactgagcgatggccaccgccatgatgtacgcgcgccggattatgatgactggagctccgcatctgagctgggctacgccggtctgaacggcgatatcctggtgtggaacccggtgctggaagatgcgtttgagctttcctctatgggtatccgtgtagatgccgatacgctgatgcgccagctggcgttgaccggtgatgaagatcgcctgcaactggagtggcatcaggcgctgctgcgcggcgaaatgccgcagaccatcggcggcgggattgggcagtctcgtctgacgatgttgctgctgcaattgccgcatattggtcaggtgcagtgcggcgtatggcccgcgcaggttcgcgaaagcattcctgctattttataa

SEQ ID NO: 1534 - protein, 330 aa, Salmonella paratyphi A
MKTAYIAKQRQISFVKSHFSRQLEERLGLIEVQAPILSRVGDGTQDNLSGCEKAVQVKVKALPDAQFEVVHSLAKWKRQTLGQHDFSAGEGLYTHMKALRPDEDRLSPLHSVYVDQWDWERVMGDGERQFSTLKSTVEAIWAGIKATEAEVHKQFGLAPFLPDQIHFVHSQELLARFPDLDAKGRERAIAKELGAVFLVGIGGKLSDGHRHDVRAPDYDDWSSASELGYAGLNGDILVWNPVLEDAFELSSMGIRVDADTLMRQLALTGDEDRLQLEWHQALLRGEMPQTIGGGIGQSRLTMLLLQLPHIGQVQCGVWPAQVRESIPAIL

SEQ ID NO: 1535 - DNA, 993 bp, Salmonella typhi
  CDS (1)..(993): transl_table=11
atgaaaaccgcttacattgccaaacaacgtcaaattagcttcgtgaaatcacatttctctcgccagctagaggagcgtctgggtctgattgaggtccaggcgccgatcctgagtcgcgtaggggatggtacgcaggataatttgtccggctgtgaaaaagcggtgcaggtaaaagtgaaagcgttgcctgacgcccagttcgaagtggtgcattcactggcgaagtggaaacgtcaaaccctggggcaacatgacttcagcgcgggcgaagggctgtacacgcacatgaaagcccttcgccccgatgaagaccgactctctccgctccactcggtctatgtggatcagtgggactgggagcgtgtcatgggcgatggcgagcgccaattttccaccctgaaaagcacagtagaggctatatgggcaggcattaaggcgacggaagcggaagtgcataaacagtttggtctggcgccgttcctgccggatcagatccattttgttcacagtcaggaactgctggcgcgtttcccggatctggatgcgaaagggcgcgaacgcgcgatcgccaaagaacttggcgccgttttcctggtggggatcggcggtaaactgagcgatggccgccgccatgatgtacgcgcgccggattatgatgactggagctccgcatctgagctgggctacgctggtctgaacggcgatatcctagtgtggaacccggtgctggaagatgcgtttgagctttcctctatgggtatccgcgtagatgccgatacgctgatgcgtcagctggcgttgaccggtgatgaagatcgcctgcaactggagtggcatcaggcgctgctgcgcggcgaaatgccgcagaccatcggcggcgggattgggcagtcgcgtctgacgatgttgctgctgcaattgccgcatattggtcaggtgcagtgcggcgtatggcccgcgcaggttcgcgaaagcattcctgctattttataa

SEQ ID NO: 1536 - protein, 330 aa, Salmonella typhi
MKTAYIAKQRQISFVKSHFSRQLEERLGLIEVQAPILSRVGDGTQDNLSGCEKAVQVKVKALPDAQFEVVHSLAKWKRQTLGQHDFSAGEGLYTHMKALRPDEDRLSPLHSVYVDQWDWERVMGDGERQFSTLKSTVEAIWAGIKATEAEVHKQFGLAPFLPDQIHFVHSQELLARFPDLDAKGRERAIAKELGAVFLVGIGGKLSDGRRHDVRAPDYDDWSSASELGYAGLNGDILVWNPVLEDAFELSSMGIRVDADTLMRQLALTGDEDRLQLEWHQALLRGEMPQTIGGGIGQSRLTMLLLQLPHIGQVQCGVWPAQVRESIPAIL

SEQ ID NO: 1537 - DNA, 993 bp, Salmonella typhimurium
  CDS (1)..(993): transl_table=11
atgaaaaccgcttacattgccaaacaacgtcaaattagcttcgtgaaatcacatttctctcgccagctggaggagcgtctgggtctgattgaggtccaggcgccgatcctgagtcgcgtaggggatggtacgcaggataatttgtccggctgtgaaaaagcggtgcaggtaaaagtgaaagcattgcctgacgcccagttcgaagtggtgcattcactggcgaagtggaaacgtcaaaccctggggcaacatgacttcagcgcgggcgaagggctgtacacgcacatgaaagcccttcgccccgatgaagaccgactctctccgctccactcggtctatgtggatcagtgggactgggagcgtgtcatgggcgatggcgagcgccaattttccaccctgaaaagcacagtagaggctatatgggcaggaattaaggcgacggaagcagaagtgcataaacagtttggtctggcgccgttcctgccagagcaaattcagtttgttcacagtcaggaactgctggcgcgtttcccggatctggatgcgaaagggcgcgaacgcgcgatcgccaaagaacttggcgccgttttcctggtggggatcggcggtaaactgagcgatggccaccgccatgatgtacgcgcgccggattatgatgactggagctccgcatctgagctgggctacgccggtctgaacggcgatatcctggtgtggaacccggtgctggaagatgcgtttgagctttcctctatgggtatccgcgtagatgccgatacgctgatgcgccagctggcgttgaccggtgatgaagatcgtctgcaactggagtggcatcaggcgctgctgcgcggcgaaatgccgcagaccatcggcggcgggattgggcagtcgcgtctgacgatgttgctgctgcaattgccgcatattggtcaggtacagtgcggcgtatggcccgcgcaggttcgcgaaagcattcctgctattttataa

SEQ ID NO: 1538 - protein, 330 aa, Salmonella typhimurium
MKTAYIAKQRQISFVKSHFSRQLEERLGLIEVQAPILSRVGDGTQDNLSGCEKAVQVKVKALPDAQFEVVHSLAKWKRQTLGQHDFSAGEGLYTHMKALRPDEDRLSPLHSVYVDQWDWERVMGDGERQFSTLKSTVEAIWAGIKATEAEVHKQFGLAPFLPEQIQFVHSQELLARFPDLDAKGRERAIAKELGAVFLVGIGGKLSDGHRHDVRAPDYDDWSSASELGYAGLNGDILVWNPVLEDAFELSSMGIRVDADTLMRQLALTGDEDRLQLEWHQALLRGEMPQTIGGGIGQSRLTMLLLQLPHIGQVQCGVWPAQVRESIPAIL

SEQ ID NO: 1539 - DNA, 993 bp, Streptococcus agalactiae serotype III
  CDS (1)..(993): transl_table=11
atgaagaaaagctttattcatcagcaacaggagatttcttttgtcaaaaatacttttacacaatatttgattgataagttagaaatcgtcgaagtgcaaggacctattcttagtcaggtcggggatggtatgcaagataatttatctggtattgaacatcctgtatcggtgaaagtccttaatatacctgaagctgaatttgaagtcgttcactcattggctaaatggaaacgtcatactttggcaagatttgggtttaatgagggagaaggtcttttcgttcatatgaaagctcttcgtccagatgaagattctcttgatccaacacactcagtttacgtagatcagtgggactgggagaaggtcattcctgatggtagacgtaatttggactacctaaaagaaactgtggaaaaaatctacaaagctatccgcctaacagagcttgccgtggaagctcgttttgatattgaatccattttaccaaagcgtattacctttattcatacagaagaattggtagaaaaatacccagacttaagccctaaagagcgtgaaaatgccatcgctaaggagtatggcgcagtctttttgattggtattggtggagagttagcagatggtaaaccacatgatggtcgtgcaccggactatgatgactggacaacaccatcagaaaatggttttaaaggtctcaatggtgatattttagtatggaacgaacagcttggaactgcctttgaactatcatcaatgggaattcgagttgatgaagatgctcttaaacgtcaagttgttctcaccggtgatgaaggtcgtttagagtttgagtggcataagacgctattacgtggtttcttccctttgactattggtgggggaattggtcaatcacgattagctatgttcttgcttcgtaaaaaacatattggagaagtacagtcaagtgtctggccaaaagaagtcagagacacctttgaaaatatattataa

SEQ ID NO: 1540 - protein, 330 aa, Streptococcus agalactiae serotype III
MKKSFIHQQQEISFVKNTFTQYLIDKLEIVEVQGPILSQVGDGMQDNLSGIEHPVSVKVLNIPEAEFEVVHSLAKWKRHTLARFGFNEGEGLFVHMKALRPDEDSLDPTHSVYVDQWDWEKVIPDGRRNLDYLKETVEKIYKAIRLTELAVEARFDIESILPKRITFIHTEELVEKYPDLSPKERENAIAKEYGAVFLIGIGGELADGKPHDGRAPDYDDWTTPSENGFKGLNGDILVWNEQLGTAFELSSMGIRVDEDALKRQVVLTGDEGRLEFEWHKTLLRGFFPLTIGGGIGQSRLAMFLLRKKHIGEVQSSVWPKEVRDTFENIL

SEQ ID NO: 1541 - DNA, 993 bp, Streptococcus pyogenes serotype M5
  CDS (1)..(993): transl_table=11
atgaagaaaagttttattcatcaacaagaggagatttcctttgttaaaaatacgttcactcagtatttaattgctaagttagatgttgttgaagtgcaaggacccattttaagtcgggtcggggatggtatgcaagataatttgtccggtactgaaaatccagtatctgtcaatgtcttgaaaattcctaatgcaacctttgaagttgtgcattcattagcaaaatggaaacgtcacaccttagcccgttttgggtttaatgaaggtgaaggtcttgttgttaatatgaaggctctccgaccggatgaagattcacttgaccaaacccattctgtctatgttgaccaatgggactgggaaaaagtcatccctgatggcaaacgtaatctcgcttaccttaaagaaaccgttgaaaccatttacaaggtcattcggctaactgaattagctgtagaagctcgttatgatattgaggctgttttacctaagaaaataaccttcattcataccgaagaattggtagctgaataccctgatttgacgcccaaagaacgtgaaaatgccattactaaagaatttggagcagtctttttaattggtattggcggggttttacctgacggtaaaccacacgatggccgcgctcctgactatgatgactggacaacagaaactgaaaatggctatcatgggcttaatggtgatattttggtttggaatgaccaacttggttcagcctttgaattatcctcaatggggatccgtgtggatgaagaggccctaaaacgtcaggtggaaatgactggtgaccaagaccgcttagcctttgattggcacaaatctttgttgaatggacttttccctctaacgattggtggaggaatcggtcaatcacgtatggtcatgtttttgttgcgtaaaaaacatattggagaagttcagacctccgtttggccccaagaagttcgtgatagctacgataatattttataa

SEQ ID NO: 1542 - protein, 330 aa, Streptococcus pyogenes serotype M5
MKKSFIHQQEEISFVKNTFTQYLIAKLDVVEVQGPILSRVGDGMQDNLSGTENPVSVNVLKIPNATFEVVHSLAKWKRHTLARFGFNEGEGLVVNMKALRPDEDSLDQTHSVYVDQWDWEKVIPDGKRNLAYLKETVETIYKVIRLTELAVEARYDIEAVLPKKITFIHTEELVAEYPDLTPKERENAITKEFGAVFLIGIGGVLPDGKPHDGRAPDYDDWTTETENGYHGLNGDILVWNDQLGSAFELSSMGIRVDEEALKRQVEMTGDQDRLAFDWHKSLLNGLFPLTIGGGIGQSRMVMFLLRKKHIGEVQTSVWPQEVRDSYDNIL

SEQ ID NO: 1543 - DNA, 993 bp, Streptococcus pneumoniae
  CDS (1)..(993): transl_table=11
atgaagaaaagttttatccatcaacaagaagaaatttcctttgtcaaaaacacttttacccagtatttgaaagataagctagaagttgtcgaagttcaaggtcctatcttgagtaaggtcggtgacggaatgcaggacaacctgtctggtgtggaaaatccagtatcggtcaaggttctccaaatccctgatgctacttatgaagtggtgcactcacttgctaaatggaaacgccacaccttggctcgttttggctttggtgaaggagagggtctctttgtccacatgaaagcccttcgtccagatgaggattccttggatgcaacccactctgtttatgttgaccagtgggactgggagaaggttatcccaaatggtaagcgtaacatcgtttatctaaaagaaacagttgagaagatttataaggctattcgcctgactgagctagctgttgaagcccgctatgacatcgagtctatcttgccaaaacaaattacctttatccatacagaagaattggtagaacgctacccagacttgacaccgaaagaacgtgaaaatgcgatttgtaaagaatttggagccgtctttttgattggtatcggtggcgagttgccagatggtaaaccgcacgatggacgtgcaccagactatgatgactggacaagcgagtctgagaatggctacaagggtctaaatggtgatattcttgtctggaatgagtctttaggtggagcctttgagttgtcttctatgggaattcgtgtagatgaagaaactcttagacgtcaggtggaaattacaggtgatgaagaccgcttggaattggaatggcacaagtctttgttgaatggtctattcccattgacaatcggtggaggaattggacaatctcgtatggccatgttcctacttcgcaagagacacatcggagaagtgcaaacaagtgtttggcctcaagaagtccgcgatacttacgaaaatattttgtag

SEQ ID NO: 1544 - protein, 330 aa, Streptococcus pneumoniae
MKKSFIHQQEEISFVKNTFTQYLKDKLEVVEVQGPILSKVGDGMQDNLSGVENPVSVKVLQIPDATYEVVHSLAKWKRHTLARFGFGEGEGLFVHMKALRPDEDSLDATHSVYVDQWDWEKVIPNGKRNIVYLKETVEKIYKAIRLTELAVEARYDIESILPKQITFIHTEELVERYPDLTPKERENAICKEFGAVFLIGIGGELPDGKPHDGRAPDYDDWTSESENGYKGLNGDILVWNESLGGAFELSSMGIRVDEETLRRQVEITGDEDRLELEWHKSLLNGLFPLTIGGGIGQSRMAMFLLRKRHIGEVQTSVWPQEVRDTYENIL

SEQ ID NO: 1545 - DNA, 993 bp, Treponema pallidum
  CDS (1)..(993): transl_table=11
atggaaaaatcatttattttgcaacagcaggggatcagctttgccaagcacacatttacccaaaagctgatggagcacctgggactcatagaagttcagggacctcttctgagccaggtgggtgacgggatccaagatggtctttcaggtcgggagaaggcggtttccgtctccgtgaagcagatcccgggtactgcctttgaggttgtgcactcgttagcaaagtggaagcgccacacgcttgcccgctacggctttcaggataatgagggtttgtttgtacacatgatcgcgctccgcccggatgaagatttcttggatcaggtgcgctctgtgtgtgtggatcagtgggattgggagaaggtagtaccggtagggtcgagaaatcttgcgtatctgaaggacacggtgcgtaaggtctacggtgctcttcgggagtcggaggtgttggtaagtgagaggttcggcctacgggcgtttttgcctgcggatattgtatttgtacagagcgaggagctggtgcggcgttatccgcatttagacagcaaggggcgtgaggatgctatttgcaaagagcatggtgcggtgttcctgattgggatcggtggtgtgctttctgacggcaagccgcacgatgtgcgcgctccagattacgatgactggacgacgccttccgaaggggaatacaagggcctgaacggcgatattttggtgtggaatccagtgttggggcgtgcgtttgaagtgtcttcgatggggatacgggtggacgagggtgcgcttcgcacgcagctggctcttactggcgatgaggatagtctggcatgcagctggcaccaggatctgatcaatggtcgtcttcctcaatccatcggaggtggtatcggtcaatcccgtttggcgatgctactcctacaaaggaagcatattggtgaagttcaggccagtgtatggccgcggtcggtgagggaggagttcgagaacattctttga

SEQ ID NO: 1546 - protein, 330 aa, Treponema pallidum
MEKSFILQQQGISFAKHTFTQKLMEHLGLIEVQGPLLSQVGDGIQDGLSGREKAVSVSVKQIPGTAFEVVHSLAKWKRHTLARYGFQDNEGLFVHMIALRPDEDFLDQVRSVCVDQWDWEKVVPVGSRNLAYLKDTVRKVYGALRESEVLVSERFGLRAFLPADIVFVQSEELVRRYPHLDSKGREDAICKEHGAVFLIGIGGVLSDGKPHDVRAPDYDDWTTPSEGEYKGLNGDILVWNPVLGRAFEVSSMGIRVDEGALRTQLALTGDEDSLACSWHQDLINGRLPQSIGGGIGQSRLAMLLLQRKHIGEVQASVWPRSVREEFENIL

SEQ ID NO: 1547 - DNA, 25 bp, Artificial sequence
  primer
atgaaaaccgcttacattgccaaac

SEQ ID NO: 1548 - DNA, 22 bp, Artificial sequence
  primer
ttacagcagagaagggacgctc

SEQ ID NO: 1549 - protein, 339 aa, Artificial sequence
  consensus sequence
  Variant (2)..(4): Xaa in position 2 to 4 is any amino acid
  Variant (6)..(7): Xaa in position 6 to 7 is any amino acid
  Variant (9)..(11): Xaa in position 9 to 11 is any amino acid
  Variant (13)..(15): Xaa in position 13 to 15 is any amino acid
  Variant (17)..(20): Xaa in position 17 to 20 is any amino acid
  Variant (22)..(23): Xaa in position 22 to 23 is any amino acid
  Variant (25)..(31): Xaa in position 25 to 31 is any amino acid
  Variant (33)..(34): Xaa in position 33 to 34 is any amino acid
  Variant (36)..(36): Xaa in position 36 is any amino acid
  Variant (38)..(38): Xaa in position 38 is any amino acid
  Variant (40)..(40): Xaa in position 40 is any amino acid
  Variant (41)..(42): Xaa in position 41 to 42 is any or no amino acid
  Variant (44)..(45): Xaa in position 44 to 45 is any amino acid
  Variant (47)..(56): Xaa in position 47 to 56 is any amino acid
  Variant (57)..(61): Xaa in position 57 to 61 is any or no amino acid
  Variant (63)..(63): Xaa in position 63 is any amino acid
  Variant (73)..(74): Xaa in position 73 to 74 is any amino acid
  Variant (76)..(83): Xaa in position 76 to 83 is any amino acid
  Variant (87)..(89): Xaa in position 87 to 89 is any amino acid
  Variant (91)..(91): Xaa in position 91 is any amino acid
  Variant (93)..(93): Xaa in position 93 is any amino acid
  Variant (95)..(95): Xaa in position 95 is any amino acid
  Variant (98)..(98): Xaa in position 98 is any amino acid
  Variant (99)..(99): Xaa in position 99 is any or no amino acid
  Variant (101)..(103): Xaa in position 101 to 103 is any amino acid
  Variant (106)..(106): Xaa in position 106 is any amino acid
  Variant (115)..(121): Xaa in position 115 to 121 is any amino acid
  Variant (122)..(122): Xaa in position 122 is any or no amino acid
  Variant (124)..(127): Xaa in position 124 to 127 is any amino acid
  Variant (130)..(131): Xaa in position 130 to 131 is any amino acid
  Variant (133)..(134): Xaa in position 133 to 134 is any amino acid
  Variant (136)..(142): Xaa in position 136 to 142 is any amino acid
  Variant (144)..(156): Xaa in position 144 to 156 is any amino acid
  Variant (157)..(161): Xaa in position 157 to 161 is any or no amino acid
  Variant (163)..(164): Xaa in position 163 to 164 is any amino acid
  Variant (166)..(166): Xaa in position 166 is any amino acid
  Variant (168)..(172): Xaa in position 168 to 172 is any amino acid
  Variant (174)..(176): Xaa in position 174 to 176 is any amino acid
  Variant (179)..(179): Xaa in position 179 is any amino acid
  Variant (181)..(182): Xaa in position 181 to 182 is any amino acid
  Variant (184)..(184): Xaa in position 184 is any amino acid
  Variant (187)..(188): Xaa in position 187 to 188 is any amino acid
  Variant (190)..(190): Xaa in position 190 is any amino acid
  Variant (192)..(194): Xaa in position 192 to 194 is any amino acid
  Variant (198)..(200): Xaa in position 198 to 200 is any amino acid
  Variant (203)..(204): Xaa in position 203 to 204 is any amino acid
  Variant (206)..(207): Xaa in position 206 to 207 is any amino acid
  Variant (208)..(208): Xaa in position 208 is any or no amino acid
  Variant (210)..(211): Xaa in position 210 to 211 is any amino acid
  Variant (214)..(214): Xaa in position 214 is any amino acid
  Variant (223)..(223): Xaa in position 223 is any amino acid
  Variant (224)..(236): Xaa in position 224 to 236 is any or no amino acid
  Variant (243)..(243): Xaa in position 243 is any amino acid
  Variant (245)..(247): Xaa in position 245 to 247 is any amino acid
  Variant (249)..(251): Xaa in position 249 to 251 is any amino acid
  Variant (252)..(252): Xaa in position 252 is any or no amino acid
  Variant (254)..(254): Xaa in position 254 is any amino acid
  Variant (263)..(265): Xaa in position 263 to 265 is any amino acid
  Variant (267)..(268): Xaa in position 267 to 268 is any amino acid
  Variant (270)..(283): Xaa in position 270 to 283 is any amino acid
  Variant (285)..(287): Xaa in position 285 to 287 is any amino acid
  Variant (289)..(292): Xaa in position 289 to 292 is any amino acid
  Variant (294)..(295): Xaa in position 294 to 295 is any amino acid
  Variant (305)..(306): Xaa in position 305 to 306 is any amino acid
  Variant (308)..(309): Xaa in position 308 to 309 is any amino acid
  Variant (311)..(313): Xaa in position 311 to 313 is any amino acid
  Variant (317)..(317): Xaa in position 317 is any amino acid
  Variant (320)..(322): Xaa in position 320 to 322 is any amino acid
  Variant (324)..(334): Xaa in position 324 to 334 is any amino acid
  Variant (335)..(338): Xaa in position 335 to 338 is any or no amino acid
IXXXKXXFXXXLXXXLXXXXVXXPXXXXXXXGXXDXLXGXXXEXXVXXXXXXXXXXXXXXXEXVHSLAKWKRXXLXXXXXXXXEGLXXXMXAXRXDEXXLXXXHSXYVDQWDWEXXXXXXXXRXXXXLKXXVXXIXXXXXXXEXXXXXXXXXXXXXXXXXXPXXIXFXXXXXLXXXYPXLXXKXREXXIXKXXXAVFXXXIGXXLXXXGXXHDXRAPDYDDWXXXXXXXXXXXXXXLNGDILXWXXXLXXXXEXSSMGIRVDXXXLXXQXXXXXXXXXXXXXXHXXXLXXXXPXXIGGGIGQSRXXMXXLXXXHIGXVQXXXWXXXXXXXXXXXXXXXL

SEQ ID NO: 1550 - protein, 40 aa, Artificial sequence
  protein pattern
  Variant (2)..(3): Xaa in position 2 to 3 is any amino acid
  Variant (4)..(5): Xaa in position 4 to 5 is Ile, Leu or Val
  Variant (6)..(8): Xaa in position 6 to 8 is any amino acid
  Variant (9)..(9): Xaa in position 9 is Phe, Leu or Met
  Variant (11)..(11): Xaa in position 11 is any amino acid
  Variant (12)..(12): Xaa in position 12 is Ser or Thr
  Variant (22)..(22): Xaa in position 22 is Ile, Leu or Met
  Variant (23)..(23): Xaa in position 23 is Ala, Cys, Ser, Thr or Val
  Variant (25)..(25): Xaa in position 25 is any amino acid
  Variant (26)..(26): Xaa in position 26 is Phe or Leu
  Variant (28)..(30): Xaa in position 28 to 30 is any amino acid
  Variant (34)..(34): Xaa in position 34 is Glu or Gln
  Variant (37)..(37): Xaa in position 37 is Ala, Cys, Ser, Thr or Val
  Variant (38)..(38): Xaa in position 38 is Gly or Ser
  Variant (39)..(39): Xaa in position 39 is Ile, Met or Val
HXXXXXXXXPXXIGGGIGQSRXXMXXLXXXHIGXVQXXXW

SEQ ID NO: 1551 - protein, 36 aa, Artificial sequence
  protein pattern
  Variant (2)..(2): Xaa in position 2 is any or no amino acid
  Variant (4)..(4): Xaa in position 4 is any or no amino acid
  Variant (13)..(13): Xaa in position 13 is any amino acid
  Variant (14)..(14): Xaa in position 14 is Ala or Thr
  Variant (16)..(17): Xaa in position 16 to 17 is any amino acid
  Variant (18)..(18): Xaa in position 18 is Phe, His or Tyr
  Variant (19)..(19): Xaa in position 19 is Asp, Gly or Asn
  Variant (20)..(24): Xaa in position 20 to 24 is any amino acid
  Variant (26)..(26): Xaa in position 26 is Ile or Leu
  Variant (27)..(27): Xaa in position 27 is any amino acid
  Variant (28)..(28): Xaa in position 28 is Ala, Thr or Val
  Variant (29)..(29): Xaa in position 29 is any amino acid
  Variant (31)..(31): Xaa in position 31 is any amino acid
  Variant (33)..(33): Xaa in position 33 is Ile or Leu
  Variant (35)..(35): Xaa in position 35 is any amino acid
EXVXHSLAKWKRXXLXXXXXXXXXGXXXXMXAXRXD

SEQ ID NO: 1552 - protein, 18 aa, Artificial sequence
  protein pattern
  Variant (2)..(2): Xaa in position 2 is Asp, Ser or Thr
  Variant (3)..(4): Xaa in position 3 to 4 is any amino acid
  Variant (7)..(7): Xaa in position 7 is Ala, Ile or Val
  Variant (16)..(17): Xaa in position 16 to 17 is any amino acid
  Variant (18)..(18): Xaa in position 18 is Ile, Met or Val
LXXXHSXYVDQWDWEXXX

SEQ ID NO: 1553 - protein, 18 aa, Artificial sequence
  protein pattern
  Variant (2)..(3): Xaa in position 2 to 3 is any amino acid
  Variant (6)..(6): Xaa in position 6 is any amino acid
  Variant (9)..(9): Xaa in position 9 is Ala or Pro
  Variant (15)..(17): Xaa in position 15 to 17 is any amino acid
  Variant (18)..(18): Xaa in position 18 is Gly, Asn, Ser, Thr or Val
GXXHDXRAXDYDDWXXXX

SEQ ID NO: 1554 - protein, 24 aa, Artificial sequence
  protein pattern
  Variant (2)..(5): Xaa in position 2 to 5 is any amino acid
  Variant (6)..(6): Xaa in position 6 is any or no amino acid
  Variant (8)..(8): Xaa in position 8 is Ile, Leu or Val
  Variant (16)..(16): Xaa in position 16 is Asp or Ser
  Variant (17)..(18): Xaa in position 17 to 18 is any amino acid
  Variant (19)..(19): Xaa in position 19 is Ala, Ser, Thr or Val
  Variant (21)..(22): Xaa in position 21 to 22 is any amino acid
  Variant (24)..(24): Xaa in position 24 is Leu or Val
LXXXXXEXSSMGIRVXXXXLXXQX

SEQ ID NO: 1555 - protein, 26 aa, Artificial sequence
  protein pattern
  Variant (2)..(3): Xaa in position 2 to 3 is any amino acid
  Variant (4)..(4): Xaa in position 4 is Ala, Ile, Leu or Val
  Variant (6)..(7): Xaa in position 6 to 7 is any amino acid
  Variant (9)..(9): Xaa in position 9 is Ala, Glu, Gln, Ser or Thr
  Variant (10)..(11): Xaa in position 10 to 11 is any amino acid
  Variant (13)..(15): Xaa in position 13 to 15 is any amino acid
  Variant (17)..(17): Xaa in position 17 is any amino acid
  Variant (18)..(18): Xaa in position 18 is Ile, Leu or Val
  Variant (19)..(19): Xaa in position 19 is any amino acid
  Variant (20)..(20): Xaa in position 20 is Glu or Arg
  Variant (22)..(22): Xaa in position 22 is Gln, Ser or Thr
  Variant (23)..(23): Xaa in position 23 is Ala, Gly or Ser
  Variant (25)..(25): Xaa in position 25 is any or no amino acid
IXXXKXXFXXXLXXXLXXXXVXXPXL

SEQ ID NO: 1556 - protein, 10 aa, Artificial sequence
  protein pattern
  Variant (2)..(2): Xaa in position 2 is Asp, Gly or Asn
  Variant (4)..(4): Xaa in position 4 is Asn or Ser
  Variant (6)..(6): Xaa in position 6 is any amino acid
  Variant (8)..(8): Xaa in position 8 is any amino acid
  Variant (9)..(9): Xaa in position 9 is Ala or Pro
DXLXGXEXXV

SEQ ID NO: 1557 - DNA, 1050 bp, Escherichia coli
  CDS (1)..(1050): transl_table=11
atggcaacaggcacgcagcccgatgctgggcagatcctcaactcgctgattaacagtattttgttaatcgatgacaacctggcgatccattacgccaaccctgccgcgcaacaactgctcgcccaaagctcccgcaaattgtttggtacaccgttaccggaactgttgagctacttctcattaaatatcgagctgatgcaagaaagtctggaggcggggcaaggttttaccgataacgaagtgacgctggtcatcgacgggcgctcgcatatcctttctgtgacggcccagcgtatgccggacggcatgatcctgctggagatggctccgatggataaccagcgccgcttaagtcaggaacagctacagcacgcccagcaggttgctgcccgtgatttagtgcgcggcctggcacatgagattaaaaatccgcttggcggtttacgtggcgcggcgcagctgctcagcaaagcgttacctgacccatcactactcgaatataccaaagtgattatcgaacaggcggaccggctgcgaaatctggtcgaccgtctgttggggccgcagctgcccggtacgcgcgttaccgaaagtattcacaaagtggctgaacgcgtggtaacgctggtgtcgatggaactgccggacaacgtgcggttgattcgtgattacgatcccagcctaccggaactggcgcacgacccggatcaaattgaacaggtcttgctgaatattgtgcgcaatgcgctacaggcgctggggccggaaggcggtgaaatcattctgcgtacccgcaccgcgtttcaactgaccttacacggcgagcgctaccggctggcggcgcggattgatgtggaagataacgggccgggcattccgcctcatttgcaggatacgctgttttacccgatggtcagcggccgcgaaggtggcaccgggcttggcttatccatcgctcgtaatttgattgatcagcattcaggcaaaattgaatttaccagttggccagggcataccgagttctcggtttacctgcctatcaggaaataa

SEQ ID NO: 1558 - protein, 349 aa, Escherichia coli
MATGTQPDAGQILNSLINSILLIDDNLAIHYANPAAQQLLAQSSRKLFGTPLPELLSYFSLNIELMQESLEAGQGFTDNEVTLVIDGRSHILSVTAQRMPDGMILLEMAPMDNQRRLSQEQLQHAQQVAARDLVRGLAHEIKNPLGGLRGAAQLLSKALPDPSLLEYTKVIIEQADRLRNLVDRLLGPQLPGTRVTESIHKVAERVVTLVSMELPDNVRLIRDYDPSLPELAHDPDQIEQVLLNIVRNALQALGPEGGEIILRTRTAFQLTLHGERYRLAARIDVEDNGPGIPPHLQDTLFYPMVSGREGGTGLGLSIARNLIDQHSGKIEFTSWPGHTEFSVYLPIRK

SEQ ID NO: 1559 - DNA, 1050 bp, Yersinia pestis
  CDS (1)..(1050): transl_table=11
atggcaacaggcacgctgcccgatgctgggcagatcctcaatactctcattaatagcattctgctgttagatgatgatttggctattcattatgccaaccccgcagcccagcaacttctggcgcaaagctcccgtaaactttttggtacacctctgcctgatttattaggctatttttcactgaatatcgtgttgatgcgagagagtttgcaagccgggcaagggtttactgataacgaagtgacattagttgttgatggccgggcacatattttatcgctgaccgcacagtccctagcggaagggtttattctgctagaattagccccgatggataatcagcgccggttaagccaagagcaattgcaacacgctcaacaagttgccgcacgtgatttagtgcgcggattggctcacgagattaaaaacccactcggaggcctacggggcgctgcgcaattattagctaaagcgttacccgatccagcgttgctggaatatacccaagtgattattgaacaggcggatcgcctacgtaatttagttgatcgcttgttaggcccacagcggcctggccaacatattacacagagtattcatcaggttgctgagcgggtttgccaattagtctcattggaaaaaccagataacgtcacgttaatccgcgactatgatccaagcctccctgagcttgcccatgatccagaccaaatagaacaagtgctgctgaatatcacccgtaacgcattacaggctctcggggagactggcggcacaattacacttcgcacccgaaccgctttccaagtgacgctacatggcatgcgctaccgtttagccgctcggattgatattgaagatgacggtcccggtgtaccaacgcaattacaagataccgtattctatccgatggtcagtggccgcgagggcggtacgggtcttggtttatctatcgcccgtaatcttatcgatcagcattcgggtaaaattgaatttaacagttggccaggacacaccgagttttcggtttacctgcctattcgccagtga

SEQ ID NO: 1560 - protein, 349 aa, Yersinia pestis
MATGTLPDAGQILNTLINSILLLDDDLAIHYANPAAQQLLAQSSRKLFGTPLPDLLGYFSLNIVLMRESLQAGQGFTDNEVTLVVDGRAHILSLTAQSLAEGFILLELAPMDNQRRLSQEQLQHAQQVAARDLVRGLAHEIKNPLGGLRGAAQLLAKALPDPALLEYTQVIIEQADRLRNLVDRLLGPQRPGQHITQSIHQVAERVCQLVSLEKPDNVTLIRDYDPSLPELAHDPDQIEQVLLNITRNALQALGETGGTITLRTRTAFQVTLHGMRYRLAARIDIEDDGPGVPTQLQDTVFYPMVSGREGGTGLGLSIARNLIDQHSGKIEFNSWPGHTEFSVYLPIRQ

SEQ ID NO: 1561 - DNA, 1050 bp, Enterobacter cloacae
  CDS (1)..(1050): transl_table=11
atggcaactggcacgctgcccgatgctgggcagatcctcaattctttgattaacagtattttgctggtcgacgacgagctggcggtgcattacgccaacccggcggcgcaacagctgctcgcccaaagcgccagaaaactgtttggcacgccgctgccggaactgctgagctatttctcgctgaatattggtctgatgcaggagagtttgcaggcgggtcagggcttcaccgataacgaagtgacgctggtgattgacggacgctcgcatattttgtccctcaccgcacagcgcctgccagatggcatgattctgctggaaatggcgccgatggataaccaacgtcgtctcagccaggagcagcttcagcatgcgcagcagattgcggcgcgcgacctggtgcgcgggctggcccatgagatcaaaaacccgctgggcggcttacgcggtgcggcacagcttttgaccaaagcgctgcctgaccctgccctggcggagtataccaacgtcattattgagcaggcggaccgtctgcgtaatctggtcgatcgcctgctcgggccacagcagccggggatgcatgtttcagaaagcattcacaaggtcgcggagcgggtggtgaaactcgtctctatggagctgccggataacgtcacgctggtgcgtgattacgacccaagcctgccggagctggcgcacgatccggaccagattgaacaggtgctgttgaacattgtgcgtaacgcgttgcaggcgctgggcccggagggtggcgaaattattctgcgtacccgcaccgcgttccagctgacgctgcacggcgtgcgttatcgtctggcggcacgtattgatgtggaagataacgggccggggatcccgccgcatctccaggacactctgttctacccgatggtcagcggtcgcgaaggcggcaccgggctggggttatccatagcccgaaatttgattgaccaacactccggcaaaattgaatttaccagttggccgggacataccgagttttcggttttcctgccgattaaaaaataa

SEQ ID NO: 1562 - protein, 349 aa, Enterobacter cloacae
MATGTLPDAGQILNSLINSILLVDDELAVHYANPAAQQLLAQSARKLFGTPLPELLSYFSLNIGLMQESLQAGQGFTDNEVTLVIDGRSHILSLTAQRLPDGMILLEMAPMDNQRRLSQEQLQHAQQIAARDLVRGLAHEIKNPLGGLRGAAQLLTKALPDPALAEYTNVIIEQADRLRNLVDRLLGPQQPGMHVSESIHKVAERVVKLVSMELPDNVTLVRDYDPSLPELAHDPDQIEQVLLNIVRNALQALGPEGGEIILRTRTAFQLTLHGVRYRLAARIDVEDNGPGIPPHLQDTLFYPMVSGREGGTGLGLSIARNLIDQHSGKIEFTSWPGHTEFSVFLPIKK

SEQ ID NO: 1563 - DNA, 1050 bp, Xanthomonas campestris pv. campestris
  CDS (1)..(1050): transl_table=11
atgtcgtcatccacgccttccctcgacagccttggtacgccggtggcctgggccgaccgcgacgggcgcgtactgggggtcaatcccgcgttcgcgcgctggctcggcgtgagtgcgcgccggctggtggaccagccgctggccgcgttggaagtgcagggcgacgcgctggcgcgctttctgctcaacgacgagcgcgacatcctgcggctgcaccggctggccctgggcctgcccaatgacgcgccgcgctttgccgaaggctggctgtcgcggctggacgacggcggctggctgctggaaacccatccggtcgacgaattccccgctttggaccccacccacgcgttgcccaacgcattgagcgcggcgctgaagggcctggcccacgagctgcgcaacccgctggccgggctcaagggcgccgcccagttgctggcgcgccgcgcggccgggcgcgacgaggacgagcgcgagttgatcgagttgatcggcaccgaaatcgaacgcctcaacaccctgctcgaacgcctgctttcgccctcacccctacgcccgcacgagtgcctcaatatccatgtggtgctcgaacgcgtgctgcggctagctgaggccgaaggcggctggtcggtgcaggtgcagcgcgattacgaccccagcatccccgacatcctcggcgacgtggaccggctcacccaggcggtgtggaacctggtacgcaacgccttccaggccggcgccacgcgggtgaccctgcgcacccgcgtcgagcatggtcagcgcatccgcgaccgcgtgcacgccatgtcgctgcggctggaaatcatcgacgacggcggcggcgtgcctgaagaactggccgagcacctgttcctgccgctggtcagcgggcgtgccgaaggcagcgggctgggcctggcgctggcgcagcaggtctcgcgcgaacaccacggcacgctgacctaccgctcgcggccgggccataccgttttcaccctgctgctgcccgagctggccggcgatcacgacaaggagcatctgcatggctga

SEQ ID NO: 1564 - protein, 349 aa, Xanthomonas campestris pv. campestris
MSSSTPSLDSLGTPVAWADRDGRVLGVNPAFARWLGVSARRLVDQPLAALEVQGDALARFLLNDERDILRLHRLALGLPNDAPRFAEGWLSRLDDGGWLLETHPVDEFPALDPTHALPNALSAALKGLAHELRNPLAGLKGAAQLLARRAAGRDEDERELIELIGTEIERLNTLLERLLSPSPLRPHECLNIHVVLERVLRLAEAEGGWSVQVQRDYDPSIPDILGDVDRLTQAVWNLVRNAFQAGATRVTLRTRVEHGQRIRDRVHAMSLRLEIIDDGGGVPEELAEHLFLPLVSGRAEGSGLGLALAQQVSREHHGTLTYRSRPGHTVFTLLLPELAGDHDKEHLHG

SEQ ID NO: 1565 - DNA, 1143 bp, Mesorhizobium loti MAFF303099
  CDS (1)..(1143): transl_table=11
atgaacgccatcgctggccagggagctgaaatggtggacgccgcccagatcgtcctcaacaccatccgccgcccggtgatcatgatcagcgaggaaggcttcatcaccttcgccaatgccgatgccgaggacttttttcgctccagcgcgaccatgctggcgcgcaacaccctgtccaagctcgtccccttcggcagtccgctgctgaccttggtcgatcaggtgcgcgagcgccgggctccggtcaacgagtatcgggtcgatgtgtcgtcgccacgcctcggcatcgagaaggtcgtcgatctctatgtcgcgccggtgccggaattcccgggctccgtcgtggtcatgttccaggaacggtccatggccgacaagatcgaccggcagatgacgcatcgcggtgccgcgcgctcggtgactggcctggcggcgatgctcgcccatgagatcaagaacccgctctccggcatccgcggcgccgcgcaactgctcgaactgtccgcctccgacgaggaccgcgcgttgacccggctgatcaccgacgagacggaccgcatcgtctcgctggtcgatcgcatggaggtgttttccgacgagcggccgatcgatcgctatcccgtcaacatccatgtcgttctcgaccatgtgaaggcgatcgcaaagaacggttttgccaagaaaatcaggatattggaggactatgatccatcattgcctccagtgttcgccaaccgcgaccagctgatccaggtgttcctgaacctggtcaagaacgccgccgaggcgatcggcaccgacccgcatggcgagatcgtgctgtcgaccgccttccggccgggcattcgcgtatcggtgccgggaacgcaggaccgcgtgtcgctgcccctggagttctgcgtgcgcgacaatggccccggtgtctcggaggatatcctgccgatcctgtttgatcctttcatcaccaccaagccgaacggctcggggctggggcttgcgctggtcgccaagatcgtcggcgagcatggcggcatcatcgaatgcgaatcgaccccgcgaggaaccaccttccgcatcctgatgccggcctggaaggaaacgccgttcggcgctgaagaagacggtgaaggagaccgcaaatga

SEQ ID NO: 1566 - protein, 380 aa, Mesorhizobium loti MAFF303099
MNAIAGQGAEMVDAAQIVLNTIRRPVIMISEEGFITFANADAEDFFRSSATMLARNTLSKLVPFGSPLLTLVDQVRERRAPVNEYRVDVSSPRLGIEKVVDLYVAPVPEFPGSVVVMFQERSMADKIDRQMTHRGAARSVTGLAAMLAHEIKNPLSGIRGAAQLLELSASDEDRALTRLITDETDRIVSLVDRMEVFSDERPIDRYPVNIHVVLDHVKAIAKNGFAKKIRILEDYDPSLPPVFANRDQLIQVFLNLVKNAAEAIGTDPHGEIVLSTAFRPGIRVSVPGTQDRVSLPLEFCVRDNGPGVSEDILPILFDPFITTKPNGSGLGLALVAKIVGEHGGIIECESTPRGTTFRILMPAWKETPFGAEEDGEGDRK

SEQ ID NO: 1567 - DNA, 1077 bp, Pseudomonas aeruginosa PAO1
  CDS (1)..(1077): transl_table=11
atgccgaccgataccctgcaccgactgttgctcgacaacctgaccaccgcggtgatcctgctcaacggcgaactgcgcctggagtacatgaacccggcggcggagatgctcctggccgtgagcggccagcgcagccacgggcaattcatcagcgagctgttcaccgaatcgccggaagccttgaactcgctgcgccaggcggtggaacaggcacatccgttcaccaagcgcgaagcgaccctgacctcgatcaccggcgtcagcatcacggtcgactatgcggtgacgcccatcctcaaccgcaacgagacgctgctgctgctcgaggtccatccgcgcgaccggctgatgcggatcacccgcgaagaagcgcagttgtccaagcaggagaccaccaagctgctggtgcgcgggctcgcccacgagatcaagaacccgctcggcggcatccgcggcgcagcgcaactgctgtctcgcgagttgccggaagagtcgctgaaggactacaccaacgtcatcatcgaagaagccgaccggttgcggaacctggtggaccgcatgctcggctcgaacaaactgccgaacctggcgccgaccaacatccatgaagtgctggagcgggtcagcagcctggtggaagcggagagccagggcagcatcaccctggtccgcgactacgacccgagcatccccgacctgctgctcgaccgcgagcaaatgatccaggccgtgctcaacatggtacgcaacgccatgcaggcgatcgcagggcagaacgacctgcgcctcggtcgcatcaccctgcgcagccgtaccctgcgccagttcaccatcggccacacgcgtcaccgcctggtgtgcaaggtggagatcatcgacaacggcccgggcattccggccgagctccaggaaaccatcttctaccccatggtcagcggccgtccggacggtaccggactcggcctggccatcgcccagaacatcatcagccagcaccaggggctgattgaatgcgagagccaccccggccataccgtattcagtctgttcctgcccctggaacaaggagtgcattga

SEQ ID NO: 1568 - protein, 358 aa, Pseudomonas aeruginosa PAO1
MPTDTLHRLLLDNLTTAVILLNGELRLEYMNPAAEMLLAVSGQRSHGQFISELFTESPEALNSLRQAVEQAHPFTKREATLTSITGVSITVDYAVTPILNRNETLLLLEVHPRDRLMRITREEAQLSKQETTKLLVRGLAHEIKNPLGGIRGAAQLLSRELPEESLKDYTNVIIEEADRLRNLVDRMLGSNKLPNLAPTNIHEVLERVSSLVEAESQGSITLVRDYDPSIPDLLLDREQMIQAVLNMVRNAMQAIAGQNDLRLGRITLRSRTLRQFTIGHTRHRLVCKVEIIDNGPGIPAELQETIFYPMVSGRPDGTGLGLAIAQNIISQHQGLIECESHPGHTVFSLFLPLEQGVH

SEQ ID NO: 1569 - DNA, 1086 bp, Ralstonia solanacearum GMI1000
  CDS (1)..(1086): transl_table=11
atgccgcctctgccgttctcgcacagtgcgccgccgtcgtatcccgggctcgatgccgtgcccaatcccgtcctcttcgtccgccatccgtcgctgacgatcttctacgccaatcccgccgccgaggccacgctggccgtgtcgcgccgccaactggtgggcacgtcgctgcacgagctgttcgccgatccggtcgagctgatggagatgatcggcacggtggcgagccgcctgttcgacgccaagcgccgcgatctgacgctcgagcggccgggccacgaggcgctgcacgtgcacgcggtggtcggcaccatcgatttcgagccgggctgcgccctgctggagctgctgcccaacgagcagaagatgcgcagcgagcgcgaagagcgcctgctggacctcacctccgccaacaaggaactgatccgcaacctggcgcacgagatcaagaacccgctgggcggcatccgcggcgcggcgcagttgctggagttcgagctgcccgagcgtgcgctgcgcgagtacacccaggtcatcatcaaggagtccgaccggctgcagacgctggtggaccgcctgctggagccccaccggcatccgcacatcgtcggcgacgtgaacatccacgaggtgctcgagcgcgtgcgctcggtggtgctggcggagtttccgcagggcctgcgcatcgtgcgcgactacgacgccagcctgcccgagttccgcggcgacaaggagcaactgatccaggccgtgctcaacatcgtccacaacgcggcgcatgccctggggccgcgcatcgcgcagggcaatgccgaaatcattctgcgcacgcgggtggcgcgccaggtcacgatcgccaagcatctctacaagctggcattggacttgcatgtggtggacaacggtcctggtatcccggacgacatccgcgagcgcatcttcttcccgctggtgtccggacgggagggggggagcgggctgggcctgacgctggcgcagaccttcgtgcagcagcacgacggcctgatcgaatgcgacagcaggccgggcctgaccgatttccgcatcctggtgccgctgcattga

SEQ ID NO: 1570 - protein, 361 aa, Ralstonia solanacearum GMI1000
MPPLPFSHSAPPSYPGLDAVPNPVLFVRHPSLTIFYANPAAEATLAVSRRQLVGTSLHELFADPVELMEMIGTVASRLFDAKRRDLTLERPGHEALHVHAVVGTIDFEPGCALLELLPNEQKMRSEREERLLDLTSANKELIRNLAHEIKNPLGGIRGAAQLLEFELPERALREYTQVIIKESDRLQTLVDRLLEPHRHPHIVGDVNIHEVLERVRSVVLAEFPQGLRIVRDYDASLPEFRGDKEQLIQAVLNIVHNAAHALGPRIAQGNAEIILRTRVARQVTIAKHLYKLALDLHVVDNGPGIPDDIRERIFFPLVSGREGGSGLGLTLAQTFVQQHDGLIECDSRPGLTDFRILVPLH

SEQ ID NO: 1571 - DNA, 1056 bp, Xanthomonas axonopodis pv. citri str. 306
  CDS (1)..(1056): transl_table=11
atggtgacgtcctcttccatgccatcgctggacagcctgggcacaccggtcgcctgggccgaccgcgagggccgcgtgctgggcgtcaacccggcgtttgcccgctggctcggggtcagtgcacggcggttggtcgaacagcccctggccgcgctggaagtgcagggcgatgcgctggcgcgcttcctgctcaacgacgagcgcgacatattgcgtctgcaccggctggcgctgggcctgcccaacgacgcgccgcgctttgccgaaggctggctgtcgcggctggacgatggcggctggctgctggaaacccacccggtcgacgaattccccgcgctcgatcccacccacgccctgcccaacgccttgagcgctgcgctcaaagggttggcgcacgaactgcgcaatccgctggccgggctgaagggcgccgcgcagctgctggcacgccgcgcggccgggcgcgacgaagacgaacgcgagctgatcgagctgatcggcaccgagatcgagcgcctcaataccttgctcgaacggctgctgtcgcccaccccggcgcgcccgcacgaccgcctcaacatccatgtggtgctcgaacgggtgttgcgcctggccgaagccgagggcggctggtcggtgcaggtgcagcgcgactacgaccccagcattcccgacattctgggcgatggcgaccgcctgacccaggcggtctggaacctggtgcgtaacgccttccaggccggcgccacgcgcgtgacgctgcgcacccgcgtcgagcatggccagcgcatccgcgaccgcgtgcatgcgatgtcgctgcggctggaaatcatcgacgacggcggcggcgtgccggaagaactggccgagcacctgtttctgccactggtcagcggccgcgccgaaggcagcgggctgggcctggcgctggcccagcaggtctcgcgcgaacaccacggcacgctgacctatcgctcgcgtccgggccataccgttttcaccctgctgctgcccgagctggccggcgatcacgacaaggagcatctgcatggctga

SEQ ID NO: 1572 - protein, 351 aa, Xanthomonas axonopodis pv. citri str. 306
MVTSSSMPSLDSLGTPVAWADREGRVLGVNPAFARWLGVSARRLVEQPLAALEVQGDALARFLLNDERDILRLHRLALGLPNDAPRFAEGWLSRLDDGGWLLETHPVDEFPALDPTHALPNALSAALKGLAHELRNPLAGLKGAAQLLARRAAGRDEDERELIELIGTEIERLNTLLERLLSPTPARPHDRLNIHVVLERVLRLAEAEGGWSVQVQRDYDPSIPDILGDGDRLTQAVWNLVRNAFQAGATRVTLRTRVEHGQRIRDRVHAMSLRLEIIDDGGGVPEELAEHLFLPLVSGRAEGSGLGLALAQQVSREHHGTLTYRSRPGHTVFTLLLPELAGDHDKEHLHG

SEQ ID NO: 1573 - DNA, 1104 bp, Brucella suis 1330
  CDS (1)..(1104): transl_table=11
gtgcttgatgcgatcagccagccggtcatcatggtgagtgcggataatcacatcgtctatgccaatctggatgcggagcagtttttcctgtccggctcatccattctggcgcgaaaccggctggaatcctttcttcccttcggaagccccctgcttgcgctggtcgatcaggtgcgggcgagccagatgccggtcaacgaatatcgtgtcgatatttcttctccgcgtctgggcgccgaacggatcgtggatatttatgttgcaccggtggcggaaatgccgggagcggtggtcattctcttcaaggaaaagagcatggcggaaaagatcgaccgccagatgacgcatcgcggtgcggcgcgttcagttaccggccttgcatccatgctggcgcacgagatcaagaacccgctttccggtattcgcggtgcggcgcagcttctggaacaggtggtcagcgatgaagatcgcgcgctggcgcggcttatcaccgaggagaccgaccgtattgtctcgcttgtggaccggatggaggttttttccgacgagcgccccatcgagcgcacggcggtcaatatccatgccgtgctggaccatgtgaaggccattgcgcgcaatggtttcgcacggaaaatccgcttcagcgaggattacgatccatccctgccgccggtctatgccaatcgcgaccagcttgtgcaggtgtttctcaatctggtgaaaaatgcctgcgaggcgatgggtggccgcgatggcggcgagatcgtgctttcgacagcctatcgccccggcattcgcttgcaggtgccgggcgcgcgcgaccgcgtggcgctgccgctggagttctgcgtgcatgataacgggccgggcgtgccgcaggacatgctgccgcacctcttcgacccattcgtaaccacaaaaaccaacggctccgggctggggctggcgctggttgccaagatcatcggcgaccatggcggcatcatcgaatgcgacagccatcctgcgcgcacgactttccgtattctcatgccagcctggaaaggccccggcgaaccggaaatcaggtcaaacactattggcaacgctggagacaatgcatga

SEQ ID NO: 1574 - protein, 367 aa, Brucella suis 1330
MLDAISQPVIMVSADNHIVYANLDAEQFFLSGSSILARNRLESFLPFGSPLLALVDQVRASQMPVNEYRVDISSPRLGAERIVDIYVAPVAEMPGAVVILFKEKSMAEKIDRQMTHRGAARSVTGLASMLAHEIKNPLSGIRGAAQLLEQVVSDEDRALARLITEETDRIVSLVDRMEVFSDERPIERTAVNIHAVLDHVKAIARNGFARKIRFSEDYDPSLPPVYANRDQLVQVFLNLVKNACEAMGGRDGGEIVLSTAYRPGIRLQVPGARDRVALPLEFCVHDNGPGVPQDMLPHLFDPFVTTKTNGSGLGLALVAKIIGDHGGIIECDSHPARTTFRILMPAWKGPGEPEIRSNTIGNAGDNA

SEQ ID NO: 1575 - DNA, 1047 bp, Shewanella oneidensis MR-1
  CDS (1)..(1047): transl_table=11
atggataaagagactctgctcaatcatttagtgaccgcggtacttgtcatcgataaggatcttaagccttgttatgccaacgccgctgcagagcaacttttaggtgtcggtagccacaggctggtcgaacaagcattgccagagcattatcaagccctaggtgtcgacactcagctccttagcgatgcggtaaaagctgggcaaagtctcaccgttaacaccgcgacgttagtcaccttagatgctcagcatcacaccgtcgatctaacgcttattccactagaggatgaagcgctgctgagtctgcttgagcttaggcaagtcgatcaacaacgacgtatccaccagcaactcagccaagacgcacagcagcaggcggcacaattcttagtgcgtaacttagcccatgagattaaaaaccccttaggcggcttgcgtggcgctgcacaattgctctcgcgggaactcgacgatcccgcgcaaaaggaatttaccaatctcatcatcgaacaagctgatcgtctgcgtagcttagtcgaccgactgctcggcccgcagcgtcccactcaacatagcctgcataacattcatcaagtagtgcaaaaagtatataaactagtcgaaatcgcgctgcccgccaatatccagttgaagcgagattatgatccctcgatccccgatatcgagatggacccagatcaaatgcagcaagcggtgttgaatattttgcagaatgcggtgcaagccctagaacacacagatggcgaaatcctgatccgcacccgcacacaacaccaagtcaccattggctcgcagcgccacaaactggtgttgaccttatcgattatcgataacggtcctggcataccgccagagctcatggacacactgttttatcccatggtaaccagtcgtgaacagggttcggggcttggtctatcgattgcccacaacattgccagattacactcgggcaggattgattgcgtatccagcccaggacacacagaatttattatctcgttaccgattttaagtgccaaataa

SEQ ID NO: 1576 - protein, 348 aa, Shewanella oneidensis MR-1
MDKETLLNHLVTAVLVIDKDLKPCYANAAAEQLLGVGSHRLVEQALPEHYQALGVDTQLLSDAVKAGQSLTVNTATLVTLDAQHHTVDLTLIPLEDEALLSLLELRQVDQQRRIHQQLSQDAQQQAAQFLVRNLAHEIKNPLGGLRGAAQLLSRELDDPAQKEFTNLIIEQADRLRSLVDRLLGPQRPTQHSLHNIHQVVQKVYKLVEIALPANIQLKRDYDPSIPDIEMDPDQMQQAVLNILQNAVQALEHTDGEILIRTRTQHQVTIGSQRHKLVLTLSIIDNGPGIPPELMDTLFYPMVTSREQGSGLGLSIAHNIARLHSGRIDCVSSPGHTEFIISLPILSAK

SEQ ID NO: 1577 - DNA, 1086 bp, Pseudomonas putida KT2440
  CDS (1)..(1086): transl_table=11
atgaccatcagcgatgcacagcaccgtctgcttctggacaacctgaccaccgccacgttgctgctcaacgccgagctgcgcctggagtacatgaacccggccgcagaaatgctgctggccgtcagtggccagcgcagccatgggcagttcatcagcgagctgttcaccgaatcgaccgaggcgctcagttcgctgcgccaggcggtcgagcaggcgcacccgttcaccaagcgtgaagcgcagcttacatcgctgaccgggcagaccatcaccgtcgattacgcggtaacgccgatactgcatcaaggccagaccctgctgctgctcgaggtgcacccgcgtgaccggctgctgcgcatcaccaaggaagaggcccaactgagcaagcaggaaaccaccaagatgctggtgcgcggcctggcccacgaaatcaagaacccccttggcggcatccgcggagcggcccagctactggcccgcgaactgccagaggaagggctgcgcgactacaccaatgtgatcatcgaggaggccgaccgcttgcgtaacctggtcgaccgcatgctcggctcgaacaagctgccgtcgctggccatgaccaatattcacgaagtgctggagcgggtgtgcagcctggtcgatgccgaaagccaggggtgcatcactttggtgcgcgattacgacccaagcctgccggacgtgctgatcgaccgagaacagatgattcaggccgtactcaacatcgtgcgcaacgccatgcaggcgatcagctcgcagaatgagctgcgcctgggtcgcatcaccttgcgcagccgcgccctgcgccagttcaccatcggccacgtgcgtcaccgcctggtagcgcgggtagagatcatcgacaacggcccaggcatcccgccggaactgcaggaaaccctcttctatcccatggtcagtggccgcccggacggtaccgggctgggcctggccattacccagaacatcatcagccagcaccagggcctgatcgagtgtgaaagccacgctggccataccgccttctcgatttacctgcctctggaacaaggagccaccgcctcatga

SEQ ID NO: 1578 - protein, 361 aa, Pseudomonas putida KT2440
MTISDAQHRLLLDNLTTATLLLNAELRLEYMNPAAEMLLAVSGQRSHGQFISELFTESTEALSSLRQAVEQAHPFTKREAQLTSLTGQTITVDYAVTPILHQGQTLLLLEVHPRDRLLRITKEEAQLSKQETTKMLVRGLAHEIKNPLGGIRGAAQLLARELPEEGLRDYTNVIIEEADRLRNLVDRMLGSNKLPSLAMTNIHEVLERVCSLVDAESQGCITLVRDYDPSLPDVLIDREQMIQAVLNIVRNAMQAISSQNELRLGRITLRSRALRQFTIGHVRHRLVARVEIIDNGPGIPPELQETLFYPMVSGRPDGTGLGLAITQNIISQHQGLIECESHAGHTAFSIYLPLEQGATAS

SEQ ID NO: 1579 - DNA, 1053 bp, Vibrio vulnificus CMCP6
  CDS (1)..(1053): transl_table=11
gtgaaggtgaattccgctctctcaaataccatactcagcaacatggtgactgcgacgctcatcttggatgatgagctgcaaatacaccacgccaatcctgcggcagagcaattgttttctcaaagtgccaagcggattgtgcaccacccactctcgcagttgattcagcatgcgtcgctcgatctcgccttgctttcacagccattacaaagcggacaaagcattaccgacagtgacgtcactttcgtggtggatggcaaacctttgttgctggaggttacagtcagcccgatttcaatcgaaagagagctgatgctcttaatggagatgcgtaaagtcgaccaacagcgccgaatcactcaggagatgaaccagcacgcccaacaacaagccgcaaagctcttggtgcgaggcctcgctcatgaaatcaaaaacccgctaggaggtctacgtggcgcagcacaactgctggaaaaaatgctgcccgatccttcattaacggaatacacccagatcattattgagcaggcagaccgattgcgcgcgttagtcgaccggctactgggcccacaaaaaccgggcaaaaaacaacaaaccaaccttcaccaagttctcgaaaaagttcgccaacttgtggagctggagtccgaacaaacgctggtcatcgagcgagactatgatccaagcttgcccgatatttacattgatgctgaccaaatagagcaggcgatgctcaatatcgttagcaatgcttcgcaaattttggctcaccaagaggatggtaaaatctccattcgcaccagaacggtgcatcaggccaatatccatggccaacgctgcaaagtggcggcccggattgaaattatggataacgggccaggtatccccgttgagcttcaagatactttgttttaccccatggtcagtggtcgagaaggcgggacaggattaggtctttctatttctcaaaaccttattgatcagcataacggcaaaattgatgtcgaaagctggccagggcacaccaattttacgatttatctgccaatttaa

SEQ ID NO: 1580 - protein, 350 aa, Vibrio vulnificus CMCP6
MKVNSALSNTILSNMVTATLILDDELQIHHANPAAEQLFSQSAKRIVHHPLSQLIQHASLDLALLSQPLQSGQSITDSDVTFVVDGKPLLLEVTVSPISIERELMLLMEMRKVDQQRRITQEMNQHAQQQAAKLLVRGLAHEIKNPLGGLRGAAQLLEKMLPDPSLTEYTQIIIEQADRLRALVDRLLGPQKPGKKQQTNLHQVLEKVRQLVELESEQTLVIERDYDPSLPDIYIDADQIEQAMLNIVSNASQILAHQEDGKISIRTRTVHQANIHGQRCKVAARIEIMDNGPGIPVELQDTLFYPMVSGREGGTGLGLSISQNLIDQHNGKIDVESWPGHTNFTIYLPI

SEQ ID NO: 1581 - DNA, 1176 bp, Bradyrhizobium japonicum USDA 110
  CDS (1)..(1176): transl_table=11
atgagctcagccgctgaacaacgtcggccgctaccgtccgacagcgatgcgatcctggacgcgcttcccaatcccgtgctcctgatcgggccggacggcaagatcgtcgccgccaacatcgcaaccgaagccttctttgagatctcgacgcaattcctgaagcggcagtcgctgaaagagctggtgccgttcggcagccccttgctggcgctgatcgaccaggtgcgctcgtcgaactcgccggtgaacgaatacaaggtcgatttgggcacgccccgcatgggcggcgatcgccaggtcgatctgcacgtcgccccgctcaccgagcggcccggccatatcgtggtgatgcttcaggagcgcaccatcgccgacaagatggatcggcagctcacccatcgcagcgccgcgcgctcggtgatagcgctagcagcgatgctcgcgcatgagatcaagaatccgctctccggcatccgcggcgcggcgcagctgctggagcagcaggcctcgtccgaggaccgcatgctgacgcggctgatctgcgacgaggccgaccgcatcgtgacgctggtcgaccgcatggaggtgttcggcgacgagcgtcccgtggtgcgcgggccggtcaatatccattcggtgctcgatcacgtgaagcggctggcgcagtcgggctttgcccgcaacatccgcttcatcgaggactacgatccctcgctgccgccggtgctggcgaaccaggatcagctgatccaggtgttcctcaatctcgtgaagaacgccgccgaagccttgatcgacgtgcccgatgccgagatccagctcaccaccgcgttccgccccggcgtgcgcctgtcagtccccggtcaaaaatcccgggtatccttgccgctcgaattctgcgtgagggacaacggaccaggcgtgccggacgatcttctgcccaacctgttcgatcccttcgtgaccaccaagcagaccggctcgggtctgggcctcgccctggtcgcaaagatcgtcggcgatcacgggggcatcatcgaatgcgaatctcagccgcgcaagaccaccttccgcgtgctgatgccgatgtattccacatcggtcaaacatgccgatcacagcagtcgcgacggctctgccgggaagtcgtcgtctgcatcacagggggcaaaatga

SEQ ID NO: 1582 - protein, 391 aa, Bradyrhizobium japonicum USDA 110
MSSAAEQRRPLPSDSDAILDALPNPVLLIGPDGKIVAANIATEAFFEISTQFLKRQSLKELVPFGSPLLALIDQVRSSNSPVNEYKVDLGTPRMGGDRQVDLHVAPLTERPGHIVVMLQERTIADKMDRQLTHRSAARSVIALAAMLAHEIKNPLSGIRGAAQLLEQQASSEDRMLTRLICDEADRIVTLVDRMEVFGDERPVVRGPVNIHSVLDHVKRLAQSGFARNIRFIEDYDPSLPPVLANQDQLIQVFLNLVKNAAEALIDVPDAEIQLTTAFRPGVRLSVPGQKSRVSLPLEFCVRDNGPGVPDDLLPNLFDPFVTTKQTGSGLGLALVAKIVGDHGGIIECESQPRKTTFRVLMPMYSTSVKHADHSSRDGSAGKSSSASQGAK

SEQ ID NO: 1583 - DNA, 1086 bp, Pseudomonas syringae pv. tomato str. DC3000
  CDS (1)..(1086): transl_table=11
atgactatcagcgacgcgctgcacagactgttactggataacctgaccactgccaccattctgctcaacgccgacctgcgacttgagtacatgaacccggcagcggaaatgctcctggccatcagcgggcagcgtagccatgggcaattcatcagcgagctgttcaccgagtcggctgaggcactgagttcgctgcgtcaggcagtggaacaggcacacccgttcaccaagcgcgaagcgatgctcaccgcactgaccggtcagacattgactgtcgactatgccgtgacgcccatcctcagcaagggcgataccctgctgctgcttgaagtgcatccccgtgaccggctgttgcgcatcaccaaggaagaagcccagctgtccaaacaggaaaccaccaagatgctggtgcgcggcctggctcacgaaataaagaatccgctcggcggcattcgcggcgctgcgcaattgctggcccgcgaactgcccgaagaaagcctcaaggattacaccaacgtcatcatcgaagaggccgaccgcctgcgtaatctggttgaccgcatgctgggctccaacaagctgccgtcgctggcgatgaccaacgtgcacgaagtgcttgaacgggtgtgcagcctggtggaggccgagagccggggctgcatcacgttggtgcgtgactatgaccccagcattcccgacgttttgatcgaccgcgagcagatgatccaggcggtgctcaatatcgtgcgtaacgccatgcaggccatcagcggccagaacgaactgcgtctgggccggatcaccatgagaacccgcgccatgcgccagttcaccatcgggcatgtgcgccaccgactggtgagcaagatcgaaattatcgacaacggcccgggcatcccggccgagcttcaggaaaccattttctatccgatggtcagtggtcgcccggacggcacagggctcggtctcgccattacccagaacatcatcagccagcaccagggcctgatcgagtgtgacagccatcccggccacaccacgttctcgatcttcctgccgctggaacaaggagcagcttcgacatga

SEQ ID NO: 1584 - protein, 361 aa, Pseudomonas syringae pv. tomato str. DC3000
MTISDALHRLLLDNLTTATILLNADLRLEYMNPAAEMLLAISGQRSHGQFISELFTESAEALSSLRQAVEQAHPFTKREAMLTALTGQTLTVDYAVTPILSKGDTLLLLEVHPRDRLLRITKEEAQLSKQETTKMLVRGLAHEIKNPLGGIRGAAQLLARELPEESLKDYTNVIIEEADRLRNLVDRMLGSNKLPSLAMTNVHEVLERVCSLVEAESRGCITLVRDYDPSIPDVLIDREQMIQAVLNIVRNAMQAISGQNELRLGRITMRTRAMRQFTIGHVRHRLVSKIEIIDNGPGIPAELQETIFYPMVSGRPDGTGLGLAITQNIISQHQGLIECDSHPGHTTFSIFLPLEQGAAST

SEQ ID NO: 1585 - DNA, 1047 bp, Vibrio parahaemolyticus RIMD 2210633
  CDS (1)..(1047): transl_table=11
gtggataccagtctccctagtgccatactcaacaacatggtcacagcaacgctgattcttgatgatggattggccatccgctatgccaatccagccgctgagctgttgttttcgcaaagcgctaagcgcattgtcgaacaatcgctttctcaactgattcagcatgcatcgttggatttggccttactgactcagccactacaaagcggccaaagcattaccgacagtgacgtgacgtttgtcgtcgatgggcgtccgctaatgctggaagtcacagtaagtccaatcacttggcaacgacagctcatgctgttggttgaaatgcgcaagatagatcaacaacgacgcctcactcaagagctcaaccaacacgcacagcaacaagccgccaaactgctcgtgcggggtttagctcatgagatcaaaaatccacttggcggattacgcggtgcggcgcagctgctggaaaaaatgttgcccgatccatcgttaaccgaatacacccacatcattatcgaacaagccgatcgattaagagcgttagtcgaccgcctacttggcccacagaaaccgggcaaaaagacacaagaaaatctacaccaaattctggagaaagtacgccaactggtcgagttagaatctcaaaactcgatcatcatcgaacgtgactacgaccctagcttgcccgagattttgatggatgcggatcaaatagaacaagcgatgctgaacatcgtcagcaacgcggcacaaattcttgctcatcaagagcacggcaacatcaccattcgcaccagaacggtgcatcaagccaacattcatggcaaacgctgcaaattagcggcgcgcatcgagatcactgataacgggccgggcattccaccagaattacaggacaccttgttttatcccatggtcagcgggcgcgaaggcggcaccggacttgggttgtccatctcacaaaatttgatcgaccagcacaacggaaaaatcgacgttgaaagctggcctggccacaccacttttacaatttatttgccgatttga

SEQ ID NO: 1586 - protein, 348 aa, Vibrio parahaemolyticus RIMD 2210633
MDTSLPSAILNNMVTATLILDDGLAIRYANPAAELLFSQSAKRIVEQSLSQLIQHASLDLALLTQPLQSGQSITDSDVTFVVDGRPLMLEVTVSPITWQRQLMLLVEMRKIDQQRRLTQELNQHAQQQAAKLLVRGLAHEIKNPLGGLRGAAQLLEKMLPDPSLTEYTHIIIEQADRLRALVDRLLGPQKPGKKTQENLHQILEKVRQLVELESQNSIIIERDYDPSLPEILMDADQIEQAMLNIVSNAAQILAHQEHGNITIRTRTVHQANIHGKRCKLAARIEITDNGPGIPPELQDTLFYPMVSGREGGTGLGLSISQNLIDQHNGKIDVESWPGHTTFTIYLPI

SEQ ID NO: 1587 - DNA, 1077 bp, Bordetella parapertussis 12822
  CDS (1)..(1077): transl_table=11
ttgcctcctatgacgaatgtcgatgcttttgatctgctggccacatcggtcttcctgctgaacgagcgcgggcatatcgaatacgccaatgccgccgccgaggacctgttcggccgttcccgcaagcagttgcgaggcctgtcggccgcgacgctgttcgacaatcccgaagacctgcaatcggccatcgacagcgcggccgccggcaagtttgccgacgtgcgccagctggcctcgctgcggcgggtggtcgagtcggtggaggtcaccgtcacgacggtgtcgctgtccggccaggcctggccggtattgatcgagacgcgcgagatcgagcagcgcgtgctggccgatcgcaaccagcggctggtcgacgaaatcgaatcgcatcgcgaattgctgcgcaatctcgcgcacgaggtcaagaaccccctgggcggcctgcgcggcgcggcccagctgctggaagccgagctgcccagcgcggccctggccgaatatacccaggtcatcatcaccgaggccgaccggctgcaggcgctggtcgacaggctgagcggtccgcagcgcgtgccgctggccgcgcggccggtgaacatccatgaaatctgcgagcgcgtctgcgcgctgatccaggccgagttccgcgacgcggtcgaactggtgcgcgactatgacgcgtcggtgcccgagctgcgcggcgacgcggccaggctgatgcaggcggtgctgaatgtggcgcgcaacgcggcgcaggagctggtgcagcagaagccgggcgccgacgtgcccgcgccgcgcgtcgtgctacgcacgcgggtggcgcgccaggtcatgctggcgcaccggcagcaccggctggcgctggtcgtgtcggtgctggacaacgggccgggcgtgcccgagcacatccgcgagcgcattttccatccgctggtgaccgcgcgcgccggcggcaccgggctgggcctgagcctggcccaggatttcgtgcagcagcacggaggcatcatcgaattcgagtcccgtgcgcggcacaccgaattccggctggtattaccgatggagcccccactttga

SEQ ID NO: 1588 - protein, 358 aa, Bordetella parapertussis 12822
MPPMTNVDAFDLLATSVFLLNERGHIEYANAAAEDLFGRSRKQLRGLSAATLFDNPEDLQSAIDSAAAGKFADVRQLASLRRVVESVEVTVTTVSLSGQAWPVLIETREIEQRVLADRNQRLVDEIESHRELLRNLAHEVKNPLGGLRGAAQLLEAELPSAALAEYTQVIITEADRLQALVDRLSGPQRVPLAARPVNIHEICERVCALIQAEFRDAVELVRDYDASVPELRGDAARLMQAVLNVARNAAQELVQQKPGADVPAPRVVLRTRVARQVMLAHRQHRLALVVSVLDNGPGVPEHIRERIFHPLVTARAGGTGLGLSLAQDFVQQHGGIIEFESRARHTEFRLVLPMEPPL

SEQ ID NO: 1589 - DNA, 1068 bp, Bordetella bronchiseptica RB50
  CDS (1)..(1068): transl_table=11
atgacgaatgtcgatgcttttgatctgctggccacatcggtcttcctgctgaacgagcgcgggcatatcgaatacgccaatgccgccgccgaggacctgttcggccgttcccgcaagcagttgcgaggcctgtcggccgcgacgctgttcgacaatcccgaagacctgcaatcggccatcgacagcgcggccgccggcaagtttgccgacgtgcgccagctggcctcgctgcggcgggtggtcgagtcggtggaggtcaccgtcacgacggtgtcgctgtccggccaggcctggccggtattgatcgagacgcgcgagatcgagcagcgcgtgctggccgatcgcaaccagcggctggtcgacgaaatcgaatcgcatcgcgaattgctgcgcaatctcgcgcacgaggtcaagaaccccctgggcggcctgcgcggcgcggcccagttgctggaagccgagctgcccagcgcggccctggccgaatatacccaggtcatcatcaccgaggccgaccggctgcaggcgctggtcgacaggctgagcggtccgcagcgcgtgccgctggccgcgcggccggtgaacatccatgaaatctgcgagcgcgtctgcgcgctgatccaggccgagttccgcgacgcggtcgaactggtgcgcgactatgacgcgtcggtgcccgagctgcgcggcgacgcggccaggctgatgcaggcggtgctgaatgtggcgcgcaacgcggcgcaggagctggtgcagcagaagccgggcgccgacgtgcccgcgccgcgcgtcgtgctgcgcacgcgggtggcgcgccaggtcatgctggcgcaccggcagcaccggctggcgctggtcgtgtcggtgctggacaacgggccgggcgtgcccgagcacatccgcgagcgcattttccatccgctggtgaccgcgcgcgccggcggcaccgggctgggcctgagcctggcccaggatttcgtgcagcagcacggaggcatcatcgaattcgagtcccgtgcgcggcacaccgaattccggctggtattaccgatggagcccccactttga

SEQ ID NO: 1590 - protein, 355 aa, Bordetella bronchiseptica RB50
MTNVDAFDLLATSVFLLNERGHIEYANAAAEDLFGRSRKQLRGLSAATLFDNPEDLQSAIDSAAAGKFADVRQLASLRRVVESVEVTVTTVSLSGQAWPVLIETREIEQRVLADRNQRLVDEIESHRELLRNLAHEVKNPLGGLRGAAQLLEAELPSAALAEYTQVIITEADRLQALVDRLSGPQRVPLAARPVNIHEICERVCALIQAEFRDAVELVRDYDASVPELRGDAARLMQAVLNVARNAAQELVQQKPGADVPAPRVVLRTRVARQVMLAHRQHRLALVVSVLDNGPGVPEHIRERIFHPLVTARAGGTGLGLSLAQDFVQQHGGIIEFESRARHTEFRLVLPMEPPL

SEQ ID NO: 1591 - DNA, 1059 bp, Chromobacterium violaceum ATCC 12472
  CDS (1)..(1059): transl_table=11
atgacgatacccagctttgccggactggagctcctggacaccccggtgctgatctgcgatgccggagccgcgctgcgcttcgtcaatcccgcctgcgagaacctgctggccctgggcagccgggaactgctgcgccatgcgctgcccgagctgttccagccctgcccggcgctgaatcaggcgctcgccaccgcgctcgcccagggcgccagctacatcgagcacgatctggagctgaagccgctgcacaacgactcggcgctgcacgtgatgctgtcgatcacgccgatagacgtcgaaggctgccaggcactgatcgaactcaggccgctggaccagcagctgaagatcgccaacgaggagcgctcgctgctgcagcaccaggccaaccgcgagctgatccgcaacctggcccacgagatcaaaaacccgctgggcggcatacgcggcgcggcgcagctgttggagcacgagctggcagaccggcccgagctcaaggagtacaccgaggtgatcaccgaggaggcgctgcggctgcaaacgctggtagaccggctgctggcgccgcaccgcagccacaaccgcgggccgatcaacatccacgaagtgctggagcgggtgcgcagcatcgcgctggcccagcatccgcagggcctgaccgtcgtccgcgactacgacaccagcctgccgctgctctccgccgacaaggaacagctgatccaggtggtgctgaacatcgtcaacaacgcggtgcaagccttgcgcggccaggggcgcatcacgctgcgcacccgggtggcgcggcagatcacgctggcgcgcaagcgccatcagctggcactgaaattgcagatcatcgacgacggtcccggcatacccgacgacatccgcgaccacatcttctatccgctggtcaccggccgcgccgaaggcaccggcctggggctgacgctggcccaggccttcgtccaccagcacggcggcagcatagagttcgattcgcggccgggccagacctgcttcaccgtgctgctgcccttcggcggcgaagcgggataa

SEQ ID NO: 1592 - protein, 352 aa, Chromobacterium violaceum ATCC 12472
MTIPSFAGLELLDTPVLICDAGAALRFVNPACENLLALGSRELLRHALPELFQPCPALNQALATALAQGASYIEHDLELKPLHNDSALHVMLSITPIDVEGCQALIELRPLDQQLKIANEERSLLQHQANRELIRNLAHEIKNPLGGIRGAAQLLEHELADRPELKEYTEVITEEALRLQTLVDRLLAPHRSHNRGPINIHEVLERVRSIALAQHPQGLTVVRDYDTSLPLLSADKEQLIQVVLNIVNNAVQALRGQGRITLRTRVARQITLARKRHQLALKLQIIDDGPGIPDDIRDHIFYPLVTGRAEGTGLGLTLAQAFVHQHGGSIEFDSRPGQTCFTVLLPFGGEAG

SEQ ID NO: 1593 - DNA, 1050 bp, Photorhabdus luminescens subsp. laumondii TTO1
  CDS (1)..(1050): transl_table=11
atgaaaacggaaaatctgcccgatagcgggcaaatattaaattcgctcattaacagtgtactggtactggatactgatctcgtcatccgctatgccaaccatgcagcactacaattattcgctcagagtgcccgtaaactattcggtacacctcttccagtactgttcagctatttttcactggatacagaactgatgcattctagtctggtcagcggccagagttttactgataacgaagtaacattagtggttgagaaccgctttcacattatgtcgctcagtgcccaaccgatttccgagcagttcatcttgctggaactggcacctatggatagtcaacgccggttaagccaagagcaggtacaacaagctcagcagacagccgcacgggaattggttcgggggctggcacatgaaatcaaaaacccccttggtgggttgagaggagccgcgcaattgctgtcaaaagcactgcctgatcctgctttgcaggaatacacccaggtgattattgaacaagccgaccgattgcgccatctggtagacagattgcttggcccacaacatccgggtgaacgaattaagcaaagcattcattatgttgctgaacgagtttcccagttagtctcgctggaaatgccggataacgtcacactggtaaaagattatgatcccagtttgccagaactggcccactatcctgatcaaattgaacaggtactactaaatatcacccgtaatgccttgcaagcgctaggaaaacaggggggaaccattaccctccgcactcgtactgcttttcagattaccttgcatggtaagcgctatcgtctggcggccagaattgacgtggaagataacgggccaggtatcccgccacaaattcaggataccttgttttacccaatggtcagtgcgcatgaaggcggaacaggtcttggtctatccattgctcgtaatttaatagaccaacactccggcaaaatagaatttaccagttggccggggcacacagcattttctatctacttacccattaagaaatag

SEQ ID NO: 1594 - protein, 349 aa, Photorhabdus luminescens subsp. laumondii TTO1
MKTENLPDSGQILNSLINSVLVLDTDLVIRYANHAALQLFAQSARKLFGTPLPVLFSYFSLDTELMHSSLVSGQSFTDNEVTLVVENRFHIMSLSAQPISEQFILLELAPMDSQRRLSQEQVQQAQQTAARELVRGLAHEIKNPLGGLRGAAQLLSKALPDPALQEYTQVIIEQADRLRHLVDRLLGPQHPGERIKQSIHYVAERVSQLVSLEMPDNVTLVKDYDPSLPELAHYPDQIEQVLLNITRNALQALGKQGGTITLRTRTAFQITLHGKRYRLAARIDVEDNGPGIPPQIQDTLFYPMVSAHEGGTGLGLSIARNLIDQHSGKIEFTSWPGHTAFSIYLPIKK

SEQ ID NO: 1595 - DNA, 1173 bp, Rhodopseudomonas palustris CGA009
  CDS (1)..(1173): transl_table=11
atgaacgccattgtcgaaccgcgccgggctcagccgaccgacagcgatgcgatcctcaacgcgttgccgaatcctgttctgctggtcggtcccgacggcaagatcgtggacgccaacatggcggcggaatcgttctttgagatttcgacgcaattgctgcgacggcagtcgctgaccgacctggtgccgtttggcagcccgctgctggcgctgatcgagcaggtgcgcgtcgggcattcgccggtcaatgaatacaaggtcgatctcggcacgccgcggatcggcgccgaccgccaggtcgatctgcacgtcgcgccgctcaacgaacggcccggccatatcgtggtgatgctgcaggagcgcaccatcgccgacaagatggaccgccagctcacgcatcgcagcgcggcgcgctcggtgatcgcgctcgccgccatgctggcgcacgagatcaagaatccgctgtccggcatccgcggcgcagcgcaactgctggagcagcaggcctccgccgaagaccggatgctgacccggctgatctgtgacgaagccgaccgcatcgtcacactggtcgaccgcatggaagtgttcggcgacgaccgcccagtggcgcgcggcccggtgaacatccactcggtgctggatcacgtgaagcggctggcgcagtcgggctttgcccgcaacatcaagttcatcgaggactacgacccgtcgctgccgccggtgctcgccaatcaggatcaactgattcaggtgttcctgaacttggtgaagaacgcggccgaagccgtggtcgatctcggctccgatggtgagatccaactcaccactgcgttccgccctggtgtccgcctgtcggtgccgggcaaaaagacgcgggtgtcgctgcctctggaattctgcgtgcgggacaatggtcccggcgttcccgaagatctgctaccgaacctgttcgatccgttcgtcaccaccaagccgtccggttccggcctcggtcttgcattggtggcgaagattgtcggcgatcacggcggcatcatcgagtgtgaatcgcagccgcgcaaaaccaccttccgggtgctgatgccgatgttcaacaccgccaaggcccttcaatccccgaacggcgaggacgcgccggcgtcgtccgatgcctcacagactgcaagatga

SEQ ID NO: 1596 - protein, 390 aa, Rhodopseudomonas palustris CGA009
MNAIVEPRRAQPTDSDAILNALPNPVLLVGPDGKIVDANMAAESFFEISTQLLRRQSLTDLVPFGSPLLALIEQVRVGHSPVNEYKVDLGTPRIGADRQVDLHVAPLNERPGHIVVMLQERTIADKMDRQLTHRSAARSVIALAAMLAHEIKNPLSGIRGAAQLLEQQASAEDRMLTRLICDEADRIVTLVDRMEVFGDDRPVARGPVNIHSVLDHVKRLAQSGFARNIKFIEDYDPSLPPVLANQDQLIQVFLNLVKNAAEAVVDLGSDGEIQLTTAFRPGVRLSVPGKKTRVSLPLEFCVRDNGPGVPEDLLPNLFDPFVTTKPSGSGLGLALVAKIVGDHGGIIECESQPRKTTFRVLMPMFNTAKALQSPNGEDAPASSDASQTAR

SEQ ID NO: 1597 - DNA, 1074 bp, Herminiimonas arsenicoxydans
  CDS (1)..(1074): transl_table=11
gtgaaaaaaccttcaatttctttcggtggtcttgatctgctggcctccgccgtgctggtgctgcgctccgacggttatatcgcctatgcgaatccggcagcagaaaatctgctggaaaattcaaacaaggttctggcgacgcaccggctcaatgaactctttctcaatgcagatgaactggacgtagtattccagcaggccgtagaacatcagttcgccgacaagcggcaggacttgacgctggagcgcatggggcgcgagccgctgcaggtgcacatggtcgtgactgcgctagataatccggacttgccggtgctgatggagttgcgcgaaaacgtgcagcaattgaagctggatcgcgaagagcgcctgatcgatcaaagccaggccaacaaggagttgatccgcaatctggcacatgagatcaagaatcctctgggcggcatacgcggcgccgcacaattgctcgaacttgagttgcccgagcggcatgtgaaagagctgcgcgaatatacgcaagtcatcatcaaggaggcggatcgcctgcaaacgctggtggatcgcctgctggcgccgcatcgcagcctgcatattgtcggcgatgtgaatattcatgaagtatgcgaacgcgtgcgcagcctgatcgtggccgaattcccgagcggattgaagatcaggcgtgattacgatttgtcgatacccgaattccgcggcgacaaggagcaactgatacaagcggtattgaacattgcgcacaatgctgcacaagtactgtcctcgcacatcaaaagcggcgatgcggagattgttttgcgtacgcggattgcacgaaatgtgacgctggccaaggtacgctaccggctggcattagacttgcatattatcgataacggtccgggcattccgcctgacatccaggatcgcatcttctatcctttggtatcgggtcgggacggcggtagtgggttgggactgacgctggcgcagacatttgtgcagcaacacatgggcttgatcgaatgcgagagccgccctgggtgtacggatttcagaattctgattccattgccgtga

SEQ ID NO: 1598 - protein, 357 aa, Herminiimonas arsenicoxydans
MKKPSISFGGLDLLASAVLVLRSDGYIAYANPAAENLLENSNKVLATHRLNELFLNADELDVVFQQAVEHQFADKRQDLTLERMGREPLQVHMVVTALDNPDLPVLMELRENVQQLKLDREERLIDQSQANKELIRNLAHEIKNPLGGIRGAAQLLELELPERHVKELREYTQVIIKEADRLQTLVDRLLAPHRSLHIVGDVNIHEVCERVRSLIVAEFPSGLKIRRDYDLSIPEFRGDKEQLIQAVLNIAHNAAQVLSSHIKSGDAEIVLRTRIARNVTLAKVRYRLALDLHIIDNGPGIPPDIQDRIFYPLVSGRDGGSGLGLTLAQTFVQQHMGLIECESRPGCTDFRILIPLP

SEQ ID NO: 1599 - DNA, 1143 bp, Burkholderia vietnamiensis G4
  CDS (1)..(1143): transl_table=11
atggctctgaagaatctgatcaaggcgaagacggggcagcccgagcgactgacggaagacgagcggctcgcgcgctccgggctgcttgccgggctcgaagcgctgccgacggtcgtgctcgtgctcgaccgcaagacgctgcgggtcgcgttcgcgaacccgtccgcggaggcgatgctcgacatctcgcgccggcagctcgcgcagcggccgtggggcgagatcttcccgaacgcgaacgagctcgcgtcgacgatcaccgcgatcggcgaggagcgctttcacgcgacgcatctcgacaccgtgctcgatcggcccggccacgaggcgttgcacgtgcatgcgatcgtcggcttcctcgagaccgcgcccgatttcgtgctcgtcgagctgttcgagaacgaacgccagtcgcgcaccgatcgcgaggagcgcatccacgacctgaccgcggtcaacaagcagctgatccgcaatctcgcgcacgagatcaagaatccgctcggcggcattcgcggcgccgcgcagctgctcgaattcgagctgggcgagcgcgagcgtggcgagttgcgcgaatacacgcaggtgatcatcaaggagtccgaccgcctgcagacgctcgtcgaccggttgctggagccgcatcggcatccgcacatcgtcggcgacgtgaacattcatgaagtatgcgaactcgtgcgcgcggtgatgctcgcggagtttccgcgcggcctcacgatcgagcgcgactacgacgtgagcgtgccggacctgcgcggcgacaaggagcagctgatccaggcgctgctgaacatcgtgcgcaatgcggcgcaggcgctgcgcgaacgcatcgcgcagggcgacgcgagaatcgaattgcgcacgcgcatcgcgcgcaaggtgacgatcgcgaagcgcctgtaccggctggcactggacttgcacgtggtcgacaacgggccgggcattccggaggagattcgcgaccgcatcttctacccgctcgtgtccgggcgcgacgacggcagcgggctcggcctcacgctcgcgcaaaccttcgtgcagcagcacgacgggatgatcgaggtcgagagccggcccggacgtaccgaatttcagatcctgttgccgctcgatcactga

SEQ ID NO: 1600 - protein, 380 aa, Burkholderia vietnamiensis G4
MALKNLIKAKTGQPERLTEDERLARSGLLAGLEALPTVVLVLDRKTLRVAFANPSAEAMLDISRRQLAQRPWGEIFPNANELASTITAIGEERFHATHLDTVLDRPGHEALHVHAIVGFLETAPDFVLVELFENERQSRTDREERIHDLTAVNKQLIRNLAHEIKNPLGGIRGAAQLLEFELGERERGELREYTQVIIKESDRLQTLVDRLLEPHRHPHIVGDVNIHEVCELVRAVMLAEFPRGLTIERDYDVSVPDLRGDKEQLIQALLNIVRNAAQALRERIAQGDARIELRTRIARKVTIAKRLYRLALDLHVVDNGPGIPEEIRDRIFYPLVSGRDDGSGLGLTLAQTFVQQHDGMIEVESRPGRTEFQILLPLDH

SEQ ID NO: 1601 - DNA, 1176 bp, Bradyrhizobium sp. ORS278
  CDS (1)..(1176): transl_table=11
atgagctcagccgcagaacagcgcaagcgccttccgtccgatggcgatgccatcctcaacgcgttgcccaatccggtcctcgtcatcggcccggacggcatgatcatggacgccaacatggcggcggaatcgttcttcgattcctccacgcagttcctgcagcggcagtcgttgaagaagctggtgccgttcggctcgccgctgctggcgctgatcgaccaggtgcgcacgaccagcgcgccagtcaacgagtacaaggtcgacctgggcacgccgcgcaccggcgccgaccggctcgtcgatcttcatgtcgcccccttgccggagcggccggggcatatcgtcgtgatgctgcaggagcgcaccatcgccgacaagatggaccgccagctcacccatcgtagcgccgcgcgctcggtgatcgcgctggcggcgatgctggcgcatgagatcaagaacccgctgtcgggcatccgtggcgccgcccagctgctggagcagcaggcttcctccgaggaccgcatgctgacccggctgatctgcgacgaggccgaccgcatcgtcaccctggtcgaccgcatggaggtgttcggcgacgaccgcccggtggcgcgcgggccggtcaacatccattccgtgctcgatcacgtgaagcggctggcgcagtcgggtttcgcccgcaacatccgcttcatcgaggactacgacccgtcgctgccgccggtgctcgccaaccaggaccagctgatccaggtgttcctgaacctggtcaagaatgccgccgaagcagtcgtcgatctcggctccgacgccgaaatccagctcaccacggccttccgcccgggcgtgcggctgtcggtgccgggcaagaagtcgcgcgtgtcgctgccgctggagttctgcgtcagggacaacggcccgggcgtgccggaagacctgatgccgaacctgttcgatccgttcgtgaccaccaagccgaccggaagcggcctcggtcttgcattggtcgcgaagatcatcggcgaccatggcgggatcatcgagtgcgaatcgcagccgcgcaagacgaccttccgggtgctgatgccgatgtacagcgcgagcaaatatccagaccaaggccatcgcgatgacgtttcggggacgccgtcgcatgcctcacagggatcaaattga

SEQ ID NO: 1602 - protein, 391 aa, Bradyrhizobium sp. ORS278
MSSAAEQRKRLPSDGDAILNALPNPVLVIGPDGMIMDANMAAESFFDSSTQFLQRQSLKKLVPFGSPLLALIDQVRTTSAPVNEYKVDLGTPRTGADRLVDLHVAPLPERPGHIVVMLQERTIADKMDRQLTHRSAARSVIALAAMLAHEIKNPLSGIRGAAQLLEQQASSEDRMLTRLICDEADRIVTLVDRMEVFGDDRPVARGPVNIHSVLDHVKRLAQSGFARNIRFIEDYDPSLPPVLANQDQLIQVFLNLVKNAAEAVVDLGSDAEIQLTTAFRPGVRLSVPGKKSRVSLPLEFCVRDNGPGVPEDLMPNLFDPFVTTKPTGSGLGLALVAKIIGDHGGIIECESQPRKTTFRVLMPMYSASKYPDQGHRDDVSGTPSHASQGSN

SEQ ID NO: 1603 - DNA, 1050 bp, Klebsiella pneumoniae subsp. pneumoniae MGH 78578
  CDS (1)..(1050): transl_table=11
atggcaacaggcacactgcccgatgctgggcagatccttaactcccttatcaacagtattttactggtcgatgatgacctggcggtgcactttgccaaccctgcggcgcagcagctgctggcgcagagctcgcgcaaactgtttggcaccccattacctgagctgttgagctatttttcgttgaatatcgggctgatgcaggagagtctgcaggcgggccaggggtttaccgataacgaagtgacgttggttatcgatggccgttcgcacatcctgtcgttgaccgcccagcggctgccggaaggctttattctgctggaaatggcgccgatggataatcagcgccgcctgagccaggagcagctgcagcatgcgcagcaggtcgccgctcgcgacctcgtccgcggcctggcgcatgagataaaaaacccgttaggcggcctgcgcggcgcggcccagctgctcagcaaagcgctgcccgacccggcgctaacggaatataccaaagtgatcattgagcaggccgaccggctaagaaatctggtcgaccgcctgctcggaccacagcatccgggcatgcacgttaccgaaagcatccacaaagtcgccgaacgggtagttaaactggtttccatggagttgccggacaacgtgaagttgatccgcgattacgaccccagcctaccagagctaccccacgacccggatcaaattgaacaggtgttgctgaacatcgtccgtaatgcgctgcaggcgctggggccggaagggggcgaaattattcttcgcacccgcaccgctttccagctgacgctgcacggggtgcgttatcgcctcgccgcccgcatcgacgttgaagataatggcccgggtattccgccccatctccaggatacgctgttctatccgatggtcagcggccgcgaaggcggtaccggcctgggcttatctatcgcccgtagccttatcgatcagcactccggcaaaattgaattcaccagctggccgggtcataccgaattttcggtatacctgcctattcggaagtag

SEQ ID NO: 1604 - protein, 349 aa, Klebsiella pneumoniae subsp. pneumoniae MGH 78578
MATGTLPDAGQILNSLINSILLVDDDLAVHFANPAAQQLLAQSSRKLFGTPLPELLSYFSLNIGLMQESLQAGQGFTDNEVTLVIDGRSHILSLTAQRLPEGFILLEMAPMDNQRRLSQEQLQHAQQVAARDLVRGLAHEIKNPLGGLRGAAQLLSKALPDPALTEYTKVIIEQADRLRNLVDRLLGPQHPGMHVTESIHKVAERVVKLVSMELPDNVKLIRDYDPSLPELPHDPDQIEQVLLNIVRNALQALGPEGGEIILRTRTAFQLTLHGVRYRLAARIDVEDNGPGIPPHLQDTLFYPMVSGREGGTGLGLSIARSLIDQHSGKIEFTSWPGHTEFSVYLPIRK

SEQ ID NO: 1605 - DNA, 1050 bp, Salmonella enterica subsp. arizonae serovar 62:z4,z23:--
  CDS (1)..(1050): transl_table=11
atggcaacaggcatgcggcccgatgctgggcagatcctcaattcgttaatcaacagtgtgctggtggtcgacgacgcgctggcaatccattacgccaaccctgccgcgcagcagttgctcgcgcaaagctcacgtaaactgtttggtacgccgttacctgaactgttgagctatttttcgttaaatattgacctgatgggcgagagtttagcggcaggacaaggctttaccgataatgaagtgacgctggtaattgatagtcgctcacatattctctctttaaccgcacaacgtctgcccgacggttttattctgcttgaaatgacgccgatggataaccagcgccgtctgagtcaggagcagttgcagcacgcgcagcaaatcgccgcccgcgatctggttcgcggtctggcgcacgaaatcaaaaatccgctcggcggcctgcgcggcgcagcgcagttgctcagcaaggcgctgcccgacccgtcgctaacggaatataccaaagtcatcattgaacaggccgacaggctacgcaaccttgtcgatcgtttgctgggaccgcaacatccgggaatgcacatcaccgagagcatacataaagtcgcggagcgcgtggtcacgctggtttcgatggagttgccggataatatccggcttatccgcgattacgaccccagtctgccggagctgccgcacgatccggagcagattgaacaggtgctactgaatattgtccgcaacgccttgcaggcgctggggtcggaaggcggcgaaattacgctgcgcacgcgtaccgccttccagttaacgttgcacggcgaacgctatcgtctggcggcgcgtatagacgttgaagacaacgggccgggcatacctccccatttacaggatacgctcttctatccgatggtcagcggtcgcgaaggcggcaccgggcttggattatccattgcccgcaatcttatcgatcaacacgccggcaaaattgaattcaccagttggccgggtcataccgagttttcggtctacctgccgattcggaaatag

SEQ ID NO: 1606 - protein, 349 aa, Salmonella enterica subsp. arizonae serovar 62:z4,z23:--
MATGMRPDAGQILNSLINSVLVVDDALAIHYANPAAQQLLAQSSRKLFGTPLPELLSYFSLNIDLMGESLAAGQGFTDNEVTLVIDSRSHILSLTAQRLPDGFILLEMTPMDNQRRLSQEQLQHAQQIAARDLVRGLAHEIKNPLGGLRGAAQLLSKALPDPSLTEYTKVIIEQADRLRNLVDRLLGPQHPGMHITESIHKVAERVVTLVSMELPDNIRLIRDYDPSLPELPHDPEQIEQVLLNIVRNALQALGSEGGEITLRTRTAFQLTLHGERYRLAARIDVEDNGPGIPPHLQDTLFYPMVSGREGGTGLGLSIARNLIDQHAGKIEFTSWPGHTEFSVYLPIRK

SEQ ID NO: 1607 - DNA, 1050 bp, Salmonella enterica subsp. enterica serovar Paratyphi B str. SPB7
  CDS (1)..(1050): transl_table=11
atggcaagcggcatacagcccgatgctgggcagatcctcaattcgttaatcaacagcgtgctggtggtcgacgacgcgctggcaatccattacgccaaccctgccgcgcagcagttgctcgcgcaaagctcacgcaaactgttcgggacgccgttacctgaactgttgagctatttttcgttaaacattgacctgatgcgcgaaagtttagcggcagggcaaggctttaccgataacgaagtgacgctggtgattgatagtcgctcgcatattctctctttgaccgcccaacgtctgcccgacgattttatactgctcgaaatggcgccgatggataaccagcgtcgtctgagtcaggagcagttgcagcacgcgcagcaaatcgccgcccgcgatctggtgcgcggtctggcgcacgaaatcaaaaatccgctcggcggcctgcgcggcgcggcgcagctactcagcaaggcgctgcccgacccggcgctaatggaatataccaaagtcatcattgaacaggccgacaggctacgcaaccttgtcgatcgtttgctggggccgcagcacccgggaatgcacattacggagagcatacataaagtcgcggagcgcgtggtggcgctggtgtcgatggaactgccggataatgtccggcttatccgcgattacgaccccagtctgccagaactgccgcatgacccggaacaaattgagcaagtactgctgaatattgtccgcaatgccttgcaggcgctggggccggatggcggcgaaattacgctgcgtacccgtaccgccttccagttaacgctgcatggcgaacgctatcgcctggcggcgcgtatagacgttgaagacaatgggccgggcattcctccccatttacaggatacgctgttctacccgatggtcagcggtcgcgaaggcggcaccgggcttgggttatctatcgcccgcaatcttatcgatcaacacgccggcaaaattgaatttaccagttggccggggcataccgagttttcggtttacctgccgattcggaaatag

SEQ ID NO: 1608 - protein, 349 aa, Salmonella enterica subsp. enterica serovar Paratyphi B str. SPB7
MASGIQPDAGQILNSLINSVLVVDDALAIHYANPAAQQLLAQSSRKLFGTPLPELLSYFSLNIDLMRESLAAGQGFTDNEVTLVIDSRSHILSLTAQRLPDDFILLEMAPMDNQRRLSQEQLQHAQQIAARDLVRGLAHEIKNPLGGLRGAAQLLSKALPDPALMEYTKVIIEQADRLRNLVDRLLGPQHPGMHITESIHKVAERVVALVSMELPDNVRLIRDYDPSLPELPHDPEQIEQVLLNIVRNALQALGPDGGEITLRTRTAFQLTLHGERYRLAARIDVEDNGPGIPPHLQDTLFYPMVSGREGGTGLGLSIARNLIDQHAGKIEFTSWPGHTEFSVYLPIRK

SEQ ID NO: 1609 - DNA, 1110 bp, Acinetobacter sp. ADP1
  CDS (1)..(1110): transl_table=11
atggatcaacaaccgactatcgactatcgactactcgtagataacatgactactgccattttactggtcgatagtaacttgaacattttttatcttaattcatcctgtgaagcattatttgacatcagtttacttcgtgcatctggacagcctgtaatcaatctactgcatgctccaaacgatacctttaacacccacgaagccttacttaatacacttaagtccagtcagcattatacacgtcgtgaagccactattaatgtgaacttcaaagacattcatgtagattataccgtttctcaactcaacacaggcaaaccttaccacccgctgttattgatcgaactcaatccaattgatcgaatgcttaaaatttctaaagaagaaaattttattcagcagcaccaagtcgccagacagctcatccgtggtgtagcacacgagattaaaaatccacttggtggtatacgtggtgcaacacaattgcttgcccgtagtctaaatgatccgaaatatgcagaattcacagacattattatcaatgaggtagatcgtctaaggaatctggcagacacgatgctcggttcaagacagttgccaagctacgaagacgtgaatattcatgaacctctggaacgtgttcgttcactgattgttaatcagaccaagaagaaaattaagattattcgtgattacgacttatctctacccgatgtaaaagctgatcgagatcagctcatacaagtcatgctcaacattagtgtcaatgcaatccaagccattaccgaaaataaagagttttttgttgaacatgaacctcaacttatgctccgtacccgtatccagcgtctagtcaccatcaatggtgtacttaaccgctcagctgtacgaattgatattgaagataacggcccaggtattccagaggatattttagaatccgtcttttatccattggttacgggccgagcaaaaggcacagggctgggcttaagtattgcacaaaacattatgcatcaacacaacgggatgattgagtgccaatctattccaggaaaaacagtttttagcttatatctaccttgggagtccgaccatgtcgcgaaataa

SEQ ID NO: 1610 - protein, 369 aa, Acinetobacter sp. ADP1
MDQQPTIDYRLLVDNMTTAILLVDSNLNIFYLNSSCEALFDISLLRASGQPVINLLHAPNDTFNTHEALLNTLKSSQHYTRREATINVNFKDIHVDYTVSQLNTGKPYHPLLLIELNPIDRMLKISKEENFIQQHQVARQLIRGVAHEIKNPLGGIRGATQLLARSLNDPKYAEFTDIIINEVDRLRNLADTMLGSRQLPSYEDVNIHEPLERVRSLIVNQTKKKIKIIRDYDLSLPDVKADRDQLIQVMLNISVNAIQAITENKEFFVEHEPQLMLRTRIQRLVTINGVLNRSAVRIDIEDNGPGIPEDILESVFYPLVTGRAKGTGLGLSIAQNIMHQHNGMIECQSIPGKTVFSLYLPWESDHVAK

SEQ ID NO: 1611 - DNA, 1050 bp, Pectobacterium atrosepticum SCRI1043
  CDS (1)..(1050): transl_table=11
atggcaacaggcacgctgcccgatgctgggcagatcctaaattctctgataaacagcatcttattgctggataacgatctagcgattcactattccaacccggcagcacagcaattactagcacaaagctcgcgtaaattatccggcacaccgctgccagacttgctgggatatttttctctgaatatcgatttactgcgtgaaagtctggattcagggcaaggttttacggataacgaagtcaccctcgtcgtggatggcaaagcgcacatcatgtcgctcaccgctcagcgggtacagaacgattttattttactggaaatggcgccgatggataatcagcgccgtctcagtcaggaacagcttcaacatgcgcagcagcaggccgcccgtgatttggtccgaggcctggcacatgagataaaaaatccgcttggcgggttgcgcggtgctgcacagctgcttgccaaggcattgcccgacccagcattgacggaatataccaaggtcatcatcgaacaggcggatcgcctgcgtaatctggttgatcgcctgctcgggccacagcagcctggcctgcacgtcacccaaagcatccatcaggtcgccgaacgcgtttgccaacttgtctcgctggaaaagccagataacgtgacgctggtaaaagattatgaccccagcctgccagagttgacgcacgaccccgaccagattgaacaggttttgctgaatattacccgcaatgcgctacaggcactgggcgaggaaggcgggacgattacgatacgtacccgcacggcttttcagctcactttacacggcgtgcgctaccgtctcgccgcacgtattgacgtggaagatgatggccccggcgtacctgctcaactacaggacacactgttttacccgatggtgagcggacgcgaagggggaaccggtttagggctttccatcgcccgcagtcttatcgaccagcactccggtaaaattgaatttaacagttggccaggacacaccgaattctcggtttacctgcctattcgccagtga

SEQ ID NO: 1612 - protein, 349 aa, Pectobacterium atrosepticum SCRI1043
MATGTLPDAGQILNSLINSILLLDNDLAIHYSNPAAQQLLAQSSRKLSGTPLPDLLGYFSLNIDLLRESLDSGQGFTDNEVTLVVDGKAHIMSLTAQRVQNDFILLEMAPMDNQRRLSQEQLQHAQQQAARDLVRGLAHEIKNPLGGLRGAAQLLAKALPDPALTEYTKVIIEQADRLRNLVDRLLGPQQPGLHVTQSIHQVAERVCQLVSLEKPDNVTLVKDYDPSLPELTHDPDQIEQVLLNITRNALQALGEEGGTITIRTRTAFQLTLHGVRYRLAARIDVEDDGPGVPAQLQDTLFYPMVSGREGGTGLGLSIARSLIDQHSGKIEFNSWPGHTEFSVYLPIRQ

SEQ ID NO: 1613 - DNA, 1074 bp, Burkholderia mallei ATCC 23344
  CDS (1)..(1074): transl_table=11
gtgcgctcgggactcctgacggggctcgaggcgttgccgacggtcgtgctcgtgctcgatcggcgcacgctcaggatcgcgttcgccaatccgtcggcggaggcgatgctcgacatctcgcgccggcagttgtcgcagatgccgtggggcgagatcttcccgaacgcgagcgagctcgcgacgacgatcaccgcgatcggcgaggagcgctttcacgcgacccatctggacaccgtgctcgatcgtccgggccgcgagccgctgcacgtgcatgcgatcgtcggctttctcgagggcgcgcccgagttcgtgctcgtcgagctgttcgagaacgagcggcagtcgcgcaccgaccgcgaggagcggatccacgatctcaccgccgtcaacaagcaactgatccgcaacctcgcgcatgagatcaagaacccgctcggcgggattcgcggcgcggcgcaattgctcgagttcgagctgggcgagcgcgagcgcgacgagctgcgcgagtacacgcaggtgatcatcaaggaatcggaccggctgcagacgctcgtcgaccggctgctcgagccgcatcgccatccgcacatcgtcggcgacgtgaacatccacgaagtgtgcgagcgggtgcgcgcggtgatgctcgcggaattcccgcgcggcctcacgatcgagcgcgattacgacgtgagcgtgcccgatctgcgcggcgacaaggagcaactgatccaggcgctcctcaatatcgtgcgcaacgcggcgcaggcgctgcgcgagcggatcgcgcagggcgacgcgcggatcgagctgcgcacgcgcgtcgcgcgcaaggtgacgatcgcgaagcgcctgtacaggctggcactggatttgcgtgtgatcgacaacggccccggcattcccgacgacatccgcgaccggatcttctatccgctcgtatccggccgcgacgacggcagcgggctcgggctcacgctcgcgcagaccttcatccagcagcacgacgggatgatcgaagtggacagccggccgggccggaccgaatttcagattttgctgccgctcgaccattga

SEQ ID NO: 1614 - protein, 357 aa, Burkholderia mallei ATCC 23344
MRSGLLTGLEALPTVVLVLDRRTLRIAFANPSAEAMLDISRRQLSQMPWGEIFPNASELATTITAIGEERFHATHLDTVLDRPGREPLHVHAIVGFLEGAPEFVLVELFENERQSRTDREERIHDLTAVNKQLIRNLAHEIKNPLGGIRGAAQLLEFELGERERDELREYTQVIIKESDRLQTLVDRLLEPHRHPHIVGDVNIHEVCERVRAVMLAEFPRGLTIERDYDVSVPDLRGDKEQLIQALLNIVRNAAQALRERIAQGDARIELRTRVARKVTIAKRLYRLALDLRVIDNGPGIPDDIRDRIFYPLVSGRDDGSGLGLTLAQTFIQQHDGMIEVDSRPGRTEFQILLPLDH

SEQ ID NO: 1615 - DNA, 1095 bp, Burkholderia pseudomallei K96243
  CDS (1)..(1095): transl_table=11
ttgtccgacgatgaccggctcgtgcgctcgggactcctgacggggctcgaggcgttgccgacggtcgtgctcgtgctcgatcggcgcacgctcaggatcgcgttcgccaatccgtcggcggaggcgatgctcgacatctcgcgccggcagttgtcgcagatgccgtggggcgagatcttcccgaacgcgagcgagctcgcgacgacgatcaccgcgatcggcgaggagcgctttcacgcgacccatctggacaccgtgctcgatcgtccgggccgcgagccgctgcacgtgcatgcgatcgtcggctttctcgagggcgcgcccgagttcgtgctcgtcgagctgttcgagaacgagcggcagtcgcgcaccgaccgcgaggagcggatccacgatctcaccgccgtcaacaagcaactgatccgcaacctcgcgcatgagatcaagaacccgctcggcgggattcgcggcgcggcgcaattgctcgagttcgagctgggcgagcgcgagcgcgacgagctgcgcgagtacacgcaagtgatcatcaaggaatcggaccggctgcagacgctcgtcgaccggctgctcgagccgcatcgccatccgcacatcgtcggcgacgtgaacatccacgaagtgtgcgagcgggtgcgcgcggtgatgctcgcggaattcccgcgcggcctcacgatcgagcgcgattacgacgtgagcgtgcccgatctgcgcggcgacaaggagcaactgatccaggcgctcctcaatatcgtgcgcaacgcggcgcaggcgctgcgcgagcggatcgcgcagggcgacgcgcggatcgagctgcgcacgcgcgtcgcgcgcaaggtgacgatcgcgaagcgcctgtacaggctggcactggatttgcgtgtgatcgacaacggccccggcattcccgacgacatccgcgaccggatcttctatccgctcgtatccggccgcgacgacggcagcgggctcgggctcacgctcgcgcagaccttcatccagcagcacgacgggatgatcgaagtggacagccggccgggccggaccgaatttcagattttgctgccgctcgaccattga

SEQ ID NO: 1616 - protein, 364 aa, Burkholderia pseudomallei K96243
MSDDDRLVRSGLLTGLEALPTVVLVLDRRTLRIAFANPSAEAMLDISRRQLSQMPWGEIFPNASELATTITAIGEERFHATHLDTVLDRPGREPLHVHAIVGFLEGAPEFVLVELFENERQSRTDREERIHDLTAVNKQLIRNLAHEIKNPLGGIRGAAQLLEFELGERERDELREYTQVIIKESDRLQTLVDRLLEPHRHPHIVGDVNIHEVCERVRAVMLAEFPRGLTIERDYDVSVPDLRGDKEQLIQALLNIVRNAAQALRERIAQGDARIELRTRVARKVTIAKRLYRLALDLRVIDNGPGIPDDIRDRIFYPLVSGRDDGSGLGLTLAQTFIQQHDGMIEVDSRPGRTEFQILLPLDH

SEQ ID NO: 1617 - DNA, 1095 bp, Methylococcus capsulatus str. Bath
  CDS (1)..(1095): transl_table=11
atgacggcatcggacacaccttccttctaccggcgcatcctcgacaacctgggggacggtgtgctgctgttcgataaaacgctgaccctgacctacatcaacatgcccggcgaaatgttgctcgccgtcagcgcccgtcaggtgctgggcgcccgcgcacgtctggtattgccgtgcggcgaacagccggtcgagccggatttgcggcacgccatggagaccggcatttccctgaccaagcgcaatgtcacgctggttcatccgctccatgtgatcacggtgaatctgcacatctcgccgatcaccgaggacgaggccaccggggtactggtccaggtgcagcaggtggatcgccatttgcggatttccatggaggagcagttgctggcgcagcaaaacgcggccaggtcactgctcaggggattggcgcacgagatcaagaatccgctcggggggctgcgcggcgcggcgcagctcctggagcgggagctgcaggacgagctgcgtgagtatacccagatcatcatcgaggagtccgaccgtctccagtccctgctggaccggatgctcgggccgaacaagctgccacagaaggcctggctgaacatccaccgggtgctggaccgggtgacccagctggtgcaggcggaagtgcccgccggtgtccggatcgtccgtgactacgatccgagcatcccggaaatcttcggcgacgccgatcagttgatccaggccatcctcaacatcgtgcgcaatgccgcccaggccctcggtatgcacggccggatcgtcatccgcagccgcatcgaccggcaggtgacgatcggtgagcggcgccatcgcatggcggtgaaaatcgacatcatcgatgacggccccggtatcaagccggaactcctgaaccatattttctatccgatggtcaccgggcgggccgagggcacgggcctgggattgtcgatcgcacaggggctgatcagccagcacggcggcttgatcgagtgcagcagcgtgcccggaaacaccgttttttccctgtttttgcctttggaggaggatcatgaagcgagcgttccaggtttgggtggtcgatga

SEQ ID NO: 1618 - protein, 364 aa, Methylococcus capsulatus str. Bath
MTASDTPSFYRRILDNLGDGVLLFDKTLTLTYINMPGEMLLAVSARQVLGARARLVLPCGEQPVEPDLRHAMETGISLTKRNVTLVHPLHVITVNLHISPITEDEATGVLVQVQQVDRHLRISMEEQLLAQQNAARSLLRGLAHEIKNPLGGLRGAAQLLERELQDELREYTQIIIEESDRLQSLLDRMLGPNKLPQKAWLNIHRVLDRVTQLVQAEVPAGVRIVRDYDPSIPEIFGDADQLIQAILNIVRNAAQALGMHGRIVIRSRIDRQVTIGERRHRMAVKIDIIDDGPGIKPELLNHIFYPMVTGRAEGTGLGLSIAQGLISQHGGLIECSSVPGNTVFSLFLPLEEDHEASVPGLGGR

SEQ ID NO: 1619 - DNA, 1068 bp, Azoarcus sp. EbN1
  CDS (1)..(1068): transl_table=11
atgcccgacctacaccgcccttcgaaccccggcccgttcgccggtctggatctgctgtcttcggcgatcgtcctcgtcgacgccgagctcgtcatccgctacctcaacgcaggcgccgagaaccttttcgaagtcagccagcgtcgcctgctcggacagccattgtcggcgctgctcggcgagccggccgggctgagggcggcgctgcacaatgcgctgcacaagaactggagctacacgggccagaacctgaagatcgcacgttccgacgccgagccgcttcacctcgattgcaccgtcagcccagccgaagccgtaggcgttcgcctgctgctcgaattccgcccgatcgacgcccagctgcgtgtcgcacgcgaagagcagctcctgcagcagcaacaggcgagccgcgagctgatccgcaacctcgcgcacgagatcaagaacccgctcggcggcatccgcggctcggcgcagctgctcgaacgcgagctgggggacccgcaactgcgcgaatacactgaagtcatcatcgccgaagccgaccggctgcaggacctgatgagccggctgctgacctcgcactgcatgatgcgtcccgggcagctcaacatccacgacgtgctcgaacgcgtgcggcgcctgattcttgccgagtttcccgagctcgcggtgcggcgcgactacgacaccagcttgccggagttcaccgccgaccgcgaacaactgatccaggcgattctcaacatcgcgcgaaacgccgcacaggcgatgggaggccgcggggaaatccgcttgcgcacgcgggtcgcccggcaggtcacgctggcgaagcggcgtttcaaactggcactggaattgcaagtgatcgacaacggccccggcattccggaagagatccgcgacaagatcttctatccactggtctcggggcgggaaggcgggagcggactgggcctgtcgctggcccagagcttcattgagcagcatcagggaatgatcgaggtcgacagccgtcgcgggcggacctgcttcactatcctgctgccgattaccgaccgtgcgtga

SEQ ID NO: 1620 - protein, 355 aa, Azoarcus sp. EbN1
MPDLHRPSNPGPFAGLDLLSSAIVLVDAELVIRYLNAGAENLFEVSQRRLLGQPLSALLGEPAGLRAALHNALHKNWSYTGQNLKIARSDAEPLHLDCTVSPAEAVGVRLLLEFRPIDAQLRVAREEQLLQQQQASRELIRNLAHEIKNPLGGIRGSAQLLERELGDPQLREYTEVIIAEADRLQDLMSRLLTSHCMMRPGQLNIHDVLERVRRLILAEFPELAVRRDYDTSLPEFTADREQLIQAILNIARNAAQAMGGRGEIRLRTRVARQVTLAKRRFKLALELQVIDNGPGIPEEIRDKIFYPLVSGREGGSGLGLSLAQSFIEQHQGMIEVDSRRGRTCFTILLPITDRA

SEQ ID NO: 1621 - DNA, 1080 bp, Silicibacter pomeroyi DSS-3
  CDS (1)..(1080): transl_table=11
atgagtgccgaaagcgccctctgggcctcgctgccggtcccggccttcctgatcgacgcggatgaccggatcgtcgatgtgaactctgccgccgaggggttcctgaacctgtcgcgcaaggcggtgctgggccatccgatctgggaccagctggcgatcgacgcgccgatcgaacccgcgttcgaacgcgcccgcggccagggcacgccgctgttcgtgaacgatatcgacgttggttcgggcaatcgggcgccgctgcaatgcgccatccagatcgccccgcttgtcggcagtcccggagtgatgatgatgctggtcagcccgcgcgagctggccgggcggatgacgcaaagccattcggtgaaatcggcggcgcaatcggccatcggcatggccgagatgctggcacacgagatcaagaacccgctggcgggcatcactggcgccgcccagcttctgagcatgaacctcgcaccagaagaccttgaattgacagaccttattgtcgcggaaagccgccggatcgtgaagctgctggaacaggtcgaacagttcggcaatctcagcgtgcccgatttcaagccggtcaacatccacgatgtgctggaccgggcgcgccgctcggcccttctcggatttggcgcgcatatgaagatcatcgaggattacgacccctcgctgccgctggcctatggcgatcctgaccagctgttgcaggtggtgctgaacctgctcaagaacgcttccgaggcggcgccgggcggcggcaccattcgcctcaggacctatttcgaacattccttccgcctgcgccgcaatgacgggtcgggccagtcgctgccgcttcaggtcgaggtgatcgatgacggccccggcctgcccgaagagattcgcgccgatatcttcgacccctttgtctcgggacgcgagaatggcaccgggctgggcctggcgctggtgagcaagatcatttccgaccatgacggctggatcgccgtcgactcggtcccgggccgcacggtgttccgcctgtcgctgccccgggtaccgaaggatcgcggcgaaaaggagagcaactga

SEQ ID NO: 1622 - protein, 359 aa, Silicibacter pomeroyi DSS-3
MSAESALWASLPVPAFLIDADDRIVDVNSAAEGFLNLSRKAVLGHPIWDQLAIDAPIEPAFERARGQGTPLFVNDIDVGSGNRAPLQCAIQIAPLVGSPGVMMMLVSPRELAGRMTQSHSVKSAAQSAIGMAEMLAHEIKNPLAGITGAAQLLSMNLAPEDLELTDLIVAESRRIVKLLEQVEQFGNLSVPDFKPVNIHDVLDRARRSALLGFGAHMKIIEDYDPSLPLAYGDPDQLLQVVLNLLKNASEAAPGGGTIRLRTYFEHSFRLRRNDGSGQSLPLQVEVIDDGPGLPEEIRADIFDPFVSGRENGTGLGLALVSKIISDHDGWIAVDSVPGRTVFRLSLPRVPKDRGEKESN

SEQ ID NO: 1623 - DNA, 1086 bp, Pseudomonas syringae pv. syringae B728a
  CDS (1)..(1086): transl_table=11
atgactatcagcgatgcgctgcacagactgttactggataacctgaccactgccaccattctgctcaacgccgacctgcgacttgagtacatgaacccggcggcggaaatgctgctggccatcagcgggcagcgcagccatgggcaattcatcagcgagctgttcaccgagtcggccgaagcattgagttcgctgcgtcaggcagtcgaacaggctcatccttttaccaagcgcgaagcgatgctcactgcactgaccggccagaccctgacggtcgactacgcggtgacgcctatccttagcaagggcgataccctgctgctgcttgaagtgcatccgcgtgaccggctgttgcgtatcaccaaggaagaggctcagctgtccaagcaggaaaccaccaagatgctggtgcgtggcctggctcacgagatcaagaatccactgggcggcattcgcggggccgcacaattgctggcccgcgagctgcctgaagaaagcctcaaggactacaccaacgtcattatcgaagaggccgaccgcctgcgtaatctggtcgaccgcatgctcggctccaacaagctgccatcgctggcgatgaccaacgtgcacgaagtgctggagcgcgtgtgcagcctggtcgaggccgaaagccagggttgcattaccttggtgcgcgactacgacccaagcatcccggacgtgttgatcgaccgcgagcaaatgatccaggcggtgctcaatatcgtgcgcaacgccatgcaggccatcagcggccagaacgagttgcgccttggccggatcaccctgcgtacccgcgccatgcgccagttcaccatcggccacgttcgccatcgactggtgagcaagatcgaaatcatcgacaacggccccggtattccggccgaacttcaggaaaccattttctatccgatggtcagtggccgcccggatggcacgggactaggtcttgccattacccagaacatcatcagccagcaccagggtctgatcgagtgtgacagccatcccggccacaccacattctcgatcttcctgccgctggaacaaggagcagcttcgacatga

SEQ ID NO: 1624 - protein, 361 aa, Pseudomonas syringae pv. syringae B728a
MTISDALHRLLLDNLTTATILLNADLRLEYMNPAAEMLLAISGQRSHGQFISELFTESAEALSSLRQAVEQAHPFTKREAMLTALTGQTLTVDYAVTPILSKGDTLLLLEVHPRDRLLRITKEEAQLSKQETTKMLVRGLAHEIKNPLGGIRGAAQLLARELPEESLKDYTNVIIEEADRLRNLVDRMLGSNKLPSLAMTNVHEVLERVCSLVEAESQGCITLVRDYDPSIPDVLIDREQMIQAVLNIVRNAMQAISGQNELRLGRITLRTRAMRQFTIGHVRHRLVSKIEIIDNGPGIPAELQETIFYPMVSGRPDGTGLGLAITQNIISQHQGLIECDSHPGHTTFSIFLPLEQGAAST

SEQ ID NO: 1625 - DNA, 1086 bp, Pseudomonas fluorescens Pf-5
  CDS (1)..(1086): transl_table=11
atgaccatcagcgacccactgcaccgcctgcttctggacaacctgaccaccgccaccatcctgctcaatgccgacctgcgccttgagtacatgaacccggcggcggaaatgctcctggccatcagcggccagcgcagccatgggcaattcatcagcgagctgttcaccgaatccgccgaggccctgagctccctgcgccaggcggtggagcaggcgcaccccttcaccaagcgcgaagccatgctcaccgcactgaccggccagaccctgaccgtcgactacgcggtgacgccgatcctcagcaacggcgacaccttgctgctgctggaagtccacccccgggaccggctgctgcggatcaccaaggaagaggcccagttgtccaagcaggaaaccagcaagatgctggtgcgcggcctggcccatgaaatcaagaaccccttggggggcattcgcggcgccgcacagttgctggcccgggagctgcccgaggaaagcctcaaggactacaccaacgtcatcatcgaagaagccgaccgcctgaggaacctggtggaccgcatgctcggctcgaacaagctgccatccctggccctgaccaacatccatgaagtgctggagcgggtcagcagcctggtggaagccgaaagccagggctgtatcaccctggtgcgcgattacgacccgagcattcccgacgtgctgatcgaccgcgaacagatgatccaggcggtgctcaacatcgtgcgcaacgccatgcaggccatcagcagccagaatgaaatgcgcctggggcgcatcaccctgcgcagccgcaccatgcgccagttcaccatcggccacgtgcgccatcgcctggtgagcaagatcgagatcatcgacaacggcccgggcatccccgcggaactgcaggacaccctcttcttccccatggtcagcggccgcccggacggtaccgggctgggcctggccatcacccagaacatcatcagccagcaccagggtctgatcgaatgtgacagccatcccggccacaccacgttctcgatctttctgccactggaacaaggagccccatcgacatga

SEQ ID NO: 1626 - protein, 361 aa, Pseudomonas fluorescens Pf-5
MTISDPLHRLLLDNLTTATILLNADLRLEYMNPAAEMLLAISGQRSHGQFISELFTESAEALSSLRQAVEQAHPFTKREAMLTALTGQTLTVDYAVTPILSNGDTLLLLEVHPRDRLLRITKEEAQLSKQETSKMLVRGLAHEIKNPLGGIRGAAQLLARELPEESLKDYTNVIIEEADRLRNLVDRMLGSNKLPSLALTNIHEVLERVSSLVEAESQGCITLVRDYDPSIPDVLIDREQMIQAVLNIVRNAMQAISSQNEMRLGRITLRSRTMRQFTIGHVRHRLVSKIEIIDNGPGIPAELQDTLFFPMVSGRPDGTGLGLAITQNIISQHQGLIECDSHPGHTTFSIFLPLEQGAPST

SEQ ID NO: 1627 - DNA, 1116 bp, Colwellia psychrerythraea 34H
  CDS (1)..(1116): transl_table=11
atgcatagccgtagttatatacaagatcacaagttgtcttaccagcaatcacttgccaatcagttggtgactgctgtaattattctcaatgaaaaactctccatcgtttatgtgaacccagccgctgaagcactattaaataaaagcttgtatcgtttattcaatactgaatctgaaatgatttttgctaataccagtatcaatcgctcacgtttaatacaactgcttgccaccggtcaagaatttacagattgcgacattgttgtagagttaaatgaaagccaccgatttacggcagaagtaaccgcgtcttcagtcgagtttgaaagaactccccatgtattgctcgaattcaaacaaatagatcaacaaaagcaaattagcttagaagtttttcaacatcagcaatggcttgctgcacgtgatcttattaaaggtctggctcacgaaattaaaaatccgcttggggggttaagaggcgcagcacagttacttagtaaagaagtgactagtgagcaacaagaatataccagcatgatcattgagcaagctgacagattaactaacttggttgatcgtctattaggtccaaaccaactgccccaaatgcaggcacaaaatgtccatggcatacttgagaaggtatgccagttggtcggctattcaaatggacaaaaaattcatttgttacgcgattatgatccctcacttcctgcggttgaatgtgatcaagaaaaactgcaacaagcagtgcttaatattgttaacaatgctattcaagccattgatgaaaaacacaatataaccctacgtactcgaattgctagtaatagaaccattcatggcaaacgaatcaagttagccattgaaattagcataattgataatggacctggtatccccactaaaattcaagacacacttttttatcctatggtctctggtcgttctaatggtacagggttaggtttatctatttcacaaacactaataaatcaacaccaaggtaagctatcgtgtcatagccgccctggtcatactgaatttacaatcctactaccattaaaacagcaacctttaaatcgagcacctttatcacaagagagtacattatga

SEQ ID NO: 1628 - protein, 371 aa, Colwellia psychrerythraea 34H
MHSRSYIQDHKLSYQQSLANQLVTAVIILNEKLSIVYVNPAAEALLNKSLYRLFNTESEMIFANTSINRSRLIQLLATGQEFTDCDIVVELNESHRFTAEVTASSVEFERTPHVLLEFKQIDQQKQISLEVFQHQQWLAARDLIKGLAHEIKNPLGGLRGAAQLLSKEVTSEQQEYTSMIIEQADRLTNLVDRLLGPNQLPQMQAQNVHGILEKVCQLVGYSNGQKIHLLRDYDPSLPAVECDQEKLQQAVLNIVNNAIQAIDEKHNITLRTRIASNRTIHGKRIKLAIEISIIDNGPGIPTKIQDTLFYPMVSGRSNGTGLGLSISQTLINQHQGKLSCHSRPGHTEFTILLPLKQQPLNRAPLSQESTL

SEQ ID NO: 1629 - DNA, 1086 bp, Pseudomonas syringae pv. phaseolicola 1448A
  CDS (1)..(1086): transl_table=11
atgactatcagcgacgcgctgcacagactgttactggataacctgaccactgccaccattctgctcaacgccgacctgcgacttgagtacatgaacccggcagcggaaatgctgctcgccatcagcgggcagcgcagccatgggcaattcatcagcgagctgttcaccgagtcggctgaggcactgagttcgctgcgtcaggcagtggaacaggctcatcctttcaccaagcgcgaagcgatgctcaccgcactgaccggtcagacactgactgtcgactatgccgtgacgccgattctcagcaagggcgataccctgctgctgcttgaagtgcacccacgtgacaggttgctgcgcattaccaaggaagaggcccagttgtccaagcaggaaaccaccaagatgctggtgcgtggcctggctcacgaaataaagaatccgctgggcggcattcgcggcgccgcacagctgctggcccgcgagctgcctgaagaaagcctcaaggattacaccaacgtcatcatcgaagaggccgaccgtctgcgtaatctggtcgaccgcatgctcggttccaacaagctgccgtcgctggcgatgaccaacgtgcacgaagtgcttgaacgagtgtgcagcctggtcgaggccgaaagtcagggctgcatcacgctggtgcgcgactatgacccaagcattcccgacgtcttgatcgaccgcgagcaaatgatccaggccgtgctcaatatcgtgcgcaacgccatgcaggccatcagcggccagaacgaattgcgcctgggacgaatcaccctgcgcacccgcgccatgcgccagttcactatcggccacgttcgccatcggctggtcagcaagatcgaaatcatcgacaacggccccggtattccggccgaacttcaggaaaccattttttacccgatggtcagtggccgcccggatggcacagggctaggtcttgccattacccagaacatcatcagccagcaccagggcctgatcgagtgtgacagccatcccggccacaccacgttctcgatcttcctgccgctggaacaaggagcaccttcgacatga

SEQ ID NO: 1630 - protein, 361 aa, Pseudomonas syringae pv. phaseolicola 1448A
MTISDALHRLLLDNLTTATILLNADLRLEYMNPAAEMLLAISGQRSHGQFISELFTESAEALSSLRQAVEQAHPFTKREAMLTALTGQTLTVDYAVTPILSKGDTLLLLEVHPRDRLLRITKEEAQLSKQETTKMLVRGLAHEIKNPLGGIRGAAQLLARELPEESLKDYTNVIIEEADRLRNLVDRMLGSNKLPSLAMTNVHEVLERVCSLVEAESQGCITLVRDYDPSIPDVLIDREQMIQAVLNIVRNAMQAISGQNELRLGRITLRTRAMRQFTIGHVRHRLVSKIEIIDNGPGIPAELQETIFYPMVSGRPDGTGLGLAITQNIISQHQGLIECDSHPGHTTFSIFLPLEQGAPST

SEQ ID NO: 1631 - DNA, 1071 bp, Dechloromonas aromatica RCB
  CDS (1)..(1071): transl_table=11
atggcagccatgaatatcacccatgcttcctttgccggcctcgatctgctggcctcggcggtgctgctgatcgacgatgggcaggccatccgttatatcaatgcggctggcgagaatctgctcgccgtcagcagtcgctcggtcatcggcaagaccctgtcgacggtgtgcacttgttccgccaccttacaggcggccgtgggcaacggactgaataacaattggggttacaccggccagaatatcgaggtcagacgcagcgacggcgaaatcctgcatctcaactgcaccgtgacgcccctgcggccggagatcgcggccggcatgcgcctgttgctcgaattgcagccaatcgagcaccatctgacggcgacgcgggaagagcgattgatcgagcagcagcaggccagtcgcgagctgatccgcaatctggcgcatgaaatcaagaatcccttggggggcatccggggggctgcgcagttgctggaacatgaactgggcaacccgtcgcttaaggaatacacgcaagtcatcatcaaggaagcggaccgcttgcaggatttgatgcagcgcctgctgaccccgcatcgggcaatgctgccaacgaccgtcaatattcacgaaatcctggagcgggtacgtagcctgctgacagccgaatttcctggttccttgcaggtccggcgtgattacgacaccagcttgccggagctgattggtgatcgcgaacagttgattcaggcggtgctgaatatcgcccggaatgccgcgcaggcgatgaacggcgaaggcgagattgtgctcaagacgcgttccttgcggcaggtgacgctggccaagaaacattatcgcctggccatggaaatcaaggtggtggacaacggcccggggattcctgatgaaatccgcgaacgcatgttctatccgctggtttcggggcgtgaaggggggagtggattggggttgaccatcgcccagaacttcattcagcaccatcacgggaccatcgattgctccagtcgacccggtaacaccatttttacgctgcgcttgccggtcgaacaggcctga

SEQ ID NO: 1632 - protein, 356 aa, Dechloromonas aromatica RCB
MAAMNITHASFAGLDLLASAVLLIDDGQAIRYINAAGENLLAVSSRSVIGKTLSTVCTCSATLQAAVGNGLNNNWGYTGQNIEVRRSDGEILHLNCTVTPLRPEIAAGMRLLLELQPIEHHLTATREERLIEQQQASRELIRNLAHEIKNPLGGIRGAAQLLEHELGNPSLKEYTQVIIKEADRLQDLMQRLLTPHRAMLPTTVNIHEILERVRSLLTAEFPGSLQVRRDYDTSLPELIGDREQLIQAVLNIARNAAQAMNGEGEIVLKTRSLRQVTLAKKHYRLAMEIKVVDNGPGIPDEIRERMFYPLVSGREGGSGLGLTIAQNFIQHHHGTIDCSSRPGNTIFTLRLPVEQA

SEQ ID NO: 1633 - DNA, 1182 bp, Ralstonia eutropha JMP134
  CDS (1)..(1182): transl_table=11
atgcgtcgcctgattcgcagcgtgtcgcgcaggagcggtagcgccgatggcgccggcggcgacactgccggccggactccaccggccaatggtccgggcagcggtcaggtgttgccactaggcgcggtggcgctgcatgccggcctcgatgtcgtcgctaacccggtactgctcgtcaggcaaccgggtctgggcgtgatgtatgccaatccggcggcggaatcgaccttcgcagtgtcgcgcaaggcgatggtggagttgtcgttgtcggacctgttcgggcagtccgaagagctgcagggcatgatcgacacggtgatcacgcgccagttcgatgtgcggcgccaggacttggtgctgcgcccaccattgcaggagcccattcacgcgcacgtggtcatcggcgcgctggaggccttcagcgataccgtgctcgttgagatcctgcccaacgagcagaaggttcgcagcgacagggaagagcgcattctcgacctgacggccgctaacaaggaattgatccgcaatctcgcccacgagatcaagaatccgctcggcggtatccgtggcgcggcacaactgctcgagttcgagttgcccgaacgtgcactgcgcgaatacacgcaggtcatcatcaaggagtcggaccggttgcagacgctggtggaccggctgctggagccgcaccgccatccgcatatcgtgtcgagcctgaatatccacgaggtgctagagcgtgtgcgttcggtcgtgctggccgagtttcccaacgggctggacatcgagcgcgattacgatgccagcctgcccgaactgcgcggcgacatggaacagctgatccaggccgtgctcaatatcgtccataacgcagcccaggcgctggccgagcgcattgcgcgcggcgacgcgcagatcatcctgcgcacgcgcgtcgcccgccaggtcacgattgcgaagcgattgttcaagctggcattggacttgcatgtgatcgacaacggcccgggaattcccgatgacatccgcgaacgcatcttctatccgctggtttcgggtagggacggcggcagcggactcggtctcacactcgctcaaaccttcgtgcagcagcacgagggcttgatcgaatgcgagagcaggccgggctgtaccgacttccgcatcctgctgccgctgcactag

SEQ ID NO: 1634 - protein, 393 aa, Ralstonia eutropha JMP134
MRRLIRSVSRRSGSADGAGGDTAGRTPPANGPGSGQVLPLGAVALHAGLDVVANPVLLVRQPGLGVMYANPAAESTFAVSRKAMVELSLSDLFGQSEELQGMIDTVITRQFDVRRQDLVLRPPLQEPIHAHVVIGALEAFSDTVLVEILPNEQKVRSDREERILDLTAANKELIRNLAHEIKNPLGGIRGAAQLLEFELPERALREYTQVIIKESDRLQTLVDRLLEPHRHPHIVSSLNIHEVLERVRSVVLAEFPNGLDIERDYDASLPELRGDMEQLIQAVLNIVHNAAQALAERIARGDAQIILRTRVARQVTIAKRLFKLALDLHVIDNGPGIPDDIRERIFYPLVSGRDGGSGLGLTLAQTFVQQHEGLIECESRPGCTDFRILLPLH

SEQ ID NO: 1635 - DNA, 1092 bp, Thiobacillus denitrificans ATCC 25259
  CDS (1)..(1092): transl_table=11
atgagcatgccgtcgccctcttaccccgagtatgccggactggactgcctgtccacgggtgccatgattctcgatggcgcgggcggggtcgtctatctgaaccccgctgccgagacgctgctcggcgtgtccggggtgctcctcgtcggcgccgaggcgtccacactcttcgagcgcagccccgaattgctggcagcgatcgagaccgcgcgcacccagcaggaaaccgtcgtcgaatacgaactcgatgtcgtcgccagcgggcatccgccgatacgcgtcggctgcagcgtctcgccgctcgagcggccgcgctacggcgtgctggttgaaatgcgcgcggtcgacccgcagttgcgcatcgcgcggctggagcaggcgcggcttcagcaggaagccaaccgcgagctcctgcgcaacctcgcgcacgaaataaaaaacccgctcggcggcatccgcggcgcggcgcagctgctcgaacacgaactccctcgggaaagcctgcgcgagtacacccaggtcatcatcaaggagtccgaccgccttcagtcgctgatggagcgcctactgacgccgcaccgcgtgccgcatttcggtgcagtgaacattcatgaggtgctcgagcgggttcgcagcctcgttctcgccgaaacgcccggcgtcacgctgcgccgcgactacgacgtcagcctgcccgaaatccgcggcgacgccgagcagctgatccaggcgacgctcaacatcgcgcgcaacgcggtgcaggccatgcacggtaacggggccggacatggtaatggacacgggcgcggcgcgggcgagctggtgttccgcacccgtgtcgcgcgccagatcacgctcgagagtcggcgctatcaactgggcctgcgcgtcgagatcatcgacaacggccccggcattcccgacagcattcgcgaccagatcttctttccgctggtgtcggggcgcgaaggcggcagtggcctcggcctcgccgtcgcgcagaccctggtctcgcagaaccacggcacgctcgattgcgaaagccgccccgggcggaccgtgttttcaatctttctcccactgcccgtctga

SEQ ID NO: 1636 - protein, 363 aa, Thiobacillus denitrificans ATCC 25259
MSMPSPSYPEYAGLDCLSTGAMILDGAGGVVYLNPAAETLLGVSGVLLVGAEASTLFERSPELLAAIETARTQQETVVEYELDVVASGHPPIRVGCSVSPLERPRYGVLVEMRAVDPQLRIARLEQARLQQEANRELLRNLAHEIKNPLGGIRGAAQLLEHELPRESLREYTQVIIKESDRLQSLMERLLTPHRVPHFGAVNIHEVLERVRSLVLAETPGVTLRRDYDVSLPEIRGDAEQLIQATLNIARNAVQAMHGNGAGHGNGHGRGAGELVFRTRVARQITLESRRYQLGLRVEIIDNGPGIPDSIRDQIFFPLVSGREGGSGLGLAVAQTLVSQNHGTLDCESRPGRTVFSIFLPLPV

SEQ ID NO: 1637 - DNA, 1086 bp, Pseudomonas fluorescens PfO-1
  CDS (1)..(1086): transl_table=11
atgaccatcagtgacgcactgcatcgcttgctactcgacaacctgaccaccgccaccatcctgctcgacagcgaattgcgcctcgagtacatgaacccggcggcggagatgctgctggccatcagcggtcagcgcagccatgggcagttcatcagcgagctgttcaccgagtccaccgaggcgctcaactcgctgcgccaggcggtggagcaggcgcacccgttcaccaagcgcgaagcgatgctcaccgccctcaccggccagaccctgaccgtggattacgcggtgacgccgatcctcagcaacggcgcgaccctgctcctgctggaagtccatccccgtgaccgcctgctgcggatcaccaaggaagaggcgcaactgtcgaaacaggaaaccagcaagatgctggtgcgcggcctggcccacgagatcaagaatccgctgggcggcatccgtggtgccgcgcagttgctggcccgggaactgccggaagacagcctgcgcgactacaccaacgtgatcatcgaagaggccgaccgcctgcgcaatctggtcgaccgcatgctcggctcgaacaaattgccgtcgctggccctgtgcaacgtacacgaagtgctggagcgggtctgccaactggtcgaggccgaaagccagggctgcatcacgctggtgcgcgattacgacccgagcattccagacgtcctgatcgaccgggaacaaatgattcaggcggtgctgaacatcgtgcgcaacgcgatgcaggccatcagcagccagaacgaactgcgcctgggccgcatcagcctgcgcacccgcgccatgcgccagttcaccatcggccacgtccgccatcgcctggtgaccaagatcgagatcatcgacaacggcccgggcattcctgcggaactccaggaaaccatcttctttcccatggtcagcggccgtccggacggtaccgggctgggcctggccatcacccagaacatcatcagccagcaccagggcctgatcgagtgtgacagccatccaggccacaccacgttctcgatctttctgccactggaacaaggagccacatcgacatga

SEQ ID NO: 1638 - protein, 361 aa, Pseudomonas fluorescens PfO-1
MTISDALHRLLLDNLTTATILLDSELRLEYMNPAAEMLLAISGQRSHGQFISELFTESTEALNSLRQAVEQAHPFTKREAMLTALTGQTLTVDYAVTPILSNGATLLLLEVHPRDRLLRITKEEAQLSKQETSKMLVRGLAHEIKNPLGGIRGAAQLLARELPEDSLRDYTNVIIEEADRLRNLVDRMLGSNKLPSLALCNVHEVLERVCQLVEAESQGCITLVRDYDPSIPDVLIDREQMIQAVLNIVRNAMQAISSQNELRLGRISLRTRAMRQFTIGHVRHRLVTKIEIIDNGPGIPAELQETIFFPMVSGRPDGTGLGLAITQNIISQHQGLIECDSHPGHTTFSIFLPLEQGATST

SEQ ID NO: 1639 - DNA, 1143 bp, Burkholderia sp. 383
  CDS (1)..(1143): transl_table=11
atggttctgaagaatctgatcaaggcgaaaacggggcagcccgagcgactgacggacgacgagcggctctcgcgctcgggcctgctggcggggctggaagcgttgccgacggtcgtgatcgtgctcgaccgcaagacgctgcggatcgcgttcgcgaacccgtcagccgaggcgatgctcgacatttcgcgccggcagctcgcgcagcggccgtggggcgagatttttccgaatgcgaacgagctggcatcgacgatcaccgcgatcggcgaagaacgctttcatgcgacgcacctcgataccgtgctcgaccggcccggccgcgaaccgctgcatgtgcacgcgatcgtcggctttctcgagacctcgcccgatttcgtgctcgtcgagctgttcgagaacgagcggcagtcgcgcaccgatcgcgaggagcgcatccacgacctgaccgcggtcaacaagcagttgatccgcaacctcgcgcacgagatcaagaacccgctcggcggcattcgcggcgcagcccagctgctcgaattcgagctcggcgagcgcgagcgcggcgagttgcgcgaatacacgcaggtgatcatcaaggagtccgaccgcctgcagacgctcgtcgaccggttgctggagccgcaccggcatccgcacatcgtcggcgacgtgaacattcatgaagtatgcgaacgcgtgcgtgcggtgatgctcgcggaattcccgcgcgggctctcgatcgagcgcgactacgacgtgagcgtgccggacctgcgcggcgacaaggagcaactgatccaggcgctgctcaacatcgtgcgcaacgccgcgcaggcgctgcgcgaacggatcgcgcagggcgacgcgaagatcgagctgcgcacgcgcatcgcgcgcaaggtgacgatcgcgaagcgcctgtaccggctggcactggacttgcacgtgatcgacaacgggcccggcattccggaggaaatccgcgaccggatcttctacccgctcgtgtccgggcgcgacgacggcagcggcctcggcctgacgctcgcgcagacgttcgtgcagcagcacgacgggatgatcgaggtcgaaagccggcccggacgtaccgaatttcagatcctgctgccgctcgaccattga

SEQ ID NO: 1640 - protein, 380 aa, Burkholderia sp. 383
MVLKNLIKAKTGQPERLTDDERLSRSGLLAGLEALPTVVIVLDRKTLRIAFANPSAEAMLDISRRQLAQRPWGEIFPNANELASTITAIGEERFHATHLDTVLDRPGREPLHVHAIVGFLETSPDFVLVELFENERQSRTDREERIHDLTAVNKQLIRNLAHEIKNPLGGIRGAAQLLEFELGERERGELREYTQVIIKESDRLQTLVDRLLEPHRHPHIVGDVNIHEVCERVRAVMLAEFPRGLSIERDYDVSVPDLRGDKEQLIQALLNIVRNAAQALRERIAQGDAKIELRTRIARKVTIAKRLYRLALDLHVIDNGPGIPEEIRDRIFYPLVSGRDDGSGLGLTLAQTFVQQHDGMIEVESRPGRTEFQILLPLDH

SEQ ID NO: 1641 - DNA, 1092 bp, Geobacter metallireducens GS-15
  CDS (1)..(1092): transl_table=11
atgagcccggaaagccccaacgaagcgttccttgccaccatcatcgacagcgtcggcgacggggtcatcgtcatcgacctgggggggcggatcaccctcatgaaccctgcggccgaggagatcatcgccatctcccggcgccaggccatggggcaccccttcgcggccctcctcggcagtcaggagattctggtggatatggtcgccaagaccgccgccaccggcatgaccatctccgacaacgagaacatcgtcatcaggaaggcgaagcagcttaccccggtcgcggtcaccacgtttccgctcctgcggcaggacggcgagcccatcggcaccatcctcatgctgcgggacctgacgaacatccgggaactggaagatgcggtccgccacgccgaccggctctccaccctcggcaccctggcggcgggcctggcccacgagatcaagaaccctctgggggggatcaagggggcggcccagcttctggaaatggagctcccccccgagagcgaactgcgggacaacgtccgggtcgtggtcagggaggtggaccgggtcaaccggatcgtggaggagctcctggcactctcatcgccccgcaagctccaactcaccaaggtgaacctccacaagatcctcggcgacattgtcactctcaggaaacgggccacggaagggaagtccgtcacgttccagcagcagttcgacccgagcatcccgccgatcctggccgacgaggggctcctgacccagctcttcctgaacctgatcaagaacgccgtggaggcggtggacgagcggggcaccatccgggtcgcgagccgggtcctctccgactacagcatgaccccgaagggggagcgccgctcccgcatggtggccgtcgatgtccgcgacgacggccccggtatccccagggagcaactggagcagctcttcacccccttcttcaccaccaaggccaaggggaccggactcggcctcgccatctgccagaagatcgtcacagagcaccggggcatgctcaaggtggaatcggacccgggcacggggacgacgttcacggtgatgctgccgttaattcagtaa

SEQ ID NO: 1642 - protein, 363 aa, Geobacter metallireducens GS-15
MSPESPNEAFLATIIDSVGDGVIVIDLGGRITLMNPAAEEIIAISRRQAMGHPFAALLGSQEILVDMVAKTAATGMTISDNENIVIRKAKQLTPVAVTTFPLLRQDGEPIGTILMLRDLTNIRELEDAVRHADRLSTLGTLAAGLAHEIKNPLGGIKGAAQLLEMELPPESELRDNVRVVVREVDRVNRIVEELLALSSPRKLQLTKVNLHKILGDIVTLRKRATEGKSVTFQQQFDPSIPPILADEGLLTQLFLNLIKNAVEAVDERGTIRVASRVLSDYSMTPKGERRSRMVAVDVRDDGPGIPREQLEQLFTPFFTTKAKGTGLGLAICQKIVTEHRGMLKVESDPGTGTTFTVMLPLIQ

SEQ ID NO: 1643 - DNA, 1101 bp, Rhodospirillum rubrum ATCC 11170
  CDS (1)..(1101): transl_table=11
atggtgaagatttctgccctgacccggcgcgcgccggttccctcgatcgacccggcgacggtgctgagcgccatcgcttcggcggtgatctgtgtcgacgaggccgaccgggtgcaattcgtcaatgccgccggcgagcagatgttcgaaagcacctgggcgctgttgcgcggcatggcgctctcggacctgattccgcccgattgtccgatctttggattgatggaaaaggttcggcgcaatcattcgactttttcggaatacggggtgcagcttgataccccgcgcaccggccagcgcaccatcaccgtgcgcgtgtcgcctttggccgaatacgagaactgggtggtgatctcgctccatgaactgtcgatggccttgaagatcggccagcagatgagccaccgcaacgccgcccgctcggtgacggcaatggccgccctgcttgcccatgaggtcaagaacccgctgtcggggattcgcggggcggcccagcttctggaagccaatctgcccgaagaggaccaccagctggtccggctgatcatcgacgagaccgaccgcatcgttgccctggtcgaccgcatggaggttttctccgacaacatgccgctggcccgcgaggcggtgaacatccaccgggttctcgagcatgtgcgcatggtcgccgaaaacggcttcgcccgcggtgtccgcttcgtcgagacctatgatccgtccttgcccgccgttttgggcagccgcgaccagttgatccaggtgttcctcaatctgatcaagaacgccgccgaggcgatcggcccgggcggcggcgagatcgtgctgtcgaccgcctatcagcagggcctgagattacgggtgccgggcggcgaggtgaccgatttgccgctggtcatcagcgtgcgcgacaatggtaccaccggtatctcggaagatctgcgcggcaatctgttcgatcccttcgtcaccaccaagcccaagggcagtggtctggggctgccgctggtggccaagatcgtcaacgatcacggcggcatcatcgaattcgacagcgttcccggccgcacggtgttcaccgtcatgctgccgatggtccgctga

SEQ ID NO: 1644 - protein, 366 aa, Rhodospirillum rubrum ATCC 11170
MVKISALTRRAPVPSIDPATVLSAIASAVICVDEADRVQFVNAAGEQMFESTWALLRGMALSDLIPPDCPIFGLMEKVRRNHSTFSEYGVQLDTPRTGQRTITVRVSPLAEYENWVVISLHELSMALKIGQQMSHRNAARSVTAMAALLAHEVKNPLSGIRGAAQLLEANLPEEDHQLVRLIIDETDRIVALVDRMEVFSDNMPLAREAVNIHRVLEHVRMVAENGFARGVRFVETYDPSLPAVLGSRDQLIQVFLNLIKNAAEAIGPGGGEIVLSTAYQQGLRLRVPGGEVTDLPLVISVRDNGTTGISEDLRGNLFDPFVTTKPKGSGLGLPLVAKIVNDHGGIIEFDSVPGRTVFTVMLPMVR

SEQ ID NO: 1645 - DNA, 1188 bp, Burkholderia thailandensis E264
  CDS (1)..(1188): transl_table=11
ttgttccgcccgcgacggcggtttttgacacggcatccacgcaagatggttctgaagaatctgatcaaggccagggccggccacccggagcgcttgtcggacgacgaccggctcgtgcgctcggggctcctcacggggctggaggcgttgccgacggtcgtgctcgtgctcgaccggcgcacgctcaggatcgcgttcgccaatccgtcggcggaggcgatgctcgacatctcgcgccggcagttgtcgcagatgccgtggagcgagatcttcccgaacgcgaacgagctcgcgacgacgatcgccgcgatcggcgaagagcgctttcatgcgacgcatctcgacaccgtgctcgaccgcccgggacgcgagccgctgcacgtgcacgcgatcgtcggcttcctcgagggcgcgccggacttcgtgctcgtcgagctgttcgagaacgagcggcagtcgcgcaccgaccgcgaggagcgaatccacgatctcacggccgtcaacaagcaactgatccgcaatctcgcgcacgagatcaagaacccgctcggcgggattcgcggcgccgcgcaattgctcgaattcgagttgggcgagcgcgagcgcgacgagctgcgcgagtacacgcaggtgatcatcaaggaatcggaccggctgcagacgctcgtcgaccgtttgctcgaaccgcatcggcacccgcacatcgtcggcgacgtgaatatccatgaagtgtgcgagcgggtgcgcgccgtgatgctcgctgaatttccgcgcggcctcacgatcgagcgcgactacgacgtgagcgtgcccgacctgcgcggcgacaaggagcaactgatccaggcgctgctgaacatcgtgcgcaacgcggcgcaggcgctgcgcgagcggatcgcgcagggcgacgcgaagatcgagttgcgcacgcgcgtcgcgcgcaaggtgacgatcgcgaagcgcctgtacaggctggcactggatttgcacgtgatcgacaacggccccggcattcccgacgagatacgcgaccggatcttctatccgctcgtatccggccgcgacgacggcagcgggctcgggctcacgctcgcgcagacgttcatccagcagcacgacgggatgatcgaagtggacagccggccgggccggaccgaatttcagattttgctgccgctcgaccactga

SEQ ID NO: 1646 - protein, 395 aa, Burkholderia thailandensis E264
MFRPRRRFLTRHPRKMVLKNLIKARAGHPERLSDDDRLVRSGLLTGLEALPTVVLVLDRRTLRIAFANPSAEAMLDISRRQLSQMPWSEIFPNANELATTIAAIGEERFHATHLDTVLDRPGREPLHVHAIVGFLEGAPDFVLVELFENERQSRTDREERIHDLTAVNKQLIRNLAHEIKNPLGGIRGAAQLLEFELGERERDELREYTQVIIKESDRLQTLVDRLLEPHRHPHIVGDVNIHEVCERVRAVMLAEFPRGLTIERDYDVSVPDLRGDKEQLIQALLNIVRNAAQALRERIAQGDAKIELRTRVARKVTIAKRLYRLALDLHVIDNGPGIPDEIRDRIFYPLVSGRDDGSGLGLTLAQTFIQQHDGMIEVDSRPGRTEFQILLPLDH

SEQ ID NO: 1647 - DNA, 1122 bp, Novosphingobium aromaticivorans DSM 12444
  CDS (1)..(1122): transl_table=11
atgatcgcgctccctgactggcgtcgtcaggaaccggggcagaagcccgaaccgaagcgcgtcgtcgcgagccttccgcttgcgctgctgcagctcgatcccgacctcatcgtggccgcggtaaacccggcggccgaacaactcatggggcagggcgcacgccggatcgttggaaagtcggtcgcagaactgttcgaattcgaggagccgcttatcctcggccgcctggctgaaggtgaagcccaacttttcgcgcgcggagttggcgtgcgcatcatggggcagcccgcgcgacgttttgacgtgatgaccagccccgtgactcattgccccggctggcagctcctgatgcttcacgaaggtgtgggcgtcgaggccctgtctggcgacggtcgcggcgcaggaggcggggagggtgttgctttgcgcgcacccgaagtccttgcccacgagatcaagaacccgctggccggcataaagggcgcggcgcagcttcttgatcgcaagctgtccgaaagcgatcgcgcgatgaccggcctgatcaccgccgaggtcgaccgtatcgccaaactgatcgaccagatgcagtcgctttcccggcggagcgccgaacccgcgcagccgtgcaatctgcacgaagctgtccgccgggccgaagcggtgcttgcagcggccagcccggaatcggtcacgatcgtcgaggagttcgacccctcgctcccgccgatcatggccaatccggattcgctcgtccaggttctgcttaacctgctgagcaatgcgcgcgaagcctgcctcgccaatgaagagccgcgcatcatcgtgcgcacgcgctttgcaagcggcattcagctacatgccggccccggtggaaggccccttcgcctgcctatcgaattgcgcgtatccgacaacggaccgggtatcgatcccacattgcgcgaccacatcttcgaaccctttgtcaccgcaaagaagaacggccagggccttggtcttgcccttgtccagaagctggtgcgagagatgaatggccgcattacccatgatcgcgacgaggtgggtggctggacccattttcgcatccatcttcctgtcgccggatcggttcccaccgaatga

SEQ ID NO: 1648 - protein, 373 aa, Novosphingobium aromaticivorans DSM 12444
MIALPDWRRQEPGQKPEPKRVVASLPLALLQLDPDLIVAAVNPAAEQLMGQGARRIVGKSVAELFEFEEPLILGRLAEGEAQLFARGVGVRIMGQPARRFDVMTSPVTHCPGWQLLMLHEGVGVEALSGDGRGAGGGEGVALRAPEVLAHEIKNPLAGIKGAAQLLDRKLSESDRAMTGLITAEVDRIAKLIDQMQSLSRRSAEPAQPCNLHEAVRRAEAVLAAASPESVTIVEEFDPSLPPIMANPDSLVQVLLNLLSNAREACLANEEPRIIVRTRFASGIQLHAGPGGRPLRLPIELRVSDNGPGIDPTLRDHIFEPFVTAKKNGQGLGLALVQKLVREMNGRITHDRDEVGGWTHFRIHLPVAGSVPTE

SEQ ID NO: 1649 - DNA, 1074 bp, Saccharophagus degradans 2-40
  CDS (1)..(1074): transl_table=11
atggttgaacaagcaaacttccgacaaatactcgacagcctgattacggcagtcatagtgctggaagacgatttaagcatcgcccacattaacgcatcggcagaaatgctgctaagcgtgagcggcgagcagcttgtcggcaagcctattcaagagtgctttttcgaaaccgacggcacccccatgtcactatctgaagcattgcgtgaaaatcgcaatttcaccaagcgcaaagcgcgctggagccttcactctcatcaagaaataactgtcgactattcggttacccccagccccgaaatgggcaagattatcttagaggtgcaaccgctagatagattgctgcgcattagtcgtgaagaagccctactctcttcgcaagaaacatcgcgcaacttaattcgcagcatggcccacgaaattaaaaaccccttaggcggcattcgcggggcggctcagctgctctctcgcgaactgcaagatgaagacctcgatgaatacacgcgcattatcatcgacgaaacagacagattaagaaaccttgtggaccgcatgctggggccgcgcacattgcccaaaaacgaagaaacaaatatccacgaagtattggaacacgtagcagcggtaatcaaggccgaaattggcggtgcggtaaaattgcgccgcgactacgacccaagtattcccgaagtactgggcgataaagaaatgcttattcaggccacgctgaacattgtgcgcaacgccgtacaagcactaatggaaaacagcaaccaagaaaagccgccagaagtaaaactaagcacccgcgtgcagcgccgctacaccattggcagggcgcactttccgctggtagcgcgcattggcattgaagacaacggcccgggcataccgccagaaataatcgaagacatattcttccccatgataacggggagagcggaaggcaccggcctaggcctagccatttcgcaaaatttaataggccagcacaacggccttatagaatgcgagagcgagccgggcagaaccgagttcgccatatacttacccttgggaaatcactatgcataa

SEQ ID NO: 1650 - protein, 357 aa, Saccharophagus degradans 2-40
MVEQANFRQILDSLITAVIVLEDDLSIAHINASAEMLLSVSGEQLVGKPIQECFFETDGTPMSLSEALRENRNFTKRKARWSLHSHQEITVDYSVTPSPEMGKIILEVQPLDRLLRISREEALLSSQETSRNLIRSMAHEIKNPLGGIRGAAQLLSRELQDEDLDEYTRIIIDETDRLRNLVDRMLGPRTLPKNEETNIHEVLEHVAAVIKAEIGGAVKLRRDYDPSIPEVLGDKEMLIQATLNIVRNAVQALMENSNQEKPPEVKLSTRVQRRYTIGRAHFPLVARIGIEDNGPGIPPEIIEDIFFPMITGRAEGTGLGLAISQNLIGQHNGLIECESEPGRTEFAIYLPLGNHYA

SEQ ID NO: 1651 - DNA, 1098 bp, Methylobacillus flagellatus KT
  CDS (1)..(1098): transl_table=11
atggaacataaaatccccccctcattcgcaggtttagagcatttatcgaccgcgattatcctactcaataatcagcgtcacgttgtctatgccaaccccggcgccgaggtgctattcgccatcagtgccaaacagatcgcaggcctgccggtgtctcaggtatttcctggctgcgacatcctcgactccgccatggaacacgccatcaagtaccacagcccgttccgcgagcacgagttccctatcaccacgctgcgacagcaatctttcgccgttacctgcactgtgacgccggtagagctggacccagcgtgcctggtactcgaattccagcatatggaccagcagctgcgcattgcgcgtgaagaacgcatgctcatccaacagcaagccaacgccgaactcctgcgcaacctggcccatgaaatccgcaatccgctaggcgggctacgcggtgcggcgcaactgctggaacacgagctgccgcaagtcagcctgcgcgaatacacccaggtcatcatcaaggaggccgaccggctgcaattgctgatggaccggctgctggtgccgcaccgcgtcccgaaatacgagccgaccaacatccacgaagtattggaacgtgtgcgcagcctgctgctggctgagtccccccgcggcatccagatccgcagggattacgacaccagcctgcccgagctgatcggcgaccgcgagaaactcatccaagcggtcctgaacatcgcgcgcaatgccgtgcaggccatgctgaacaaccctggcgagcaagcaccggaaatcatcttacgtacgcgtgcggcccgtcaggtcacactggcaaaaaaacgctaccgggttgccatcaagctgcagatcatcgacaacggccccggaattccgcccgacatccgcgagcgcattttctacccgctggtgtcaggccgggagggcggaacaggcctgggcctgacgctggcccagaccttcatcacccagcatcacggcatgatcgaatgcgaaagcgaaccgggccgtaccactttcaccatattgctgccaatagaaagcacggcaatgaagtcttacatcgcaagacaataa

SEQ ID NO: 1652 - protein, 365 aa, Methylobacillus flagellatus KT
MEHKIPPSFAGLEHLSTAIILLNNQRHVVYANPGAEVLFAISAKQIAGLPVSQVFPGCDILDSAMEHAIKYHSPFREHEFPITTLRQQSFAVTCTVTPVELDPACLVLEFQHMDQQLRIAREERMLIQQQANAELLRNLAHEIRNPLGGLRGAAQLLEHELPQVSLREYTQVIIKEADRLQLLMDRLLVPHRVPKYEPTNIHEVLERVRSLLLAESPRGIQIRRDYDTSLPELIGDREKLIQAVLNIARNAVQAMLNNPGEQAPEIILRTRAARQVTLAKKRYRVAIKLQIIDNGPGIPPDIRERIFYPLVSGREGGTGLGLTLAQTFITQHHGMIECESEPGRTTFTILLPIESTAMKSYIARQ

SEQ ID NO: 1653 - DNA, 1143 bp, Burkholderia xenovorans LB400
  CDS (1)..(1143): transl_table=11
atggttcttaagaatctgatcaaggcaaggaaaacgcacgagccgacactctcggacgacgcccaactcgtcagctccggtttgctgccgggcttcgaggcgttgccgacagtcgtgctggtgctcgaaaagcgcacgctgcgcgtcgcgtttgcgaacccgtcggcggagtcgatgctggagctctcgcgccggcaactgacgcaaatggcgtggccgcacatcttctcgaatgccgacgaactggtcgcgaccatttccgcgatcgccgctcaccgctttcatgccacgcatctggacgccgtgctcgaacgtccgggccacgaaccgctgcatgtgcacgcgatcgtgggttttctggaaagcgcgcaagactatgtgctgctcgaactgttcgagaacgaacggcatttacgcaccgaccgcgaggagcgcatcaacgacctcacggcggtcaacaagcaactgatccgcaatctcgcgcacgagatcaagaacccgctcggcgggattcgcggcgcggcgcaactgctcgagttcgaactcggcgagcgtcagcgtgacgaactgcgcgagtacacgcaggtgatcatcaaggaatcggaccggctgcaaacgctggttgaccgtttgctcgaaccgcaccgtcatccgcatatcgtcggcgacgtgaatattcacgaagtgtgcgaacgcgtgcgccaggtgattctcgcggagtttccgcgcggcctcaccatcgagcgcgattacgacgtgagcgtgccggacctgcgcggcgacaaggagcaactgatccaggcgctcctgaacatcgtgcgcaacgcggccgaagcgttgcgcgaacgtatttcgcaaggcgatgcgcggatcgaattgcgcacccgcgttgcccgcaagattacggtgtcgaaacgcttatgtaagctggcattggacttgcatatcacagacaacggcccgggcattcccgaagaaatccgtgaccgcattttctatccgctcgtgtcggggcgcgaggacggtagcggtctcggactgacgcttgcgcagactttcgtgcaacaacacgacggtctgatcgaagtggatagccgcccgggtcacaccgagtttcagattctgctgccgctcgactgctaa

SEQ ID NO: 1654 - protein, 380 aa, Burkholderia xenovorans LB400
MVLKNLIKARKTHEPTLSDDAQLVSSGLLPGFEALPTVVLVLEKRTLRVAFANPSAESMLELSRRQLTQMAWPHIFSNADELVATISAIAAHRFHATHLDAVLERPGHEPLHVHAIVGFLESAQDYVLLELFENERHLRTDREERINDLTAVNKQLIRNLAHEIKNPLGGIRGAAQLLEFELGERQRDELREYTQVIIKESDRLQTLVDRLLEPHRHPHIVGDVNIHEVCERVRQVILAEFPRGLTIERDYDVSVPDLRGDKEQLIQALLNIVRNAAEALRERISQGDARIELRTRVARKITVSKRLCKLALDLHITDNGPGIPEEIRDRIFYPLVSGREDGSGLGLTLAQTFVQQHDGLIEVDSRPGHTEFQILLPLDC

SEQ ID NO: 1655 - DNA, 1164 bp, Ralstonia metallidurans CH34
  CDS (1)..(1164): transl_table=11
atgcgccgcctgattcgtgaagtgtcccgcaaggtagcaggaacggaccgcaagccggacgccggcgagccggccgatcgtgatgcggacatcctgccgctgggcggcgcggccctgcatccgggcctggatgtagtggccaaccctgtgctgctggtgcgccagccgggcctgcgggtgatttacgcgaatccggcggcggaggccagctttgccgtgtcgcgcaaggccatggtggaactgtccctgccggacctgttcggggcgtcggaagaactcgacagcatgttcgagacggtgatggcccggcaggtggacgtgcgcaggcaggatctggtcctgcggccgccattgcaggaaccgatgcacgcgcacgtggtaatcggtggcgtggaaggctacgcgaacacagcggtggtcgaggtgctgctcaacgagcagaaggtgcgcagtgaccgcgaggagcgcattcttgacctgacctcggcgaacaaggaactgatccgcaatctggctcacgagatcaagaacccgctgggcgggattcgcggcgcggcccagttgctcgaattcgagctgcccgagcgtgcactccgggagtacacgcaggtcatcatcaaggagtcggaccgcctgcaaacgctggtggaccgcctgctggagccgcatcgccatccgcacatcgtctcggacctcaatatccacgaggtgctggagcgtgtgcgctcggtggtgctggccgagtttcccaacgggctggaaatcgtgcgcgactacgatgccagcttgccagaattgcgcggcgatatggagcaactgatccaggccgtgctgaacatcgtccataacgccgcccaggcgctgcacgagcgtgttgcgcgcggcgatgcgcagatcatcctgcggacccgggtggcccggcaggtcacgatcgccaagcggctcttcaagctggcattggatttgcatgtgattgacaacggcccgggaatccccgaggacattcgcgagcgcatcttctatccgttggtttcgggcagggatggcggtagcgggctcggtctcacactcgctcaaaccttcgtgcagcaacacgagggcttgatcgaatgcgagagcaagccgggctgtaccgacttccgtatcctgttgccattgcactaa

SEQ ID NO: 1656 - protein, 387 aa, Ralstonia metallidurans CH34
MRRLIREVSRKVAGTDRKPDAGEPADRDADILPLGGAALHPGLDVVANPVLLVRQPGLRVIYANPAAEASFAVSRKAMVELSLPDLFGASEELDSMFETVMARQVDVRRQDLVLRPPLQEPMHAHVVIGGVEGYANTAVVEVLLNEQKVRSDREERILDLTSANKELIRNLAHEIKNPLGGIRGAAQLLEFELPERALREYTQVIIKESDRLQTLVDRLLEPHRHPHIVSDLNIHEVLERVRSVVLAEFPNGLEIVRDYDASLPELRGDMEQLIQAVLNIVHNAAQALHERVARGDAQIILRTRVARQVTIAKRLFKLALDLHVIDNGPGIPEDIRERIFYPLVSGRDGGSGLGLTLAQTFVQQHEGLIECESKPGCTDFRILLPLH

SEQ ID NO: 1657 - DNA, 1089 bp, Silicibacter sp. TM1040
  CDS (1)..(1089): transl_table=11
atgaatgatgcctcgaatcctcacagcaacgactgcgacatctgggcttcgctgccggtacccgcgtttctggtcgatgagcataattgcattgaagatgtgaactcagctgctgagggctttatcaactcctcgcgcaagtccctgattggtaagaaaatctggcagaaggtcgcgattgagtcctcgatcgaactggcctttgacaaggctcgagagcagggcacgcccctatttgtgaatgatgtcgatgtcggcgcccgcgaacgcgcaccgttgcaatgtgctgtgcagattgcgccgctccacgggcatcctggtcatatgctgctgatgctctcgccgcgagagcttgcggggcggatgacgcagacccactccgccaaatcggccgcgcaatcggcgatcggcatggcagagatgctggcgcatgaaatcaagaaccctttggcggggatcaccggtgccgcgcagcttttgagcatgaacctctccacggatgaccttgaacttacggatctaatcgtgagtgagagccgccggatcgtgaagctgctggagcaggtggagcagtttggaaatctctccgagccggacttcaaaccggtcaatctgcatgatgttctggaccgcgcgcgccgctccgcgctgctgggcttcggcgcacatatgaagattgtcgagaaatacgacccctcgctgccgctggcctggggcgacccggatcagctgttgcaggtggttttgaaccttctcaagaatgcctcagaggccgcaggcagcgcgggtggcaccattacggtacgcaccttttatgaacactccttccgcctgcgtcgcagcgacggacagggcaagctgctgcccttgcagatcgagatcagcgacgatgggccagggctgccggagaagatccgcgacgatatctttgagccttttgtctctggcaaggagaacggaacaggtcttggcctggccttggtcagcaagatcatcggcgaccataacggttggatttccgtgcgctcagagcccggcaacacgaccttcagactgtcgctttcgcgcgttccgcgagagcagaaataa

SEQ ID NO: 1658 - protein, 362 aa, Silicibacter sp. TM1040
MNDASNPHSNDCDIWASLPVPAFLVDEHNCIEDVNSAAEGFINSSRKSLIGKKIWQKVAIESSIELAFDKAREQGTPLFVNDVDVGARERAPLQCAVQIAPLHGHPGHMLLMLSPRELAGRMTQTHSAKSAAQSAIGMAEMLAHEIKNPLAGITGAAQLLSMNLSTDDLELTDLIVSESRRIVKLLEQVEQFGNLSEPDFKPVNLHDVLDRARRSALLGFGAHMKIVEKYDPSLPLAWGDPDQLLQVVLNLLKNASEAAGSAGGTITVRTFYEHSFRLRRSDGQGKLLPLQIEISDDGPGLPEKIRDDIFEPFVSGKENGTGLGLALVSKIIGDHNGWISVRSEPGNTTFRLSLSRVPREQK

SEQ ID NO: 1659 - DNA, 1047 bp, Shewanella sp. MR-4
  CDS (1)..(1047): transl_table=11
atggataaagaaacgctgcttaatcatttagtcaccgcggtacttgtcattgataaggatcttaagccttgttatgccaacgccgcagcagagcagctattgggcgttggcagccacaggctcgtggaacaagccctaccggagcattatcaagccctcggtgtcgaggcgcaaatcctcagcgatgctgtaaaagccggacaaggcctgacggtcaacacagccactttagtgaccttagatgcccagcatcataccgttgatttgacactaatcccgctcgaggatgaggcgcaactgagtctgcttgagcttaggcaagtcgatcaacaacgccggatccaccagcaactcagccaggatgctcagcaacaggcggcacaattccttgttcgcaacttggcccatgagatcaaaaaccccttaggcggtctacgcggcgcggcgcaattgctctcgcgggagttagacgatccggcacaaaaggaatttaccaatctcatcatcgaacaggccgaccgcctgcgcagcttagtggacagactgctcggcccgcagcggccaacccaacatagcctgcacaacattcatcaagtggtgcaaaaggtctataaattggtggaaatggcgcttcccaccaatattcaattaaagcgtgactacgacccatcgatccccgatatcgaaatggatcccgaccaaatgcagcaagccgtgctgaatattttgcagaatgcggtacaagctcttgaacacacaggtggtgaaatcctgatccgcacccgcacgcaacatcaggtcactatcggttcgcagcgacataagctcgtgctgacactgtccattatcgacaacggcccaggcataccaccagagctgatggacacgctgttttatcccatggtcaccagtcgtgagcaggggtctgggcttggcctgtcgattgcccataacattgccagattacactcgggcagaatcgattgtgtatccagccctgggcataccgaatttatcatttcgttaccgattttaagtgccaaataa

SEQ ID NO: 1660 - protein, 348 aa, Shewanella sp. MR-4
MDKETLLNHLVTAVLVIDKDLKPCYANAAAEQLLGVGSHRLVEQALPEHYQALGVEAQILSDAVKAGQGLTVNTATLVTLDAQHHTVDLTLIPLEDEAQLSLLELRQVDQQRRIHQQLSQDAQQQAAQFLVRNLAHEIKNPLGGLRGAAQLLSRELDDPAQKEFTNLIIEQADRLRSLVDRLLGPQRPTQHSLHNIHQVVQKVYKLVEMALPTNIQLKRDYDPSIPDIEMDPDQMQQAVLNILQNAVQALEHTGGEILIRTRTQHQVTIGSQRHKLVLTLSIIDNGPGIPPELMDTLFYPMVTSREQGSGLGLSIAHNIARLHSGRIDCVSSPGHTEFIISLPILSAK

SEQ ID NO: 1661 - DNA, 1053 bp, Alkalilimnicola ehrlichei MLHE-1
  CDS (1)..(1053): transl_table=11
atggaaacgcacacccccccgtacgtggaccttctggagcacatcaccaccgccgtggtgatgatggatacggatacccgggtcctccacctgaatcccgcggcggagatgctgttccgggtgagcctccgccaggtctccggccagccgctgctggcctttgccccgtcggcggaattgctggacaccctggtgcgcgacgtggtggagaccggccggacctatactcagcgtgagcgccgcctgccggtgagccagaaccacctgatcaccgtggattgcactgtcaccccgatgcccaacggccgggtcctgctggaactggccgagatcgaccgccacctgcgcatcacccgcgagcaccatctggtggcccagaaccgggccatccgggagctgatccgcggtctcgcccatgagatcaagaatccgctgggcggcttgcgtggggcggcgcaattgttggagcgggagctggccggagaagagctgcgcgaatacacccaggtgatcatcaacgaggcggaccgcctgcaaaacctggtggacagcctgctcggtcccaatgcggtgccgcggcgggaaccggtgaatatccaccaggtgctggagcgggtgcgccagctggtcgtggctgaggccccggccggcgtgcagctggaacgcgattacgacccgagcatccccccggtgacggcgcagttcgaccatctggtccaggcgtgcctcaacttggtgcgcaatgccctgcaggcggtggccggcgaaggcaccatcaccctacgcacccgtacccagcgtcagttcaccattgccggccgcaaccacaagctggtggcgcggatagacgtggtggacgacgggcccggtatccccgcggaacaattggaacagatcttttaccccatggtgaccacccggccggagggctccgggctgggcctgccgatcgcccagaccctggttggccagcacagcggcctggtcgaatgcagcagcgagcccgggcacacggtgttcaccatctggttacccctggagacgaccccatga

SEQ ID NO: 1662 - protein, 350 aa, Alkalilimnicola ehrlichei MLHE-1
METHTPPYVDLLEHITTAVVMMDTDTRVLHLNPAAEMLFRVSLRQVSGQPLLAFAPSAELLDTLVRDVVETGRTYTQRERRLPVSQNHLITVDCTVTPMPNGRVLLELAEIDRHLRITREHHLVAQNRAIRELIRGLAHEIKNPLGGLRGAAQLLERELAGEELREYTQVIINEADRLQNLVDSLLGPNAVPRREPVNIHQVLERVRQLVVAEAPAGVQLERDYDPSIPPVTAQFDHLVQACLNLVRNALQAVAGEGTITLRTRTQRQFTIAGRNHKLVARIDVVDDGPGIPAEQLEQIFYPMVTTRPEGSGLGLPIAQTLVGQHSGLVECSSEPGHTVFTIWLPLETTP

SEQ ID NO: 1663 - DNA, 1059 bp, Hyphomonas neptunium ATCC 15444
  CDS (1)..(1059): transl_table=11
atgacgactttgactggcgagcggccctccggcctcgcagatctgtcccccatcgcgctgctgcatgttgatcagcgccgccgcatcgcgaatgtgaacccggcggttgaggacatgttcaagctctcgcgccgcgcgctggtcgggcgcccgctgagcgaagtggtgtttcacgactccattctcttcgagctgatcgaccgggccgagcgcgatccggctgagatcaccgcgccctccacaccggtgtccggcccctccatgcaggtccgcaccatctgcgacgttcgcatccgcacagtcgaagggggtaatttcatcctcgccatggcggaggccccgtcgcgggattccggcgaaggcgtcgccggcgcagccgggttcgggcgcatcctcggccatgaagtgaaaaacccgctcgccggcatcatcggcgccgcccagctgctcgagcgccaggcccatgccggtcagagcgagctgctcgacattatcaaggacgaagcccgccgcatcgagcgcctcgtaaaccgcctctcggcgttcgagctgttctccgcgccccgcatgcaggcctgcaacgtccacgcgctgctcgacaaggtgatcgcttcggaacgcgccgcgatgggcgcgcgcgttgagttccgccgggactttgacccctccttgccaaacatgatgggcgatcccgatcaccttcagcaggccttccagaatatcgtccgcaacgccgccgaagctgcctccgaaggcggacgcaaaggcgaggtcgtcctgcgtaccgcctatgccgccggccttgccgtgcgacaggcccggctcgggtccggcctgcgccgcgcgatgctgatttcctttgaagacaacggccagggcatcccgcgcgagcatcaggccacgatctttgacgtgttccagagcaccaaatccggcggccggggcctcggcctctcgatcgtcagcgaagtcgtcaatgcccatggcggccagatccgcgtcgacagccagccgggcgctacccgtttcaccattctgttgccgctttcggaggcgtaa

SEQ ID NO: 1664 - protein, 352 aa, Hyphomonas neptunium ATCC 15444
MTTLTGERPSGLADLSPIALLHVDQRRRIANVNPAVEDMFKLSRRALVGRPLSEVVFHDSILFELIDRAERDPAEITAPSTPVSGPSMQVRTICDVRIRTVEGGNFILAMAEAPSRDSGEGVAGAAGFGRILGHEVKNPLAGIIGAAQLLERQAHAGQSELLDIIKDEARRIERLVNRLSAFELFSAPRMQACNVHALLDKVIASERAAMGARVEFRRDFDPSLPNMMGDPDHLQQAFQNIVRNAAEAASEGGRKGEVVLRTAYAAGLAVRQARLGSGLRRAMLISFEDNGQGIPREHQATIFDVFQSTKSGGRGLGLSIVSEVVNAHGGQIRVDSQPGATRFTILLPLSEA

SEQ ID NO: 1665 - DNA, 1155 bp, Rhizobium leguminosarum bv. viciae 3841
  CDS (1)..(1155): transl_table=11
atgacgaaggatatgacatctccgtccgatcacgccggcgggactgtcgccatggccgtgctgaacgccatccagaaccccgtcgtcatggtcgacgaatccggcttcgtcgttttcgccaattgggaggcggaggcctttttcggcgccagcgcctcgcatctggcgcgttaccgcatctcgaccttcattcctttcggcagcccgctgctcgccctgatcgaccaggtgcgcgagcgcaaggcgccggtcaacgaatatcgcgtcgacctgagttcgccccgcctcggccaggataagctcgtcgatctctacgtcgcccctgtgctcagcgagcccggcgccgtcgtcatcgtcttccaggaacgctcgatggccgacaagatcgaccggcagctgacgcatcgcgccgccgcccgctcggtgaccggccttgcctcgatgctggcgcatgagatcaagaacccgctctccggcatccggggtgctgcccagctgctcgaacagtctgcggtcgacgacgatcgggcgctgacccggctgatctgtgacgagaccgatcgcatcgtctcgctagtcgaccgcatggaagtcttttccgacgaacgccctgtcgaccgcatgccggtcaacatccattccgtgctcgatcatgtgaaggcggtcgccaaggcgggttttgcccgcaacatccgggtcaccgagagttacgatccgtcgctgccggccgtctatgccaatcgcgaccagctcgtccaggtcttcctcaatctggtgaagaacgccgccgaagcggtcggcgatcggccggacggcgaaatcatgctgacgacggcctatcgccccggcatccgtctttcggtcgccggcacgcgcgaaaagatctcgctgccgctggagttctgcgtccacgataacggccccggcgtccccctcgatctgttgccgcatctcttcgatcctttcatcaccaccaagccgaacggcagcggcctcggactggcgctggtcgccaagatcatcggcgatcacggcggcatcatcgaatgcgacagccagaacagccgcacgacattccgcgttctcatgccggcgtcgaaggacgcctcgcttgaagacgcctctatagcaagctcgacaggaccttctcgatga

SEQ ID NO: 1666 - protein, 384 aa, Rhizobium leguminosarum bv. viciae 3841
MTKDMTSPSDHAGGTVAMAVLNAIQNPVVMVDESGFVVFANWEAEAFFGASASHLARYRISTFIPFGSPLLALIDQVRERKAPVNEYRVDLSSPRLGQDKLVDLYVAPVLSEPGAVVIVFQERSMADKIDRQLTHRAAARSVTGLASMLAHEIKNPLSGIRGAAQLLEQSAVDDDRALTRLICDETDRIVSLVDRMEVFSDERPVDRMPVNIHSVLDHVKAVAKAGFARNIRVTESYDPSLPAVYANRDQLVQVFLNLVKNAAEAVGDRPDGEIMLTTAYRPGIRLSVAGTREKISLPLEFCVHDNGPGVPLDLLPHLFDPFITTKPNGSGLGLALVAKIIGDHGGIIECDSQNSRTTFRVLMPASKDASLEDASIASSTGPSR

SEQ ID NO: 1667 - DNA, 1068 bp, Magnetococcus sp. MC-1
  CDS (1)..(1068): transl_table=11
atggataaggctgttcgatttaacgctgcccaactgctggatcaaacctccatcggcatcattgccctggattgtgacaatgtgattcagcgggtcaacaccgcagctgagaagattttagaccgtccacgtcaacaccttctgcacacgccgttagagaaggtgctgcccggtcaccctgtggcgctggaccttatcagccgcgccagtaatttgttgatgccctgccgctttcgcgtggctcaactttcaccatcccccgatattaatctgctggtctccctgaccgcgaccccttacatgcgtgaggatggacagctacagggcaccattttagagatggaggaggtcggctcggcagaacagttggaagagggccgccgcctgaatgaaaccctggattctcttggctcgctggctttggcggtggcccatgaggtcaaaaatccgctggctggcatccggggtgccgcgcagctattagaaatggagagtaccagcgaaaccggggcaatctgtaccgagctgatccgctccgaggtggaccgcatcagtcggctgttggatagtttgctggggttggccgaagaccacccgatcaaccaaaaaaacatcaatattcatgaggttctggatcatgtggtacgcctctgttccagctctggggcccatttggtacgggattatgatccctctctgccggagatctcaggggatcgggataagttgatacagctctttcttaaccttatctccaatgccacggaggccaccggtaaagagggtgaagtgcgtatctccagccgcatttctaagcagattcggcttacccaggggcgtcgacaacagcatattgtggtggagattcgggacaatggtccaggtattccccatgagctacgcaagcggatttttctaccctttgttaccaccaaatccaacggcacggggttgggtttggcgatttcacaaaagattgtacacgaccacgatgggcagatggccctagagagtcgaccaggggagaccgcgtttcgggtttttctgcccctgaaaaccatacgctaa

SEQ ID NO: 1668 - protein, 355 aa, Magnetococcus sp. MC-1
MDKAVRFNAAQLLDQTSIGIIALDCDNVIQRVNTAAEKILDRPRQHLLHTPLEKVLPGHPVALDLISRASNLLMPCRFRVAQLSPSPDINLLVSLTATPYMREDGQLQGTILEMEEVGSAEQLEEGRRLNETLDSLGSLALAVAHEVKNPLAGIRGAAQLLEMESTSETGAICTELIRSEVDRISRLLDSLLGLAEDHPINQKNINIHEVLDHVVRLCSSSGAHLVRDYDPSLPEISGDRDKLIQLFLNLISNATEATGKEGEVRISSRISKQIRLTQGRRQQHIVVEIRDNGPGIPHELRKRIFLPFVTTKSNGTGLGLAISQKIVHDHDGQMALESRPGETAFRVFLPLKTIR

SEQ ID NO: 1669 - DNA, 1047 bp, Shewanella sp. ANA-3
  CDS (1)..(1047): transl_table=11
atggataaagagactctgcttaatcatttagtcaccgcggtacttgtcatcgataaggatcttaagccttgttatgccaacgccgcagcagagcaactgttaggtgtcggtagccataggttagtcgagcaagccctgccggagcattatcaagcacttggtgttgaagcgcagatcctgagcgatgcggtgaaagccggccaaggccttacggtcaacaccgccaccttagtgaccttagatgcacaacatcataccgtcgatctgacgctgatcccgctcgaagatgaagcacaactgagcctacttgaactgagacaggtcgaccaacaacgccggatccaccagcaactcagccaagatgcccagcaacaggcggcgcaatttctcgtgcgaaatttagcccacgagatcaaaaatcccctaggcggcctgcgtggtgctgcgcaattgctctcgcgggaattagacgatccggcacaaaaggaatttaccaatctgatcattgagcaggccgaccgcctgcgcagcctagtggacagattgctcggcccgcagcgaccgacccaacatagcctgcacaacattcatcaagtggtgcagaaggtctataaactggtggaaatggctctgcccgccaatattcagctaaagcgcgactacgatccctcaatccccgatatcgagatggatcccgaccaaatgcaacaagccgtgctgaatattttgcagaatgcggtgcaagcccttgagcatacaggtggcgaaatcctgatccgcacccgcacgcaacatcaggtcactatcggttcgcagcgtcacaagctagtgctgaccctgtccattatcgacaatggtccgggcataccaccagagctgatggacacactgttttaccccatggtcaccagtcgtgagcaaggttcggggctaggcctatcgattgcccataacattgccagattacactcgggcagaatcgattgtgtatccagccctgggcataccgaatttatcatttcgttaccgattttaagcgccaaataa

SEQ ID NO: 1670 - protein, 348 aa, Shewanella sp. ANA-3
MDKETLLNHLVTAVLVIDKDLKPCYANAAAEQLLGVGSHRLVEQALPEHYQALGVEAQILSDAVKAGQGLTVNTATLVTLDAQHHTVDLTLIPLEDEAQLSLLELRQVDQQRRIHQQLSQDAQQQAAQFLVRNLAHEIKNPLGGLRGAAQLLSRELDDPAQKEFTNLIIEQADRLRSLVDRLLGPQRPTQHSLHNIHQVVQKVYKLVEMALPANIQLKRDYDPSIPDIEMDPDQMQQAVLNILQNAVQALEHTGGEILIRTRTQHQVTIGSQRHKLVLTLSIIDNGPGIPPELMDTLFYPMVTSREQGSGLGLSIAHNIARLHSGRIDCVSSPGHTEFIISLPILSAK

SEQ ID NO: 1671 - DNA, 1074 bp, Azoarcus sp. BH72
  CDS (1)..(1074): transl_table=11
atggctcgatcctcctcctcccagccgatcgcggcagagagtttcaatggcctcgacctgctgtcttccgcggtcgtgatgatcgatgaaagacgcgtcatccgttacatcaatccgggcgcagaaaacctgttcgcgatcagccagcgcaagctgctcggcgcaccgctcgcgcgcctgctcggcgaacccgccgggctcggcaccgcgctcgacaacgtgctccgcaccaactggagctacaccgggcaggacctgaccatcgcgcgccccgcgtcggaagccatccatgtcgattgcacggtcagcccggtcgacatcgcgggcgtcaagctgctgctcgagttccgcccgatcgacgcccagttgcgcgtcgcccgcgaggagcaactgctgcagcagcagcaggccaaccgcgagctgatccgcaacctcgcgcacgagatcaagaatccgctcggcggcatccgcggctcggcacagctgctggagcgcgaactcgccgatccgcaactgcgcgaatacaccgaggtcatcatcgctgaagccgaccggctgcaggacctgatgaaccggctgctgacctcgcactcgatgatgcggcccgcgcagctcaacatccatgatgtcctggagcgcgtgcgccgcctgatcctcgccgagttcccggacgtggtgatccggcgcgactacgacaccagcctgcccgaactcaccgccgaccgcgaacaactgatccaggccatcctcaacatcgcgcgcaacgcggcgcaggccctgggcggaaagggcgagatccggctgcgcacccgggtcgcacgccaggtcacgctcgccaagcgccgctacaagctggcactggaattgcaagtgatcgacaacggccccggtattccggatgagattcgcgacaagatcttctacccgcttgtttcgggccgcgacggtggtagcggactgggcttgtcactggcccagagcttcgtggagcagcaccagggcatgatcgacgtcgatagccgcccgggacgaacctgcttttgcatcctgctgccgattaccgatcggacctga

SEQ ID NO: 1672 - protein, 357 aa, Azoarcus sp. BH72
MARSSSSQPIAAESFNGLDLLSSAVVMIDERRVIRYINPGAENLFAISQRKLLGAPLARLLGEPAGLGTALDNVLRTNWSYTGQDLTIARPASEAIHVDCTVSPVDIAGVKLLLEFRPIDAQLRVAREEQLLQQQQANRELIRNLAHEIKNPLGGIRGSAQLLERELADPQLREYTEVIIAEADRLQDLMNRLLTSHSMMRPAQLNIHDVLERVRRLILAEFPDVVIRRDYDTSLPELTADREQLIQAILNIARNAAQALGGKGEIRLRTRVARQVTLAKRRYKLALELQVIDNGPGIPDEIRDKIFYPLVSGRDGGSGLGLSLAQSFVEQHQGMIDVDSRPGRTCFCILLPITDRT

SEQ ID NO: 1673 - DNA, 1089 bp, Acidovorax sp. JS42
  CDS (1)..(1089): transl_table=11
gtgcggcacaaaggcgcgatcatccaagagcccaccccaacggaccgctaccaggcgctggacctcgtctccacgctgattgccgtgctgcaccccggcggggcggccctcttcgtcaacgctgcgctggaaaacgccctgggcctgtcgcgccgcacgctggaaggcgtggacttcgcaggcctgttcaccgatccgaccatcctgcagacggcgttggccggcgcgcgcgggcgcgacttcgcggcgctgcgcttcgaagccgtgctgcgccgctcgccgcaggagcctttgccggtgcacgccagcgtggcggtggtggagcacagcggcgacgtgatcgtagagctgtggcccctggaggcgcaggcgcgccaggaccgcgaggagcggctgcgcgagcaggcgcaggccaacaaggagctgatccgcaatctggcgcacgagatcaagaacccgctgggcggcatccgaggggcggcgcagctgctggagatggagctggaaagccgcgacctgaccgagtacacccaggtcatcatccacgaggccgaccgcctgcaaagcctggtggatcggctgctggcgccgcaccgccacccgcacctcgtcggcgatgtgaatatccacgaggtctgcgagcgcgtgcgctccctggtactggttgagcatccgcagggcctggccgtgctgcgcgactatgacacctccatccctgagtttcgcggcgaccgcgcgcagctcatccaggccgtgctgaacatcgtgcagaacgcggcgcaggcgttgcacgagcgcattgccgcgggcgacgcggtcatcacgctgcgcacgcgcgtggcgcggcaggtcacgttcgggcgccaacgctaccggctggcattggaattgcatgtcatcgacaacggaccgggcgtgcccgaagccatcaaggagcggatcttctatccgctggtgacggggcgggacgggggatcgggactgggcttgacgctggcgcaaacctttgtgcagcgacaccatgggctcattgagtgcgagagccagccgggccgcaccgacttccgcatcctcataccactgccttga

SEQ ID NO: 1674 - protein, 362 aa, Acidovorax sp. JS42
MRHKGAIIQEPTPTDRYQALDLVSTLIAVLHPGGAALFVNAALENALGLSRRTLEGVDFAGLFTDPTILQTALAGARGRDFAALRFEAVLRRSPQEPLPVHASVAVVEHSGDVIVELWPLEAQARQDREERLREQAQANKELIRNLAHEIKNPLGGIRGAAQLLEMELESRDLTEYTQVIIHEADRLQSLVDRLLAPHRHPHLVGDVNIHEVCERVRSLVLVEHPQGLAVLRDYDTSIPEFRGDRAQLIQAVLNIVQNAAQALHERIAAGDAVITLRTRVARQVTFGRQRYRLALELHVIDNGPGVPEAIKERIFYPLVTGRDGGSGLGLTLAQTFVQRHHGLIECESQPGRTDFRILIPLP

SEQ ID NO: 1675 - DNA, 1122 bp, Magnetospirillum magnetotacticum MS-1
  CDS (1)..(1122): transl_table=11
atgcccattcccatcgtctcggccttgaagcgcggattgtccggctccaccttcgatccgacctcggtcctgagcgcgctcggttccgccgtggtggccgtggacaggcagaacgtcatccgttacgccaatggtgcggcagagcagttgttcgcctgtggcgccgcctatatggtcggccagtccgtcacggattttctgccgcccgattcaccgctgctggcgctggtcactcaggctcgcgacggcaatttctcggtcgccgaatacggcgtcaccctcgacacgccacgcaccggtcaccgcaccgtcacggtgcagatcgctcccatcatcgagatgcccggcgcggtggtgatcagccttcacgagcagtccatcgctctgaagatcggctcgcagctgaccagtcgcaatgcggcgcggtcggtgagcgccatggccgccatcttagcccacgaggtcaagaatcccctgtccggcatccggggcgccgcccaattgcttgagcagaatgccggagaggacgaccgggttctgacccggctgatctgtgacgaggcggaccgcatcgtggccctggtcgaccgcatggaggccttctcggacaatcccaccgtggagcgcagcgccgtcaacatccatcgggtgctggaacatgtgcgccgcatctccgaggccggattcgcccgctcggtgcggatcatcgagaattacgatccttcgctgccgccggtcttgggagatcgcgaccaactggtccaggtcttcctcaatctggtgaagaacgccgccgaggcggtgccggaggagggcggcgagatcatcctgtccaccgggtatcagcacggcgtccgtctggccctgccgggcagcgagacgcgccgccacctgcctttggtggtgagcatccaagataacggccccggaatccccgaggatctgaagcccaacctgttcgacgccttcgtcaccaccaagacatcgggcagcgggttgggcttggccctggtggccaagatcatcggcgatcatggcggcgtgattgaattcgacagcgtaccgaggcggaccattttccgggtgatgctgcccatggtccaggatggggacggcaagtga

SEQ ID NO: 1676 - protein, 373 aa, Magnetospirillum magnetotacticum MS-1
MPIPIVSALKRGLSGSTFDPTSVLSALGSAVVAVDRQNVIRYANGAAEQLFACGAAYMVGQSVTDFLPPDSPLLALVTQARDGNFSVAEYGVTLDTPRTGHRTVTVQIAPIIEMPGAVVISLHEQSIALKIGSQLTSRNAARSVSAMAAILAHEVKNPLSGIRGAAQLLEQNAGEDDRVLTRLICDEADRIVALVDRMEAFSDNPTVERSAVNIHRVLEHVRRISEAGFARSVRIIENYDPSLPPVLGDRDQLVQVFLNLVKNAAEAVPEEGGEIILSTGYQHGVRLALPGSETRRHLPLVVSIQDNGPGIPEDLKPNLFDAFVTTKTSGSGLGLALVAKIIGDHGGVIEFDSVPRRTIFRVMLPMVQDGDGK

SEQ ID NO: 1677 - DNA, 1092 bp, Sulfitobacter sp. EE-36
  CDS (1)..(1092): transl_table=11
atgtcgctggatactgttttcgcatcgctgcccgtgcccgccattctgatcgataccgacgacacgattgccgagctgaactcggaagccgaagggtttctgaacgcctccgcaaagtcagtgcgcggtgtgccggtgtgggacatgatcgccgtcgatgccccgctggaagaggcgttcacccgcgcccgcgacaatggcacgcccttgttcgtcaacgatgtggatgtcggcagcgggcagcgcccgccggtgcaatgcgcgttgcacttcgcgccgctgatcgatgcggcggggcagatgatcctgatgatcaccccccgcgagatggccggtcggatgacgcagaataattcggtcaaatccgccgccaaatccgccatcggcatggccgagatgctggcccatgagatcaagaacccgctggcagggatcaccggtgccgcgcaactgctcagcatgaacctcagcaccgaggatctggagctgacagacctgatcgtcgcggaatcgcgccggatcgtgaagctgctggaacaggtcgaacaattcggcaacctgatgccgccggaacgcaaggcggtgaacctgcatgacgcgctggaccgcgcgcgccggtctgcgctgctggggttcggcgcgcgcatgaagatcatcgaggattacgacccctcgctgccgccggccttgggcgacaaggatcagttgttgcaggtggtgctgaacctgatcaagaacgcgtcagaggcggcgggcccctcgggcggcacgatccggttgcacagctattatgaacattcattccgcatgcgccgatccgacggcacggcgcaatcgttgcccttgcagatcgaagtcatcgacgacggccccggtctaccagaggcgatccgcgctgacgtgttcgaacccttcgtatccgggcgcgagaacggcaccgggctggggctggcgctggtgagcaagatcatttccgaccacggcggctggatcacggtggagtctgtgcccggcaaaaccgtgttccgcatctcactgccgcgggccgataagacccaaattgaaaataccgcttccgatcaggagaattaa

SEQ ID NO: 1678 - protein, 363 aa, Sulfitobacter sp. EE-36
MSLDTVFASLPVPAILIDTDDTIAELNSEAEGFLNASAKSVRGVPVWDMIAVDAPLEEAFTRARDNGTPLFVNDVDVGSGQRPPVQCALHFAPLIDAAGQMILMITPREMAGRMTQNNSVKSAAKSAIGMAEMLAHEIKNPLAGITGAAQLLSMNLSTEDLELTDLIVAESRRIVKLLEQVEQFGNLMPPERKAVNLHDALDRARRSALLGFGARMKIIEDYDPSLPPALGDKDQLLQVVLNLIKNASEAAGPSGGTIRLHSYYEHSFRMRRSDGTAQSLPLQIEVIDDGPGLPEAIRADVFEPFVSGRENGTGLGLALVSKIISDHGGWITVESVPGKTVFRISLPRADKTQIENTASDQEN

SEQ ID NO: 1679 - DNA, 1083 bp, Roseovarius nubinhibens ISM
  CDS (1)..(1083): transl_table=11
atgagcgggattggcgacaccatctgggcggcgctgccggtgccggggatcttggtcgatggcgacgatctggtgagcgatctcaacaccgccgccgaagggtttctcaacctgtcgtcgcgcagcgtgcgggggcggcccttgtgggatgtgctgcggctggccgagccgccgcttgccgccgtggcgcgggcgcgggaacaggtgacgccgctctatatcaatgatgcgacgatcgagaccgggccgcgcagccgggtgcaggccgggcttcagatcgcgccactctccgggcaggacggggcgatggtggtgcttgttgcgccgcgcgatgcggcggggcggccggggccgggcggggcgatctcggcgaaatcgtcgaaatcggcgatcggcatggcagagatgctcgcccatgagatcaagaacccgctggccgggatcaccggggcggcgcagctcttgtcgatgacgctcagtgaggaggatcaggagctgaccgatctgatcgtggccgagagccggcggatcgtcgggcttttggagcaggtcgagcagtttggcgatgtgcgcccgccagagcggagtgcggtcaacctgcatgatattctcgaccgggcgcggcggtcggcgcagctcagcgtggcggggcatatgaaggtgatcgagattttcgacccctcgctgccaccggcgcatggcgatgccgatcagctgttgcaggtgttgctcaacctcatccggaacgcggcgcaggcggcgggaccggcagggggcacgatcaccctgcgcacctattatgaacatggtctgcgattgcaggggccggatggcgagggccagaaagtgccgctgcagatcgagatcgaggatgacgggccggggctgccagcggatatcgccgatgaggtgttcgatccgtttgtctcgggccgggaaaatggcaccgggttggggctggcgctggccgccaagatcatcgcggcgcatggcggctggatcggcgtgacgtcggaaccgggttgcactgtcttcaggctgtcgctgccgatggcgcccagagaacttcaggaggataactga

SEQ ID NO: 1680 - protein, 360 aa, Roseovarius nubinhibens ISM
MSGIGDTIWAALPVPGILVDGDDLVSDLNTAAEGFLNLSSRSVRGRPLWDVLRLAEPPLAAVARAREQVTPLYINDATIETGPRSRVQAGLQIAPLSGQDGAMVVLVAPRDAAGRPGPGGAISAKSSKSAIGMAEMLAHEIKNPLAGITGAAQLLSMTLSEEDQELTDLIVAESRRIVGLLEQVEQFGDVRPPERSAVNLHDILDRARRSAQLSVAGHMKVIEIFDPSLPPAHGDADQLLQVLLNLIRNAAQAAGPAGGTITLRTYYEHGLRLQGPDGEGQKVPLQIEIEDDGPGLPADIADEVFDPFVSGRENGTGLGLALAAKIIAAHGGWIGVTSEPGCTVFRLSLPMAPRELQEDN

SEQ ID NO: 1681 - DNA, 1092 bp, Oceanicola batsensis HTCC2597
  CDS (1)..(1092): transl_table=11
atgatcgaggacgatacggtctggaactccctcccggtgccggcgttgctgctggatcccgaggattgcatcgtcgccatcaacccttcggccgagggctttctgaacacctcgtccaagacgatccgcggctcccgcgtctgggaaaaggtgatgatcgacagtccgctcgaggcggccttcgagcgcgcccgcgccaccgcctcgccgctcttcgtgaacgacgtcgacgtgggcacgggcgaacgggcgccgctgcattgcaacctccagatcgcgccgatggcggatcagccggggcacatgcttttcctgatctcgccgcgcgaacttgccgggcggctgactcaggaccacacggtcaagtctgccgccaagtccgcgatcggcatggccgagatgctggcgcacgagatcaagaacccgctggcgggcatcaccggcgccgcgcagcttctgtcgatgaacctcaaggcgccggatcgcgagctgaccgacctgatcgtcgccgaaagccgccgcatcgtgaagctgctggaacaggtcgagcagttcggcaacctcacattgcccgatctgcgccccgtcaacgtgcatgacgtgctcgaccgcgcccggcgatccgccctgctgggcttcggtgcgcagatgaagatcgtcgaggattacgacccctcgctgccgatggcggtcggagacccggaccaactgctccaggtcgtgctgaaccttctcaagaacgccgcggaagctgctgataaagaaggcggaacgatccgtctgcgaacctatttcgaacattcgttccgcctccggcgctcggacggggagggcaagaccctgcccctgcagatcgagatcatcgacgacgggccgggcctgccccccgatatcgccgaggacatcttcgatcctttcgtctcgggcaaggagaacggcacgggcctgggcctcgcgctggtgagcaagatcatctcggatcacgagggctggatctcggtcacgtcggtgccgggccgcacggtctttcgcctgtcgctgccgatggacagggcccgcaaccggaaaaagaagcccagcaaggagagctga

SEQ ID NO: 1682 - protein, 363 aa, Oceanicola batsensis HTCC2597
MIEDDTVWNSLPVPALLLDPEDCIVAINPSAEGFLNTSSKTIRGSRVWEKVMIDSPLEAAFERARATASPLFVNDVDVGTGERAPLHCNLQIAPMADQPGHMLFLISPRELAGRLTQDHTVKSAAKSAIGMAEMLAHEIKNPLAGITGAAQLLSMNLKAPDRELTDLIVAESRRIVKLLEQVEQFGNLTLPDLRPVNVHDVLDRARRSALLGFGAQMKIVEDYDPSLPMAVGDPDQLLQVVLNLLKNAAEAADKEGGTIRLRTYFEHSFRLRRSDGEGKTLPLQIEIIDDGPGLPPDIAEDIFDPFVSGKENGTGLGLALVSKIISDHEGWISVTSVPGRTVFRLSLPMDRARNRKKKPSKES

SEQ ID NO: 1683 - DNA, 1026 bp, Erythrobacter sp. NAP1
  CDS (1)..(1026): transl_table=11
ttgtttgcgctcgtgctgatcgatccgacttcggcgattgccgaggtcaatcatgcagccgagaacttgcttggccgaagcgccaagcgtctagttggcaagccattgcttgaggccattgggccgcttgatccaagggtcgaaaatcgcctgacaaacaccgacgaggcgcttgttgctcgcgatatcctgatcaatgcgagtgaggccgaaaagcgggttaatttgaccgtcagtccgcttggaggctttcagggctggagagtggtgacattctccgaaattggccacgaagagacgggaagcgacgacgatcttggttcatcgctcggtgcgccttctatcttggcccacgagatcaagaaccctctcgcggcgatccggggtgccgggcagctggcggctcgcaagcttccgctgaaggacaagaagctggcccgcatgatcacggatgaggtcgaccggattgcgagactcatcgaccggatgcagcagcttggctcgcgcacggcagaggtggcagaagcctgcaacccgcacgaggcgatccgttcggcgattgccacggttcgcgcagcaggcggcgcgaagccggtggaaatcaaggaagagttcgatccctcaattccaccggcatacgccaatcgcgacgctttggagcaggtactgatcaacctcatatcgaatgcgcgcgatgccgcctgctctggtgcacgcggcgagatcacagtgagaacccggttcgtatccggccttgcctttagcgcgatccgcttgggacgagcggtgcgcctgccggttgagatcaccgtttccgacaacgggcccggcattgatccagccatgcgcgaccatgtgttcgagccattcgtgtcgtcaaaacaatccggccaggggctggggctggctctcgtgcgaaaacttgttcgcgacatgaacggatcgatctcgcatgagcgtgacgcgaagcgcggccttacgcatttccggcttcatctgcccttggccaagacaccccaggaatag

SEQ ID NO: 1684 - protein, 341 aa, Erythrobacter sp. NAP1
MFALVLIDPTSAIAEVNHAAENLLGRSAKRLVGKPLLEAIGPLDPRVENRLTNTDEALVARDILINASEAEKRVNLTVSPLGGFQGWRVVTFSEIGHEETGSDDDLGSSLGAPSILAHEIKNPLAAIRGAGQLAARKLPLKDKKLARMITDEVDRIARLIDRMQQLGSRTAEVAEACNPHEAIRSAIATVRAAGGAKPVEIKEEFDPSIPPAYANRDALEQVLINLISNARDAACSGARGEITVRTRFVSGLAFSAIRLGRAVRLPVEITVSDNGPGIDPAMRDHVFEPFVSSKQSGQGLGLALVRKLVRDMNGSISHERDAKRGLTHFRLHLPLAKTPQE

SEQ ID NO: 1685 - DNA, 1077 bp, Pseudoalteromonas tunicata D2
  CDS (1)..(1077): transl_table=11
atgcgcaacaataaaacactcactaaacaagcattacaaattttaagtgaaaacttagctaccgcagttattttacttaaccaagatttacaggttgtttatgctaatgatagcgccagtgaactctttgctttagggcctaagcgcttcattgatcagcagtttgaatccctttttaattaccataccatagatgtaaaacgcattatcagccatacattaatagaaggtagcgattgccatcaacatagagctgacgcggttttcctcgattctcgccatgcaaaaatcaccttaaattctcgccgtctcatgctcgaaaatcagcctttcattctattagaatgccgcgcactcgatgatgaaataaaacacgataaagcctctcatcaaatgcatcaatacatggctgctcgcacgctaattcgtggcttagctcacgaaataaaaaatcctctagggggcattcgcggagcggcgcaattattgcaatacgaagtcgatcaacaagaacgtgatgaatgcgcaactttgattattgaacaagccgataggttaactgaacttgttgaccgtttgcttggcccgaatcaattgcctaaaaaagcgtggtgcaatattcaccaaaccttggagtcagtggttaaactcaccacattaagtaatcaaagcaatataacgttgctaaaagattacgacccgagtattcccgacatttttatcgatcagggaaaaattcaacaagtcgtactcaatattgtacgtaatgcgcagcaagctttagttgatggcggacaaatcaccttgcaaacgcgtattcgccatcatatgcgagttcataacaaagcaatgaaaaacgccttgttgattaaagtgtcggataatggcccaggcattgataaagccctgcgtgatacgctgttttatcctatggtcactaataaagagggcggttcagggcttggacttgccatagcgcaaaccttaattgaccaacatgatgggtatattgagtgtgaaagctggccgggtcacaccgaatttaatatttatttgccatttgcgagcaccaaatag

SEQ ID NO: 1686 - protein, 358 aa, Pseudoalteromonas tunicata D2
MRNNKTLTKQALQILSENLATAVILLNQDLQVVYANDSASELFALGPKRFIDQQFESLFNYHTIDVKRIISHTLIEGSDCHQHRADAVFLDSRHAKITLNSRRLMLENQPFILLECRALDDEIKHDKASHQMHQYMAARTLIRGLAHEIKNPLGGIRGAAQLLQYEVDQQERDECATLIIEQADRLTELVDRLLGPNQLPKKAWCNIHQTLESVVKLTTLSNQSNITLLKDYDPSIPDIFIDQGKIQQVVLNIVRNAQQALVDGGQITLQTRIRHHMRVHNKAMKNALLIKVSDNGPGIDKALRDTLFYPMVTNKEGGSGLGLAIAQTLIDQHDGYIECESWPGHTEFNIYLPFASTK

SEQ ID NO: 1687 - DNA, 1053 bp, Photobacterium sp. SKA34
  CDS (1)..(1053): transl_table=11
gtgactaccgcttttacccctataattattgataaccttgttactgcgatcattttactggatgagcacttaacgattcgttatgtcaatcccgccgcagaacaactgttatcgtcgagtaagcgtcgtttgctgggcattacgttaccagagctattacagtattcctctcttgatctcgatttaatcgcagccacactgtacagtggtcaaggcctagctgatagtgatctcgcttttgtgattgatgaacagcgtcaccttcttgccttaaatgccagccctatttcatggcaaaaagagcttttcgtgatgctggagcttaaacctatcgatcagcaacgccgtattagccaagagctttcccaattagctcagcagcaagctgcaaaagaattagtgcgagggttagctcatgagataaaaaatccactaggtggcttacgaggtgctgcacaactacttgaaaaagcgctacccgatcctagttatgtcgaatatacccaaatgattattgagcaagccgaccgattacgtaatttggtcgatagattattaggtccacaacgcccaggcatcagaaaaaccgataatattcatctcatattagaaaaagtacgtcagctgatcatactggaaaacgacagtaatcttgtaattgagcgcgactacgatccaagtctgcctgagattgatatggataccgaacaactcgagcaagccttactcaatattgtcagtaacgccgctcatgttctaaaaaaacaacaaaatggcgggataattaaactaaaaacccgtacagcccaccaagccttgatccaaggcaaatacacccgtatcgccgcgaaaattgaaattatcgataatggcccagggatcccagcagagatccaagacaccttgttctatccaatggtaaccggtaatgctgatggcacaggattagggctatcgatctcgcaaaacttaatagaccaacataacggcaaaattgaagtgattagctggccaggacacaccaactttacgatctatttaccaatacaataa

SEQ ID NO: 1688 - protein, 350 aa, Photobacterium sp. SKA34
MTTAFTPIIIDNLVTAIILLDEHLTIRYVNPAAEQLLSSSKRRLLGITLPELLQYSSLDLDLIAATLYSGQGLADSDLAFVIDEQRHLLALNASPISWQKELFVMLELKPIDQQRRISQELSQLAQQQAAKELVRGLAHEIKNPLGGLRGAAQLLEKALPDPSYVEYTQMIIEQADRLRNLVDRLLGPQRPGIRKTDNIHLILEKVRQLIILENDSNLVIERDYDPSLPEIDMDTEQLEQALLNIVSNAAHVLKKQQNGGIIKLKTRTAHQALIQGKYTRIAAKIEIIDNGPGIPAEIQDTLFYPMVTGNADGTGLGLSISQNLIDQHNGKIEVISWPGHTNFTIYLPIQ

SEQ ID NO: 1689 - DNA, 1083 bp, Neptuniibacter caesariensis
  CDS (1)..(1083): transl_table=11
atgccaataaaagactttcataaacagattcttgagaatctatctacagcagtcgtgctactggatagtagcttaactgtcgagtatgcaaaccccgcagcagaaatgttgctgcaggcaagtctgcgtcgcctttctcaagtgtcggtatcagagtggttttcacccgaacagaatggaattgatgacctgcaatcctgttttgaaaccggccatccctacacacgtcgagaagcacgcttggtgactcaggcgggtagtgcgttaacggtcgattactcgattaatcctgttttttggtcaacaggaaggcagctgcttattgagatcgaagcgcgtgatcgtttgatgcggattgagcgtgaggaagatcttctgactcagcatgatacagcgcggtctttggttagggggatggcgcatgaaattaagaatccgttaggtggtattcgtggcgcagcgcaattgctggagcgagagctacctgatcttgctttgcatgattatacccgtgtgattattgaggaagcggaccgtctccgaaatttagttgatcgtctgctgggccctcgaacactaccgaagctggaggatgtaaatatccatgccattctggaaagggtttgtcagcttattgaagctgaaaccaaaggttcagtggtattagaaagggattatgatccgagtattccagaatttaccggtgatgcggagcagttgattcaggccgtgctgaatattcttcgcaacagtatgcaggcaatgcagagtgcaggtactgctgagccaacgataaaaattaaaacccgcgcctttcgtcagataacgcttggtgctgagaaacatcgcttggtttgtagtgtagagatcgtcgataacggaccggggattcctgatgaaattcttagcaaaattttctatccgatggtcagcggccgcgctgaagggacggggcttggcttgtccattgcgcagtcgattattaatcagcatcaggggttaattgaatgcgatacccgaccaggggaaaccaaatttcaactattcatacctttggagataagtcatgaatctgtcaggtaa

SEQ ID NO: 1690 - protein, 360 aa, Neptuniibacter caesariensis
MPIKDFHKQILENLSTAVVLLDSSLTVEYANPAAEMLLQASLRRLSQVSVSEWFSPEQNGIDDLQSCFETGHPYTRREARLVTQAGSALTVDYSINPVFWSTGRQLLIEIEARDRLMRIEREEDLLTQHDTARSLVRGMAHEIKNPLGGIRGAAQLLERELPDLALHDYTRVIIEEADRLRNLVDRLLGPRTLPKLEDVNIHAILERVCQLIEAETKGSVVLERDYDPSIPEFTGDAEQLIQAVLNILRNSMQAMQSAGTAEPTIKIKTRAFRQITLGAEKHRLVCSVEIVDNGPGIPDEILSKIFYPMVSGRAEGTGLGLSIAQSIINQHQGLIECDTRPGETKFQLFIPLEISHESVR

SEQ ID NO: 1691 - DNA, 1098 bp, Oceanobacter sp. RED65
  CDS (1)..(1098): transl_table=11
atggccgattttgtattttataagcaactcattaatcacttagacagcgctattttagtggtggatgatcaattgtgtgtcacctacctgaatccagctgcggaagccttgcttcaggtaagcggacgccgttgcgttggcctgcctgtaaaacatttcttcttagattctttagaatcttcttcaacgttagaacaaagcatcgctgaggatacgtctttcaccaaacgcgaagctcatgttcgcttacagaatcaaaccattattaccttagactatagtgtttcccccgttgaatttgataattctctttgcctcgtcatagaaatgcatgcccgtgatcgccttttacgcattagcaaagaagaggaattaatttcagctcaagcaacgacacaagctttagtgagaggcatggcccacgaaatcaaaaaccctttgggcggcattcgaggtagcgcgcaattgttagagcgcatgttggataattcggagctacaagaattcacacaaatcatcattgatgaagtagatcgcttgcgtaacttagtggacaaaatgcttggcccgaacaaactgttggagcgagaagacaccaatattcacgaagttttagaacgcgtacacagcctaatcagtgttgaatctgaaggcaaagttaagctacgacgagactatgacccgagcattccagagtttttagccgacaaagaacaacttatccaagttgtattgaacatcgctcgcaatgccatgcaagcattactacagcatgtatccgcggaaggctctccacaaataactttacgcacgcggactgtacgtcaatttactattggccacaccaagcatcgcttagtccttcacatatctattgttgataacggaccaggcattcccgaagacatacgagaaagcttgtttttccctatggtcagcggccgcgctgaaggtacaggtctaggtttatcgattgctcagagcatcgtgaaccaacatcaaggcattatcgagtgtgagtctgaaccgggccgtactcagttttcaatttatttaccacttgagctctcacttaatgactatgagcgggctcgatga

SEQ ID NO: 1692 - protein, 365 aa, Oceanobacter sp. RED65
MADFVFYKQLINHLDSAILVVDDQLCVTYLNPAAEALLQVSGRRCVGLPVKHFFLDSLESSSTLEQSIAEDTSFTKREAHVRLQNQTIITLDYSVSPVEFDNSLCLVIEMHARDRLLRISKEEELISAQATTQALVRGMAHEIKNPLGGIRGSAQLLERMLDNSELQEFTQIIIDEVDRLRNLVDKMLGPNKLLEREDTNIHEVLERVHSLISVESEGKVKLRRDYDPSIPEFLADKEQLIQVVLNIARNAMQALLQHVSAEGSPQITLRTRTVRQFTIGHTKHRLVLHISIVDNGPGIPEDIRESLFFPMVSGRAEGTGLGLSIAQSIVNQHQGIIECESEPGRTQFSIYLPLELSLNDYERAR

SEQ ID NO: 1693 - DNA, 1047 bp, Vibrio sp. Ex25
  CDS (1)..(1047): transl_table=11
atggataccagtcttcctagtgccattctcaacaacatggtgacagcaacgctgattcttgatgatggattggctatccgttatgccaatccggctgccgagttgctgttttctcaaagcgcgaaacgtattgttgaacaatcgctttctcaattgattcaacatgcgtcgctggatctcgcgctgctcactcaaccattgcaaagtggccaaagcatcaccgacagtgacgtcactttcgttgttgatggccgccccttaatgctagaggtgacagttagcccaatcacttggcaaaagcagttgatgcttctggttgagatgcgcaaaattgatcagcagcgccgactctctcaagaactgaaccagcacgcccaacaacaagcggcgaaactgttagtccgagggcttgcacatgagatcaaaaacccgctaggtggattacgtggtgcagcgcaattgttagaaaaaatgctgccagatccctctctcaccgagtatacgcacatcattattgagcaagccgaccgtttaagagcgcttgttgatcgattactcggaccacaaaagccaggtaagaagacacaagaaaacttgcatcaaattctggaaaaggtccgccagttggttgaactagaatcgcaacgttcaatcgtgattgaacgtgattacgacccgagcttgccagaaattttgatggatgcggaccaaatcgaacaggcgatgcttaatatcgtcagtaatgcagcgcaaattcttagccatcaagaacacggtaaaatcaccattcgcaccagaacggtgcatcaagctaatattcacggcaaacgctgtaaactcgctgcgcgtgtcgaaatcacagacaacggcccaggcattccaccggaattacaagacacgctgttctatcccatggtcagtggccgcgagggaggaactggcttagggctgtctatttcacaaaatttgatcgaccagcacaatggaaaaatagacgtagaaagctggcctggtcacacaacatttactatttatttgccgatctga

SEQ ID NO: 1694 - protein, 348 aa, Vibrio sp. Ex25
MDTSLPSAILNNMVTATLILDDGLAIRYANPAAELLFSQSAKRIVEQSLSQLIQHASLDLALLTQPLQSGQSITDSDVTFVVDGRPLMLEVTVSPITWQKQLMLLVEMRKIDQQRRLSQELNQHAQQQAAKLLVRGLAHEIKNPLGGLRGAAQLLEKMLPDPSLTEYTHIIIEQADRLRALVDRLLGPQKPGKKTQENLHQILEKVRQLVELESQRSIVIERDYDPSLPEILMDADQIEQAMLNIVSNAAQILSHQEHGKITIRTRTVHQANIHGKRCKLAARVEITDNGPGIPPELQDTLFYPMVSGREGGTGLGLSISQNLIDQHNGKIDVESWPGHTTFTIYLPI

SEQ ID NO: 1695 - DNA, 1071 bp, Alteromonadales bacterium TW-7
  CDS (1)..(1071): transl_table=11
atgattaataacgaaaattttagccccgaattgcttgatgccatatggcaaaatcaaacaacggcagttatgcttctcgataaaaattttaccgttttttatgccaataccagtaccagtgagttacttgggcttgccactaaacgcttactcgaacagccctttgataccctttttaattaccattcaattgacttaaaacgcatcgcgcagttttcattaattgatggcgttgattgccaacaacacagagctgacgtagtctttagcgattctcgccatgccaaagtaagtgttaattcaaggcgaattaactttaaaggtactgcgtatattttattagaatgtcgtcaaacggacgatgaaataaagcacgatcaagcttcaaatcaaatgcatcaataccaagcagcacgtaacttaataagaggcttggcacacgaaattaaaaatcctttaggtggaattcgcggagcggcgcaattattgcaatatgaggttgatcagcaagaaagaaatcaatgcgctgagctcatcattgagcaagcagacagattacgtgaactagtagatagacttttagggcctaatcaactgccacaaaaatcttacgttaatatacaccaagcgttagagtcggtagtgaagttaagcacactcgataattgttcaaatatcgaattaaaaaaagattacgatcctagtatccctaatgtgtttattgatcagagtaaaatacaacaagtggttttaaatattgttcgtaatgctcagcaggcgcttactgagggtggtgagataaaaataaaaacgcgtattaatcatcaacaccgtcgtccaggtaaggcacctaaaaaagccttgttgatccaaatatctgataacggaccaggcatagatcacagcatacgtgaaaccttgttctaccctatgatcaccaacaaagaaggtggctcagggcttggactctcaattgcacagacgctcattgatcagcacgatggctatattgaatgtgatagctggcctggacatactgaatttaatatctatctgccctttgcagattaa

SEQ ID NO: 1696 - protein, 356 aa, Alteromonadales bacterium TW-7
MINNENFSPELLDAIWQNQTTAVMLLDKNFTVFYANTSTSELLGLATKRLLEQPFDTLFNYHSIDLKRIAQFSLIDGVDCQQHRADVVFSDSRHAKVSVNSRRINFKGTAYILLECRQTDDEIKHDQASNQMHQYQAARNLIRGLAHEIKNPLGGIRGAAQLLQYEVDQQERNQCAELIIEQADRLRELVDRLLGPNQLPQKSYVNIHQALESVVKLSTLDNCSNIELKKDYDPSIPNVFIDQSKIQQVVLNIVRNAQQALTEGGEIKIKTRINHQHRRPGKAPKKALLIQISDNGPGIDHSIRETLFYPMITNKEGGSGLGLSIAQTLIDQHDGYIECDSWPGHTEFNIYLPFAD

SEQ ID NO: 1697 - DNA, 1080 bp, marine gamma proteobacterium HTCC2143
  CDS (1)..(1080): transl_table=11
atggcgcctgtaagcttacacactgatattctggacaacctgcagacggcaattttactgatgaaccctgatttgtcagtccggtatattaattccagtgcagaggcgctgatgaaaattagcggtagtcgcgttatcggggaacccatttcaacgcttttcaaggaggaggagcaagatcagcaaatcttgcgggacgcgctcaacaataccagtgcattcactaaacgagaaactcaattgcaacttgccgacgggcgaacaatcaccgtcgactgcgccgtaacacccattttgaccggtgatgttgtcaccgcgttgattatggaactgcaaccccttgaccggctattacgtatcagccgtgaggaaggcatgctgtcttcccagcaaaattctcaggtgttaattcggggacttgctcatgaaattaaaaatcccctcggcggtttgaggggagctgcgcagctgttagccaaagaattgccagaggaacatctcaccgattataccaatatcattatcgaagaggccgaccgcctgagtaatctagtgaaccgaatgctgggctctcacgacctaatgaagattcacccggttaatattcacgaagttttggaacgcgtaaaaagcctaatagacgctgaaaccgcaggccgcataaaaatagctcgcgattatgaccccagcatgccagagatcaatggcgacaaagaaaggctgattcaggcactgttgaatattgttcgcaacgccatgcaatcacttctctcgagccaagacaccaatcccgacccactgacgataacactaaaaactcgggcagtgagacaatttaccatcgggccaaagcgccatcgacttgtctgcaaggtcgacattactgataacggcgcaggtatccccgccgatatcgcagaggcgatttttctaccgatggtgagcggacgcgcaaacggtaccggactcggattatctatttcacagtcaattatcacccatcaccaaggattgattgaatgtaatagtgaaccgggatgcactgtatttaccctctttatcccactcgaaaattactga

SEQ ID NO: 1698 - protein, 359 aa, marine gamma proteobacterium HTCC2143
MAPVSLHTDILDNLQTAILLMNPDLSVRYINSSAEALMKISGSRVIGEPISTLFKEEEQDQQILRDALNNTSAFTKRETQLQLADGRTITVDCAVTPILTGDVVTALIMELQPLDRLLRISREEGMLSSQQNSQVLIRGLAHEIKNPLGGLRGAAQLLAKELPEEHLTDYTNIIIEEADRLSNLVNRMLGSHDLMKIHPVNIHEVLERVKSLIDAETAGRIKIARDYDPSMPEINGDKERLIQALLNIVRNAMQSLLSSQDTNPDPLTITLKTRAVRQFTIGPKRHRLVCKVDITDNGAGIPADIAEAIFLPMVSGRANGTGLGLSISQSIITHHQGLIECNSEPGCTVFTLFIPLENY

SEQ ID NO: 1699 - DNA, 1143 bp, Marinobacter sp. ELB17
  CDS (1)..(1143): transl_table=11
atggctaacgcttcaaactcggtgaccggttacccacacattgttgacagcctgagcaccgctctgttggtgatggaccgcaatctgcttattcactatatgaacccagccgccgaaaatctgctggcagtgagcgcaacccgcagccatggcatggccttcagcggtattgtgctggttgccggcgataccgaacgccggctgaaagcagcagccgaccacggtcggtcgttcagccagcatgaagctgagtacatgttgatgaacggtgcgcgcatgatcgtggattacacggtaacgccgattaactcggaaggtgatttgctgctggaaatctggcgccgcgaccaactgctgcgcattaaccgtgaagaagacatactgtcgcagcaggaaaccaatcgggtgctggtgcgcggtatggcgcacgaaatcaaaaatcccctgggcggtatacgcggcgccgcgcaactgctggaccgcgagttgcagagcgccgaactgcgtgaatacacccaagtgatcatcgacgaagccgataggctgcgtagcctggttgaccgcatgctggggcccaacaaagcgcccaggctcatccgcaccaacatccacgaggttctggaacgggtgcgcgcgctgctagaagccgaaagccacggcaaactgacgctcaagcgggattacgaccccagcctgccggagttctgcgctgaccgcgaacagctgattcaggcatttttgaatattgcccgcaacgcgatggaagcttgcctggaaagacctgacggccctggcaaatctgatagccgtgatcgccctcacagctgtagcaacccgtcgagcaacaccagcgagcccgccaccgtaaccttccgcacccgtaccctgcgccagttcaccataggcccggtccgtcaccgtttggtatgccggatagacgtcatagacaacggcccgggcatcagcccacagctgcaacagaatattttttacccgatgatcagcgggcgcgccagcggtaatggcctggggctggccattacccagagcattattggccgccaccatggactggtggaatgtaacagtgaacccggacacaccaactttgttatttatctgcccatcgaggagtgcacatga

SEQ ID NO: 1700 - protein, 380 aa, Marinobacter sp. ELB17
MANASNSVTGYPHIVDSLSTALLVMDRNLLIHYMNPAAENLLAVSATRSHGMAFSGIVLVAGDTERRLKAAADHGRSFSQHEAEYMLMNGARMIVDYTVTPINSEGDLLLEIWRRDQLLRINREEDILSQQETNRVLVRGMAHEIKNPLGGIRGAAQLLDRELQSAELREYTQVIIDEADRLRSLVDRMLGPNKAPRLIRTNIHEVLERVRALLEAESHGKLTLKRDYDPSLPEFCADREQLIQAFLNIARNAMEACLERPDGPGKSDSRDRPHSCSNPSSNTSEPATVTFRTRTLRQFTIGPVRHRLVCRIDVIDNGPGISPQLQQNIFYPMISGRASGNGLGLAITQSIIGRHHGLVECNSEPGHTNFVIYLPIEECT

SEQ ID NO: 1701 - DNA, 1074 bp, Erythrobacter sp. SD-21
  CDS (1)..(1074): transl_table=11
atgagcgccagcccgggcgcgcccgatgccgatgcgcagatctcagggctgattttcgctgtcctcctgctcgatcaagacgatcgcatccggcaggccaatcccgcggccgaggaattgctggggcgcagcgcaggccgcctgatcgatgcggatttcgcggatgtcatcgggatcgacgacggcaggctgcgcgacagcctccgcaatttcgatgcgcaggtgatcgcacgcggcattgccatcgaagctggtcagaaagcgcgtcgggtcaatttcaccagctcccccatgcacgcccatccgggctggcgcgtagtgacgctgtccgaagtcggccaggaggggaacaacggagactacgaagaacgcgtcgaactccgcgccccggcggtgctcgcccatgagatcaagaatccgctgtcggccattcgcggggcgagccagcttctcgcccgccgcgtaaccgaaaaggaccggcctctggctcgcatgatagagggcgaagtggatcggatcgcccagttgatcgaccggatgcagcagctgggaagtcgcaaaccgatcaggaccgcgccctgcaatctgcatgaagccatacgcaacgccatggcaacggtccgcgcgggacgcgaggatgcctgcgaaatggtcgaggagttcgatccctccctgcctccggtcgaggccgaccagggcgcgctcgagcaggtgatgatcaatctccttgcgaacgcctgcgacgcgtgttcgctcgtggagaacgcgcgggtcgccgtgcggacgcggttcgtgagtgggcttgttttctcggccatccgcttcggcaaggcgacgcgcctcccgatcgagatcaccgtcaccgatcccgggccgggcctgcctccggaactgcgcgatcacgcgttcgagcccttcgtttcgggcaagccgcatgggcagggcctcggcctcgccctcgtgcggaagctcctgcgcgacatgggagggcgcatcgcccatgaacgcgacgagcgcgccggactgacccattttcgcatcaacctgccagtcgcagacggggaactgccatga

SEQ ID NO: 1702 - protein, 357 aa, Erythrobacter sp. SD-21
MSASPGAPDADAQISGLIFAVLLLDQDDRIRQANPAAEELLGRSAGRLIDADFADVIGIDDGRLRDSLRNFDAQVIARGIAIEAGQKARRVNFTSSPMHAHPGWRVVTLSEVGQEGNNGDYEERVELRAPAVLAHEIKNPLSAIRGASQLLARRVTEKDRPLARMIEGEVDRIAQLIDRMQQLGSRKPIRTAPCNLHEAIRNAMATVRAGREDACEMVEEFDPSLPPVEADQGALEQVMINLLANACDACSLVENARVAVRTRFVSGLVFSAIRFGKATRLPIEITVTDPGPGLPPELRDHAFEPFVSGKPHGQGLGLALVRKLLRDMGGRIAHERDERAGLTHFRINLPVADGELP

SEQ ID NO: 1703 - DNA, 1047 bp, Moritella sp. PE36
  CDS (1)..(1047): transl_table=11
atgatcccagaaccccagcaatcattactgaataacctcgtctcttcggtgtttgtactcgatcatgaactgcatattaaatatatcaatcctgcaggtgaacaactgctaggctccagtgctagtcgaatactggatgttaagataaccgacattattgaacacacgaccttagacctttcgttactggcaagcacgataaaaaccgggcaaggctttaccgacaatgaggtatctttagtcattgatgatcgccagttgttagttgaaatatcagctaccttgactaactttggtccagaaacctgtattttaattgaagccagacaaatcgacttacagaagaaaatcagccaagaactttatcagcacgtacaacaacaagcagcacaagaattagtacgcggtttggcccatgaaattaaaaacccattagggggattacggggggccgcacaattattagaaaaagaattacctaccgctgaattaaaagaatataccagcattatcatcgagcaagccgatcgattacggacccttgttgaccgtttattagggccacaaaagcccggtcagcaaactattttaaatattcactccgtgattgaaaaagtaaaacaattagtcgagtttgatttacccactggtattattatcgaacgcgattacgatccatctatccctgattttgagatggagccagacttattacaacaagcactactgaatatcattagcaatgccattcaaatactgaaaggtcatggcgtgataaaaatcattactcgaacagcacatcaagtgaatattcagggacagaaatatcgcttatgtgctgaaataaaaatcatcgataacgggcctggtattcctgaacacattaaagataccctgttctacccgatggtcactgcacgtgaaggtggcaccggacttggtctttctatcgctcaaaacctgattaaacaacacaaaggtaaaattgagtgccatagctggccagggcataccgaatttgccatttatctgccactaagaaaataa

SEQ ID NO: 1704 - protein, 348 aa, Moritella sp. PE36
MIPEPQQSLLNNLVSSVFVLDHELHIKYINPAGEQLLGSSASRILDVKITDIIEHTTLDLSLLASTIKTGQGFTDNEVSLVIDDRQLLVEISATLTNFGPETCILIEARQIDLQKKISQELYQHVQQQAAQELVRGLAHEIKNPLGGLRGAAQLLEKELPTAELKEYTSIIIEQADRLRTLVDRLLGPQKPGQQTILNIHSVIEKVKQLVEFDLPTGIIIERDYDPSIPDFEMEPDLLQQALLNIISNAIQILKGHGVIKIITRTAHQVNIQGQKYRLCAEIKIIDNGPGIPEHIKDTLFYPMVTAREGGTGLGLSIAQNLIKQHKGKIECHSWPGHTEFAIYLPLRK

SEQ ID NO: 1705 - DNA, 1077 bp, Thauera sp. MZ1T
  CDS (1)..(1077): transl_table=11
atgccatcgcaccccacccacgccgccagcagccccagcagcccgttcgccggactcgacctgctgtcttcggcggtcgtgctcgtcgacgccgggctggtgatccgctacctcaacgcgggcgcggagaacctgttcgcgatcagccggcgcaagctgctcggccaaccgctcgaacgcctgctcggcagcccgcccggcctggccgcggcgctcgacaacgcgctgcgcaccaactggagctacaccggccaggacatcagcgtgcagcgcggcgacgccgagccgctgcggctcgactgcacggtgacgccggtcgacaccgcaagcgtgcgcctgctgctcgaattccgcccgatcgacgcgcagctgcgcgtcgcgcgcgaggagcagctgctgcaccagcagcaggccaaccgcgagctcatccgcaacctcgcgcacgagatcaagaacccgctcggcggcatccgcggctcggcccagctgctgcagcacgagctcgacgacccgcagctgcgcgaattcaccgacgtcatcatcgccgaggccgaccgcctgcaggacctgatgaaccgcctgctgagttcgcattgcatgatgcgcccggcctcgatcaacctccacgacgtgctcgaacgcgtgcgccgcctgatcctcgccgagtttccttcgatcggcatcgtccccgactacgacctcagcctgcccgagctcaccgccgatcgcgagcagctcatccaggccgtgctcaacatcgtgcgcaacgccgcacaggcgctgggcggccacggcgagatcctgctgcgcacccgcatcgcgcgccaggtcacgctcgccaagcgccgtcacaaactggcactcaaattgcaagtaatcgacgacggccccggcatccccgaggagatccgcgatcgcatcttctatccgctggtttcggggcgggagggcggcagtggtctgggcctgtcgctcgcacagagcttcatcgagcaacaccagggcatgatcgaggtggatagccgtcccgggcgcacctgcttcacgatcctgctgccgattaccgagcgtgcctga

SEQ ID NO: 1706 - protein, 358 aa, Thauera sp. MZ1T
MPSHPTHAASSPSSPFAGLDLLSSAVVLVDAGLVIRYLNAGAENLFAISRRKLLGQPLERLLGSPPGLAAALDNALRTNWSYTGQDISVQRGDAEPLRLDCTVTPVDTASVRLLLEFRPIDAQLRVAREEQLLHQQQANRELIRNLAHEIKNPLGGIRGSAQLLQHELDDPQLREFTDVIIAEADRLQDLMNRLLSSHCMMRPASINLHDVLERVRRLILAEFPSIGIVPDYDLSLPELTADREQLIQAVLNIVRNAAQALGGHGEILLRTRIARQVTLAKRRHKLALKLQVIDDGPGIPEEIRDRIFYPLVSGREGGSGLGLSLAQSFIEQHQGMIEVDSRPGRTCFTILLPITERA

SEQ ID NO: 1707 - DNA, 1119 bp, Magnetospirillum gryphiswaldense
  CDS (1)..(1119): transl_table=11
atgatcgggaaggtatccgccatgctgcgccgccctcaggctgcttccatcgatccgtccgtggtgctgggggcgctggcctcgtcgatcctggtgatcgatacggcgaacaagattcagtacgccaacgcctcggccgagcaattgttccaatccggcgcctcgtatctgctgggcaagccgatcaccgatctgctgccgcccgattcgcccattctgtcgctgatcgaacaggcccgtaacgatgctcaggtggtgtcggaacacggcatttccctggataccccgcgcaccggccaccgtaccgtcaccgtccaggcggcaccggtgaacgaatgccccggtctggtggccctatcgctgcacgaacaatccatcgcgctcaaaatcggcgggtcgttgtccagccgcaacgcggcgcgctcggtatcggccatggccgccatgctggcgcacgaggtcaaaaacccgctgtcgggcatccgcggcgccgcccagttgctggaaagcgcggcaagcgaggacgaccgggtgctgacccgcctgatcatcgacgaggccgatcgcatcgttgccctggtcgaccgcatggaagtgttttcggacaagcccatggtcgaacgcggcgccgtcaacatccatcaggtgctggagcatgtgcgccgcatcgccgaaaacggctttgcccgcactgtgcgcattgtcgagaattacgacccgtccttgccgccggtggccggcgaccgcgaccagttgatccaactgttcctcaatctggtcaagaacgccgccgaggcggtgccgtccgagggcggcgaaatcatcatttccactgcctaccagcatggtgtgcgtctggccattccgggcagcgaagtgcgccgccacttgccgctgctggtcagtattcaggacaatggaatcggtatccccgatgacctgcgtccgcatctgttcgatgccttcgtcaccaccaagccttcgggtactggattggggttggctttggttgccaaaatcgtgggggatctggggggcattgtcgaattcgacagcacgcctcgccgcaccgtgttcaaggtgatgttgcccatggttcaggaaggggacgagggctga

SEQ ID NO: 1708 - protein, 372 aa, Magnetospirillum gryphiswaldense
MIGKVSAMLRRPQAASIDPSVVLGALASSILVIDTANKIQYANASAEQLFQSGASYLLGKPITDLLPPDSPILSLIEQARNDAQVVSEHGISLDTPRTGHRTVTVQAAPVNECPGLVALSLHEQSIALKIGGSLSSRNAARSVSAMAAMLAHEVKNPLSGIRGAAQLLESAASEDDRVLTRLIIDEADRIVALVDRMEVFSDKPMVERGAVNIHQVLEHVRRIAENGFARTVRIVENYDPSLPPVAGDRDQLIQLFLNLVKNAAEAVPSEGGEIIISTAYQHGVRLAIPGSEVRRHLPLLVSIQDNGIGIPDDLRPHLFDAFVTTKPSGTGLGLALVAKIVGDLGGIVEFDSTPRRTVFKVMLPMVQEGDEG

SEQ ID NO: 1709 - DNA, 1098 bp, Vibrio sp
  CDS (1)..(1098)
ttgcaccattattgtgcaacgcacaatcttaaagcaaaacaaggacgtaatgtggataccagtcttcctagtgccattctcaacaacatggtgacagcaacgctgattcttgatgatggattggctatccgttatgccaatccggctgccgagttgctgttttctcaaagcgcgaaacgtattgttgaacaatcgctttctcaattgattcaacatgcgtcgctggatctcgcgctgctcactcaaccattgcaaagtggccaaagcatcaccgacagtgacgtcactttcgttgttgatggccgccccttaatgctagaggtgacagttagcccaatcacttggcaaaagcagttgatgcttctggttgagatgcgcaaaattgatcagcagcgccgactctctcaagaactgaaccagcacgcccaacaacaagcggcgaaactgttagtccgagggcttgcacatgagatcaaaaacccgctaggtggattacgtggtgcagcgcaattgctagaaaaaatgctgccagatccctctctcaccgaatatacgcacatcattattgagcaagccgaccgtttaagagcgctcgttgatcgattactcggaccacaaaagccaggtaagaagacacaagaaaacttgcatcaaattctggaaaaggtccgccagttggttgaactagaatcgcaacgttcaatcgtgattgaacgtgattacgacccgagcttgccagaaattttgatggatgcggaccaaatcgaacaggcgatgcttaatatcgtcagtaatgcagcgcaaattcttagccatcaagaacacggcaaaatcaccattcgcaccagaacggtgcatcaagctaatattcacggcaaacgctgtaaactcgctgcgcgtgtcgaaatcacagacaacggcccaggcattccaccggaattacaagacacgctgttctatcccatggtcagtggccgcgagggaggaactggcttagggctatctatttcacaaaatttgatcgaccagcacaatggaaaaatagacgtagaaagctggcctggtcacacaacatttactatttatttgccgatctga

SEQ ID NO: 1710 - protein, 365 aa, Vibrio sp
MHHYCATHNLKAKQGRNVDTSLPSAILNNMVTATLILDDGLAIRYANPAAELLFSQSAKRIVEQSLSQLIQHASLDLALLTQPLQSGQSITDSDVTFVVDGRPLMLEVTVSPITWQKQLMLLVEMRKIDQQRRLSQELNQHAQQQAAKLLVRGLAHEIKNPLGGLRGAAQLLEKMLPDPSLTEYTHIIIEQADRLRALVDRLLGPQKPGKKTQENLHQILEKVRQLVELESQRSIVIERDYDPSLPEILMDADQIEQAMLNIVSNAAQILSHQEHGKITIRTRTVHQANIHGKRCKLAARVEITDNGPGIPPELQDTLFYPMVSGREGGTGLGLSISQNLIDQHNGKIDVESWPGHTTFTIYLPI

SEQ ID NO: 1711 - DNA, 1095 bp, Herbaspirillum seropedicae
  CDS (1)..(1095): transl_table=11
atgaatccaggctccccgactaccgccatgaagactccgttcccctccctcgaaggtctcgacctgctggctctgatcatcctcgacgccgagggcggcatcgtctatgccaatgccgccgccagaacctgctggaaaagctccttcaaggtgctctcgcagcagaagctctcggagctcttcctgaacggcaaggagctctcggccctgttctaccaggccatcgaacaccagttcgccgacaagcgcctggacctggtgctggaacgcgccaaccgcgaaccgctgcaggtccacaccatcgtcacgccgctggacaaccccgacatgccggtgctgctggagctgcgcgaaaacgtccagcaattgaagctggaccgcgaagagcgcatcttcgaccagagccaggccaacaaggaactgatccgcaacctggcccacgagatcaagaatccgctgggcggcatccgcggcgcagcgcagctgctggagctggagctgcccgagcggcacctcaaggaattgcgcgaatatacccaggtcatcatcaaggaagccgatcgcctgcagaccctggtcgatcgcctgctggcgccgcaccggcatccgcacatcgtcggcgacgtcaacatccacgaagtctgtgaacgcgtgcgcagcctggtcatggccgagttcccccaggggctgaccatcaagcgcgactatgacctgtccatcccggaatttcgcggcgacaaggagcagctcatccaggccgtgctcaacatcgtgcacaacgccgcccaggcgctggccgaccgcatccgcgccggcgatggcgagctcatcctgcgtactcgcgtgagccgtcaagtgacgctatccaaggtccgataccggctggcactagacttgcatatcatcgataacggtccgggcatcccccccgacatccaggacagaatcttctatccactggtgtcgggtcgggaaggtggcagcggactggggctgaccctggcgcagacattcgtccatcagcacatgggcgtgatcgaatgcgacagccggccaggttgtaccgatttcagaatacttataccgctgccgtga

SEQ ID NO: 1712 - protein, 364 aa, Herbaspirillum seropedicae
MNPGSPTTAMKTPFPSLEGLDLLALIILDAEGGIVYANAAARTCWKSSFKVLSQQKLSELFLNGKELSALFYQAIEHQFADKRLDLVLERANREPLQVHTIVTPLDNPDMPVLLELRENVQQLKLDREERIFDQSQANKELIRNLAHEIKNPLGGIRGAAQLLELELPERHLKELREYTQVIIKEADRLQTLVDRLLAPHRHPHIVGDVNIHEVCERVRSLVMAEFPQGLTIKRDYDLSIPEFRGDKEQLIQAVLNIVHNAAQALADRIRAGDGELILRTRVSRQVTLSKVRYRLALDLHIIDNGPGIPPDIQDRIFYPLVSGREGGSGLGLTLAQTFVHQHMGVIECDSRPGCTDFRILIPLP

SEQ ID NO: 1713 - DNA, 1086 bp, Thiobacillus ferrooxidans
  CDS (1)..(1086): transl_table=11
atggcgcgccgcaaaaacataaccaccctgcccgcggagaatatggtgctggacgccctggaatcagcggtactggttctgggagcggattaccatatccgatatatgaatcccgccgccgagaatctgctgcgctcagccagcaccaggcattggggcaatatttgccggcgctgtgcagcgtcgttggcgaagagcgatttgccacacttttcgtggataccatcgcggcgaacacggcaacgctgcgtagagcccctgcccctggcgctgagtgagggcggcggcgccgtggtggatttggtggtgacaccggcaccaaccgacggcctcattattgaaatgcggcccatggaactgccggcgcggcacgccgaggaggaaatgcaggaccgcatttacggggcagcgcaggagatgctgcgcggcctcgcccacgaaatcaaaaatcccctcggcggtttgcgcggggctgcgcaactcctggatcgcgagttgcaacgcccggaactgaaagattacacccgcgtcattctccatgaggtggatcgtctgcatcatctggtggatcgcctccagggaccccgtagccgcccggtttttgccgaggtgaatatccatcaggtgctggagcacgtgcgtcgtctgctgaatgcggaattgcccaccggtattgccgtgcgtttcgactacgacccctccattcccgaccttatggcggaccaggagcaactggtgcaagtttttctgaatctgatgcgcaatgcccaacaggcgctggaccgccacggtgcaattctgatccgtacccgggtcgaacgctacgttaccctgctgcaccacaagttccgcctggcgctgcgtgtggatgtagtcgacaacggcccgggaatctccccggatctgctgccacggatctttttgcccctggtcaccagtcgtgccgagggtatgggaatggggctcgccatcgtacagggactggtgcgcgggcatggcggcgtggtccactgccattcacaaccgggagaaacggtattttccgtttctctgcccctgtcaccgcaccgggaggcatccgcatga

SEQ ID NO: 1714 - protein, 361 aa, Thiobacillus ferrooxidans
MARRKNITTLPAENMVLDALESAVLVLGADYHIRYMNPAAENLLRSASTRHWGNICRRCAASLAKSDLPHFSWIPSRRTRQRCVEPLPLALSEGGGAVVDLVVTPAPTDGLIIEMRPMELPARHAEEEMQDRIYGAAQEMLRGLAHEIKNPLGGLRGAAQLLDRELQRPELKDYTRVILHEVDRLHHLVDRLQGPRSRPVFAEVNIHQVLEHVRRLLNAELPTGIAVRFDYDPSIPDLMADQEQLVQVFLNLMRNAQQALDRHGAILIRTRVERYVTLLHHKFRLALRVDVVDNGPGISPDLLPRIFLPLVTSRAEGMGMGLAIVQGLVRGHGGVVHCHSQPGETVFSVSLPLSPHREASA

SEQ ID NO: 1715 - DNA, 1011 bp, Vibrio vulnificus
  CDS (1)..(1011): transl_table=11
atggtgactgcgacgctcatcttggatgatgagctgcaaatacaccacgccaatcctgcggcagagcaattgttttctcaaagtgccaagcggattgtgcaccacccactctcgcagttgattcagcatgcgtcgctcgatctcgccttgctttcacagccattacaaagcggacaaagcattaccgacagtgacgtcactttcgtggtggatggcaaacctttgttgctggaggttacagtcagcccgatttcaatcgaaagagagctgatgctcttaatggagatgcgtaaagtcgaccaacagcgccgaatcactcaggagatgaaccagcacgcccaacaacaagccgcaaagctcttggtgcgaggcctcgctcatgaaatcaaaaacccgctaggaggtctacgtggcgcagcacaactgctggaaaaaatgctgcccgatccttcattaacggaatacacccagatcattattgagcaggcagaccgattgcgcgcgttagtcgaccggctactgggcccacaaaaaccgggcaaaaaacaacaaaccaaccttcaccaagttctcgaaaaagttcgccaacttgtggagctggagtccgaacaaacgctggtcatcgagcgagactatgatccaagcttgcccgatatttacattgatgctgaccaaatagagcaggcgatgctcaatatcgttagcaatgcttcgcaaattttggctcaccaagaggatggtaaaatctccattcgcaccagaacggtgcatcaggccaatatccatggccaacgctgcaaagtggcggcccggattgaaattatggataacgggccaggtatccccgttgagcttcaagatactttgttttaccccatggtcagtggtcgagaaggcgggacaggattaggtctttctatttctcaaaaccttattgatcagcataacggcaaaattgatgtcgaaagctggccagggcacaccaattttacgatttatctgccaatttaa

SEQ ID NO: 1716 - protein, 336 aa, Vibrio vulnificus
MVTATLILDDELQIHHANPAAEQLFSQSAKRIVHHPLSQLIQHASLDLALLSQPLQSGQSITDSDVTFVVDGKPLLLEVTVSPISIERELMLLMEMRKVDQQRRITQEMNQHAQQQAAKLLVRGLAHEIKNPLGGLRGAAQLLEKMLPDPSLTEYTQIIIEQADRLRALVDRLLGPQKPGKKQQTNLHQVLEKVRQLVELESEQTLVIERDYDPSLPDIYIDADQIEQAMLNIVSNASQILAHQEDGKISIRTRTVHQANIHGQRCKVAARIEIMDNGPGIPVELQDTLFYPMVSGREGGTGLGLSISQNLIDQHNGKIDVESWPGHTNFTIYLPI

SEQ ID NO: 1717 - DNA, 1083 bp, Pseudomonas stutzeri
  CDS (1)..(1083): transl_table=11
atgatcaacgaagccctgcaacgcctgctgatcgagaacctgaccaccgcaacgctgctgctcaactcgcgcttgcgtctggaatacatgaacccggcagccgaaatgctgctggccgtcagcggtcagcgcagccatgggcaattcatcagcgaactgttcaccgaatcaccggaagccctggcggcattgcgccaggctgtggaagaagcccaccccttcaccaaacgcgaggcaaccctgacctccgccaccggccagtcgctgaccgtcgactacgcggtgaccccggtgctgacgcgccaggagaccatgctgttgctggaagtgctgccacgcgaccggctgctgcgcatcaccaaggaagaggcccagctgtccaagcaggaaaccaccaagatgctggtgcgcggcctggcccacgagatcaagaaccctctgggcggcattcgcggcgcggcgcagctgctggcccgcgagctgccggaagaacacctgaaggactacaccgaagtcatcattgaggaagctgaccggctgagaaacctcgtcgaccgcatgctcggctcgaacaagctgccgtcactggcgatgaccaacatccacgaagtgctcgaacatgtggccagcctgatcgaggccgaatgccagggaagcatcattttggtgcgcgactatgacccgagcatccccgaggtcctgatggaccgtgaacagatgatccaggccgtgctcaatatcatgcgcaacgccatgcaggccctcgccgggcagaacgagctgggcctgggccgcctgaccctgcgcacccgcacgctgcgccagttcaccatcggccatatccgtcatcgcctggtggcgcgcatcgagatcatcgacaacggcccgggcatccccgccgaactgcagaacacgctcttctacccgatggtcagcggtcgcccggacggaaccgggctgggcctggccatcacccagaacatcatcagtcagcaccagggtctgatcgaatgcgagagccatcctggccacaccgtgttctcgatcttcctaccgctggaacaaggagccacatcagcatga

SEQ ID NO: 1718 - protein, 360 aa, Pseudomonas stutzeri
MINEALQRLLIENLTTATLLLNSRLRLEYMNPAAEMLLAVSGQRSHGQFISELFTESPEALAALRQAVEEAHPFTKREATLTSATGQSLTVDYAVTPVLTRQETMLLLEVLPRDRLLRITKEEAQLSKQETTKMLVRGLAHEIKNPLGGIRGAAQLLARELPEEHLKDYTEVIIEEADRLRNLVDRMLGSNKLPSLAMTNIHEVLEHVASLIEAECQGSIILVRDYDPSIPEVLMDREQMIQAVLNIMRNAMQALAGQNELGLGRLTLRTRTLRQFTIGHIRHRLVARIEIIDNGPGIPAELQNTLFYPMVSGRPDGTGLGLAITQNIISQHQGLIECESHPGHTVFSIFLPLEQGATSA

SEQ ID NO: 1719 - DNA, 1155 bp, Gluconacetobacter diazotrophicus
  CDS (1)..(1155): transl_table=11
atggcggccggcatggccctcgacatgccgcagccggatggcgccgcgctgctggacgcgatgtcgatgccggtggtcctggtggggccgggcaatcatatccgctacatcaacagcgcggccgaaccgttcttcgcgtcgcgccagcaactgatgcatcgggacctggcggaaatcctggcggccgaccatccgatcttcctgctggtcgaacaggtgcggcgcgacggggtgacgaccgccgaacatgaactgacgctggacgggccgcggctgcaccgcacgggcattaccgtgcagggcacgcaactgcccgatgagccggattccgtgctgctgacctttcacgattcgtcggcggcgcggcaactcgaccggcaactgaccttccggtccgcggcgcgcagcgtgtccggcatggccgccatcctggcgcacgaggtcaagaatcccctgtccggcatcaggggggcggcgcagttgctggaaagctcggtggccgagggcgaccgggaactggcggtgctgatccgggacgaggccgaccggatacgcgacctggtcgagcgcatggaaatgttcagcgacaagccgctggaacggcgcccggtgaacattcatcgcgtgctcgaacgcgtgcgcatgctggccgagcagggattcgccggcaacatccggatcgtcgaggattacgatccctcgctgccgccggtctggggcaatcgcgaccagttggtgcaggtgctgctgaacctggtgaagaacgcggccgaggccatcgcatcggacgggcaggggggggaaatcaccctcggcacgtcctaccggcacggggtgcggctggcggtgccggggatggaacatcgcgtcgaactgccgctggtggtgtcggtccgcgataccgggcccggcattcccgacagcatccggccccatctgttcgaacccttcctgacgacgaagaccagcggaagcggcctgggactgcctggcgggcaagatctcgacgaccatggcggcgtgatcgaaatcgacagccgccccggccgcaccgaggtccgcctgcacctgcccatggtggccgaaggcagggacccttccctgaccgccggccggacgccgcccccagcccttagccccgattcaagagactga

SEQ ID NO: 1720 - protein, 384 aa, Gluconacetobacter diazotrophicus
MAAGMALDMPQPDGAALLDAMSMPVVLVGPGNHIRYINSAAEPFFASRQQLMHRDLAEILAADHPIFLLVEQVRRDGVTTAEHELTLDGPRLHRTGITVQGTQLPDEPDSVLLTFHDSSAARQLDRQLTFRSAARSVSGMAAILAHEVKNPLSGIRGAAQLLESSVAEGDRELAVLIRDEADRIRDLVERMEMFSDKPLERRPVNIHRVLERVRMLAEQGFAGNIRIVEDYDPSLPPVWGNRDQLVQVLLNLVKNAAEAIASDGQGGEITLGTSYRHGVRLAVPGMEHRVELPLVVSVRDTGPGIPDSIRPHLFEPFLTTKTSGSGLGLPGGQDLDDHGGVIEIDSRPGRTEVRLHLPMVAEGRDPSLTAGRTPPPALSPDSRD

SEQ ID NO: 1721 - DNA, 1044 bp, Shewanella violacea
  CDS (1)..(1044): transl_table=11
atggatctaaaacacctgctcaataaccttgttaccgcagtcatggtcatagatgtggatcttaggctaagttatgccaatgcagccgcggagcagctattaggcgtcagcacccataggttaactgagcattcccttgcagataactttcaagtgttaggcgtaagcacgcaaatactcagcggtgcaataagggataatcaaggcttaaccatcagcactgcacctctagtgacattggataatcaacatcatactgtggatataaccttgaccccattagagcatgagcaaggtttagctctgcttgaactgagacaggtagaccagcaacgtcgaatccatcagcaattgactctcgatgcccaacagcaggcagcacaatatctagtacgtaatttagctcacgaaataaagaatccattaggtggactgagaggggcggcgcaactactttcacgggagttacatgatcccgaattacatgaatttaccgatatgatcattgagcaggccgatagattaagaaatctggtcgatcgcttacttgggccgcagaaacctacccaacatacacagcaaaatattcatgaagtgatccaaaaagttcttaagcttgtcaccatggcactgccggaaaatatccaattcaagcaagactacgatccttcgattccagatataaatatggatccggaacagattcagcaagctgtgcttaatattgtacaaaatgcagttcaggccttggaaggtgttggcggcaatataatcatcaagacacgcgctcaacaccagatcactattggcactcagagacataaaatcgtgattgccttatctgttatcgacaatggtccgggtataaaacctgagctcatggacaccttattttatcctatggtgacaggtagagatcaaggctcaggcctaggtttatccatatcccataactttgctcgattacatggcggaagaatagattgccagtcgacccctggagaaaccgagtttacgattttactgccaataaaaactaaatga

SEQ ID NO: 1722 - protein, 347 aa, Shewanella violacea
MDLKHLLNNLVTAVMVIDVDLRLSYANAAAEQLLGVSTHRLTEHSLADNFQVLGVSTQILSGAIRDNQGLTISTAPLVTLDNQHHTVDITLTPLEHEQGLALLELRQVDQQRRIHQQLTLDAQQQAAQYLVRNLAHEIKNPLGGLRGAAQLLSRELHDPELHEFTDMIIEQADRLRNLVDRLLGPQKPTQHTQQNIHEVIQKVLKLVTMALPENIQFKQDYDPSIPDINMDPEQIQQAVLNIVQNAVQALEGVGGNIIIKTRAQHQITIGTQRHKIVIALSVIDNGPGIKPELMDTLFYPMVTGRDQGSGLGLSISHNFARLHGGRIDCQSTPGETEFTILLPIKTK

SEQ ID NO: 1723 - DNA, 1050 bp, Enterobacter gergoviae
  CDS (1)..(1050): transl_table=11
atggcaacaggcacactgcccgatgctgggcagatcctcaactctcttatcaacagtatcttactggtcgatgatgacctggcggtgcactttgccaatcctgcggcgcagcagctgctggcgcaaagttcacgcaagctgtttggcaccccgttacctgagctgttgagctatttttcgttgaatatcgggctgatgcaggagagcctgcaggcgggccaggggtttaccgataacgaagtgacgctggttattgatggccgctcgcacatcctgtcgctgaccgcccagcggctgccggaaggctttattctgctggaaatggcgccgatggataaccagcgccgcctgagccaggagcagctgcagcacgcgcagcaggtcgccgcccgcgatctggtccgcggcctggcacatgagataaaaaatccgttaggcggcctgcgcggcgcggcacagctgctcagcaaagccctgcccgacccggcgctaacggaatataccaaagtgatcatcgagcaggctgaccggctgagaaatctggtcgatcgcctgcttgggccacagcatccgggcatgcacgttactgaaagtatccataaagtcgccgagcgggtagtgaaactggtctccatggagttaccggacaacgtgaagttaatccgtgattacgaccccagcctaccagagctgccccacgacccggatcaaattgaacaggtgttgctgaacatcgtccgtaatgcgctgcaggcgctggggccggaagggggcgaaattgttctccgcacccgcaccgctttccagctgacgctgcacggggtgcgttatcgcctcgccgcacgtattgacgttgaagataatggcccgggtattccgccccatctccaggatacgctgttttatccgatggtcagcggccgcgaaggcggtaccggcctgggcttatctatcgcccgcagccttatcgatcagcactccggcaaaattgaattcaccagctggccgggtcatacggaattttcggtatacctgcctattcggaagtag

SEQ ID NO: 1724 - protein, 349 aa, Enterobacter gergoviae
MATGTLPDAGQILNSLINSILLVDDDLAVHFANPAAQQLLAQSSRKLFGTPLPELLSYFSLNIGLMQESLQAGQGFTDNEVTLVIDGRSHILSLTAQRLPEGFILLEMAPMDNQRRLSQEQLQHAQQVAARDLVRGLAHEIKNPLGGLRGAAQLLSKALPDPALTEYTKVIIEQADRLRNLVDRLLGPQHPGMHVTESIHKVAERVVKLVSMELPDNVKLIRDYDPSLPELPHDPDQIEQVLLNIVRNALQALGPEGGEIVLRTRTAFQLTLHGVRYRLAARIDVEDNGPGIPPHLQDTLFYPMVSGREGGTGLGLSIARSLIDQHSGKIEFTSWPGHTEFSVYLPIRK

SEQ ID NO: 1725 - DNA, 1203 bp, Azospirillum brasilense
  CDS (1)..(1203): transl_table=11
atggcccgtgcatctgccgctgctccactgccccgccgcccggcgcggccccgtgcgccctccagttcctaccgtcccgtccgcccctgcatcgatccgtccgtcatgctgaacgcgctccccgacccggttctggtcgtcgacggctccggcgacatccgctacgtgaatctggaggcgcaggagttcttcggcctgtccgccgccatgatggaaggcatgccgctggccgagctgctgccgcccaacagcccggtcagccagttgatcgagcaggtgcagcagggtcgccaccgcgcctcgcaggaaggtgtcgtcatcgacacgccgcgcatcggcccgcaccatgtcaccgtgcgggtcaccgcgctgggcgagcccgccgaccatgtgctgctgacggtcaacgagcgtacgctggcccgcaagatcgacaattccctgacccaccgcaacgctgcccgctcggtcaccgccatggcgtcgatgctcgggcatgaggtcaagaatccgctgtcgggcatccgcggagcggcacagctcctggaggaaaactgcagcgagtccgaccgggtgctcacccggctgatctgcgacgaggccgaccgcatcgtcgctctggtcaaccggatggaggtcttctccgaccagcgcccgctggagcgcgatgcggtgaacatccacaccgttctggagcatgtccgcaaggtggcccaaagcggcttcgcgcggaacatccgcttcatcgagcgctatgacccatccctgccgccggtttatggcaaccgcgaccagcttatccagattttcctcaacctgattaaaaatgcggcagaagctgcaccggaatcgggcggcgaaatcattctcagcacatcttatcagcacggcgtccgcatggccctgcccggcggcgacacccgcctgcacctgccgttgctggtgtccgttcaggataatggggacggcatacccgacgacctgcgttccaacctgttcgatgcgttcattacgaccaaggtcaatgggactggcctggggcttgcattggtagccaaaatcgtcggcgaccacggcggcgtcatcgaatttgacagccagccgcgccgcaccgtcttcaaggtctcgctacccatgttcgatgaagcgcagatgagcggcgatcctgcaccggccagaggcatccgaggggccatcggatga

SEQ ID NO: 1726 - protein, 400 aa, Azospirillum brasilense
MARASAAAPLPRRPARPRAPSSSYRPVRPCIDPSVMLNALPDPVLVVDGSGDIRYVNLEAQEFFGLSAAMMEGMPLAELLPPNSPVSQLIEQVQQGRHRASQEGVVIDTPRIGPHHVTVRVTALGEPADHVLLTVNERTLARKIDNSLTHRNAARSVTAMASMLGHEVKNPLSGIRGAAQLLEENCSESDRVLTRLICDEADRIVALVNRMEVFSDQRPLERDAVNIHTVLEHVRKVAQSGFARNIRFIERYDPSLPPVYGNRDQLIQIFLNLIKNAAEAAPESGGEIILSTSYQHGVRMALPGGDTRLHLPLLVSVQDNGDGIPDDLRSNLFDAFITTKVNGTGLGLALVAKIVGDHGGVIEFDSQPRRTVFKVSLPMFDEAQMSGDPAPARGIRGAIG

SEQ ID NO: 1727 - DNA, 1134 bp, Bradyrhizobium sp
  CDS (1)..(1134): transl_table=11
atgacgtcagccatggaattccgccggccggtgccgactgacggggaggccatcctcaatgcgctgcccaatccggtgctgctggtcgcgcccgacgggcggatcgtcgatgccaatatcgcagccgaatccttcttcgagatctcgacccagttcctgcgccggcagtcgctgaaggagctggtgccgttcggcagcccgctgctggcgctgatcgagcaggtgcggacgagcggctcgccggtcaacgaatacaaggtcgatctcggcacgccgcggatcggcggcgatcgccaggtcgatctgcacgtcgcgccgctgaccgagcggcccgggcatatcgtggtgatgctgcaggagcgcaccatcgccgacaagatggatcgccagctcacccatcgcagcgcggcgcgctcggtgatcgcgctggctgcgatgctcgcccacgagatcaagaacccgctgtcgggcattcgcggtgcggcgcagcttttggagcagcaggcctcttccgaggaccggctgctgacgcggttgatctgcgacgaggcggaccgcatcgtgacgctggtcgaccgcatggaagtgttcggcgacgaccgcccggtggcgcgcggcccggtcaacatccattccgtgctcgatcatgtgaagcgcctggcgcagtccggctttgcccgcaatgtccgcttcatcgaggattacgatccgtcgttgccgccggtgctggccaaccaggaccagctgatccaggtgttcctcaacctcgtgaagaacgcggccgaagcggtcgccgatctcggcaccgatgcggagatccagctcaccacggcgttccggccgggggtgcggctgtcggtacccggcaagaaatcgcgggtctcgctgccgctggaattctgcgtcaaggacaacggctccggcgtgccggaagacctgctgccgaacctgttcgatcccttcgtcaccaccaagcagaccggcagcgggctcggcctcgcgctggtcgccaagatcgtcggcgatcacggcggcatcatcgaatgcgagtcgcagccgcgcaaaaccacctttcgcgtgctggatgccgatgtacagcgccgccaagcaactcgaccaaagcaaccgcgatga

SEQ ID NO: 1728 - protein, 377 aa, Bradyrhizobium sp
MTSAMEFRRPVPTDGEAILNALPNPVLLVAPDGRIVDANIAAESFFEISTQFLRRQSLKELVPFGSPLLALIEQVRTSGSPVNEYKVDLGTPRIGGDRQVDLHVAPLTERPGHIVVMLQERTIADKMDRQLTHRSAARSVIALAAMLAHEIKNPLSGIRGAAQLLEQQASSEDRLLTRLICDEADRIVTLVDRMEVFGDDRPVARGPVNIHSVLDHVKRLAQSGFARNVRFIEDYDPSLPPVLANQDQLIQVFLNLVKNAAEAVADLGTDAEIQLTTAFRPGVRLSVPGKKSRVSLPLEFCVKDNGSGVPEDLLPNLFDPFVTTKQTGSGLGLALVAKIVGDHGGIIECESQPRKTTFRVLDADVQRRQATRPKQPR

SEQ ID NO: 1729 - DNA, 1050 bp, Klebsiella oxytoca
  CDS (1)..(1050): transl_table=11
atggcaacaggcacactgcccgatgctgggcagatccttaactctttaatcaacagtatcttactggtcgatgacgacctggcggtacattacgcgaacccggcggcgcagcagctgctggcgcaaagctcgcgtaaattattcggcacgccgctgccggagctgttgagctatttctcgctgaatatcggcctcatgcaagagagcctcgctgcgggtcagggttttaccgataacgaagtgacgctggttattgatggccgctcccacatcctttccctgacggcgcaacgcctgcctgaaggctatatcctgctggaaatggcgccgatggataatcagcgtcgcctgagccaggagcagctacagcacgcgcagcagattgccgcacgtgacttagtgcgtggtctggcccacgagattaaaaatccgctgggcggcctgcgcggcgcggcgcagctgctgagcaaagcgctgcccgaccctgcgctaatggaatataccaaagtcattattgaacaggccgaccggttaagaaatctggtcgaccgtctactgggaccacagcatcccggaatgcacgtaacagaaagcatccacaaggtcgctgagcgagtggtgaagctggtgtcgatggaactaccggataacgtcaagctggtgcgcgactatgaccccagcctgccagagctcccgcacgacccggatcaaattgaacaagtgctgctgaacatcgtacgtaacgcgctgcaggcgctgggaccggagggcggagagatcactctgcgcacccggacggccttccagttaaccctgcacggcgtgcgctaccgcctcgctgcgcgtatagacgttgaagataacggcccgggaatcccgtctcacttacaggatacgctgttttatcccatggtgagtggacgcgaaggcggtaccggactcgggctgtctatcgcccgcagccttatcgaccagcactccggcaaaattgaatttaccagttggccagggcataccgaattctcggtgtacctgcctattcggaagtag

SEQ ID NO: 1730 - protein, 349 aa, Klebsiella oxytoca
MATGTLPDAGQILNSLINSILLVDDDLAVHYANPAAQQLLAQSSRKLFGTPLPELLSYFSLNIGLMQESLAAGQGFTDNEVTLVIDGRSHILSLTAQRLPEGYILLEMAPMDNQRRLSQEQLQHAQQIAARDLVRGLAHEIKNPLGGLRGAAQLLSKALPDPALMEYTKVIIEQADRLRNLVDRLLGPQHPGMHVTESIHKVAERVVKLVSMELPDNVKLVRDYDPSLPELPHDPDQIEQVLLNIVRNALQALGPEGGEITLRTRTAFQLTLHGVRYRLAARIDVEDNGPGIPSHLQDTLFYPMVSGREGGTGLGLSIARSLIDQHSGKIEFTSWPGHTEFSVYLPIRK

SEQ ID NO: 1731 - DNA, 1047 bp, Proteus vulgaris
  CDS (1)..(1047): transl_table=11
atggaaacgggcaacttacctgataacacactgattttagactctttaatccattcagtgctggttatcaatcaagaattcattatttgttatgcaaaccacgctgcgttacaagttttggcacaaagccgtcgcaaattatttgaaacaccttttaccgatttgtttagttatcattcatttgatgctgaacttatgcaagaaaccttagcaaacggacaaagtttcactgataacgaagtgattttggttattcataaccaatcacacactatgtcgctcagtgcccaacctatttccgagcaacatattttgctggaactggcgcctatggatagtcaacgtcggttaagccaagagcagatccaacaagcccagcaaatagctgcaagggaattggttcggggactggcacatgaaattaaaaacccgctagggggattgcgaggtgccgcacaattactggcaaaatcgttacctgatcccgcgctgacggaatatacacaagtcattatcgaacaagcagaccgtttgcgtacactggttgatagactgttaggccctcagcaccctggtaaaaaaacacatcaaagcattcatcatgttgttgagcgtgtagcccaattaatttcattggaatgcccagaaaatgtcacattattaaaagattacgacccaagcttacctgaactttctcattacccggatcaaatagaacaagtcctactcaatattacgcgtaatgccttacaagcggttgaaaaaacaggcgggacgataattttacgtactcgcaccgcgtttcaaatcacgctacatggtgagcgtcacagacttgttgcacgcatcgatgtgatagataccggaagcggtattcccccacatttacaagatacccttttctatccaatggtaagcggaagagaagacggaaatggcttaggattatctatcgctcgtaatttagttgatcagcacgcaggtaaaattgaatttactagttggccgggtaataccgaattttctatttacctgccaataaaatag

SEQ ID NO: 1732 - protein, 348 aa, Proteus vulgaris
METGNLPDNTLILDSLIHSVLVINQEFIICYANHAALQVLAQSRRKLFETPFTDLFSYHSFDAELMQETLANGQSFTDNEVILVIHNQSHTMSLSAQPISEQHILLELAPMDSQRRLSQEQIQQAQQIAARELVRGLAHEIKNPLGGLRGAAQLLAKSLPDPALTEYTQVIIEQADRLRTLVDRLLGPQHPGKKTHQSIHHVVERVAQLISLECPENVTLLKDYDPSLPELSHYPDQIEQVLLNITRNALQAVEKTGGTIILRTRTAFQITLHGERHRLVARIDVIDTGSGIPPHLQDTLFYPMVSGREDGNGLGLSIARNLVDQHAGKIEFTSWPGNTEFSIYLPIK

SEQ ID NO: 1733 - DNA, 1152 bp, Rhizobium leguminosarum bv
  CDS (1)..(1152): transl_table=11
atgacgaaggatacgacatctccgcccgatcaggctggcggaaccgttgccatggccgtgctgaacgccatccagaacccggtcgtcatggtcgacgaatccggtttcatcgccttcgccaattgggaggcggaggcctttttcggcgccgccttcgcatctggcgcgttaccggatctcgacattcattccttcggcagtccgctgctcgccctggtcgatcaggtgcggacgcaaggctcgccggtcaacgaatatcgcgtcgatctgagttcgccacgcctcggtcaggacaaactcgtcgatctctatgtcgctccggtgctgagcgaaccaggcggcgtcgtcatcgtctttcaggaacgctcgatggccgacaagatcgaccggcagttgacgcaccgcgccgccgcccgctcggtcaccggtctcgcctctagtctggcgcacgagatcaagaacccgctttccggtaaccgcggtgccgcccagctgctcgaacaatccgtcatcgacgacgatcgggcgctcacccgcctgatctgcgacgagaccgaccgcatcgtctcgctggtcgaccgaatggaggtcttttccgacgaacgcccggtgcgacgcatgccggtcaacatccattccgtgctcgaccacgtgaagcggctggcccagtcgggctttgcccgcaatatccgcatcaccgaaagttacgacccatcgctgccggcggtctatgccaatcgcgaccagcttgttcaggtcttcctcaatttggtgaagaacgccgccgaagcagtcggcgaccggccggacggcgagatcatgctgacgactgcctatcgccccggcatccgtctctcggtcgccggcacgcgcgaaaaaatctcgctgccgttggaattctgcgtccacgacaatggcccaggtgtgcccgccgatctgttgccgcatctcttcgatcccttcatcaccaccaagacgaatggcagcggcctcggcttggcgttggtcgccaagatcatcggcgatcacggcggcatcattgaatgcgacagccagaacagccgcacgactttccgtgttctcatgccggcgtcgaaagacgcctcgctcgaggatgcttcttccgcaagctcgacaggaccttctcgatga

SEQ ID NO: 1734 - protein, 383 aa, Rhizobium leguminosarum bv
MTKDTTSPPDQAGGTVAMAVLNAIQNPVVMVDESGFIAFANWEAEAFFGAAFASGALPDLDIHSFGSPLLALVDQVRTQGSPVNEYRVDLSSPRLGQDKLVDLYVAPVLSEPGGVVIVFQERSMADKIDRQLTHRAAARSVTGLASSLAHEIKNPLSGNRGAAQLLEQSVIDDDRALTRLICDETDRIVSLVDRMEVFSDERPVRRMPVNIHSVLDHVKRLAQSGFARNIRITESYDPSLPAVYANRDQLVQVFLNLVKNAAEAVGDRPDGEIMLTTAYRPGIRLSVAGTREKISLPLEFCVHDNGPGVPADLLPHLFDPFITTKTNGSGLGLALVAKIIGDHGGIIECDSQNSRTTFRVLMPASKDASLEDASSASSTGPSR

SEQ ID NO: 1735 - DNA, 1149 bp, Rhizobium meliloti
  CDS (1)..(1149): transl_table=11
atgaccgagaaggcaacggcaccgggggaaggtgccaacgatctttccatggccgtgctgaacgcgatccagaatccggtcatcctggtggacgagaacggcttcgtcgcctttgcgaactgggaggccgaatccttcttcggggccagcgccaaccatcttgcgcgccacgatatcagcgctttcattccgttcggcagcccgctcctgacgctgatcgagcaggttcgcgagcggcgggcggcggtcaacgagtaccgggtggacctcagctctcctcgccttggagccgacaagctcgtcgatctctatgtggccccggtactgtcgcaacccggatcggtggtgatcgtctttcaggagcggtccatggcggacaagatcgaccgccagctcacccaccgtgccgcagcgcggtccgtcaccggccttgcttcgatgctcgcccacgagatcaagaatccgctttcgggcattcgcggcgccgcgcagctcctggaaacctccgtcaatgacgaggatcgctccctgacgagactgatctgcgacgaaacggaccgcatcgtctcgctcgtggaccggatggaggtcttctccgacgagcgcccggtcgaccgcctgccgctcaacatccatgcggtgctcgaccacgtcaaggcgatcgccaaggccggctttgcccggagaatcaagatatcggaacattacgatccgtcgcttcccccggttttcgcgaaccgcgaccagttggttcaggtcttcctgaatctgatcaagaacgcggccgaggcgatcggcgacagggcggacggcgagattttgctgacgacggcctatcggccgggcattcgcctttcggtcgccggaacgcgcgaaaagatctcgctgcctctggaattctgcgtgcatgacaacggtccgggcgtccctcccgatctgctgccgcatcttttcgacccgttcatcaccaccaagacgaacgggtccggtctcggcctggcgcttgtggccaagatcatcggcggccacggcggcatcgtcgaatgcgacagccagcatagccgcacgaccttccgcgttctcatgccggcatccaaggggctggcggccgatgaagaaactccgatgacaaaaggaaccaatggatga

SEQ ID NO: 1736 - protein, 382 aa, Rhizobium meliloti
MTEKATAPGEGANDLSMAVLNAIQNPVILVDENGFVAFANWEAESFFGASANHLARHDISAFIPFGSPLLTLIEQVRERRAAVNEYRVDLSSPRLGADKLVDLYVAPVLSQPGSVVIVFQERSMADKIDRQLTHRAAARSVTGLASMLAHEIKNPLSGIRGAAQLLETSVNDEDRSLTRLICDETDRIVSLVDRMEVFSDERPVDRLPLNIHAVLDHVKAIAKAGFARRIKISEHYDPSLPPVFANRDQLVQVFLNLIKNAAEAIGDRADGEILLTTAYRPGIRLSVAGTREKISLPLEFCVHDNGPGVPPDLLPHLFDPFITTKTNGSGLGLALVAKIIGGHGGIVECDSQHSRTTFRVLMPASKGLAADEETPMTKGTNG

SEQ ID NO: 1737 - DNA, 1071 bp, Rhodobacter capsulatus
  CDS (1)..(1071): transl_table=11
atgaacctgcccccgcccggcatcatctggaactcgctgccgctgcccgcgctgatgctggacgtcaacgaccgggtgatcgagatcaacccggcggccgagcttttcctcaacctgtcggcgcgggcgctgaaggggcaggcgcttggcgagcggctggcgatttccgccccgctcgaggaaatctttgcccgggtgcgcaagaatcggtccgcgcttttcgtcaacgacgtcgatctgacgacgggcgaacgcgcgccggtgcaatgcaacctgcaggccgcgccgatcgccgacgatccggaaacggtgctgctgctgatttcgccgcgcgagatcgccgaccggctgggccgggccagcatggtgaaatcggcggcgcgctcggccggaatcggcatggccgagatgctggcgcatgagatcaagaacccgctggcggggatcgcgggggcggcgcagcttttgtcgatggggctttcgggcgaggatctggagctgaccgatctgatcgtcgatgaaacccgccgcatcgtgaaactgctggaacaggtcgagcagttcggcaatgtccgcccgcccgagatgaaaccggtcaacatccacgatgtgcttgatcgggcacggaaatctgcgggcgtcggctttggcgcgcatatgctgatcgtcgaggattacgacccgtccgtgccgccgacgctgggggatgccgaccagctgacacaggtgttcctgaaccttttgaagaacgcctccgaggccgcgaagggacaaggcacgatccggctgcgcaccttttacgattacgcgctgcggctgcggcggcccgatggcggcgggagcgctgtgccgctgcaggtcgaggtgatcgacgacggtccgggcattccggccgatatcgccagctcgatctttgaacccttcgtttccggacgcgagaacggcaccggccttggcctggcgctggtgtcaaagatcatctctgaacacaatggctggatcagcgtcgaaagcgcccccggccgcacccttttccgcatttccttgcccgtcgccccgaaggagctttga

SEQ ID NO: 1738 - protein, 356 aa, Rhodobacter capsulatus
MNLPPPGIIWNSLPLPALMLDVNDRVIEINPAAELFLNLSARALKGQALGERLAISAPLEEIFARVRKNRSALFVNDVDLTTGERAPVQCNLQAAPIADDPETVLLLISPREIADRLGRASMVKSAARSAGIGMAEMLAHEIKNPLAGIAGAAQLLSMGLSGEDLELTDLIVDETRRIVKLLEQVEQFGNVRPPEMKPVNIHDVLDRARKSAGVGFGAHMLIVEDYDPSVPPTLGDADQLTQVFLNLLKNASEAAKGQGTIRLRTFYDYALRLRRPDGGGSAVPLQVEVIDDGPGIPADIASSIFEPFVSGRENGTGLGLALVSKIISEHNGWISVESAPGRTLFRISLPVAPKEL

SEQ ID NO: 1739 - DNA, 1050 bp, Salmonella typhi
  CDS (1)..(1050): transl_table=11
atggcaagcggcatacagcccgatgctgggcagatcctcaattcgttaatcaacagcgtgctggtggtcgacgacgcgctggcaatccattacgccaaccctgccgcgcagcagttgctcgcgcaaagctcacgcaaactgttcgggacgccgttacctgaactgttgagctatttttcgttaaacattgacctgatgcgcgaaagtttagcggcaggacaaggctttaccgataacgaagtgacgctggtgattgatagtcgctcgcatattctctctttgaccgcccaacgtctgcccgacgattttatactgctcgaaatggcgccgatggataaccagcgtcgtctgagtcaggagcagttgcagcacgcgcagcaaatcgccgcccgcgatctggtgcgcggtctggcgcacgaaatcaaaaatccgctcggcggcctgcgcggcgcggcgcagctactcagcaaggcgctgcccgacccggcgctaacggaatataccaaagtcatcattgaacaggccgacaggctacgcaaccttgtcgatcgtttgctggggccgcagcacccgggaatgcacattaccgagagcatacataaagtcgcggagcgcgtggtggcgctggtgtcgatggaactgccggataatgtccggcttatccgcgattacgaccccagtctgccagaactgccgcacgacccggaacaaattgagcaagtactgctgaatattgtccgcaatgccttgcaggcgctggggccggaaggcggcgaaattacgctgcgtacccgtaccgccttccagttaacgctgcatggcgaacgctatcgcctggcggcgcgtatagacgttgaagacaatgggccgggcattcctccccatttacaggatacgctgttctacccgatggtcagcggtcgcgaaggcggcaccgggcttgggttatctatcgcccgcaatcttatcgatcaacacgccggcaaaattgaatttaccagttggccggggcataccgagttttcggtttacctgccgattcggaaatag

SEQ ID NO: 1740 - protein, 349 aa, Salmonella typhi
MASGIQPDAGQILNSLINSVLVVDDALAIHYANPAAQQLLAQSSRKLFGTPLPELLSYFSLNIDLMRESLAAGQGFTDNEVTLVIDSRSHILSLTAQRLPDDFILLEMAPMDNQRRLSQEQLQHAQQIAARDLVRGLAHEIKNPLGGLRGAAQLLSKALPDPALTEYTKVIIEQADRLRNLVDRLLGPQHPGMHITESIHKVAERVVALVSMELPDNVRLIRDYDPSLPELPHDPEQIEQVLLNIVRNALQALGPEGGEITLRTRTAFQLTLHGERYRLAARIDVEDNGPGIPPHLQDTLFYPMVSGREGGTGLGLSIARNLIDQHAGKIEFTSWPGHTEFSVYLPIRK

SEQ ID NO: 1741 - DNA, 21 bp, Artificial sequence
  primer
atggcaacaggcacgcagccc

SEQ ID NO: 1742 - DNA, 25 bp, Artificial sequence
  primer
ttatttcctgataggcaggtaaacc

SEQ ID NO: 1743 - protein, 360 aa, Artificial sequence
  consensus sequence
  Variant (2)..(3): Xaa in position 2 to 3 is any amino acid
  Variant (6)..(10): Xaa in position 6 to 10 is any amino acid
  Variant (12)..(95): Xaa in position 12 to 95 is any amino acid
  Variant (96)..(108): Xaa in position 96 to 108 is any or no amino acid
  Variant (110)..(112): Xaa in position 110 to 112 is any amino acid
  Variant (122)..(122): Xaa in position 122 is any amino acid
  Variant (124)..(124): Xaa in position 124 is any amino acid
  Variant (132)..(142): Xaa in position 132 to 142 is any amino acid
  Variant (143)..(146): Xaa in position 143 to 146 is any or no amino acid
  Variant (148)..(149): Xaa in position 148 to 149 is any amino acid
  Variant (151)..(154): Xaa in position 151 to 154 is any amino acid
  Variant (157)..(159): Xaa in position 157 to 159 is any amino acid
  Variant (161)..(161): Xaa in position 161 is any amino acid
  Variant (164)..(176): Xaa in position 164 to 176 is any amino acid
  Variant (177)..(178): Xaa in position 177 to 178 is any or no amino acid
  Variant (180)..(180): Xaa in position 180 is any amino acid
  Variant (182)..(186): Xaa in position 182 to 186 is any amino acid
  Variant (188)..(200): Xaa in position 188 to 200 is any amino acid
  Variant (201)..(204): Xaa in position 201 to 204 is any or no amino acid
  Variant (208)..(208): Xaa in position 208 is any amino acid
  Variant (210)..(210): Xaa in position 210 is any amino acid
  Variant (212)..(215): Xaa in position 212 to 215 is any amino acid
  Variant (217)..(218): Xaa in position 217 to 218 is any amino acid
  Variant (220)..(221): Xaa in position 220 to 221 is any amino acid
  Variant (223)..(224): Xaa in position 223 to 224 is any amino acid
  Variant (227)..(229): Xaa in position 227 to 229 is any amino acid
  Variant (232)..(233): Xaa in position 232 to 233 is any amino acid
  Variant (235)..(238): Xaa in position 235 to 238 is any amino acid
  Variant (239)..(266): Xaa in position 239 to 266 is any or no amino acid
  Variant (268)..(270): Xaa in position 268 to 270 is any amino acid
  Variant (272)..(285): Xaa in position 272 to 285 is any amino acid
  Variant (286)..(289): Xaa in position 286 to 289 is any or no amino acid
  Variant (291)..(297): Xaa in position 291 to 297 is any amino acid
  Variant (302)..(302): Xaa in position 302 is any amino acid
  Variant (304)..(304): Xaa in position 304 is any amino acid
  Variant (306)..(312): Xaa in position 306 to 312 is any amino acid
  Variant (314)..(314): Xaa in position 314 is any amino acid
  Variant (316)..(316): Xaa in position 316 is any amino acid
  Variant (318)..(322): Xaa in position 318 to 322 is any amino acid
  Variant (324)..(324): Xaa in position 324 is any amino acid
  Variant (329)..(336): Xaa in position 329 to 336 is any amino acid
  Variant (337)..(337): Xaa in position 337 is any or no amino acid
  Variant (339)..(339): Xaa in position 339 is any amino acid
  Variant (341)..(341): Xaa in position 341 is any amino acid
  Variant (343)..(345): Xaa in position 343 to 345 is any amino acid
  Variant (347)..(347): Xaa in position 347 is any amino acid
  Variant (350)..(350): Xaa in position 350 is any amino acid
  Variant (351)..(352): Xaa in position 351 to 352 is any or no amino acid
  Variant (354)..(354): Xaa in position 354 is any amino acid
  Variant (356)..(358): Xaa in position 356 to 358 is any amino acid
NXXAEXXXXXSXXXXXXXXXXXXXXXXXXXXXXXXXXXXXXXXXXXXXXXXXXXXXXXXXXXXXXXXXXXXXXXXXXXXXXXXXXXXXXXXXXXXXXXXXXXXXXXXXLXXXLAHEIKNPLXGXRGAAQLLXXXXXXXXXXXXXXXTXXIXXXXDRXXXLXDRXXXXXXXXXXXXXXXNXHXXXXXVXXXXXXXXXXXXXXXXXDYDXSXPXXXXDXXQXXQXXLNXXXNAXXAXXXXXXXXXXXXXXXXXXXXXXXXXXXXXXXXIXXXTXXXXXXXXXXXXXXXXXXLXXXXXXXDNGPXGXPXXXXXXXFXPXVXXXXXGXGLGLXXXXXXXXXHXGXIXXXSXPGXXXTXFXXXLP

SEQ ID NO: 1744 - protein, 35 aa, Artificial sequence
  protein pattern
  Variant (2)..(2): Xaa in position 2 is Asp or Asn
  Variant (4)..(4): Xaa in position 4 is Gly or Pro
  Variant (6)..(6): Xaa in position 6 is Ile, Leu or Val
  Variant (7)..(13): Xaa in position 7 to 13 is any amino acid
  Variant (14)..(14): Xaa in position 14 is Ile, Leu, Met or Val
  Variant (16)..(16): Xaa in position 16 is any amino acid
  Variant (17)..(17): Xaa in position 17 is Ala or Pro
  Variant (18)..(18): Xaa in position 18 is Phe, Leu or Met
  Variant (19)..(19): Xaa in position 19 is Phe, Ile or Val
  Variant (20)..(20): Xaa in position 20 is Ser or Thr
  Variant (21)..(21): Xaa in position 21 is Ala, Gly, Asn, Ser or Thr
  Variant (22)..(22): Xaa in position 22 is His, Lys or Arg
  Variant (23)..(24): Xaa in position 23 to 24 is any amino acid
  Variant (26)..(26): Xaa in position 26 is Asn, Gln, Ser or Thr
  Variant (31)..(32): Xaa in position 31 to 32 is any or no amino acid
  Variant (34)..(34): Xaa in position 34 is any amino acid
  Variant (35)..(35): Xaa in position 35 is Ala, Cys, Asp, Gly, Asn, Ser, Thr or Val
DXGXGXXXXXXXXXFXXXXXXXXXGXGLGLXXAXX

SEQ ID NO: 1745 - protein, 24 aa, Artificial sequence
  protein pattern
  Variant (2)..(3): Xaa in position 2 to 3 is any amino acid
  Variant (4)..(6): Xaa in position 4 to 6 is any or no amino acid
  Variant (9)..(9): Xaa in position 9 is Ile or Val
  Variant (14)..(14): Xaa in position 14 is Ala, Gly or Ser
  Variant (16)..(16): Xaa in position 16 is any amino acid
  Variant (19)..(19): Xaa in position 19 is Ala or Ser
  Variant (20)..(20): Xaa in position 20 is Ala or Thr
  Variant (24)..(24): Xaa in position 24 is Ala, Asp, Glu, Gln, Ser or Thr
LXXXXXHEXKNPLXGXRGXXQLLX

SEQ ID NO: 1746 - protein, 27 aa, Artificial sequence
  protein pattern
  Variant (4)..(4): Xaa in position 4 is any amino acid
  Variant (6)..(6): Xaa in position 6 is Ile, Leu or Val
  Variant (8)..(13): Xaa in position 8 to 13 is any amino acid
  Variant (14)..(14): Xaa in position 14 is Ala, Asp, Glu, Gly or Ser
  Variant (15)..(15): Xaa in position 15 is any amino acid
  Variant (16)..(16): Xaa in position 16 is Ile, Leu or Met
  Variant (17)..(17): Xaa in position 17 is any amino acid
  Variant (19)..(19): Xaa in position 19 is Ala, Leu or Val
  Variant (20)..(20): Xaa in position 20 is any amino acid
  Variant (23)..(23): Xaa in position 23 is Ile, Leu, Met or Val
  Variant (24)..(25): Xaa in position 24 to 25 is any amino acid
DYDXSXPXXXXXXXXXXQXXLNXXXNA

SEQ ID NO: 1747 - protein, 22 aa, Artificial sequence
  protein pattern
  Variant (2)..(7): Xaa in position 2 to 7 is any or no amino acid
  Variant (9)..(10): Xaa in position 9 to 10 is any amino acid
  Variant (11)..(11): Xaa in position 11 is Glu or Gln
  Variant (12)..(12): Xaa in position 12 is Ala, Ser, Thr or Val
  Variant (15)..(15): Xaa in position 15 is Ile or Leu
  Variant (16)..(17): Xaa in position 16 to 17 is any amino acid
  Variant (19)..(19): Xaa in position 19 is Ile, Leu, Met or Val
  Variant (20)..(20): Xaa in position 20 is Asp, Glu, Asn, Gln or Ser
  Variant (22)..(22): Xaa in position 22 is Leu or Met
LXXXXXXIXXXXDRXXXLXXRX

SEQ ID NO: 1748 - DNA, 765 bp, Escherichia coli
  CDS (1)..(765): transl_table=11
atgaacgatctattttcactggcaggaaaaaatatcttgattaccggttcagcacagggcattggctttttactggcaaccggcctgggtaaatatggcgcacaaataattattaatgatattactgccgaacgcgcagaacttgctgtagaaaaactccaccaggagggtattcaggccgttgccgcaccttttaatgttactcataaacatgaaattgatgccgccgttgaacatatcgaaaaggacatcggccccattgatgtgctggtgaataacgccggtatccagcgccgtcatccttttactgagttccctgaacaagagtggaatgatgtgatcgcagtaaaccagaccgccgtgttcctggtatcgcaagcggtaactcgtcacatggttgaacgcaaggcaggtaaagttattaatatttgctcgatgcaaagcgaactgggacgtgacaccatcaccccttatgccgcatcgaaaggggcggtaaaaatgctcacccgcggcatgtgcgtcgagctggcgcgccacaatattcaggtcaacggtattgcgccgggctatttcaaaacagaaatgactaaagcactggttgaggacgaagccttcaccgcctggttgtgcaaacggacccccgccgcacgctggggagatccgcaggaactgattggtgctgcggtgttcctttcttcaaaagcctctgatttcgtaaacggccacctgttgtttgttgatggcggcatgttagtggctgtttaa

SEQ ID NO: 1749 - protein, 254 aa, Escherichia coli
MNDLFSLAGKNILITGSAQGIGFLLATGLGKYGAQIIINDITAERAELAVEKLHQEGIQAVAAPFNVTHKHEIDAAVEHIEKDIGPIDVLVNNAGIQRRHPFTEFPEQEWNDVIAVNQTAVFLVSQAVTRHMVERKAGKVINICSMQSELGRDTITPYAASKGAVKMLTRGMCVELARHNIQVNGIAPGYFKTEMTKALVEDEAFTAWLCKRTPAARWGDPQELIGAAVFLSSKASDFVNGHLLFVDGGMLVAV

SEQ ID NO: 1750 - DNA, 849 bp, Glycine max
  CDS (1)..(849)
atggctacgcaactttccgaccgcctcgagccatggcacaccctcgccggaaaagtcgtaatggtcaccggcgcctcctccggcctcggccgcgacttctgcctcgacctcggtcgggctggctgtcgggtcgtcgtggcggcccgcagagtcgaccgcctcgagtccctgtgcgacgaaattaacagcatggccgccggagacggtggccgaagccgccgcgccgtcgccgttgaactcgatgtcgctgccgatgaccccgccgtcgacaaatacgtgcagaaggcgtgggaggcgtttggtcacattgatgctcttatcaacaacgctggtgtcagagggaatgtcaaatcacctttggaattgtctgaggaggaatggaaccatgcgttcagaacaaacttaactgggacatggttggtctcaaaatatgtatgcaaacgcatgcgtgatgcacaaagaaaaggatcaatcattaatattgcttcaattgctggtttgaaccgtggtcaattgcctggaggtgctgcatattcatcctcaaaagcaggcgtcaatatgctaacaagggtcatggcattagaattgggggcacacaaaatcagagtgaattccatatcacctggacttttcaaatctgaaatcactgaaaaactaatggagaaaaattggttgaataatgtggccatgaaaacagtacccttgagaaaatttggcacttctgatccagcattaacatcgctggctcgttatttaattcacgattcttctgagtatgtgtcaggcaacaattttgttgtggatgctggagccaccttaccaggtgtgcctatttattcctccctataa

SEQ ID NO: 1751 - protein, 282 aa, Glycine max
MATQLSDRLEPWHTLAGKVVMVTGASSGLGRDFCLDLGRAGCRVVVAARRVDRLESLCDEINSMAAGDGGRSRRAVAVELDVAADDPAVDKYVQKAWEAFGHIDALINNAGVRGNVKSPLELSEEEWNHAFRTNLTGTWLVSKYVCKRMRDAQRKGSIINIASIAGLNRGQLPGGAAYSSSKAGVNMLTRVMALELGAHKIRVNSISPGLFKSEITEKLMEKNWLNNVAMKTVPLRKFGTSDPALTSLARYLIHDSSEYVSGNNFVVDAGATLPGVPIYSSL

SEQ ID NO: 1752 - DNA, 970 bp, Glycine max
  CDS (69)..(917)
gtttccattgccgcgacatctgaattcctccttgtcactcataatcaccaaatagaagccataaacaaatgaatgccatagcagcagaacaagtgctggagccatggcacaagctagacgacaaagtcgttttggtgacgggtgcttcctcggggctcgggcgagatttctgcatcgacctcgccaaagctggctgctgtgtcgtcgcggcagctcgtcgcctcgatcgcctcacttccctctgccacgaaatcaaccaccgatggccctcgaacgtcggaatccaccgcgcggtggcggtggagcttgatgtcgccgccgatggccccgccatcgacagggctgtgcagaaggcctgggacgcctttggccgcgttgattccttgattaacaacgctggtgtcagaggaagtgttaaatcacccttgaaattgtctgaagaggaatgggatcatgtcttcaagactaacctaactggttgttggttggtgtcaaaatatgtatgcaaacgcatgtgtgatatccagcttaagggatcaattattaatatttcttcagtttctggtttaaatcgggggcaattgcctggagctgctgcatatgcatcttcgaaggcaggggtaaacatgctgactaaggtcatggctatggaattggggatgcacaaaattagagtaaattccatatcccctggaattttcaaatctgaaataactgaaaatttattacaaaaagattggctgaatgatgtggtcaggaaaataatgcctttgagaagattaggtacttcagatccagcattaacatctctagctcgttatcttattcatgattcttctgagtacgtcacgggcaacaattttattgtcgattatggaggcaccttaccaggtgtaccaatttattcttctctgtaaattttggtacattatgcactaacgaaaagtaatactatgaattattccattac

SEQ ID NO: 1753 - protein, 282 aa, Glycine max
MNAIAAEQVLEPWHKLDDKVVLVTGASSGLGRDFCIDLAKAGCCVVAAARRLDRLTSLCHEINHRWPSNVGIHRAVAVELDVAADGPAIDRAVQKAWDAFGRVDSLINNAGVRGSVKSPLKLSEEEWDHVFKTNLTGCWLVSKYVCKRMCDIQLKGSIINISSVSGLNRGQLPGAAAYASSKAGVNMLTKVMAMELGMHKIRVNSISPGIFKSEITENLLQKDWLNDVVRKIMPLRRLGTSDPALTSLARYLIHDSSEYVTGNNFIVDYGGTLPGVPIYSSL

SEQ ID NO: 1754 - DNA, 756 bp, Xanthomonas campestris pv. campestris
  CDS (1)..(756): transl_table=11
atgagcaatccgttcagtctcgaaggcaaggtcgcactggtcaccggtgccaacactggcctgggccagggcatcgcgctggcactggcagaggcgggcgccgacatcgccgccgccggcatccaggcaccgaccgagaccgaagaaaaggtcaaggcgatgggccgccgcttcgtcgccatcgaagccaacctgatcagcatcgagccggtgcagcgcatcctcgacgaaacccttgccggcctgggccgcctggacatcctggtcaacaatgctggcctgatccgccgcaccgatgcggtggatttcagcgagcaggattgggacgacgtgatgaacgtcaacctgaaatcggcgttcttcatgtcgcaggccgccggccgccacttcatcacgcagggcagcggcaagatcatcaacatcgcctcgatgctgtcgttccagggcggcatccgcgtgccgtcctacaccgccagcaagtccggcatcgccggcatcacccgcctgctggccaacgagtggggcagcaagggtgtgaccgccaacgccatcgcccccggctacatggccaccgacaacaccgcgcagctgcgtgccgaccaggaccgcaacaagtccatcctggaccgcatcccggccgcgcgctggggtgtgccggccgacctcggcggcgcggcggtgttcctggccagcagcgcctctgactacgtcaacggcgccatcatcccggtcgacggcggctggctggcgcgctaa

SEQ ID NO: 1755 - protein, 251 aa, Xanthomonas campestris pv. campestris
MSNPFSLEGKVALVTGANTGLGQGIALALAEAGADIAAAGIQAPTETEEKVKAMGRRFVAIEANLISIEPVQRILDETLAGLGRLDILVNNAGLIRRTDAVDFSEQDWDDVMNVNLKSAFFMSQAAGRHFITQGSGKIINIASMLSFQGGIRVPSYTASKSGIAGITRLLANEWGSKGVTANAIAPGYMATDNTAQLRADQDRNKSILDRIPAARWGVPADLGGAAVFLASSASDYVNGAIIPVDGGWLAR

SEQ ID NO: 1756 - DNA, 735 bp, Bombyx mori
  CDS (1)..(735)
atggataaatattttgaaggaaaaagaatacttgttactggtggttgtcaagggataggtcgtggattagtcttagaactttggagactgggtgcgaatgttgttactgtttcaaataatgctgaaaacttaaacaaactcaaagaggaatatccatccattgaaatagtgtacgttgatcttcgaaattggaataaaacaagagaagtcattgatgctcttggagtttttgatggccttgtcaataatgccggtattgctataatcgaaccttttttggaatgcaaaaaagaaagcctaaatgaaacctttgatgtaaatgttaatgccgttattaatgtgagtcaagtggtagcgaaaaaaatgatagaaaacaaaagaaaaggttccatcgtaaatatttcatcgcaagcttctaaggcagctctaaaggatcacgtagcatattgtgcctcaaaaggtgctctagacgcactaaccagggttatggccctagaactgggacctttgggcatacgaattaatacagttaaccctactgtcattatgactgaaatgggtagaaaagtttgggcggaaccatcaaaatcaaaggaaatgttatctaaaatacctcttggaagattcggtgaggtggaggaagtggttaatgcggtaatattcctgctttgtgacagtgctagtttaatttctggagtacaattaccaattgacggagggtttttggcaacataa

SEQ ID NO: 1757 - protein, 244 aa, Bombyx mori
MDKYFEGKRILVTGGCQGIGRGLVLELWRLGANVVTVSNNAENLNKLKEEYPSIEIVYVDLRNWNKTREVIDALGVFDGLVNNAGIAIIEPFLECKKESLNETFDVNVNAVINVSQVVAKKMIENKRKGSIVNISSQASKAALKDHVAYCASKGALDALTRVMALELGPLGIRINTVNPTVIMTEMGRKVWAEPSKSKEMLSKIPLGRFGEVEEVVNAVIFLLCDSASLISGVQLPIDGGFLAT

SEQ ID NO: 1758 - DNA, 756 bp, Mesorhizobium loti MAFF303099
  CDS (1)..(756): transl_table=11
atgtcggccaatctgttcgatctcagcgggcgccaggcgctcgtaaccggctcgtcgcaaggcattgggctcgctctggccaaggggctggcgcaagccggcgcaagcgtgatcctcaacggccgtgacacggcgaagctcgccgccacggcggcgcagatccctggagcgcaaacgcttgccttcgacgcgaccgagcatgacgccgtccgttccgcgatcgacaatttcgagctgtcaggcggaccgatcgacatattggtaaacaatgccggcatgcagttccgcacgccgctcgaggattttccggccgatgcattcgagcggctgctgcagaccaatgtcgccagcgtcttccacgtcggccaggcggtcgcgcgccacatgatcaggcggggccgcggcaagatcatcaacatcgcctccgtgcagacagcactcgcccgccccggcatcgccccctacacggcgacaaaaggcgcggtcggcaacctgaccaaaggcatggcgacggactgggccaaacacggcctgcaatgcaacgccatcgcccccggttatttcgacacgccgctcaatgcggcccttgtcgccgatccggctttcagcggctggctcgaaaagcgcaccccggccggccgctggggcaaggtggaggaactggtcggcgcctgcgtgttcctggcctccgacgcctcgtccttcgtcaacggccatatcctttatgtcgacggcggcatcaccgcatcgatctga

SEQ ID NO: 1759 - protein, 251 aa, Mesorhizobium loti MAFF303099
MSANLFDLSGRQALVTGSSQGIGLALAKGLAQAGASVILNGRDTAKLAATAAQIPGAQTLAFDATEHDAVRSAIDNFELSGGPIDILVNNAGMQFRTPLEDFPADAFERLLQTNVASVFHVGQAVARHMIRRGRGKIINIASVQTALARPGIAPYTATKGAVGNLTKGMATDWAKHGLQCNAIAPGYFDTPLNAALVADPAFSGWLEKRTPAGRWGKVEELVGACVFLASDASSFVNGHILYVDGGITASI

SEQ ID NO: 1760 - DNA, 777 bp, Mesorhizobium loti MAFF303099
  CDS (1)..(777): transl_table=11
atgaacagcaccggcatcgatctctccgccttcagcctggccggcaagcgcattctggtcaccggcgccaacaccggcatcggacaaggcattgtcctctcgatcgcgcgcgccggcggtgtggtgatcggcgtcggccgttcgtcgatggacgagacggcgagcaaggtcgcggccatcggtgccaggttcgagacggtgagcgccgaccttgccgacacggcgaccgccggtcctatgctcgatcgggtctgggacgaaagcgggccgctcgacgggttggtcaacaatgccggtatcatccgacgcgccgatgcggtcgatctgaccgagaccgactgggacgatgtcatggacgtcaatttgaagacggtctttctgctttgccagtccttcgccaggcgcgcccttgccgacggtcgccggggcaagatcgtcaacatcgcctcggtgctgagtttccagggcggcatccgcgtcgcctcctacaccgcctcgaaacatggcgtgctcgggatcacccggctgctcgcctgcgaatgggcggccaagggcatcaacgtcaacgccatcgcgccgggctatgtcgagaccaacaacacgcaggcgctgcgtgccgaccctgaccgcagcgccgccattctcggccgcattccggcggggcggtggggcgagccttccgatattggcgatgccgccgtcttccttctggcccgggcttccgactatatgcatggcgcggcggtgccggtggatggcggctggctggcgcgatga

SEQ ID NO: 1761 - protein, 258 aa, Mesorhizobium loti MAFF303099
MNSTGIDLSAFSLAGKRILVTGANTGIGQGIVLSIARAGGVVIGVGRSSMDETASKVAAIGARFETVSADLADTATAGPMLDRVWDESGPLDGLVNNAGIIRRADAVDLTETDWDDVMDVNLKTVFLLCQSFARRALADGRRGKIVNIASVLSFQGGIRVASYTASKHGVLGITRLLACEWAAKGINVNAIAPGYVETNNTQALRADPDRSAAILGRIPAGRWGEPSDIGDAAVFLLARASDYMHGAAVPVDGGWLAR

SEQ ID NO: 1762 - DNA, 774 bp, Thermotoga maritima MSB8
  CDS (1)..(774): transl_table=11
gtgaatattcttgaaaagcttttctctttgaaaagaaaggtagctctggtgactggtggaggacagggcatcgggaaggccatcgcccaggcgctggcagcggcgggtgcagctgttttgatcatggacataaacgaagaaacagccagaagaacggtcgaagagataaaagagaaaggtggcgaagcagatttctatgttggggatgtgacgaaagaagaagattgttttggagcggtcaaaaaggcgctggataggtgggggaaactcgacataggagtcaacaacgcgggaataggagactggtgtgaagcggagaattatccggttgagaagtggaaaaaggtcatagacgtgaatctggttggggtgtttctttccgcaaaagcggagttccacgctatgaaggaaagaaaatacggaaagatcataaacatcgcgtccatgtccggacacatcgtgaacaaacctcagaagcagacagcttacaacgcttcgaaagcgggtgtgatccatctcaccagatctctggccgccgagtgggccccgtacggaatcagggtgaacagcataagccccggatacatcagaacacctctcatagaatctccaaacgtgaaagatcttgttcccctctggctcgacatgatccctcttggaagactgggagaggtggacgatctgataggagctgctatcttccttgcaagtcccgcctcagattacatgacagggcacgatcttgtgatagacggaggctacaccgtctggtga

SEQ ID NO: 1763 - protein, 257 aa, Thermotoga maritima MSB8
MNILEKLFSLKRKVALVTGGGQGIGKAIAQALAAAGAAVLIMDINEETARRTVEEIKEKGGEADFYVGDVTKEEDCFGAVKKALDRWGKLDIGVNNAGIGDWCEAENYPVEKWKKVIDVNLVGVFLSAKAEFHAMKERKYGKIINIASMSGHIVNKPQKQTAYNASKAGVIHLTRSLAAEWAPYGIRVNSISPGYIRTPLIESPNVKDLVPLWLDMIPLGRLGEVDDLIGAAIFLASPASDYMTGHDLVIDGGYTVW

SEQ ID NO: 1764 - DNA, 753 bp, Bacillus halodurans C-125
  CDS (1)..(753): transl_table=11
atgcaattattctctttagaagggaagatcgcgttagttacgggagctagccgtgggcttgggcaagggatggccgttggacttgcagaggctggagcggatgttattggcgctgggattagtgatatgtctgaaacgcgacagcagatcgaatctttaggtcgaactttttacgagctgaaagcagatctatttgaggaaggggccggaaagcaattaatcgctgatgcgattgaaaaggcaggacgtatcgatattctcgtcaacaatgcggggattatacggcgcaacgaagcagaggctttcaccgataaagattggaatgatgtcatcaatgtcaatttaaatgctgtatttcaaatgtgccgcgaagcagggaatcatatgatcgaaaacgggtttggacggattatcaacattgcctctatgctttcgtttcaaggtggactcagagttcctgcctatacggctagcaaacatgccatcgctggacttacgaagtctcttgccaacgagtggtcaaaaaaaggagtcaatgtaaacgccattgccccagggtatatggtgacagataatacggcagcgcttcgtgccgatgaggtgagaaacgcctatattacgtcacgaattccaaaaggtgagtggggaacgcctgccgatttaaaaggaccggttgtctttctcgcatcggaagcatcaagctatgttaacggccatattttgtgtgtagatggcggttggatgagttcatag

SEQ ID NO: 1765 - protein, 250 aa, Bacillus halodurans C-125
MQLFSLEGKIALVTGASRGLGQGMAVGLAEAGADVIGAGISDMSETRQQIESLGRTFYELKADLFEEGAGKQLIADAIEKAGRIDILVNNAGIIRRNEAEAFTDKDWNDVINVNLNAVFQMCREAGNHMIENGFGRIINIASMLSFQGGLRVPAYTASKHAIAGLTKSLANEWSKKGVNVNAIAPGYMVTDNTAALRADEVRNAYITSRIPKGEWGTPADLKGPVVFLASEASSYVNGHILCVDGGWMSS

SEQ ID NO: 1766 - DNA, 762 bp, Escherichia coli O157:H7 EDL933
  CDS (1)..(762): transl_table=11
  misc_feature (246)..(246): r is g or a
  misc_feature (298)..(298): r is g or a
atgattttaagtgcattttctctcgaaggtaaagttgcggtcgtcactggttgtgatactgggctgggccaggggatggcgttggggctggcgcaagcgggctgtgacattgttggcattaacatcgttgaaccgactgaaaccatcaagcaggtcacggcgctggggcgtcgttttttaagcctgaccgccgatctgcgaaagattgatggtattcctggactgctggatcgcgcggtagctgartttggtcatattgatatcctggtgaataacgccggattgattcgccgcgaaratgctctcgagttcagcgaaaaggactgggacgatgtcatgaacctgaatatcaagagcgtattcttcatgtctcaggcagcggcgaaacacttcatcgcgcaaggcaatggcggcaagattatcaatatcgcgtcaatgctctccttccagggcgggatccgtgtgccttcttataccgcatcaaaaagcggcgtgatgggcgtgacgcgattgatggcgaatgaatgggctaaacacaacattaatgttaatgcgatagctccgggttacatggcgaccaacaatacccaacaactgcgggcagatgaacaacgtagcgcggaaattctcgaccgcattccagctggccgttggggactgccgagtgacctgatggggccggtagtgtttcttgcctccagcgcttcagattatgtaaatggttataccattgctgtggatggcggttggctggcgcgttaa

SEQ ID NO: 1767 - protein, 253 aa, Escherichia coli O157:H7 EDL933
MILSAFSLEGKVAVVTGCDTGLGQGMALGLAQAGCDIVGINIVEPTETIKQVTALGRRFLSLTADLRKIDGIPGLLDRAVAEFGHIDILVNNAGLIRREBALEFSEKDWDDVMNLNIKSVFFMSQAAAKHFIAQGNGGKIINIASMLSFQGGIRVPSYTASKSGVMGVTRLMANEWAKHNINVNAIAPGYMATNNTQQLRADEQRSAEILDRIPAGRWGLPSDLMGPVVFLASSASDYVNGYTIAVDGGWLAR

SEQ ID NO: 1768 - DNA, 816 bp, Streptococcus pneumoniae TIGR4
  CDS (1)..(816): transl_table=11
atgacaaatacatcattctcaattgagcagttttctttaaaaggaaaaattgctctcatcaccggcgcttcttatggaattggatttgctattgccaaatcctacgctgaagccggcgctactattgtctttaacgatatcaatcaagatctggtcaataaagggattgaagcttatcgtgaagttggcatccaagcccatggatatgtctgtgacgtgacagacgaggacggtatccaagccatggtcaagcaaatcgaacaagaggttggtgtcattgacatcctcgttaataacgctggtattatccgccgagttccaatgtgcgaaatgagcgccgctgatttccgtaaggtcatcgatattgacttaaacgcaccatttatcgtttcaaaggcagttattccttctatgataaagaaagggcatggaaagattatcaatatttgttcgatgatgagcgaactgggacgtgaaacagttagcgcttatgctgctgctaaagggggcttgaaaatgttgacccgcaacattgcgtctgaatacggtggagccaatatccaatgtaacggaattggaccgggttatattgccactcctcaaacagcacctcttcgtgaattgcaagaagatggttctcgccacccatttgaccagttcatcattgcaaaaacacctgctgcacgttggggaaatactgaagatttgatgggccctgctgtctttctcgctagtgatgccagcaattttgtcaatggccacatcctatatgtagatggcggtatcttagcctacatcggaaaacaacctgagtaa

SEQ ID NO: 1769 - protein, 271 aa, Streptococcus pneumoniae TIGR4
MTNTSFSIEQFSLKGKIALITGASYGIGFAIAKSYAEAGATIVFNDINQDLVNKGIEAYREVGIQAHGYVCDVTDEDGIQAMVKQIEQEVGVIDILVNNAGIIRRVPMCEMSAADFRKVIDIDLNAPFIVSKAVIPSMIKKGHGKIINICSMMSELGRETVSAYAAAKGGLKMLTRNIASEYGGANIQCNGIGPGYIATPQTAPLRELQEDGSRHPFDQFIIAKTPAARWGNTEDLMGPAVFLASDASNFVNGHILYVDGGILAYIGKQPE

SEQ ID NO: 1770 - DNA, 804 bp, Clostridium acetobutylicum ATCC 824
  CDS (1)..(804): transl_table=11
atgaatatacttaaggatttttcattggaaggtaaaattgcattagtaaccggtgcatcatatggtattggatttgctattgcaagatcctatgcaaatgcaggagcaacaatagtattcaatgatattaaccaagatttagttgataaaggactaaaggcatacgaggcagaaggaataaaagcacatggctatgtatgtgatgttacagacgaagataaggtaaatggatttgttaaaaaagtagaaaaagaagttggattaatagatattcttgtaaataatgcaggaataatcaaacgtattccaatgcttgaaatgaaagcagaagattttagaaaggttatagatgttgatttaaatgcaccatttatagtatctaaagctgtaatacctggaatgattaaaaaaggacacggaaaaataataaatatatgttcaatgatgagtgaacttggaagagaaactgtttctgcatatgcagctgctaaaggtggacttaagatgctaacaagaaacatcgcatctgaatatggtgaacataatatccaatgtaacggaataggacctggatatatagctacaccacaaactgcgccacttagggaacttcaagcagatggttcaaaacatccgtttgatcaatttataattgcaaaaactccagcagcacgttggggaacaccagaggatttgatgggaccagctgtattcttagcatctgatgcctcaaactttgtaaatggacatgttttatatgtagatggtggaattttagcttacattggaaaacaaccgcaataa

SEQ ID NO: 1771 - protein, 267 aa, Clostridium acetobutylicum ATCC 824
MNILKDFSLEGKIALVTGASYGIGFAIARSYANAGATIVFNDINQDLVDKGLKAYEAEGIKAHGYVCDVTDEDKVNGFVKKVEKEVGLIDILVNNAGIIKRIPMLEMKAEDFRKVIDVDLNAPFIVSKAVIPGMIKKGHGKIINICSMMSELGRETVSAYAAAKGGLKMLTRNIASEYGEHNIQCNGIGPGYIATPQTAPLRELQADGSKHPFDQFIIAKTPAARWGTPEDLMGPAVFLASDASNFVNGHVLYVDGGILAYIGKQPQ

SEQ ID NO: 1772 - DNA, 771 bp, Agrobacterium tumefaciens str. C58
  CDS (1)..(771): transl_table=11
atgagcaatcagatcatcttcgatctcggcgggcgcacggcgcttgttaccggttcttcacgcggcctcggccgcgcaatggcagaaggacttgccgtcgcgggggcacgcatcctcattaacggcaccgatccgtcgcgtgtcgcgcaaacggttcaggagtttcgcaatgtcggccatgacgccgaggcggtcgcctttgacgtcacctccgaaagcgaaatcattgaggctttcgccaggcttgatgagcaggggatagacgtcgacattctcgtcaacaatgccggcatccagttccgcaaaccgatgatcgagctggagacggccgactggcagcgggtaatcgacaccaacctcactagcgccttcatgattggccgtgaggcggcaaaacggatgatcccgcggggatatggcaagatcgtcaatatcggctcgctgaccagcgaactggcccgcgcgacggtggcgccctacaccgtggccaagggcggcatcaagatgctgacccgcgccatggcggcggaatgggcgcaatacggcattcaggcgaacgccatcggccccggctacatgctgaccgacatgaatcaggcattgatcgacaatccggaatttgacgcctgggtgaaggcgcgcacgcccgcgaaacgctggggcaagccgcaggaacttgtcggaaccgccgtgttcctgtctgcttcggcctccgactacgtcaatggccagataatctatgtcgatggtggaatgctgtcggttctctag

SEQ ID NO: 1773 - protein, 256 aa, Agrobacterium tumefaciens str. C58
MSNQIIFDLGGRTALVTGSSRGLGRAMAEGLAVAGARILINGTDPSRVAQTVQEFRNVGHDAEAVAFDVTSESEIIEAFARLDEQGIDVDILVNNAGIQFRKPMIELETADWQRVIDTNLTSAFMIGREAAKRMIPRGYGKIVNIGSLTSELARATVAPYTVAKGGIKMLTRAMAAEWAQYGIQANAIGPGYMLTDMNQALIDNPEFDAWVKARTPAKRWGKPQELVGTAVFLSASASDYVNGQIIYVDGGMLSVL

SEQ ID NO: 1774 - DNA, 756 bp, Agrobacterium tumefaciens str. C58
  CDS (1)..(756): transl_table=11
gtgggccttaatttgttcgatctttccggccgccgcgccctgatcacgggttcgtcccagggcatcggtttcgcgctggcgcaagggctttcggaagccggggcggaagtggtgctgaacgggcgcgacgaagcgaagctgaaagccgccgctgccggcatcaagggcgcgagaacacttgccttcgacgccacagatcatggcgcggtgcgcgaggctatcgaccgcttcgaggcggaggttggcgcgatcgacattctcgtcaacaatgccggcatgcagcaccgcacgccgctcgaggattttccggccgatgccttcgagcgcctgctgcaaaccaacatcgcctcggtattccacgtcggacaggccaccgcgcgccacatgatttcgcgcgggcgcggcaagatcatcaatatcgccagcgttcagacagcacttgcccgccccggcatcgcaccctacaccgccaccaagggcgccgtcggcaatctgactaagggcatggcgacggactgggcaaaatatggcctgcagtgcaatgccatagcacccggttatttcgataccccgctaaacgccgcccttgtcgcagacgagacgttttcggcctggcttgaaaagcgcacgccggccggacgctggggcaaggtggaagagcttgtcggcgcctgcattttcctgtcgtccgacgcctcgtccttcgtgaacggccatattctctacgtcgacggcggcatcaccgcctcgctttaa

SEQ ID NO: 1775 - protein, 251 aa, Agrobacterium tumefaciens str. C58
MGLNLFDLSGRRALITGSSQGIGFALAQGLSEAGAEVVLNGRDEAKLKAAAAGIKGARTLAFDATDHGAVREAIDRFEAEVGAIDILVNNAGMQHRTPLEDFPADAFERLLQTNIASVFHVGQATARHMISRGRGKIINIASVQTALARPGIAPYTATKGAVGNLTKGMATDWAKYGLQCNAIAPGYFDTPLNAALVADETFSAWLEKRTPAGRWGKVEELVGACIFLSSDASSFVNGHILYVDGGITASL

SEQ ID NO: 1776 - DNA, 744 bp, Agrobacterium tumefaciens str. C58
  CDS (1)..(744): transl_table=11
atgaaaaatcccttttcgcttgagggccgcaaggcgctcgtaacgggcgcgaatacggggcttggccaggcgattgcggtgggtcttgccgctgccggtgcggaggtggtctgcgccgctcgccgtgcgccggacgaaacgcttgatatcatcgcaaaagacggcggcaatgcgagtgcgctgctcatcgattttgccgatccgctggcggcgaaggatagctttaccgacgccggtttcgatattctcgtcaacaatgccggcatcatccgccgcgccgattccgtcgagttttccgaactcgactgggacgaggtgatggacgtcaatctcaaggcgctgtttttcaccacgcaggccttcgcgaaggagcttttggcgaaaggtcggtccggcaaggtggtcaatatagcctcgctcctgtcgtttcagggcggcattcgtgtgccgtcctacaccgcggcgaaacatggcgttgcaggtctcaccaagcttctggcgaatgaatgggcggcaaagggcatcaatgtgaacgctattgcacccggttacatcgaaaccaacaataccgaggcgctgcgcgccgatgcagcccgcaacaaggccattctggagcgtattccggccggccgctgggggcattcggaagacattgccggggcggcggttttcctgtcatctgcggcggcagattatgtgcatggcgctattctcaacgtcgatggcggctggctggcgcgctga

SEQ ID NO: 1777 - protein, 247 aa, Agrobacterium tumefaciens str. C58
MKNPFSLEGRKALVTGANTGLGQAIAVGLAAAGAEVVCAARRAPDETLDIIAKDGGNASALLIDFADPLAAKDSFTDAGFDILVNNAGIIRRADSVEFSELDWDEVMDVNLKALFFTTQAFAKELLAKGRSGKVVNIASLLSFQGGIRVPSYTAAKHGVAGLTKLLANEWAAKGINVNAIAPGYIETNNTEALRADAARNKAILERIPAGRWGHSEDIAGAAVFLSSAAADYVHGAILNVDGGWLAR

SEQ ID NO: 1778 - DNA, 771 bp, Agrobacterium tumefaciens str. C58
  CDS (1)..(771): transl_table=11
atgacatatccttcgcaaatccccaacatctcgaagctgtttgacctttccggtcggagggccgtcatcacgggcggcgctcgggggatcgggcgcgctatcgctgacggcttcttagaagtgggagctgatgtcgtctgcatcgaccgtggatgggaaagctctgacctcccggccgataaccggcagattgtcacggccgatcttagcgaccgcagcgacctgaagcgcggattcgatgaagctgtggagcgactggggggccagatcgatgtccttgtcaacaacgcaggcatctgggacgacacgccgtcgctccatatggagcttgagatgtgggacaggatcatcgaggtcaatctgactgcggccttcgcgctgagcaggcatgcagccaggctgatgcttccccgaggccgcggacgaataataaacattggctccatccgcagtctgaggggaggccacaatgcggctgcctatgcagccagcaagggagggatcgccttgctcactcagaccttgtcgaatgaatgggcaccttcaggactaagggtcaatgccatagcgcccggcgctatggtcaccgtcctgactgaaaagctgcgccacgatcctgaagtggtcacccgcttcatcgagcgcatccctgccagaagatggggatcgcccgccgatgtggcgggcctggcgatcttcctggccagcgacgcctccgattatgtcactggtgcaatcatcccctgcgacggggggttccttgccggttaa

SEQ ID NO: 1779 - protein, 256 aa, Agrobacterium tumefaciens str. C58
MTYPSQIPNISKLFDLSGRRAVITGGARGIGRAIADGFLEVGADVVCIDRGWESSDLPADNRQIVTADLSDRSDLKRGFDEAVERLGGQIDVLVNNAGIWDDTPSLHMELEMWDRIIEVNLTAAFALSRHAARLMLPRGRGRIINIGSIRSLRGGHNAAAYAASKGGIALLTQTLSNEWAPSGLRVNAIAPGAMVTVLTEKLRHDPEVVTRFIERIPARRWGSPADVAGLAIFLASDASDYVTGAIIPCDGGFLAG

SEQ ID NO: 1780 - DNA, 768 bp, Caulobacter crescentus CB15
  CDS (1)..(768): transl_table=11
atggccaatccgttcagcctcgaaggcaaggtcgcgctcatcaccggcgccaacaccgggatcgggcaggggatcgccatcgctctggccgccgccggcgcggacatcgccgctgcgggccgcagcgcaccgaccgaaacccaagccgccgtcgaggccctgggccgcaagttcctgtcgatcaaggccgacttcagttcgatcgaaccggtccagcgcgtggtcgacgaaacggtcgccgcgttcggcaaggtcgacatcctggtcaataacgccggcatcatccgtcgcgcggactcgatcgagttcagcgaggccgactgggatgcggtgatggacaccaacctgaaggtggtcttcttcttgacccaggccttcgccaagcaggccctgaagcagggtttcgagggcggtcaggccaaggtcatcaacatcgcctcgctgctctccttccagggcggcatccgcgtgccgtcctatacggcctccaaatcgggcctggcgggcctgaccaagatcctcgccaacgagtgggcgaccaaggggatcaacgtcaacgccatcgcgccgggctatttcgacaccaataacaccgaggccctgcgcgccgaccaggaccgcaacgccgccatcctggcgcgcattccggccggtcgttggggccgtccggaggatatcggcggcgcggcggtgttcctggcgtcgtcggcgtctgactatgtgcagggcattactctgcccgtggatgggggttggctggcccgctag

SEQ ID NO: 1781 - protein, 255 aa, Caulobacter crescentus CB15
MANPFSLEGKVALITGANTGIGQGIAIALAAAGADIAAAGRSAPTETQAAVEALGRKFLSIKADFSSIEPVQRVVDETVAAFGKVDILVNNAGIIRRADSIEFSEADWDAVMDTNLKVVFFLTQAFAKQALKQGFEGGQAKVINIASLLSFQGGIRVPSYTASKSGLAGLTKILANEWATKGINVNAIAPGYFDTNNTEALRADQDRNAAILARIPAGRWGRPEDIGGAAVFLASSASDYVQGITLPVDGGWLAR

SEQ ID NO: 1782 - DNA, 756 bp, Sinorhizobium meliloti 1021
  CDS (1)..(756): transl_table=11
atgagcaccgaactcttcgacctgacgggcaagcgcgccctcgtcaccggctcctcgcagggcatcggctacgcgctggccaagggtcttgccgcgaccggcgccgagatcatcctgaacggccgcgacgccgccaagctcgcggccgccgcaagagacctcggggcagggcacacgctcgccttcgacgccaccgaccaccaggctgtgcgcaaggccgtcgacgccttcgaggcggacgtcggcgcgatcgacatcctcgtcaacaatgccggcatgcagcaccgcacgccgctggaggattttcccgccgacgccttcgagcgactcctgaagacgaatgtctccagtgtcttcaatgtcggccaggcggtcgcccgccacatgatcaagcgcggcgcgggcaaaatcatcaacatcgccagcgtccagacggcgctcgcccgccccggcatcgcgccctataccgccaccaagggtgccgtcggcaacctgaccaagggcatggcgaccgactgggcgagatacggcctgcaatgcaacgcgatcgcgcccggctatttcgacacgccgctgaatgctgcgctcgtcgccgacccgagcttttccgactggctcgaaaggcgcacgccagccggccgatggggcaaagtggaggaactggtcggggcctgcatcttcctgtcctcggacgcctcctccttcgtcaacggacacgtgctctatgtcgacggcggcatcacggcctcgctctga

SEQ ID NO: 1783 - protein, 251 aa, Sinorhizobium meliloti 1021
MSTELFDLTGKRALVTGSSQGIGYALAKGLAATGAEIILNGRDAAKLAAAARDLGAGHTLAFDATDHQAVRKAVDAFEADVGAIDILVNNAGMQHRTPLEDFPADAFERLLKTNVSSVFNVGQAVARHMIKRGAGKIINIASVQTALARPGIAPYTATKGAVGNLTKGMATDWARYGLQCNAIAPGYFDTPLNAALVADPSFSDWLERRTPAGRWGKVEELVGACIFLSSDASSFVNGHVLYVDGGITASL

SEQ ID NO: 1784 - DNA, 807 bp, Sinorhizobium meliloti 1021
  CDS (1)..(807): transl_table=11
atgatggatggcgcctcaaacgccgcgccgcggatacgcggtcttcccgcgcttttcgatctgagcggccgggtcgccctgattaccggatcgagcggcgggctcggcctcaccatggcgcacgctctttgcgaggcgggggcgtcagttatcctcaacggtcgcgacgaggcgcgccttgccggtgcgcgtgcggaactcgaagagcacggcttcaccgtgggaacctcggccttcgacgtcaccaagtcggccgagatcggccgagcggtggccgatattctcgccgagcgaggccgtatcgacattctggtcaacaatgcgggaatacagcaccgcacgccgcttcacgaattcccggaagacgccttcaggcgcgtcatcgaaaccaatttgacgagtgctttccttgtcggccaggcggtcgttcaggggatgatcgaacgccgcgaggggacgataatcaatatctgttcggtccagagcgaactcgcacgtccctcgattgcgccctacgccgcgtctaaaggcgggctcaaaatgctgaccaaaggcatggcgctcgactggggccgatacggcatccgcgtcaacgggcttgcgccaggctacttcaagacggaactgaacagtgcgctggtttcggacgagaagttctcgacatggctcgagcagagaacgccgcttggccgctggggcgataccggcgagctggcagcggccgccgtgttcctggcatcggccgcatcgagcttcgtcaccggtcacatactctatgtcgacggtggcatcaccagctgcctttga

SEQ ID NO: 1785 - protein, 268 aa, Sinorhizobium meliloti 1021
MMDGASNAAPRIRGLPALFDLSGRVALITGSSGGLGLTMAHALCEAGASVILNGRDEARLAGARAELEEHGFTVGTSAFDVTKSAEIGRAVADILAERGRIDILVNNAGIQHRTPLHEFPEDAFRRVIETNLTSAFLVGQAVVQGMIERREGTIINICSVQSELARPSIAPYAASKGGLKMLTKGMALDWGRYGIRVNGLAPGYFKTELNSALVSDEKFSTWLEQRTPLGRWGDTGELAAAAVFLASAASSFVTGHILYVDGGITSCL

SEQ ID NO: 1786 - DNA, 762 bp, Salmonella enterica subsp. enterica serovar Typhi str. CT18
  CDS (1)..(762): transl_table=11
atgattttgaatgcattttctcttgaaggtaaagtcgcggttgtgacggggtgcgataccggattgggacaggggatggcgttagggctggcggaagcgggctgtgacattgtcggtattaacattgttgaaccgacggaaactattgcgcgcgtcaccgctctgggacgacgttttttaagcctgacagccgatctgcgtcaaatcgatggtattccggcgctactggaacgggcggtggcggaatacggtcatattgatattctggtgaataacgcgggtttgatccgtcgtgaagatgcgattgatttcacggaaaaagactgggatgacgtcatgaacctgaacatcaagagcgtgttctttatgtctcaggcggcggcaaaatattttattgcccagggcaacggcggcaaaattattaatatcgcgtctatgctttccttccagggcggcattcgtgttccgtcttataccgcgtcgaaaagcggcgtaatgggaataacgcgtctgatggcgaacgagtgggcgaaacacaatatcaatgtaaacgccatcgcgccgggctatatgtccacgaataatacccagcaattgcgcgctgatgcacaacgtagcgccgaaattctcgaccgtattccggctggacgttgggggctaccgggcgatttaatggggccggtagtcttcctggcatccagcgccgctgattatattaacggctataccatagcggtagatggcggttggctggcgcgttaa

SEQ ID NO: 1787 - protein, 253 aa, Salmonella enterica subsp. enterica serovar Typhi str. CT18
MILNAFSLEGKVAVVTGCDTGLGQGMALGLAEAGCDIVGINIVEPTETIARVTALGRRFLSLTADLRQIDGIPALLERAVAEYGHIDILVNNAGLIRREDAIDFTEKDWDDVMNLNIKSVFFMSQAAAKYFIAQGNGGKIINIASMLSFQGGIRVPSYTASKSGVMGITRLMANEWAKHNINVNAIAPGYMSTNNTQQLRADAQRSAEILDRIPAGRWGLPGDLMGPVVFLASSAADYINGYTIAVDGGWLAR

SEQ ID NO: 1788 - DNA, 765 bp, Salmonella typhimurium LT2
  CDS (1)..(765): transl_table=11
atgaacgatcttttttcactggcaggtaaaaatatccttatcaccggagccgctcagggaattggttatttgctggcgaccggtcttggtcgctatggcgcgcgcattattgttaacgatatcaccccggagcgcgccgaaacagccgtgacgaaacttcagcaggaagggataaaggctattgccgctccttttaatgtcacccataaacaggatattgaagctgcggttgaacatatcgaaaaagatatcggcgtcattgacgtcctgataaataacgccggtatccagcgccgtcatccgtttactgagtttcccgaacaggagtggaatgacgtcatcgccgtaaatcagaccgcggtttttctcgtctctcaggccgttacgcgccgtatggtggcgcggcaggcaggaaaagtgatcaacatctgttcgatgcaaagcgagctgggccgcgacacgattacgccatacgccgcgtcgaagggtgccgtgaagatgctgactcgcggcatgtgcgtggagctggcgcgtcataatatccaggtcaacggtattgcgccggggtacttcaaaacggagatgaccaaagcgctggttgaagatgaagccttcacctcctggctatgcaaacgtacgcctgccgcacgctggggcgatccccaggagcttattggcgcagcggtgtttctctcgtcaaaagcctccgactttgttaacggacatctgctgtttgtcgatggcggtatgctggttgccgtctga

SEQ ID NO: 1789 - protein, 254 aa, Salmonella typhimurium LT2
MNDLFSLAGKNILITGAAQGIGYLLATGLGRYGARIIVNDITPERAETAVTKLQQEGIKAIAAPFNVTHKQDIEAAVEHIEKDIGVIDVLINNAGIQRRHPFTEFPEQEWNDVIAVNQTAVFLVSQAVTRRMVARQAGKVINICSMQSELGRDTITPYAASKGAVKMLTRGMCVELARHNIQVNGIAPGYFKTEMTKALVEDEAFTSWLCKRTPAARWGDPQELIGAAVFLSSKASDFVNGHLLFVDGGMLVAV

SEQ ID NO: 1790 - DNA, 777 bp, Ralstonia solanacearum GMI1000
  CDS (1)..(777): transl_table=11
atgacgccacccaatctgaacctgtttgacctgagcggccgcacggccctgatcaccggtgccagcagcggcatcgggttcgcactggccggagggttggcccgtgccggcgcccgtgtggtcctgaacgcccgagggccggaaaaactcgcgcaggccgccgacagcctgcgcgcgcagggcgccgacgtccacacggccgcgttcgatgtgacccaaagcacggcggtcgctgaaggcatcgcccgggtggaagccgagctcggccccatcgacatcctggtcaacaacgccggcatgcagcgtcgcgcgccgctggagcagttcgagacggatcaatggcacgagctgatgaagaccaacgtcgacagcgtcttcctggtcggacaggccgtggcccgctacatgatcccgcgtgggcgcggcaagatcatcaacatctgctcggtgcagagtgaactcgggcgccccgggatcgcgccttacacggccagcaagggcgccgtgaagatgctcacgaaaggcatggcgatcgactggggcccgcacggcctccaggtcaacggtctgggcccgggctacttcaagacagagttgacgcaggcgctggtcgccaacgccgagttcactgcgtggctcgtgggccgcacgccgtcgcgccgctggggcgatgtcgaagacctcaccggtgcggccatcttcctggcaagcaaggcctccgacttcgtcaacggccacattctctatgttgacggcggcgtgaccgccaccctgtaa

SEQ ID NO: 1791 - protein, 258 aa, Ralstonia solanacearum GMI1000
MTPPNLNLFDLSGRTALITGASSGIGFALAGGLARAGARVVLNARGPEKLAQAADSLRAQGADVHTAAFDVTQSTAVAEGIARVEAELGPIDILVNNAGMQRRAPLEQFETDQWHELMKTNVDSVFLVGQAVARYMIPRGRGKIINICSVQSELGRPGIAPYTASKGAVKMLTKGMAIDWGPHGLQVNGLGPGYFKTELTQALVANAEFTAWLVGRTPSRRWGDVEDLTGAAIFLASKASDFVNGHILYVDGGVTATL

SEQ ID NO: 1792 - DNA, 795 bp, Streptococcus pyogenes MGAS8232
  CDS (1)..(795): transl_table=11
atggaaaatatgttttcgttacaaggtaagattaccttgattaccggagcatcctacggtattggttttgaaattgccaaagcctatgctcaagcgggtgcaactattgtgtttaatgacatcaaacaagagttagttgataaggggttggctgcctatcgagagttagggatagaagcgcatggctatgtttgtgacgtgactgatgaagctggtatccaacagatggttagtcaaattgaagatgaagtaggtgttattgatattctggtcaacaatgcaggtattattagacgtacgccgatgcttgaaatggccgcagaagattttcgtcaagtcattgatattgatttaaatgcaccttttattgtgtcaaaagtagttttgccatcgatgattgcaaaaggacatggtaaaattataaatatctgttctatgatgagtgaattgggccgtgaaactgttagtgcctatgcggcggctaaaggtggcttgaaaatgttaaccaaaaatatagcctctgagtttggagaagccaacattcaatgtaatgggattggtcctggctacattgcgacaccccaaacagctccgttgagagagcgacaagcagatggtagtcgccatccttttgatcaatttatcattgctaaaacaccagcagcacgttgggggacaacagaagacttagctggtccagccgtttttctagctagcgatgccagtaattttgtgaacggccatatcctttatgtcgacggtggcattttagcttatattggaaaacaaccttaa

SEQ ID NO: 1793 - protein, 264 aa, Streptococcus pyogenes MGAS8232
MENMFSLQGKITLITGASYGIGFEIAKAYAQAGATIVFNDIKQELVDKGLAAYRELGIEAHGYVCDVTDEAGIQQMVSQIEDEVGVIDILVNNAGIIRRTPMLEMAAEDFRQVIDIDLNAPFIVSKVVLPSMIAKGHGKIINICSMMSELGRETVSAYAAAKGGLKMLTKNIASEFGEANIQCNGIGPGYIATPQTAPLRERQADGSRHPFDQFIIAKTPAARWGTTEDLAGPAVFLASDASNFVNGHILYVDGGILAYIGKQP

SEQ ID NO: 1794 - DNA, 762 bp, Streptomyces coelicolor A3(2)
  CDS (1)..(762): transl_table=11
atgacggcccaccccctcttcgacatcggcgggcgcaccgccctggtgaccggctccagccggggcatcgggctggcgctggcccggggcctcgcggaggccggctgccgggtgatcctcaacgggcgcgacggcgaccgcctggcgaaggccgccgccgggctgcccggcgaggtccacacggcggtgttcgacgtgaccgacggtccgtccgtgaccgccgggatcgcggaggccgaggagcgggtgggtccgctcgacatcctggtcaacaacgccggaatgcagctgcgggcgcccctgctggagttcgcggacgccgactggcaccgcatcctggacaccaatctcaccaccgccttcctggtgggccgggaggccgcgcgccggatgacggaacgcggccacggcaagatcgtgaacatctgctcgctgcagagcgaggtggtccgcccgggcatcgcgccctacgcggccaccaagggcgcgctgaagatgctcaccaagggcatgtgcgccgactggggcccgtacggcgtccaggtcaacggtctcggccccggttacatcgagaccgagctgacccggccgctcgtcgaggacgaggagttcagcacctgggtgcgcggccgcactccggcgggccgctggggccgtacggaggacctggtgggcgggctgctgttcctcgcctcgccggccgcggacttcgtcggcggacagatcctgtacgtcgacggcggaatgacgagcgtgctgtga

SEQ ID NO: 1795 - protein, 253 aa, Streptomyces coelicolor A3(2)
MTAHPLFDIGGRTALVTGSSRGIGLALARGLAEAGCRVILNGRDGDRLAKAAAGLPGEVHTAVFDVTDGPSVTAGIAEAEERVGPLDILVNNAGMQLRAPLLEFADADWHRILDTNLTTAFLVGREAARRMTERGHGKIVNICSLQSEVVRPGIAPYAATKGALKMLTKGMCADWGPYGVQVNGLGPGYIETELTRPLVEDEEFSTWVRGRTPAGRWGRTEDLVGGLLFLASPAADFVGGQILYVDGGMTSVL

SEQ ID NO: 1796 - DNA, 795 bp, Streptococcus pyogenes MGAS315
  CDS (1)..(795): transl_table=11
atggaaaatatgttttcgttacaaggtaagattgccttgattaccggagcatcctacggtattggttttgaaattgccaaagcctatgctcaagcaggtgcaaccattgtgtttaatgacatcaaacaagagttagttgatagagggatggctgcctatcgagaattagggatagaagcgcatggctatgtttgtgacgtgactgatgaagctggtatccaacagatggttagtcaaattgaagatgaagtaggtgttattgatattttggtcaacaatgcaggtattattaggcgtacgccgatgcttgaaatggccgcagaagattttcgtcaagttattgatattgatttaaatgctccttttattgtgtcaaaagctgtattaccatcaatgattgcaaagggacatggtaaaattataaatatctgttctatgatgagcgaattggggcgtgaaacagttagtgcctacgcggcggctaaaggtggcttgaaaatgttaaccaaaaatatagcctctgagtttggagaagccaacattcaatgtaatgggattggtcctggctacattgcgacgccccaaacagctccgttgagagagcgacaagcagatggtagtcgtcatccttttgatcaatttatcattgctaaaacaccagcagcacgttgggggacaacagaagacttagctggtccagctgtttttctagctagcgatgccagtaattttgtcaacggccatattctttatgtcgacggtggcattttagcttatattggaaaacaaccttaa

SEQ ID NO: 1797 - protein, 264 aa, Streptococcus pyogenes MGAS315
MENMFSLQGKIALITGASYGIGFEIAKAYAQAGATIVFNDIKQELVDRGMAAYRELGIEAHGYVCDVTDEAGIQQMVSQIEDEVGVIDILVNNAGIIRRTPMLEMAAEDFRQVIDIDLNAPFIVSKAVLPSMIAKGHGKIINICSMMSELGRETVSAYAAAKGGLKMLTKNIASEFGEANIQCNGIGPGYIATPQTAPLRERQADGSRHPFDQFIIAKTPAARWGTTEDLAGPAVFLASDASNFVNGHILYVDGGILAYIGKQP

SEQ ID NO: 1798 - DNA, 726 bp, Yersinia pestis KIM
  CDS (1)..(726): transl_table=11
ttgctcatacctgcacagggtattggattcttactggcaaaagggttagctgaatttggcgcagagattatcattaacgatatcaccgcagagcgtgctgaaaaagccgtggctgaattacgtgctagcggctttatcgcccatgccgccgcatttaacgtgacgaaccatgatgaagtcaatgaagctatcgagaaaatagaaagccatattggtgctatcgacgtgttaattaataatgccggtatccaacgccgccatgcctttaccgaattcccagaaaaagattgggatgatgtgattgctgttaatcaaaaatcggtatttttagtttcacaagccgttgcccgttatatggttaaacgccaacgtggaaaaattattaatatctgttcaatgcaaagtgaattaggccgcgatacgatcaccccgtatgccgcctctaaaggggcagttaaaatgctgacccgtgggatgtgtgtcgaactggctcgctacaatattcaggttaacggtattgcaccgggttatttcaaaacggatatgacaaaagcactggtcgatgatcaagcctttaccgattggttgtgtaaacgcacaccagccgcccgttggggagatccagaagagctcattggtgcagcggtttatttgtcatccaaagcctctgactttgttaatggtcatttgctgtttgttgatggtggcatgctggtagccgtttaa

SEQ ID NO: 1799 - protein, 241 aa, Yersinia pestis KIM
MLIPAQGIGFLLAKGLAEFGAEIIINDITAERAEKAVAELRASGFIAHAAAFNVTNHDEVNEAIEKIESHIGAIDVLINNAGIQRRHAFTEFPEKDWDDVIAVNQKSVFLVSQAVARYMVKRQRGKIINICSMQSELGRDTITPYAASKGAVKMLTRGMCVELARYNIQVNGIAPGYFKTDMTKALVDDQAFTDWLCKRTPAARWGDPEELIGAAVYLSSKASDFVNGHLLFVDGGMLVAV

SEQ ID NO: 1800 - DNA, 813 bp, Streptococcus agalactiae 2603V/R
  CDS (1)..(813): transl_table=11
atgactgaacaattcttaaaagacaacttttcactagaaggtaaagtcgccttaataacaggcgcttcttacggcattggtttttcaatagcaactgcttttgctagagctggagcaactattgtcttcaatgatattaagcaagaactcgttgacaaaggcatctccgcctataaaaaacttggcattaaggcccatggctatgtttgtgatgttacagatgaagatggaatcaacgaaatggtggacaaaatttctcaagatgttggggtaattgatattctagttaacaacgcaggtattataaaacgcacccctatgctagagatgagcgctgcagattttcgacaagttattgatattgatttgaatgctccctttatcgtatcaaaagcggtattacctggaatgatccaaaaaggacatggtaaaatcatcaatatttgctccatgatgagtgagcttggacgcgaaacagttgctgcctatgctgctgccaaagggggacttaaaatgttaaccaagaacatcgcttctgaatacggttctgctaacatccaatgtaacggtatcgggcccggctatattgccacaccacaaacagctccccttcgtgaacgtcaagatgatggttcacgtcatccattcgaccaatttatcatcgctaaaacacctgccgctcgctggggtgaggcagaagatttaggtgcaccagctatcttccttgctagtgatgcatcaaactttatcaatggtcacatactctatgtagatggcggtattttagcttacatcggtaaacaacctcaataa

SEQ ID NO: 1801 - protein, 270 aa, Streptococcus agalactiae 2603V/R
MTEQFLKDNFSLEGKVALITGASYGIGFSIATAFARAGATIVFNDIKQELVDKGISAYKKLGIKAHGYVCDVTDEDGINEMVDKISQDVGVIDILVNNAGIIKRTPMLEMSAADFRQVIDIDLNAPFIVSKAVLPGMIQKGHGKIINICSMMSELGRETVAAYAAAKGGLKMLTKNIASEYGSANIQCNGIGPGYIATPQTAPLRERQDDGSRHPFDQFIIAKTPAARWGEAEDLGAPAIFLASDASNFINGHILYVDGGILAYIGKQPQ

SEQ ID NO: 1802 - DNA, 756 bp, Oceanobacillus iheyensis HTE831
  CDS (1)..(756): transl_table=11
atgaatgaattgttcaatttgactggaaaagtagctgtcataacaggtggaaatcgaggcattggaaaaagtattgcaactggattggctagtgctggggcaaatatcgttgtcattgctagaaatgttggtgaagatgtacttgaggaaataagacaagaaggagttgatgtgataggtattaatttcgacttatcgaactttcaagagtatgagtcattagttcaaaaagtgatagcagaatttggaaaagttgatattttagtgaataatgctggtgtccaaattcgtcatccatctgttgaatttcccaagaatgattgggatactgtcattgatattaatacaaatgctgtattttttctctgtcaagcattcggtaaacatatgcttgagcaaaaaagtgggaaaattattaatttagcatcaatgctttcatttgaagggggttatctcgttccggcttatgctgcgagtaagggagctgttaaacaatttacacaatctttatcgaatgaatgggcgaaatttggaatcaatgtaaactgtatcgcaccagggtattttgaaaccgaaatgaatacagcaattattgaagatgagaagcgttacaatagtattttagaacgcattccggcaggtagatggggaaaaccagaagacttaaaaggtgcagcaatatttttagcatccagtgcatctgattatatgaatggatttactatagcagtggatggcggatatttaggaagataa

SEQ ID NO: 1803 - protein, 251 aa, Oceanobacillus iheyensis HTE831
MNELFNLTGKVAVITGGNRGIGKSIATGLASAGANIVVIARNVGEDVLEEIRQEGVDVIGINFDLSNFQEYESLVQKVIAEFGKVDILVNNAGVQIRHPSVEFPKNDWDTVIDINTNAVFFLCQAFGKHMLEQKSGKIINLASMLSFEGGYLVPAYAASKGAVKQFTQSLSNEWAKFGINVNCIAPGYFETEMNTAIIEDEKRYNSILERIPAGRWGKPEDLKGAAIFLASSASDYMNGFTIAVDGGYLGR

SEQ ID NO: 1804 - DNA, 801 bp, Escherichia coli CFT073
  CDS (1)..(801): transl_table=11
atggatttcatcaatatgttctctcttaaaggtaaaaatgctttagtcactggagcatcatatggtattggttttgagatcgctaaagcactaagtaacgctggtgcaacgatcatttttaatgatgtaatagaagaaaacattaaaaaaggcctggcagcatataaagagaacaacatcaacgcacatggttatttatttgatattacagatgaacagtctgtgaaggaaaatatcaaaaaaatagagagtgacgtaggcattattgatattctggtaaataatgcagggattattcagcgtaaacctatgctagaaactacagcagctgattatcgcaaaataatagatattgatctgacaggtcagtttattatggctaaggcggtattgccttcaatgattaaaaaaggacatggcaagatcattaatatctgttccatgatgagcgaattgggtcgcgaaaccgttgtaggctacgcttcggcaaaaggcggcttaaaaatgctgactaaaaatatctgttctgagtttggtgaaaaaaatattcagtgtaatggtattggtccaggctacattgctacacctcaaacagcaccgttacgtgaaattcaaccagatggcagccgccatccatttgatcagtttattatatcaaaaacgccagctggacgctggggtaaaccagatgatcttgctggtgcagctatatttttagcatcggatgcttcaaactttatcaatggtcatattttatatgtcgatggtggcattctggcctacattggcaaacagccttag

SEQ ID NO: 1805 - protein, 266 aa, Escherichia coli CFT073
MDFINMFSLKGKNALVTGASYGIGFEIAKALSNAGATIIFNDVIEENIKKGLAAYKENNINAHGYLFDITDEQSVKENIKKIESDVGIIDILVNNAGIIQRKPMLETTAADYRKIIDIDLTGQFIMAKAVLPSMIKKGHGKIINICSMMSELGRETVVGYASAKGGLKMLTKNICSEFGEKNIQCNGIGPGYIATPQTAPLREIQPDGSRHPFDQFIISKTPAGRWGKPDDLAGAAIFLASDASNFINGHILYVDGGILAYIGKQP

SEQ ID NO: 1806 - DNA, 762 bp, Escherichia coli CFT073
  CDS (1)..(762): transl_table=11
atgattttaaatgcattttctctcgaaggtaaagttgcggtcgtcactggttgtgatactgggctgggccaggggatggcgttggggctggcgcaagcgggctgtgacattgttggcattaacatcgttgaaccgactgaaaccatcaagcaggtcacggcgcaggggcgtcgttttttaagcctgaccgccgatctgcgaaagattgatggcattcctggactgctggatcgcgcggtagcggagtttggtcatattgatatcctggtgaataacgccggattgattcgccgcgaagacgctctcgagttcagcgaaacagactgggacgatgtcatgaacctgaatatcaagagcgtattcttcatgtctcaggcagcggcgaaacactttatcgcgcaaggcaatggcggcaagattatcaatatcgcgtcaatgctctccttccagggcgggatccgtgtgccttcttataccgcatcaaaaagcggcgtgatgggtgtgacgcgattgatggcgaacgaatgggctaaacacaacattaatgttaatgcgatagctccgggttacatggcgaccaacaatacccaacaactgcgggcagatgaacaacgtagcgcggaaattctcgaccgcattccggctggccgttggggactgccgagtgacctgatggggccggtagtgtttcttgcctccagcgcttcagattatgtaaatggttataccattgctgtggatggcggttggctggcgcgttaa

SEQ ID NO: 1807 - protein, 253 aa, Escherichia coli CFT073
MILNAFSLEGKVAVVTGCDTGLGQGMALGLAQAGCDIVGINIVEPTETIKQVTAQGRRFLSLTADLRKIDGIPGLLDRAVAEFGHIDILVNNAGLIRREDALEFSETDWDDVMNLNIKSVFFMSQAAAKHFIAQGNGGKIINIASMLSFQGGIRVPSYTASKSGVMGVTRLMANEWAKHNINVNAIAPGYMATNNTQQLRADEQRSAEILDRIPAGRWGLPSDLMGPVVFLASSASDYVNGYTIAVDGGWLAR

SEQ ID NO: 1808 - DNA, 771 bp, Vibrio vulnificus CMCP6
  CDS (1)..(771): transl_table=11
atgcattacatgattcttgattcatttagcttgcaaggcaaagtagcagtcgtcacggggtgtgacaccggtttaggtcaaggcatggcgctgggtttagcaaaggcaggttgcgatatcgttggtgtgaacatcagtgaaccaacagaaacaatggaaaaaatccaagcgacgggacgtaagttcgtcgatatccgcgctaacctaatgaaactagatgatattccttcaatcgttgatcgcgcagtgactgagcttggccgcatcgacattttggtgaacaacgcaggcatcatccgccgcaacgacgcgatcgagttctctgagcaagattgggatgacgttatgaacatcaacatcaaatccgtgttctttatgtctcaagcggtggcgaaacaatttattgcacaaggcgaaggcggcaagatcatcaacatcgcatccatgctttctttccaaggtggtatccgcgtgccttcatacactgcgtctaagagtggcgtaatgggtgtgactcgccttatggcaaacgagtgggcaaaacacggtatcaacgtgaatgcgattgcaccgggctacatggcaaccaacaacacagcggcactgcgtgctgatgagcaacgcaaccaagaaatcctagagcgcattcctgcaaaccgttggggcacgccggaagatttggctggtccttgtgtgttccttgcgtcgaaagcgtctgactacattaacggttacaccgttgcggtagatggtggctggctatcacgctaa

SEQ ID NO: 1809 - protein, 256 aa, Vibrio vulnificus CMCP6
MHYMILDSFSLQGKVAVVTGCDTGLGQGMALGLAKAGCDIVGVNISEPTETMEKIQATGRKFVDIRANLMKLDDIPSIVDRAVTELGRIDILVNNAGIIRRNDAIEFSEQDWDDVMNINIKSVFFMSQAVAKQFIAQGEGGKIINIASMLSFQGGIRVPSYTASKSGVMGVTRLMANEWAKHGINVNAIAPGYMATNNTAALRADEQRNQEILERIPANRWGTPEDLAGPCVFLASKASDYINGYTVAVDGGWLSR

SEQ ID NO: 1810 - DNA, 762 bp, Vibrio vulnificus CMCP6
  CDS (1)..(762): transl_table=11
atgattttagaggcgttcaatttagacggtaaggtggcgcttgtcacagggtgcaatacaggtcttggtaaaggcatggcagtggcgctggcgcaagcgggttgtgacattgttggcgtgaactacgctgggccggatgaaacccccgcattgatagaagccacaggccgccgtttttactcgattgtggcggatctcagtgatgcctctgtgattgcatccgtagttgatcgtgcggttacccaagcaggacgcatcgatattctggtcaacaacgcgggcattatccgtcgtgaagatgcgatcaacttcagtgagcaagattgggatgacgtgatgaacctcaacgccaagagcgtgttcttcttagctcaagcggtggctcgccagtttcaagcgcagcagtctggcggcaagatcatcaacatcgcttcgatgctctcgttccaaggcggcattcgtgttccctcgtatactgcgtcgaaaagtgccgtgatgggcatcactcgtttgctggctaacgagtgggcatcgcaggggatcaatgtcaatgccattgctccaggctatatggccaccaataacacggcggcgctcagagccgatgctgaacgcaatcaagcgattttagaacgcattccggcgcagcgttggggattacccagtgatcttgctggccctgtcgtgttcttggcatcgtccgcttctgactatgtaaatggttacaccatcgctgttgatggtggttggttagcccgttag

SEQ ID NO: 1811 - protein, 253 aa, Vibrio vulnificus CMCP6
MILEAFNLDGKVALVTGCNTGLGKGMAVALAQAGCDIVGVNYAGPDETPALIEATGRRFYSIVADLSDASVIASVVDRAVTQAGRIDILVNNAGIIRREDAINFSEQDWDDVMNLNAKSVFFLAQAVARQFQAQQSGGKIINIASMLSFQGGIRVPSYTASKSAVMGITRLLANEWASQGINVNAIAPGYMATNNTAALRADAERNQAILERIPAQRWGLPSDLAGPVVFLASSASDYVNGYTIAVDGGWLAR

SEQ ID NO: 1812 - DNA, 801 bp, Bradyrhizobium japonicum USDA 110
  CDS (1)..(801): transl_table=11
atgttcaacgatctgttctcgctcaaaggccgcatcgcactcgtgaccggcggctcgcgcggcatcggcaagatgatcgcggcgggcttcctcgcgcaaggcgcggcgaaggtctacatcaccgcgcgcaaggccggcccgtgcgaggcgacggcgaaagagctctcggctctctatgacggcgagtgcatcgcgctgccgatcgacatctcgaccgtcgaaggctgcgacaagctcgccggcgaaatcatcaagctggagccgaagctcgacatcctcgtcaacaatgccggcgccgcctggggcgctgagttcgacgaattcccggaaagcggctgggacaaggtgatggacctgaacgtcaagtcgctgttcttcctgaccaaggcgctggcgaagccgctgcgcgcggcggcaagcgcggaacgtccggccaaggtcatcaacatcgcctcggtcgacggcatcttcgtcaatccgagcgagacctattcctacgccgccagcaaggccgccgtgatccatctgacccggcgcatggcgacgaaactcatcaaggacaacatcaacgtcaccgcgatcgcgccgggcgcgttcaagtccgacatgaaccgggccgcgcgcgaccatgcggacgatgtcgccaagcgcattccggcgcggcgcatcggaaccgacgaggacatggcaggggtcgcgatctatctcgcctcgcgtgcgggcgattacgtggtcggcaacaccatcgccgtcgacggcggcgtggtctacgccaatgccgggctggagatcgcggggtag

SEQ ID NO: 1813 - protein, 266 aa, Bradyrhizobium japonicum USDA 110
MFNDLFSLKGRIALVTGGSRGIGKMIAAGFLAQGAAKVYITARKAGPCEATAKELSALYDGECIALPIDISTVEGCDKLAGEIIKLEPKLDILVNNAGAAWGAEFDEFPESGWDKVMDLNVKSLFFLTKALAKPLRAAASAERPAKVINIASVDGIFVNPSETYSYAASKAAVIHLTRRMATKLIKDNINVTAIAPGAFKSDMNRAARDHADDVAKRIPARRIGTDEDMAGVAIYLASRAGDYVVGNTIAVDGGVVYANAGLEIAG

SEQ ID NO: 1814 - DNA, 771 bp, Bradyrhizobium japonicum USDA 110
  CDS (1)..(771): transl_table=11
atgacatccagccggttcgatctccgcggcaaggtcgcgatcgtcacgggaggcaatggcggcatcgggctcggcctcgcgcacgggctcgccgatgccggcgccgatatcgccgtggtcgggcgcaacgaaaccaagtcggccgcggccgttgccgatctcagacagcgcggtgttaaggcgatcgccgtcaccaccgacgtgaccgaccaggcggcggtcgcagccatgatcgaccgcgtcgtcaaggagttcggccgcatcgacatcctcatcaacaacgccggcatgagcatccgcaagccgccgcacgagctcgagctcgacgagtggaacaaggtgatcgacaccaacctcaccagcgccttcgtgtgctcgaagctggcctatccggcgctgaaggcgtccggcaacggcaaggtgatcaacatcggctcgatgatgtcgatcttcggcgccagctttgcgacggcctatgcggcgagcaagggcggcatcgtgcagtacacgcgcgcctgcgccaatgcctgggcgcccgacaacatccaggtcaacgccatcctgccgggctggatcgacaccgacctcacccgcggcgcgcggcagcaggtgtcgggcctgcacgagcgcgtgctggcgcgcacgcctgcggggcgctggggcgagatcgacgacttcgccggcatcgcggtgttcctcgcctcgcccgcctcgaacttcgtcacgggcaccgcgatccccgtcgacggcggattctcggtcatggcctga

SEQ ID NO: 1815 - protein, 256 aa, Bradyrhizobium japonicum USDA 110
MTSSRFDLRGKVAIVTGGNGGIGLGLAHGLADAGADIAVVGRNETKSAAAVADLRQRGVKAIAVTTDVTDQAAVAAMIDRVVKEFGRIDILINNAGMSIRKPPHELELDEWNKVIDTNLTSAFVCSKLAYPALKASGNGKVINIGSMMSIFGASFATAYAASKGGIVQYTRACANAWAPDNIQVNAILPGWIDTDLTRGARQQVSGLHERVLARTPAGRWGEIDDFAGIAVFLASPASNFVTGTAIPVDGGFSVMA

SEQ ID NO: 1816 - DNA, 768 bp, Bradyrhizobium japonicum USDA 110
  CDS (1)..(768): transl_table=11
atgagcaccgcccttttcgacctttccggccacaccgcgctcgtgaccggctcctcccgcgggctcggccgcgccatcgccgagggcatggccaaggccggcgccaggctgatcatcaacggcgtcgatcccaagcgcgtcgagcaggccgtcgccgagtttcgcgccgccggctacctggccgaaggcgcagccttcaacgtaacggacgagccggcgatcgtcgccgccttcaacgacttcgacaagaagggcattgaggtcgacattctcgtcaacaatgccggcatccagcaccgcaagccgctggtcgagttcaccaccgacgaatggcgcaaggtgatcgagactgacctgaccagcgccttcgtgatcggccgcgaggccggcaagcgcatgatcccgcgcaagcgcggcaagatcatcaatatcggctcgctcggcagcgagctcgcacgtcccaccatcgcgccctacacggcagcgaagggcggcatcaagaacctgacccgctcgatggcggtggaatgggcccagcacggcatccaggccaatgcgatcggccccggctacatgctgaccgacatgaacgaggcgctggtcaacaacaccgatttcaacaactggctgatgggccgcatcccctccaagcgctggggcagaccggacgagctggtcggcgcggcgatcttcctggcgtcggacgcctccacttacgtcaacggccagatcatctatgtcgacggcggcatgatcgccgcgatgtga

SEQ ID NO: 1817 - protein, 255 aa, Bradyrhizobium japonicum USDA 110
MSTALFDLSGHTALVTGSSRGLGRAIAEGMAKAGARLIINGVDPKRVEQAVAEFRAAGYLAEGAAFNVTDEPAIVAAFNDFDKKGIEVDILVNNAGIQHRKPLVEFTTDEWRKVIETDLTSAFVIGREAGKRMIPRKRGKIINIGSLGSELARPTIAPYTAAKGGIKNLTRSMAVEWAQHGIQANAIGPGYMLTDMNEALVNNTDFNNWLMGRIPSKRWGRPDELVGAAIFLASDASTYVNGQIIYVDGGMIAAM

SEQ ID NO: 1818 - DNA, 762 bp, Vibrio parahaemolyticus RIMD 2210633
  CDS (1)..(762): transl_table=11
atgattcttgattcatttaaccttgagggaaaagtggccattgttactggttgtgacactggtcttggtcaaggtatggcgcttggtctagcaaaagcgggctgtgacattgttggcgtaaatatcagcgaaccaacagaaacgattgagaaagtagaggctgaaggccgtaagttcgtcgatatccgcgctaacttaatgaaactagacgacatcccaacgatcgttgaccgcgcagtaaccgaacttggtcgcattgatatcctagtgaacaacgcgggcatcattcgtcgtaacgatgccatcgagttttctgagcaagattgggatgacgtaatgaacatcaacgtgaagtctgtgttctttatgtctcaagcggttgcaaaacagttcatcgcgcaaggtgaaggcggcaagatcatcaacatcgcatcaatgctttctttccaaggcggtattcgcgtgccttcttacactgcgtctaagagtggcgtaatgggtgtgactcgcctaatggcgaacgaatgggcaagccacggcatcaacgtaaacgcgattgctccgggttacatggcaaccaacaacacggcggcattgcgtgccgatgaacagcgcaacaaagaaatcgtagaccgtattcctgctgctcgttggggtacgccagaagatctagctggcccttgtgtattcctagcatctaaagctgcggattacatcaacggctacaccatcgcagtagatggtggctggctagcgcgctaa

SEQ ID NO: 1819 - protein, 253 aa, Vibrio parahaemolyticus RIMD 2210633
MILDSFNLEGKVAIVTGCDTGLGQGMALGLAKAGCDIVGVNISEPTETIEKVEAEGRKFVDIRANLMKLDDIPTIVDRAVTELGRIDILVNNAGIIRRNDAIEFSEQDWDDVMNINVKSVFFMSQAVAKQFIAQGEGGKIINIASMLSFQGGIRVPSYTASKSGVMGVTRLMANEWASHGINVNAIAPGYMATNNTAALRADEQRNKEIVDRIPAARWGTPEDLAGPCVFLASKAADYINGYTIAVDGGWLAR

SEQ ID NO: 1820 - DNA, 804 bp, Bacteroides thetaiotaomicron VPI-5482
  CDS (1)..(804): transl_table=11
atgaatcagtatttgaatttttctttgaaaggtaaagtagctctcgttacaggtgcttcttacggtatcggttttgcaattgcttctgcttacgcagaacaaggcgctactgtatgttttaacgacatcaaccaggagttggtagacaaaggcatggctgcctatgctgaaaagggaattaaagctcacggttatgtatgcgacgtaacagacgaaccggctgttcaggcaatggttgctactatcgagaaagaagtaggtacgattgatatccttgttaataacgccggtattatccgccgtgttcctatgcacgaaatggaagctgctgacttccgtcgtgtgattgatatcgacttgaacgctccgttcatcgtttctaaggctgtgttgcctgccatgatgaagaagcgtgccggtaaaatcatcaacatctgctctatgatgtctgagctgggtcgtgaaactgtatcggcttacgctgctgccaaaggtggtctgaagatgctgacccgcaatatctgctctgaatatggtgaatacaacattcagtgtaacggcatcggcccgggttatatcgctactccgcaaactgctcctcttcgtgagaaacaagcagacggaagccgtcacccgttcgattcattcatctgcgccaagactcctgccggccgttggttggatccggaagaactgacaggtcctgccgtattcctggcttctgaggcttctaacgctgtaaacggtcatgttctttacgtagacggtggtatcctggcttatatcggaaaacagccgaaataa

SEQ ID NO: 1821 - protein, 267 aa, Bacteroides thetaiotaomicron VPI-5482
MNQYLNFSLKGKVALVTGASYGIGFAIASAYAEQGATVCFNDINQELVDKGMAAYAEKGIKAHGYVCDVTDEPAVQAMVATIEKEVGTIDILVNNAGIIRRVPMHEMEAADFRRVIDIDLNAPFIVSKAVLPAMMKKRAGKIINICSMMSELGRETVSAYAAAKGGLKMLTRNICSEYGEYNIQCNGIGPGYIATPQTAPLREKQADGSRHPFDSFICAKTPAGRWLDPEELTGPAVFLASEASNAVNGHVLYVDGGILAYIGKQPK

SEQ ID NO: 1822 - DNA, 789 bp, Enterococcus faecalis V583
  CDS (1)..(789): transl_table=11
atggaatttaaaatgaatgattttcaattagatggaaaagtagcgttaattacaggtgctgtttatgggattggctttgagattgcgaaatccctagctgaagcaggagcaacaattgtttttaataacttatctcctgaatcagttgaacaaggcttggaaaattatcgggccgcagggattgaagcacgtggttatgtgtgtgatgtcactgatgaagagcaagttcaagcgatggttgctcagattaaagaagaagtcggctctattgatattttagtcaataatgcgggaattattaaacgaattccaatggtggatatgtcagcagaagagttccgtcaagtgattgatgttgacttgaatgcgccatttattatggcaaaagcggttattccagatatgattgaaaagggtcatggcaaaattatcaatatctgttcaatgatgagtgaactaggtcgtgaaacagttagtgcgtacgcggcagcaaaaggcggactaaaaatgttaacgaaaaatattgcttctgaatatggacaatataatattcaatgtaatgggattggacctggctacattgaaacgccacagacggcgccattaagagaaccagggcatccatttaacgaattcatcttgggacgaacacctgctaatcgttggggcacaccagcagacttagctggcccagcagttttcttagcatctaacgcttctgactttgttaacggacatatcttatatgtcgatggtggaattttagcttatattggaaaacaaccataa

SEQ ID NO: 1823 - protein, 262 aa, Enterococcus faecalis V583
MEFKMNDFQLDGKVALITGAVYGIGFEIAKSLAEAGATIVFNNLSPESVEQGLENYRAAGIEARGYVCDVTDEEQVQAMVAQIKEEVGSIDILVNNAGIIKRIPMVDMSAEEFRQVIDVDLNAPFIMAKAVIPDMIEKGHGKIINICSMMSELGRETVSAYAAAKGGLKMLTKNIASEYGQYNIQCNGIGPGYIETPQTAPLREPGHPFNEFILGRTPANRWGTPADLAGPAVFLASNASDFVNGHILYVDGGILAYIGKQP

SEQ ID NO: 1824 - DNA, 804 bp, Enterococcus faecalis V583
  CDS (1)..(804): transl_table=11
atggattttaatatggatatgtttcgcttagatgggaaagtcgcattgattacgggcgcagtttatggaattggctttgaaatcgccaaatcattagcggcagcaggagcaacgatcgttttcaataatttgactcaagaatcagtcgatgaaggatcggcaaattacaaagcagaaggcattgaagcaaaaggctatgtctgtgacgtaacggatgaaaaagcagttcaagcaatggtcaagcaaatcaaagaagaggttggttcaatcgatattttagttaataatgctggaatcataaaacgaattccaatgacagatatgtcagcgacagatttccgacaagtcatcgatgttgatttgaatgcgccgtttattatgtcaaaagcggttattcctgagatgatcgagaaaggcgggggtaaaattattaatatttgctcaatgatgagtgaattaggtcgtgagactgttagtgcttatgccgcggcaaagggtggtttgaagatgctaacaaaaaatattgcttctgaatatggtcaattcaatatccagtgcaacggtatcggtcctggttatattgcgacaccgcaaacagcgccgctgagagagctgcaagaaaacggggaacgtcatccatttgaccaatttatcgtcggtcgtacgccagcagcacgctggggtgatccggtcgatcttgcaggtccatcagtctttcttgcctcacaggcctctgactttgtaaatggtcatgttctgtatgttgatggcggaattttagcttatattggtaaacaaccttaa

SEQ ID NO: 1825 - protein, 267 aa, Enterococcus faecalis V583
MDFNMDMFRLDGKVALITGAVYGIGFEIAKSLAAAGATIVFNNLTQESVDEGSANYKAEGIEAKGYVCDVTDEKAVQAMVKQIKEEVGSIDILVNNAGIIKRIPMTDMSATDFRQVIDVDLNAPFIMSKAVIPEMIEKGGGKIINICSMMSELGRETVSAYAAAKGGLKMLTKNIASEYGQFNIQCNGIGPGYIATPQTAPLRELQENGERHPFDQFIVGRTPAARWGDPVDLAGPSVFLASQASDFVNGHVLYVDGGILAYIGKQP

SEQ ID NO: 1826 - DNA, 759 bp, Streptomyces avermitilis MA-4680
  CDS (1)..(759): transl_table=11
atgagccatccgctcttcgacatcgccggccgtacggccctggtcaccggctccagccgcggcatcgggcgcgcgctcgcccgcggcctcctggaggcgggctgcacggtcgtcctgaacggacgggacggcgaccggctcaccgcggcggccgccgaactgccgggcgacgtccgtacggccgcgttcgacgtgaccgacggtccgtcggtggccgccggcatcgcggaggtcgaggagcgggtgggtccgctcgacatcctggtcaacaacgcgggcatacaactgcgcgccccgctcctggagttcacggactccgactggcaccggatcctgaacaccaatctgacgagcgcgttcctggtgggccgcgaggcggcccgccgtatgacggaacgcggccacggcaagatcgtcaacatctgttccctccagagcgaggtcgtccgccccggcatcgccccgtacgcggcgaccaagggcgcgctgaagatgctcaccaagggcatgtgcgcggactggggcccgtacggggtgcaggtcaacgggctcggccccggctacatagagaccgagttgacccgcccgctcgtcgaggacgaggagttcagcgcgtgggtgcggcaccgcaccccggccgggcgctggggacgtacggaggacctggtcggcggggtgctcttcctcgcctctcccgcggcggacttcgtcagcgggcaggtgctgtacgtcgacggcggcatgacgagtgtgctctag

SEQ ID NO: 1827 - protein, 252 aa, Streptomyces avermitilis MA-4680
MSHPLFDIAGRTALVTGSSRGIGRALARGLLEAGCTVVLNGRDGDRLTAAAAELPGDVRTAAFDVTDGPSVAAGIAEVEERVGPLDILVNNAGIQLRAPLLEFTDSDWHRILNTNLTSAFLVGREAARRMTERGHGKIVNICSLQSEVVRPGIAPYAATKGALKMLTKGMCADWGPYGVQVNGLGPGYIETELTRPLVEDEEFSAWVRHRTPAGRWGRTEDLVGGVLFLASPAADFVSGQVLYVDGGMTSVL

SEQ ID NO: 1828 - DNA, 780 bp, Bordetella pertussis Tohama I
  CDS (1)..(780): transl_table=11
atgatctccctaccgtatctgcaacgcttcgccctgtccggccaggtggccttggtcaccggctcggcgcgcggcctggggctgcgcatcgcgcaggcactggccggcagcggcgcgcatgtactgatcaacggccgcgacgcgcacgccgtcgaggccgccgtgtcggacctgcgccagcagggcctgcgcgccagcgcgcagccgttcgacgtatccgacgagcaagccatggagcaggccttcgcgcgcatcgacgccgaacacggccggctcgacatcctggtcaacaatgtcggggctcgcaaccgcaagccgctggccgagaccagccccgccgaaatccgcgccatgatggacaccaacctgatcgccggcatcctgctggcgcggctggccgcccagcgcatgatgcgccagcgctatggccgcctcatcgccatcacctcggtggcaggcgaactggcgcgcgccaacgacgccgtctatccggccgccaagcagggcctgaccggcatgatgcgcgccctggccgtggagttcggcggccacggcatcaccagcaacgccatcgcgcctggcgcgttcgccaccgagaccaacgcggcaatcgccaacgacccgcaggccggcgcggccatggcggcgcgcaaccccaccggccgctggggcgatcccgaagagatcgccggcgcggccgtcttcctggcctcgccggcggcctcgtatgtcaacggccacgtgctggtggtcgacggagggctgtccgtccagttctga

SEQ ID NO: 1829 - protein, 259 aa, Bordetella pertussis Tohama I
MISLPYLQRFALSGQVALVTGSARGLGLRIAQALAGSGAHVLINGRDAHAVEAAVSDLRQQGLRASAQPFDVSDEQAMEQAFARIDAEHGRLDILVNNVGARNRKPLAETSPAEIRAMMDTNLIAGILLARLAAQRMMRQRYGRLIAITSVAGELARANDAVYPAAKQGLTGMMRALAVEFGGHGITSNAIAPGAFATETNAAIANDPQAGAAMAARNPTGRWGDPEEIAGAAVFLASPAASYVNGHVLVVDGGLSVQF

SEQ ID NO: 1830 - DNA, 780 bp, Bordetella parapertussis 12822
  CDS (1)..(780): transl_table=11
atgatctccctaccgtatctgcaacgcttcgccctgtccggccaggtggccctggtcaccggctcggcgcgcggcctggggctgcgcatcgcgcaggcactggccggcagcggcgcccatgtactgctcaacggccgcgacgcgcacgccgtcgaggccgccgtgtcggacctgtgccagcagggcctgcgcgccagcgcgctgccgttcgacgtatccgacgagcaggccacggagcaggccttcgcacgcatcgacgccgaacacggccggctcgacatcctggtcaacaatgtcggggctcgcaaccgcaagccgctggccgagaccagcccggccgaaatccgcgccatgatggacaccaacctggtcgccggcatcctgctggcgcggctggcggcccaacacatggtgcgccagcgctatggccgcctcatcgcgatcacctcggtggcgggcgaactggcgcgcgccaacgacgccgtctatccggccgccaagcagggcctgaccggcatgatgcgcgccctggccgtggagttcggccgccacggcatcaccagcaacgccatcgcgcccggcgcgttcgccaccgagaccaacgcggcgatggccaacgatccgcaggcaggcgcggccatggcggcgcgcaaccctaccggccgctggggcgatcccgaagagatcgccggcgcggccgtcttcctggcatcgccggcggcctcgtatgtcaacggtcacgtgctggtggtcgacggagggctgtcggtccagttctga

SEQ ID NO: 1831 - protein, 259 aa, Bordetella parapertussis 12822
MISLPYLQRFALSGQVALVTGSARGLGLRIAQALAGSGAHVLLNGRDAHAVEAAVSDLCQQGLRASALPFDVSDEQATEQAFARIDAEHGRLDILVNNVGARNRKPLAETSPAEIRAMMDTNLVAGILLARLAAQHMVRQRYGRLIAITSVAGELARANDAVYPAAKQGLTGMMRALAVEFGRHGITSNAIAPGAFATETNAAMANDPQAGAAMAARNPTGRWGDPEEIAGAAVFLASPAASYVNGHVLVVDGGLSVQF

SEQ ID NO: 1832 - DNA, 780 bp, Bordetella bronchiseptica RB50
  CDS (1)..(780): transl_table=11
atgatctccctaccgtatctgcaacgcttcgccctgtccggccaggtggccctggtcaccggctcggcgcgcggcctggggctgcgcatcgcgcaggcactggccggcagcggcgcccatgtactgctcaacggccgcgacgcgcacgccgtcgaggccgccgtgtcggacctgcgccagcagggcctgcgcgccagcgcgctgccgttcgacgtatccgacgagcaggccacggagcaggccttcgcgcgcatcgacgccgaacacggccggctcgacatcctggtcaacaatgtcggggctcgcaaccgcaagccgctggccgagaccagcccggccgaaatccgcgccatgatggacaccaacctggtcgccggcatcctgctggcgcggctggcggcccaacgcatggtgcgccagcgctatggccgcctcatcgcgatcacctcggtggcgggcgaactggcgcgcgccaacgacgccgtctatccggccgccaagcagggcctgaccggcatgatgcgcgccctggccgtggagttcggccgccacggcatcaccagcaacgccatcgcgcccggcgcgttcgccaccgagaccaacgcggcgatggccaacgatccgcaggcaggcgcggccatggcggcgcgcaaccctaccggccgctggggcgatcccgaagagatcgccggcgcggccgtcttcctggcatcgccggcggcctcgtatgtcaacggtcacgtgctggtggtcgacggagggctgtcggtccagttctga

SEQ ID NO: 1833 - protein, 259 aa, Bordetella bronchiseptica RB50
MISLPYLQRFALSGQVALVTGSARGLGLRIAQALAGSGAHVLLNGRDAHAVEAAVSDLRQQGLRASALPFDVSDEQATEQAFARIDAEHGRLDILVNNVGARNRKPLAETSPAEIRAMMDTNLVAGILLARLAAQRMVRQRYGRLIAITSVAGELARANDAVYPAAKQGLTGMMRALAVEFGRHGITSNAIAPGAFATETNAAMANDPQAGAAMAARNPTGRWGDPEEIAGAAVFLASPAASYVNGHVLVVDGGLSVQF

SEQ ID NO: 1834 - DNA, 762 bp, Vibrio vulnificus YJ016
  CDS (1)..(762): transl_table=11
atgattctcaattcgttcaatcttcaaggtaaagtggctatcgtaactggttgtgatactggtttagggcaaggtatggcattgggtttggctaacgcaggctgtgatatcgttggcgtaaatattgtggagccaactgagaccattgcacttattgagcaaacagggcgtaagtttgttgatgtgcgtgctaacctcatgaagcttgatgacattcctgccattgttgaccgcgcagtgacagagtttggtcgcatcgatattcttgtaaacaacgctggtatcattcgtcgcaatgacgcgattgatttctctgagcaagattgggatgacgtaatgaatattaacgttaagtcagtgttcttcttgtctcaagcggtagcaaaacagtttattgcccagggagaaggtggcaaaatcattaatattgcttcaatgttgtctttccaaggtggtattcgcgttccttcatacacgacatctaaaagcggcgtaatgggtgtaactcgtctaatggcaaatgaatgggcgaaacacaatatcaacgttaatgcgattgctcctggctacatggcaaccaataacactactgcgcttcgtgctgatgaaacccgcaataaagaaatcctagaccgtattcctgcgggtcgttggggtgagccatcagatttagctggcccttgtgtcttcttggcatcgagcgcatctaactacattaatggctacacgatagcggttgatggcggctggctatctcgttaa

SEQ ID NO: 1835 - protein, 253 aa, Vibrio vulnificus YJ016
MILNSFNLQGKVAIVTGCDTGLGQGMALGLANAGCDIVGVNIVEPTETIALIEQTGRKFVDVRANLMKLDDIPAIVDRAVTEFGRIDILVNNAGIIRRNDAIDFSEQDWDDVMNINVKSVFFLSQAVAKQFIAQGEGGKIINIASMLSFQGGIRVPSYTTSKSGVMGVTRLMANEWAKHNINVNAIAPGYMATNNTTALRADETRNKEILDRIPAGRWGEPSDLAGPCVFLASSASNYINGYTIAVDGGWLSR

SEQ ID NO: 1836 - DNA, 807 bp, Rhodopseudomonas palustris CGA009
  CDS (1)..(807): transl_table=11
atgttcaaggatctgttttcgctgcaaggccgcgtcgctctggtgaccggcggctcgcgcggcattggcaagatgatcgcggccggctttctcgcctacggcgcgacgcgcgtttacatcaccgcgcgcaaagcagcggcctgtcaggccaccgccgacgaactcaccgaaatgtatcccggcgagtgcgtcgcgctgccgatcgacatctcgaccatggcgggcatcgatatgctggccgccgagatcaagcgccgcgagagctcgctcgacatcctagtcaacaacgccggtgccgcctgggcggccgacttcgacgaattcccggagagcggctgggacaaggtgatggacctcaacgtcaagacgccgttcttcctgaccaaggcgctggcgccgctgctgcgcgccgccgcgagcgccgaacagcccggcaaggtgatcaacatcgcctcgatcgacggcatcttcgtcaatccgctcgagacctatccctacgcggcgtcgaaggccggcctgatccacctcacccgccggctggctgtgaggctgatcaaggaccacatcgtcgtcaccgcgatcgcgccgggaccgttcgcctccgacatgaacaaggcggcgcgtgacgaatccgacgcagtcgccaagcgcgtccctgcgggccggatcggcaccgacgaggacatggccggcaccgccgtgttcctcgcctcgcgcgccggcgactacgtggtcggctcgaccgtgacggtcgacggcggcgttgccttcgccaaccctggcatcaagggcgacggctgggcgtaa

SEQ ID NO: 1837 - protein, 268 aa, Rhodopseudomonas palustris CGA009
MFKDLFSLQGRVALVTGGSRGIGKMIAAGFLAYGATRVYITARKAAACQATADELTEMYPGECVALPIDISTMAGIDMLAAEIKRRESSLDILVNNAGAAWAADFDEFPESGWDKVMDLNVKTPFFLTKALAPLLRAAASAEQPGKVINIASIDGIFVNPLETYPYAASKAGLIHLTRRLAVRLIKDHIVVTAIAPGPFASDMNKAARDESDAVAKRVPAGRIGTDEDMAGTAVFLASRAGDYVVGSTVTVDGGVAFANPGIKGDGWA

SEQ ID NO: 1838 - DNA, 783 bp, Magnaporthe grisea 70-15
  CDS (1)..(783)
atggcggccaacttcttttctctcaaagaccacactgccctgattacaggaggcacccggggtatcggagctgctgtagccattggtctggccgaggccggtgccgatgtgctacttgttcagagagacgagtcctccaccacaacccgggacgccatcctcgccctgggccgcaagtcccaaatctacgtggcggacctctcgtcccccgagagcgtggcggcgctgacgcccaaggtgctcgccgacgggcaccaggtccgcatcctggtaaactgcggcgggatccagcgccggcacaagtgcgaggtgttccccgactcggacttcaacgaggtgatgcaggtgaacctcggggcggtgtttacgctgacgcgcgacgtgggcgcgcacatgctctcgctggagccgcaccccgtcacgggccgcaggggctccgtcgtcaactatgccagcctgctctcgttccagggcgggctgacggtgccggcctacgcggcgagcaagggcgccgtcgcgcagctgaccaagtcgtttgccaacgagtggaccagccgcggcgtcaccgtcaacgccatcgcgccggggtacatcgccacggacatgaacgaggccctgctcaaggacgaggagaggctggcgagcatctcggccaggatccccgcgggcaggtggggcgaccccgaggatttcaagggcaccaccgtctacctggccagcaaggcgagcggctatgtcagcgggcatgtgcttgttgttgatggtggctggatgggcaggtag

SEQ ID NO: 1839 - protein, 260 aa, Magnaporthe grisea 70-15
MAANFFSLKDHTALITGGTRGIGAAVAIGLAEAGADVLLVQRDESSTTTRDAILALGRKSQIYVADLSSPESVAALTPKVLADGHQVRILVNCGGIQRRHKCEVFPDSDFNEVMQVNLGAVFTLTRDVGAHMLSLEPHPVTGRRGSVVNYASLLSFQGGLTVPAYAASKGAVAQLTKSFANEWTSRGVTVNAIAPGYIATDMNEALLKDEERLASISARIPAGRWGDPEDFKGTTVYLASKASGYVSGHVLVVDGGWMGR

SEQ ID NO: 1840 - DNA, 735 bp, Nasonia vitripennis
  CDS (1)..(735)
atgaacatcacttttgaaggaaagcggattctcgttaccggtgctggtcaaggcatcggtagagaaacagctctgcgtctatccaaatttggcggcacagttatagccctctcgaaaaccaaagccaatctcgactccctggtaaaggaagatccgaaaatccaaactgtctgcgctgacctgcaggactggaataaagcgcgagcagctgttaagagcgttttgcccatagatttgcttgtcaataatgccgggattgcgatactggatccttttctctctctcaaacccgaggactttgatcaagtcttcaatgtaaatttaaaatcgatcatcaacgtctctcaagttgtggcggagaatatgatccaaagaaaagttgctggaagcatcgtcaatctatcgtcggtggccagtttggtagctgtcaaagatcacgctatttattgctcggcgaaagcagctttggacatgctgacaaaggtcatggctttggaactgggaccacataacattcgcgtcaacaccgtcaacccgacccttgtcatgacggccatgggcaaggccaattggagcgacccggcaaaggcggccacgttgcgagaaaaaattccactggaccgttttgcagagcctcaagaagtggtggattccatttgcttccttcttagtgacaagagcgcaatgaccaccggtgttgggcttacgatcgacggaggatacaccactcattaa

SEQ ID NO: 1841 - protein, 244 aa, Nasonia vitripennis
MNITFEGKRILVTGAGQGIGRETALRLSKFGGTVIALSKTKANLDSLVKEDPKIQTVCADLQDWNKARAAVKSVLPIDLLVNNAGIAILDPFLSLKPEDFDQVFNVNLKSIINVSQVVAENMIQRKVAGSIVNLSSVASLVAVKDHAIYCSAKAALDMLTKVMALELGPHNIRVNTVNPTLVMTAMGKANWSDPAKAATLREKIPLDRFAEPQEVVDSICFLLSDKSAMTTGVGLTIDGGYTTH

SEQ ID NO: 1842 - DNA, 735 bp, Nasonia vitripennis
  CDS (1)..(735)
atgaacatcagattcgaggggaaacgtatccttgttacaggagcaggacaaggaatcggaagagaaatggctctccgtttgtcaaaattcggtggcacagtgatagctctttcgaaaacgaaggagaacctcgacatcctaaccaaacaagactcgaagatcgagaccctctgcgtaaacttgcgagactggcacgcgaccagaaaagcaatcaaaagcgttctgcccatcgaccttttggtaaataacgccggagtagcttgtctgaggccgtttttgcaagccactcaggatgacttcgatctgactttcgacgtcaatgtcaaacagatattgaacgtttcgcaaatcgtcgcggagaatatgatccagagaaaagtcgccggaagcattgttaatatatcgtcccaagctagccaagctgcgctcaaagatcacgcgatatactgcgcttccaagggagctttggacatgctaacgaaaaccatggcactcgagctcggatcgcacaatattcgtgttaacactgtgaatccgacggtcgtcatgacggagatgggtaaactcggctggagtgagccgaaaaaggctcaagagatgctgagtagaattccactcgggcgattcgccgaggtggatgaagtgatcgatgctgttgtgttccttttgagtgacaaaagttcaatgacaactggagcaagtattccagtcgaaggcggttttattgcaacgtaa

SEQ ID NO: 1843 - protein, 244 aa, Nasonia vitripennis
MNIRFEGKRILVTGAGQGIGREMALRLSKFGGTVIALSKTKENLDILTKQDSKIETLCVNLRDWHATRKAIKSVLPIDLLVNNAGVACLRPFLQATQDDFDLTFDVNVKQILNVSQIVAENMIQRKVAGSIVNISSQASQAALKDHAIYCASKGALDMLTKTMALELGSHNIRVNTVNPTVVMTEMGKLGWSEPKKAQEMLSRIPLGRFAEVDEVIDAVVFLLSDKSSMTTGASIPVEGGFIAT

SEQ ID NO: 1844 - DNA, 804 bp, Chlamydomonas reinhardtii
  CDS (1)..(804)
atgtcggtcgcggctgcagctccgcggcttgctggcaaggtcgcggtcgtgaccggtggcgcgcgtggcatcgggctgggctgtgcccgcagcctatgcaaggagggcgcgaaggtggtgttggctgacgttgacctggcggcggcgcagcgcagtgccggcgagctggcggcggcggggcacgcggcggcggcagtcaagtgcgacgtgcggctcaaggcggactgcgaggcggcggtgaaggcggcggtgacgcagtggggcaagctagacataatggtggccaacgcgggcatcgtcaaggccgcgcccttcctggacatgagcgagcaggactttgacgacgtggtggctgtgaatctgaagggcgtgttcctcacctgccaggctgctgctcggcagatggtggcccagaagggcgcagacccgcaatggggtggcggcgccattgtgaccatgtcgtccgtcaatgcggtcatggccatcccctccattgcgggctacaacgccagcaagggcggcgtcaacggcctcacgcgctgcatgtcgctggcgctggcgccgcacggaatccgtgtcaacagtgtgggcccgggctccatcgccacggacgtgctggccagtgtggcgagtgacgaggctgcgcgcaaccgcatcctgtcgcgcacacccctgggccgcattggagagccggacgagattggcgaggtggtggcgttcctggcctctgactcctcctcctacatgactggtcaggtgctgtacgtggacggcgggcggctggctctcaactacaccgtgtga

SEQ ID NO: 1845 - protein, 267 aa, Chlamydomonas reinhardtii
MSVAAAAPRLAGKVAVVTGGARGIGLGCARSLCKEGAKVVLADVDLAAAQRSAGELAAAGHAAAAVKCDVRLKADCEAAVKAAVTQWGKLDIMVANAGIVKAAPFLDMSEQDFDDVVAVNLKGVFLTCQAAARQMVAQKGADPQWGGGAIVTMSSVNAVMAIPSIAGYNASKGGVNGLTRCMSLALAPHGIRVNSVGPGSIATDVLASVASDEAARNRILSRTPLGRIGEPDEIGEVVAFLASDSSSYMTGQVLYVDGGRLALNYTV

SEQ ID NO: 1846 - DNA, 825 bp, Physcomitrella patens subsp. patens
  CDS (1)..(825)
atggcagtgcttgaagggaaagtggcacttataacaggggcgtcgtcgggtttgggccgggagtttgcattgtcgctgtctaaaaacggtgccaatgtgattctagccgcccggcgaaagaacttgctggattcgctttgtgatgagatcaacgcacttgcgaaccaaagcgaagggaaagggccaaggtcagggaaagcggtagcgatagagttggatgtgagtgccagtgagcccgttattgatgctgcagtggaaaaagcgtgggcagcgttagggtatatcgatgttctcgtcaacaatgccggattgagaggtcctgtcagaacccccatagatcaagaagagcatgaatggaatgccatcttcaacaccaatttgcgcggcacgtggctcatgtccaaggctgtatcgaagcgattagtggcagcgaagagaggaggctccattattaacatttcatcaattgggggcattgaacggggcttgttgcccggtggcttagcatactccacgtccaaagccgccgtaatacatctctccaagattatggcaatggagcttgggcatcacaacatccgcacgaacgccatagctgcaggattgttcaagtcggagatcacaaacgacctgttccagaaagagtggctgcacaaggttgctacgaagatcgtgcctgctggaaaatggggagctgttgatccggacttgacgtcacttgtgatcttgcttgctagtgacgactcccagtacatcaccggcaacacgttcattgtggatggcggccagagcctacccggcttgcccatttggtcatctctgtaa

SEQ ID NO: 1847 - protein, 274 aa, Physcomitrella patens subsp. patens
MAVLEGKVALITGASSGLGREFALSLSKNGANVILAARRKNLLDSLCDEINALANQSEGKGPRSGKAVAIELDVSASEPVIDAAVEKAWAALGYIDVLVNNAGLRGPVRTPIDQEEHEWNAIFNTNLRGTWLMSKAVSKRLVAAKRGGSIINISSIGGIERGLLPGGLAYSTSKAAVIHLSKIMAMELGHHNIRTNAIAAGLFKSEITNDLFQKEWLHKVATKIVPAGKWGAVDPDLTSLVILLASDDSQYITGNTFIVDGGQSLPGLPIWSSL

SEQ ID NO: 1848 - DNA, 795 bp, Magnaporthe grisea 70-15
  CDS (1)..(795)
atgcccaatcccttccttgaaaagctcttctccctggatggccgcctcgccgtcgtgacgggcggaacgcggggcatcgggcaggccatggccgttgcgctcgcagaggccggtgccgacatcattctaattcagcgcgacgagagcaacctcgacacaaagtcccaaatcgaagccctcggccgcaaagcaaccgtctacacctgcgacctctcatcccaggaatccgtcgagcggctggcaccaaggattctagccgacggccacgacgtctccgtcctcgtgacctgcgccggcatccaaaggcgccacccagcacacatcttccccatgggtgactgggacgaggtccttcaagtaaatctcaaaaccgtctggacgcttgaccgggatttcggcgcctacatgctcactcggccggccgacccggccaccggccaccgcgggagcatcatcaacgtcgcgtcgctcgtttccttccagggcggcatcacggttccggcgtacgcggcggccaagggtggcatcgcgcagctgaccaaggcgttgagtaatgaatgggcgagcaaaggcgtcaatgtaaacgcgattgcgccgggctacgtcgctacggatatgaacgaggctttgctcaaggacgaggcgagggcggcgagcattttggctaggatccccgctggaaggtgggggaatgcggatgacttcaagggcgcgacggtgtttttggcagggaggggcagcttgtacgtttcaggggagcttttgactgttgatgggggttggatggggaggtag

SEQ ID NO: 1849 - protein, 264 aa, Magnaporthe grisea 70-15
MPNPFLEKLFSLDGRLAVVTGGTRGIGQAMAVALAEAGADIILIQRDESNLDTKSQIEALGRKATVYTCDLSSQESVERLAPRILADGHDVSVLVTCAGIQRRHPAHIFPMGDWDEVLQVNLKTVWTLDRDFGAYMLTRPADPATGHRGSIINVASLVSFQGGITVPAYAAAKGGIAQLTKALSNEWASKGVNVNAIAPGYVATDMNEALLKDEARAASILARIPAGRWGNADDFKGATVFLAGRGSLYVSGELLTVDGGWMGR

SEQ ID NO: 1850 - DNA, 864 bp, Gibberella zeae PH-1
  CDS (1)..(864)
atgtctgcttcgttcttctctcttcaaggccaaacggctcttgtcactggtggcacacgtggtattggccaagctgtagccatcggcctggcagaggctggctccgacatcattctagtacagagagacacaacatcacaatcgacgaaggagtcaatcgagaagctaggccgaaaggcttttatttacaccgccgacctatcatcgcaagaatctgttgctgctcttgtgcccaaggtccttgccgacggtcatgagatccgcatcttgatcaactgtgctggcattcagcgacgtcacccttgcgaagtcttccctgacagcgacttcaatgaggttatccaagtcaacctcaactctgttttcactctttgtcgcgatgttggcgcccatatgctaaatctagaaccgtcccccgtcaccggtcgtcgcggcagcatcatcaacttcggctcccttctgacattccagggcggcttcacagtccccgcctacgccgcatctaaaggcgctgttggccaaatgaccaagagtttcgccaacgagtggactgccaagggcattaccgtcaacgcaattgctcctggatacatcgaaactgatatgaatgaggctctactaaacaacccagagcgtctcgccagcatcacttcgagaattcccgccggcaactggggctcgccggatgatttcaagggcacttcggtgtacctcgcaagcaaggccagcggatattccaaatacccacatatcaagtcaacggcgtgcgcgaataagtcttcgtttggccaaacgcggcatgccgtcgcaatacgtgactactgtgaccttgttgacaagacggcggacgatatgcagcactga

SEQ ID NO: 1851 - protein, 287 aa, Gibberella zeae PH-1
MSASFFSLQGQTALVTGGTRGIGQAVAIGLAEAGSDIILVQRDTTSQSTKESIEKLGRKAFIYTADLSSQESVAALVPKVLADGHEIRILINCAGIQRRHPCEVFPDSDFNEVIQVNLNSVFTLCRDVGAHMLNLEPSPVTGRRGSIINFGSLLTFQGGFTVPAYAASKGAVGQMTKSFANEWTAKGITVNAIAPGYIETDMNEALLNNPERLASITSRIPAGNWGSPDDFKGTSVYLASKASGYSKYPHIKSTACANKSSFGQTRHAVAIRDYCDLVDKTADDMQH

SEQ ID NO: 1852 - DNA, 735 bp, Apis mellifera
  CDS (1)..(735)
atgaacatcaattttgtgggaaaacgtattcttgtaacaggagctggacgaggtattggcaaagatttagctcttcgtctttccaaatatgaaggtcaagtaatagcgttgtccaagaaaaaagagaatctagataagctatgtaaagaagatcctcgtattcagtttatttgcgtcgatctcagcgattggaacgccaccaggaaagccgttgaaagtgtgttacctatagatctcttagtaaataatgccggtgttgcacatcttaattctttcttcgatgctacaccagaagattttgatttaacatttacagtaaatgtgaaagctatattgaatgtttctcagatagtcgcaaaaaatatgattgaaagaaaagttggtggtagtattgttaatatttcttcgcaagccagccaagcagctttgaaggatcatgttgtctattgcgcttcgaaaggagcagtagatatgttgtctaaaacaatggctcttgagcttggtccctataatattcgagtgaataccgtgaatcctacagtgattttgacggaaatgggaaaattaggttggagtgatccgaaaaaagcacgaactatgttagacaaaataccattaggtcgattcggcgaagtgtccgaggtagtggatgcgatagtgtatttattaagcaatcacagctcgatgattaatggaattacattgccagtggatggtggatttttagcaacataa

SEQ ID NO: 1853 - protein, 244 aa, Apis mellifera
MNINFVGKRILVTGAGRGIGKDLALRLSKYEGQVIALSKKKENLDKLCKEDPRIQFICVDLSDWNATRKAVESVLPIDLLVNNAGVAHLNSFFDATPEDFDLTFTVNVKAILNVSQIVAKNMIERKVGGSIVNISSQASQAALKDHVVYCASKGAVDMLSKTMALELGPYNIRVNTVNPTVILTEMGKLGWSDPKKARTMLDKIPLGRFGEVSEVVDAIVYLLSNHSSMINGITLPVDGGFLAT

SEQ ID NO: 1854 - DNA, 783 bp, Debaryomyces hansenii CBS767
  CDS (1)..(783)
atgttatcattattttcattagaaggacaagttgcgttgataaccggtggtactaatggtatcggcttggggatggccaagggtttagcggatgcaaatattgatcagattatcttaacatacagatccgagaaaccattagagaatacaattaaagttttacaggaagttaatccaaaagtcaaaatcagctcaattgaagctgattttggaacgggtaatgaagatgacttggtagcaaagattgcaactgaagcgtttaaaaagtcagtaagtggaaagatcgatattttgattaataatgctggtatcaataatcgtttcccgttcgacgagtttcctcaggacaaattcgacgaagttttgagagttaacttgaatatccctgttaagcttacgaaggcaatcggatgtaagatgttagaaactaaaactaaagggaagattgtgttcacagcttcattatgttcatttcaaggaggagttgactctaccgcgtatgcgattactaaggggggtataaagcaattcactgcagctctctcgaatgactggtccctgaaaggtattagagtgaattcaattgctccgggatacatttctactaaccttacagagcaaattgatccaaagcgacgcgaaacacttatctctcgtattcctatcggaagatggggtaatatggatgatttccaaggccctgctgttttcttgtgttctgaagccagtagatacgttactggtgaaacattggtcgtagatggtggatggttaggttattag

SEQ ID NO: 1855 - protein, 260 aa, Debaryomyces hansenii CBS767
MLSLFSLEGQVALITGGTNGIGLGMAKGLADANIDQIILTYRSEKPLENTIKVLQEVNPKVKISSIEADFGTGNEDDLVAKIATEAFKKSVSGKIDILINNAGINNRFPFDEFPQDKFDEVLRVNLNIPVKLTKAIGCKMLETKTKGKIVFTASLCSFQGGVDSTAYAITKGGIKQFTAALSNDWSLKGIRVNSIAPGYISTNLTEQIDPKRRETLISRIPIGRWGNMDDFQGPAVFLCSEASRYVTGETLVVDGGWLGY

SEQ ID NO: 1856 - DNA, 876 bp, Yarrowia lipolytica CLIB122
  CDS (1)..(876)
atgtccaactccgccaaagccgctgtcgtgccccccgcccccaccgccgaagatatcgcccgagccaacgccggatccaaggaagagcccgttttccaggctaagaactttctgtccaagttccgactcgatggcaaggtagccattgtgactggtggagctcgaggactcggattctccatggccgagggtctgtgttcggtcggcctcaagggcattgccattctggatgtgcagcaggacctgggtctggatgccattgagaagctgcacaaggcctacggagtgcaggcccagttctacaaggccgacgtccgagacgaggagtccgtcaacgagatcatcgaccgagttgtgcacgatctcgggtccgtcgacgttgtggtcaactccgccggtgttgctgaccttgttcacgcagctgagtaccccgcagacaagttccgacgagtcatcgacatcaaccttaacggatccttcttggtgacccaggccgccgcccgacacatgatcaagcagggcaccggcggaaccgtggtgttcatcgcctccatgtccggatccattgtcaactggccccagcctcagagcgcttacaacgcctccaaggctgccgtcaagcacctgtctaagtcgctggccgccgagtgggccgtccacaacatccgatgcaactccatctcgcctggatacatggataccgctcttaaccgagcctacaacactctgtttgaggagtggaaggaccgaacccccctcggccgactcggagaccccgacgagctcaccggcgcctgcatctacctggcttccgatgcctcttcgtacgtgaccggatccgacattatcattgatggtggttacactattatttaa

SEQ ID NO: 1857 - protein, 291 aa, Yarrowia lipolytica CLIB122
MSNSAKAAVVPPAPTAEDIARANAGSKEEPVFQAKNFLSKFRLDGKVAIVTGGARGLGFSMAEGLCSVGLKGIAILDVQQDLGLDAIEKLHKAYGVQAQFYKADVRDEESVNEIIDRVVHDLGSVDVVVNSAGVADLVHAAEYPADKFRRVIDINLNGSFLVTQAAARHMIKQGTGGTVVFIASMSGSIVNWPQPQSAYNASKAAVKHLSKSLAAEWAVHNIRCNSISPGYMDTALNRAYNTLFEEWKDRTPLGRLGDPDELTGACIYLASDASSYVTGSDIIIDGGYTII

SEQ ID NO: 1858 - DNA, 783 bp, Candida albicans SC5314
  CDS (1)..(783): transl_table=12
atgtctcaattattttcccttaatggccaagtagcaattttaactggtggtaccaatggtattggattaggttatgccaaaggtttggctagtgcagacttggatcaattgatattaacctacagatcagaatccactttggaaaaagcaaagaaaataatccatgaagtcaatccaaatgttcaaattgatggtatcaaaattgattttttaaaagatgaagaagatgaaattatcaccaaaatagttgaagaatcctataaattatctaaaacttcaaacattgatattttggtcaataatgcaggaataactgaaagatatccttttgaagattttccacaagataagtttgacgatgtgataaaagttgatttgaatattccggtaaagttgactaaagctattggtaagaaaatgcttgaaacaaataccaagggtaagattgtttttaccgcttctttgttatcattccaaggcgggatgttgtcgaccccctatgccatcagtaaaggtgctttaaaacaattcacacaagcagtatctaatgaatggtcatcaagaggtatcagggtcaattcaattgcacctggatatatcaaaaccaatttgaccgacagcatgagtgaagagaacaagaaaattgttgatttgagaatcccaatgaaaagatggggtaacccagatgactttatggggccaattgtctatcttacatctgatgcatcgaaatatgttactggtgacacattattagttgatggtggttggatgggccgatag

SEQ ID NO: 1859 - protein, 260 aa, Candida albicans SC5314
MSQLFSLNGQVAILTGGTNGIGLGYAKGLASADLDQLILTYRSESTLEKAKKIIHEVNPNVQIDGIKIDFLKDEEDEIITKIVEESYKLSKTSNIDILVNNAGITERYPFEDFPQDKFDDVIKVDLNIPVKLTKAIGKKMLETNTKGKIVFTASLLSFQGGMLSTPYAISKGALKQFTQAVSNEWSSRGIRVNSIAPGYIKTNLTDSMSEENKKIVDLRIPMKRWGNPDDFMGPIVYLTSDASKYVTGDTLLVDGGWMGR

SEQ ID NO: 1860 - DNA, 837 bp, Ustilago maydis 521
  CDS (1)..(837)
atggcgaccacagacgcagcttgcgaaaagacaccttcgacgtcgtcgttgggattgttcaacctctctggtaaaacggctctgctcactggtggcactcgcggcatcggccaagcatgtgctgtggctcttgtcgaggcaggggcttcggtgattctcgcggttcgccctggcaccgccacttctggcgctcatccagctcttgcgcctctcactgcggttgccaaccaatcttgctcgcaaaaacactctaccgtcgatgctgatctttccgacctctcccaagtcaagacgctcttcgaccgagctctctcgcagtcgcctacttctgcgattgacattttggtcaactgcggcggaattcaacgtcgacacccatcggtcgactttcccgagtccgactgggacgaagtgctcaacgtcaacctgaaagctgtttggcttgtctcgcaagcagcgggtcgccacatggtcgcacgtcgttccggaaaaatcatcaactttggctctctgcttaccttccaaggtgggcttacagtgcctgcgtacgcttcggcaaagggagcagtgggacagctgaccaaagcactcagcaacgagtgggcaaaacataacgtccaggtcaacggtattgctcctggttacattgctacggatatgaacgaaaagctgctcgccgacccgaccaggctgaggcagatcagcgaaaggattcccgcgggcagatggggtgatccggccgacttcaaagggccattgctgttcttggccagccaggcaagccagtacgtgagcggtgagatgttggttgttgatggtggttggatgggtcgttga

SEQ ID NO: 1861 - protein, 278 aa, Ustilago maydis 521
MATTDAACEKTPSTSSLGLFNLSGKTALLTGGTRGIGQACAVALVEAGASVILAVRPGTATSGAHPALAPLTAVANQSCSQKHSTVDADLSDLSQVKTLFDRALSQSPTSAIDILVNCGGIQRRHPSVDFPESDWDEVLNVNLKAVWLVSQAAGRHMVARRSGKIINFGSLLTFQGGLTVPAYASAKGAVGQLTKALSNEWAKHNVQVNGIAPGYIATDMNEKLLADPTRLRQISERIPAGRWGDPADFKGPLLFLASQASQYVSGEMLVVDGGWMGR

SEQ ID NO: 1862 - DNA, 837 bp, Cryptococcus neoformans var. neoformans B-3501A
  CDS (1)..(837)
atgtcctacttacaaaacctctttggccttacaggaaaaactgctttgatcactggcgccacccggggtattggggctcgaatggcccttgctctcgccaaagccggtgccgacatcatccttgtccagcgtaacaccagcaacaccgcgacccgagacgatattattgctgcggggggcaaggctgacattgttgtttgcgacctcggtgatgcggcctctgttgccaagctcattccccacgttaccaaggagcttggacgaactcttgacattgtcgtcaactgtgggggtatccagcgtcgacaccccgttgagaacttccctgagaatgattggaacgacgttctccaggtcaacttgaacactgtcttcactatcactcgagatgctggtaggcacatgctcgaatctcgaggtggtgtcgctggtgagcccgtccccgaaggcggcgctgctggcaaccccagaggcttcggcaagatcatcaacatctccagcctagtggcctaccagggtggtttgaacgttgtggcttacgccgctgccaagcacggtgtccaaggcattgtcaagtccttctctaacggttgggcttctaaaggcgtctgtgtcaatgccattgcccccggttacatcgctaccgacatgaacgaagctctcatagcagacaaggaccgagctcgtcaaatcctcgaacgtattcctgccggccgatggggatctcctgaagactttgagggtgccattgtcttccttgcttctcgagcgagtgactacgtcaccggtgaatgtctggttgttgacggcggatggatggctcgtgagtgtgtttaa

SEQ ID NO: 1863 - protein, 278 aa, Cryptococcus neoformans var. neoformans B-3501A
MSYLQNLFGLTGKTALITGATRGIGARMALALAKAGADIILVQRNTSNTATRDDIIAAGGKADIVVCDLGDAASVAKLIPHVTKELGRTLDIVVNCGGIQRRHPVENFPENDWNDVLQVNLNTVFTITRDAGRHMLESRGGVAGEPVPEGGAAGNPRGFGKIINISSLVAYQGGLNVVAYAAAKHGVQGIVKSFSNGWASKGVCVNAIAPGYIATDMNEALIADKDRARQILERIPAGRWGSPEDFEGAIVFLASRASDYVTGECLVVDGGWMARECV

SEQ ID NO: 1864 - DNA, 735 bp, Tribolium castaneum
  CDS (1)..(735)
atggaaattagtttccacggaaaaagagcccttgtcacaggagccagccaaggaattggccgtgatatcgccctccaattggccaaatgtggagccaaagtgatagcagtggcccgaaataaagaactgttggatgagttaaaaaacgagaacccgtccattgacacactttccgtcgatttatccgactggaaagccactcaaaacacactatccaacattttcccaattgaccttctagtcaacaatgccggaattgtgattttgaagcccgttccgacctttgacgagtcagacgtcgaccgtattttcgacatcaacgtcaaggctctcataaatgtgactcaaatggtcactagagacctcctctccaggaaatcccccggttccattgtcaacatatcgtctcaaacggccaaagtcggccttgaaagacactcagtctactgtgggaccaagggcgccgtcgacgcctacacaagggccgtagccctggaacttggcccttacaacatccgggttaattgtgttaaccccactgttatcatgaccgaaatgggcaaaaagggctatgcggacccgaaactagccgaacccttgaaacagaaaatccccttgaggcggttcggggaagtccgggaagtaaccgacgctgttttgtttctattaagtgacaaggcgactatgattaccggcgagtcgcttctagtagatggaggatatgtacaagcttag

SEQ ID NO: 1865 - protein, 244 aa, Tribolium castaneum
MEISFHGKRALVTGASQGIGRDIALQLAKCGAKVIAVARNKELLDELKNENPSIDTLSVDLSDWKATQNTLSNIFPIDLLVNNAGIVILKPVPTFDESDVDRIFDINVKALINVTQMVTRDLLSRKSPGSIVNISSQTAKVGLERHSVYCGTKGAVDAYTRAVALELGPYNIRVNCVNPTVIMTEMGKKGYADPKLAEPLKQKIPLRRFGEVREVTDAVLFLLSDKATMITGESLLVDGGYVQA

SEQ ID NO: 1866 - DNA, 768 bp, Novosphingobium aromaticivorans DSM 12444
  CDS (1)..(768): transl_table=11
atgagcattttcgacctttcgggccgcgtcgcggtcgttaccggcgcgaacaccgggatcggacagggcatcgcggtggcgctggccgaggcgggcgccgacatcgccgccgtgggtcgcaccccggccgaagaaaccgccgccaaggtgcgtgcgctcggccgcaagtgcgaactggtgagcgccgacctttcgaccatcgccccggtacaggacgtggtcgacgaggtgctgtcgtcgctgggcgggctcgacatcctcgtcaacaatgccgggatcatccgccgggcggacgcggtcgacttcaccgaagaggactgggacgcggtcgtcgacaccaacctcaaatcggtgttcttcctctcgcaggctgcggggcgccacatgatcgcgaaccgcgaagccaccgggcggcgcggcaagatcatcaacattgcatcgatgctgagcttccagggcggcatccgcgtacccagctataccgctagcaagagcggcgttgccgggctgaccaggctgctcgcctgcgaatgggccgccaggggcgtgaacgtcaacgccatcgcgccgggctacatcgccacgaacaacacgtccgccctccaggccgacgagacccgcaaccgccagatcatggaacgcattcccgaaggccgctggggcgatcccgccgacatcggcggtgcggcggtgttccttgccagcggcgccgccgactatgtccagggtcacgtcctggccgtggacggcgggtggctggcgcgatga

SEQ ID NO: 1867 - protein, 255 aa, Novosphingobium aromaticivorans DSM 12444
MSIFDLSGRVAVVTGANTGIGQGIAVALAEAGADIAAVGRTPAEETAAKVRALGRKCELVSADLSTIAPVQDVVDEVLSSLGGLDILVNNAGIIRRADAVDFTEEDWDAVVDTNLKSVFFLSQAAGRHMIANREATGRRGKIINIASMLSFQGGIRVPSYTASKSGVAGLTRLLACEWAARGVNVNAIAPGYIATNNTSALQADETRNRQIMERIPEGRWGDPADIGGAAVFLASGAADYVQGHVLAVDGGWLAR

SEQ ID NO: 1868 - DNA, 768 bp, Bradyrhizobium sp. ORS278
  CDS (1)..(768): transl_table=11
atgacaggccgtttcgacctgaggggcaaggttgcgatcgtgacaggaggcaacggcgggatcggacttggcatggcccgaggcttggccgatgcgggtgccgacatcgccgtcatcggccgcaacgaggccaagtcgcaggcggcgatcgccgatctcgccagccgcggcgtgcgcgccatcgctgtgacggccgacgtccgcaacaagaacgatgtcgacgcgatggtcgcgcgtgtcaccgcggcgctcggccggatcgacatcctgatcaacaatgccggcatgagcatccgcaagccgccgcatctgctcgagctcgaggaatggcaggaggtgatcgacaccaatctcaccagcgccttcctgtgctcgaaggccgcctaccccgcgctcaaggccaatggcggcggcaagatcatcaacatcggctcgatgctgtcgatcttcggcgccagcttcgcgccggcctacgcagcgagcaaaggcggcatcgtgcagtatacgcgcgcctgtgcctgcgcctgggcgcccgacaacattcaggtcaacgcgattctgccgggctggatcgacaccgatctgacgcgggccgcccgccagcagatcgatggcctgcatgaccgggtgctggcgcgcacgccggctgcgcgctggggccacatcgacgacttcgccggtatcgccaccttcctcagctcctcggcctcggacttcgtcacgggcactgcgattcccgtcgacggcggctactcgatcatggcctga

SEQ ID NO: 1869 - protein, 255 aa, Bradyrhizobium sp. ORS278
MTGRFDLRGKVAIVTGGNGGIGLGMARGLADAGADIAVIGRNEAKSQAAIADLASRGVRAIAVTADVRNKNDVDAMVARVTAALGRIDILINNAGMSIRKPPHLLELEEWQEVIDTNLTSAFLCSKAAYPALKANGGGKIINIGSMLSIFGASFAPAYAASKGGIVQYTRACACAWAPDNIQVNAILPGWIDTDLTRAARQQIDGLHDRVLARTPAARWGHIDDFAGIATFLSSSASDFVTGTAIPVDGGYSIMA

SEQ ID NO: 1870 - DNA, 756 bp, Bradyrhizobium sp. ORS278
  CDS (1)..(756): transl_table=11
gtggcggtcggcttgttcgatctgacggggcggcgcgccctggtgaccgggtcctcgcaaggcatcggtcttgcgctcgcacgcgggctggcggacgctggcgctgaggtcgtgctcaacggccgcgatgcaaccaagcttgctgcggcggccgcagcgatcaagggagcgcgcgtgctcgccttcgacgtcaccgaccacgccgcggcgcgcgcggccgtcgaccgctttgaggccgagatcgggccgatcgacattctggtcaacaatgccggcatgcagcaccgcgcgccgctggaggagtttcccgaggacgcgttccagcgcctgctgcagaccaacatcgcctctgtgttcaatgtcggccaggcctgcgcgcggcatatgatcgcgcgccacgccggcaagatcatcaacatcgcctccgtgcagacctcgctggcgcggccgtcgatcgcgccgtacaccgcctccaagggcgcggtcggcaatttcaccaagggcatggcgacggattgggccaagcacggtctgcaggtcaacgccatcgcgccgggctacttcgacacgccgctcaacgcggcgctggtcgcggatcccgctttctccgcctggctcgagaagcgcacgccggcggggcgctggggcaaggtggaggaactcgtcggcgcctgcatcttccttgcctcggccgcatcgtcgtttgtcaatggccatgtgctctatgtcgacggcggcatcactgcctcgctctga

SEQ ID NO: 1871 - protein, 251 aa, Bradyrhizobium sp. ORS278
MAVGLFDLTGRRALVTGSSQGIGLALARGLADAGAEVVLNGRDATKLAAAAAAIKGARVLAFDVTDHAAARAAVDRFEAEIGPIDILVNNAGMQHRAPLEEFPEDAFQRLLQTNIASVFNVGQACARHMIARHAGKIINIASVQTSLARPSIAPYTASKGAVGNFTKGMATDWAKHGLQVNAIAPGYFDTPLNAALVADPAFSAWLEKRTPAGRWGKVEELVGACIFLASAASSFVNGHVLYVDGGITASL

SEQ ID NO: 1872 - DNA, 762 bp, Klebsiella pneumoniae subsp. pneumoniae MGH 78578
  CDS (1)..(762): transl_table=11
atggtactgaacgccttcgacctgacgggtaaggtcgccatcgtgaccggttgcgataccggcctgggacagggaatgacgctgggcctggcgcaggccgggtgcgatatcgtcggcatcaaccgtaaaattccccatgatacggccgcccaggtgctggcgctgggccgccgctttcacgccattcaggcggatctcagccaagagaatgatatgagcggtctggtcgaccaggcggtggcggcgatgggccgggtcgatattctggtcaacaacgccggaattatccgccgccatgatgccctgaccttcacggaaagcgactgggacgcggtgatcgacctgaatctcaaagcggttttctttctcagccaggcggtcgccaggcagttcattcgccagggggaaggcgggaaaatcattaacatcgcctcgatgctctcgtttcagggcgggatccgcgtcccctcctacaccgcctcgaaaagcggcgtgctgggtttgacccgtctgctggctaacgaatgggctggccagggtatcaacgtcaacgccatagcgcccgggtatatggccaccaacaacacccaggcgctgcgcgaagatgaagagcgtaaccaggcgatcctcgagcgcattcccgctggtcgctggggagcgccgaaagacctgcaggggccggtggtgtttctcgcctcatcagcggccgactatattaacggctatactctggccgtcgatggcggatggctggcgcgctga

SEQ ID NO: 1873 - protein, 253 aa, Klebsiella pneumoniae subsp. pneumoniae MGH 78578
MVLNAFDLTGKVAIVTGCDTGLGQGMTLGLAQAGCDIVGINRKIPHDTAAQVLALGRRFHAIQADLSQENDMSGLVDQAVAAMGRVDILVNNAGIIRRHDALTFTESDWDAVIDLNLKAVFFLSQAVARQFIRQGEGGKIINIASMLSFQGGIRVPSYTASKSGVLGLTRLLANEWAGQGINVNAIAPGYMATNNTQALREDEERNQAILERIPAGRWGAPKDLQGPVVFLASSAADYINGYTLAVDGGWLAR

SEQ ID NO: 1874 - DNA, 762 bp, Klebsiella pneumoniae subsp. pneumoniae MGH 78578
  CDS (1)..(762): transl_table=11
atgattcttgatgcattctccctgcagggaaaagtggccgtcgtgagcggatgcgataccggtttaggtcaggggatggccctcgggctggcggaagcgggctgcgatattgtcggtatcaatatcgtcgaaccggtggagactatcgagcgggtaaccgcgctgggacgccgttttctcagcctgaccgccgacctgcgccagatcgacggtattcctcagcttctggagcgggcggtggcggagttcggccatattgatattctggtcaacaatgccggcctgattcgccgcgaggacgcgctggcgttcagcgaaaaagactgggacgacgtgatgaacctcaacatcaagagcgtattttttatgtcccaggcggcggcgaaacactttatcgcccagggcagcggcgggaagatcattaacatcgcctccatgctgtcgttccagggggggatccgcgtgccgtcgtataccgcatccaaaagcgcggtgatgggcgtcacccgcctgctggccaacgagtgggccaaacacaacatcaacgtcaacgccatcgccccggggtatatggcgaccaacaacacccagcagctgcgcgccgacgagcagcgtagcagcgaaatcctcgatcgcattcccgccgggcgctgggggctaccggccgatctgatggggccagtcgtgttccttgcctcctcagcctccgattacatcaatggctacacggtggcggtggacggcggctggctggcgcgctaa

SEQ ID NO: 1875 - protein, 253 aa, Klebsiella pneumoniae subsp. pneumoniae MGH 78578
MILDAFSLQGKVAVVSGCDTGLGQGMALGLAEAGCDIVGINIVEPVETIERVTALGRRFLSLTADLRQIDGIPQLLERAVAEFGHIDILVNNAGLIRREDALAFSEKDWDDVMNLNIKSVFFMSQAAAKHFIAQGSGGKIINIASMLSFQGGIRVPSYTASKSAVMGVTRLLANEWAKHNINVNAIAPGYMATNNTQQLRADEQRSSEILDRIPAGRWGLPADLMGPVVFLASSASDYINGYTVAVDGGWLAR

SEQ ID NO: 1876 - DNA, 756 bp, Kineococcus radiotolerans SRS30216
  CDS (1)..(756): transl_table=11
gtgaaccaccccttcgacctcaccggccgcacggccctcgtcaccggcggggggcgcggcctgggcctggggatctccacgtccctgctgcgggccggcgccgacgtcgtcgtcctgggccgcggcgcgcccgccgcggacctcgcggaggaggccgcgcgctgcgggcggcgcctggtgcaccacgccgtcgacctcgccgacgccgccgccgtcgccgcgaccgcggccgccgtcctcgccgagcaccgcgtggacgtcctcgtcaacaacgccggcacccaggagcgccaccccgccgtcgagttccccctcgacgccttcgaccgcgtcctcgacgtgaacctgcgggcggtgttccagctctgccagctcttcggcgcgcccatgctggagcgcggggaggggcgcgtggtgaacatcgcctccctgctgtccttccagggcgggctcaccgtgcccgcctacgccgccagcaagggcgcggtggcgcagctgacgaaggcgctgtgcaacgagtgggccgggcgcggggtcggcgtcaacgccgtggcccccgggtacatggccaccgacatgaacgaggccctgctcgccgaccccgtccgccgcgagcagctctccgtgcggatccccgccgggcggtgggggacgccgcaggacgtcggcgacgtcgtcgtcttcctcgcctcccccgcggccgcctacgtgcacgggcacgtcctcgccgtcgacggcgggtggctggcccggtga

SEQ ID NO: 1877 - protein, 251 aa, Kineococcus radiotolerans SRS30216
MNHPFDLTGRTALVTGGGRGLGLGISTSLLRAGADVVVLGRGAPAADLAEEAARCGRRLVHHAVDLADAAAVAATAAAVLAEHRVDVLVNNAGTQERHPAVEFPLDAFDRVLDVNLRAVFQLCQLFGAPMLERGEGRVVNIASLLSFQGGLTVPAYAASKGAVAQLTKALCNEWAGRGVGVNAVAPGYMATDMNEALLADPVRREQLSVRIPAGRWGTPQDVGDVVVFLASPAAAYVHGHVLAVDGGWLAR

SEQ ID NO: 1878 - DNA, 768 bp, Xanthobacter autotrophicus Py2
  CDS (1)..(768): transl_table=11
gtgtccctcaaattgttcgacctcagcggcaagcgtgcactggtcaccggatcggggcagggcataggcctttcgctggccgagggcctgggccgcgctggcgcccgcgtggtcatcaatggccgtgacgaggccaagctcgccagggccgccgagcagctttccgcgcagggcatcgccgtggagcagtccgcctttgatgtgaccgatcccaaggcggtggtcgaggccgtggacgccatcgaaaaggaccatggccccatcgatattctcgtcaacaatgcgggcatccagcgccgcgcgccgctggaggagttcgaggtcgacacctggcgcgaggtgatgcgcaccaatctcgacagcgtgttcttcgtgggccaggcggtggcccgccacatgatcaagcgcgggcgcggcaagatcatcaatatcggcagcctcatgagcgcggcggcgcgctattcggtggcgccctatacggcggccaagggcggcgtgcgcaacctcaccttcggcatgtgcaccgactgggcccgccacggcctccagattaatgcggtggggccgggctatttcgccaccccgctcaatcaggcgctggtggaaaaccccgatttcgaccgctggctgaaggcccgcacccccgccggccgctggggcagggtggaggaattgcagggcgccgtgatcttcctcgcctcgcccggatccgatttcgtcaacggccagattctctacgtggacggcggcgttctggcgacgctttga

SEQ ID NO: 1879 - protein, 255 aa, Xanthobacter autotrophicus Py2
MSLKLFDLSGKRALVTGSGQGIGLSLAEGLGRAGARVVINGRDEAKLARAAEQLSAQGIAVEQSAFDVTDPKAVVEAVDAIEKDHGPIDILVNNAGIQRRAPLEEFEVDTWREVMRTNLDSVFFVGQAVARHMIKRGRGKIINIGSLMSAAARYSVAPYTAAKGGVRNLTFGMCTDWARHGLQINAVGPGYFATPLNQALVENPDFDRWLKARTPAGRWGRVEELQGAVIFLASPGSDFVNGQILYVDGGVLATL

SEQ ID NO: 1880 - DNA, 762 bp, Salmonella enterica subsp. arizonae serovar 62:z4,z23:--
  CDS (1)..(762): transl_table=11
atgattttgaatgcattttctcttgaaggtaaagtcgcggttgttacaggttgtgataccgggctgggccagggtatggctttagggctggcggaagcgggctgtgacattgtcggaattaacatcgttgagccgacggaaaccatcgcgcgcgtcaccgctctgggacgccgttttttaagcctgacggccgatctgcgtcaaattgatggtattccggcgctactggaacgtgcggtagcggaatacggtcatattgatattctggtgaataacgcgggcttgatccgtcgtgaagatgcgattgatttcacggaaaaagactgggatgacgtcatgaacctgaatattaagagcgtattctttatgtctcaggcggcggcaaaacactttattgcccagggcaacggcggcaaaattattaatatcgcctctatgctctccttccagggcggtattcgcgttccgtcttacaccgcgtcgaaaagcggtgtaatgggaataacgcgcctgatggcgaacgagtgggcgaaacacaatatcaatgtgaacgctatcgcgccgggctatatggcgaccaataatacccagcaattacgcgcagatgaacaacgtagcgccgaaattctcgaccgtattccggctggacgttggggactgccggatgatttaatgggcccagtggttttcctggcatccagcgccgctgattatatcaacggctataccgtagcggtagatggcggttggctggcgcgttaa

SEQ ID NO: 1881 - protein, 253 aa, Salmonella enterica subsp. arizonae serovar 62:z4,z23:--
MILNAFSLEGKVAVVTGCDTGLGQGMALGLAEAGCDIVGINIVEPTETIARVTALGRRFLSLTADLRQIDGIPALLERAVAEYGHIDILVNNAGLIRREDAIDFTEKDWDDVMNLNIKSVFFMSQAAAKHFIAQGNGGKIINIASMLSFQGGIRVPSYTASKSGVMGITRLMANEWAKHNINVNAIAPGYMATNNTQQLRADEQRSAEILDRIPAGRWGLPDDLMGPVVFLASSAADYINGYTVAVDGGWLAR

SEQ ID NO: 1882 - DNA, 765 bp, Haemophilus somnus 2336
  CDS (1)..(765): transl_table=11
atgtgtgatttattttctttacaaaataaacgaattttaattacaggatctgctcgtggcatcggtcgtttattggcagagggtgttgctgaacaaggtgctgaagttattataaatggtactaatcaagaaaaatgtcaattggttgctgatgaattaactgctaaagactataaggctcacgctgttgcttttgatgtgacaaatactcaagccgttcatcaggccattgctcatatcgaacaacatattggagcaattgatgtattaattaataatgccggtattcaacgtcgccacccattctgcgattttccggaaaaagattatgatgatgtcattaatgtcaaccaaaaatctgtatttattgtttcccaaacagtggctcgctatatggtgaaacggcaagcaggaaaaatcatcaatattggttcaatgcaaagtgaattagggcgagacactattacaccttatgcggcatctaaaggtgcggtgaaaatgctaacaagaggaatgtgcgtagaattggctcgtcataatattcaagtcaatggtattgctcccggttatttcaaaactgaattaacccgtccgttagtagaaaacaaagaattttccgactggttgtgcaaacgtactccagcagcccgttggggaaatcctgaagaactaatcggtgcgactgtttttctttcatctaaagcatctgattttgttaatgggcatttgttattcgttgatggtggtatgcttgctgctgtttaa

SEQ ID NO: 1883 - protein, 254 aa, Haemophilus somnus 2336
MCDLFSLQNKRILITGSARGIGRLLAEGVAEQGAEVIINGTNQEKCQLVADELTAKDYKAHAVAFDVTNTQAVHQAIAHIEQHIGAIDVLINNAGIQRRHPFCDFPEKDYDDVINVNQKSVFIVSQTVARYMVKRQAGKIINIGSMQSELGRDTITPYAASKGAVKMLTRGMCVELARHNIQVNGIAPGYFKTELTRPLVENKEFSDWLCKRTPAARWGNPEELIGATVFLSSKASDFVNGHLLFVDGGMLAAV

SEQ ID NO: 1884 - DNA, 762 bp, Pectobacterium atrosepticum SCRI1043
  CDS (1)..(762): transl_table=11
atgattttaaattcttttgatttgcaaggtaaagttgctcttatcacgggttgtgatacgggtttaggtcagggtatggctatcggtctggcacaagctggctgtgatatcgttggcgtcaacatcgttgaaccaaaagataccatcgaaaaagttaccgcactgggacgccgtttcctcagcctgaccgctgacatgagcaacgtagcgggtcatgccgagctggtagagaaagccgttgctgaatttggtcacgttgacattctggtcaacaacgccggtatcatccgtcgtgaagatgctatcgagttcagcgagaaaaactgggacgacgtcatgaatctgaacattaagagcgttttctttatgtctcaggctgttgcacgccagtttatcaaacaaggtaaaggcggcaagatcatcaacatcgcctctatgctgtccttccaaggcggtatccgcgtgccttcttacactgcgtcaaaaagcgccgttatgggtgtaacccgtctgctggctaacgagtgggcaaaacacggcatcaacgttaacgccattgctccagggtacatggcaaccaacaatactcagcaactgcgcgccgatgaagaccgcagcaaagagattctggaccgtatcccggctggccgttggggtttaccacaggatctgatgggcccatccgtcttcctggcatccagcgcatctgattacatcaatggctacacgattgccgttgatggtggctggctggctcgctaa

SEQ ID NO: 1885 - protein, 253 aa, Pectobacterium atrosepticum SCRI1043
MILNSFDLQGKVALITGCDTGLGQGMAIGLAQAGCDIVGVNIVEPKDTIEKVTALGRRFLSLTADMSNVAGHAELVEKAVAEFGHVDILVNNAGIIRREDAIEFSEKNWDDVMNLNIKSVFFMSQAVARQFIKQGKGGKIINIASMLSFQGGIRVPSYTASKSAVMGVTRLLANEWAKHGINVNAIAPGYMATNNTQQLRADEDRSKEILDRIPAGRWGLPQDLMGPSVFLASSASDYINGYTIAVDGGWLAR

SEQ ID NO: 1886 - DNA, 765 bp, Yersinia pseudotuberculosis IP 32953
  CDS (1)..(765): transl_table=11
atgaagaatctattttcgttggaaaatcgcaaagtattaattactggctctgcacagggtattggattcttactggcaaaagggttagctgaatttggcgcagagattatcattaacgatatcaccgcagagcgtgctgaaaaagccgtggctgaattacgtgctagcggctttatcgcccatgccgccgcatttaacgtgacgaaccatgatgaagtcaatgaagctatcgagaaaatagaaagccatattggtgctatcgacgtgttaattaataatgccggtatccaacgccgccatgcctttaccgaattcccagaaaaagattgggatgatgtgattgctgttaatcagaaatcggtatttttagtttcacaagccgttgcccgttatatgattaaacgccaacgtggaaaaattattaatatctgttcaatgcaaagtgaattaggccgcgatacgatcaccccatatgccgcctctaaaggggcagttaaaatgctgacccgtgggatgtgtgtcgaactggctcgctacaatattcaggttaacggtattgcaccgggttatttcaaaacggatatgacaaaagcactggtcgatgatcaagcctttaccgattggttgtgtaaacgcacacctgccgcccgttggggagatccagaagagctcattggtgcagcggtttatttgtcatccaaagcctctgactttgttaatggtcatttgctgtttgttgatggtggcatgctggtagccgtttaa

SEQ ID NO: 1887 - protein, 254 aa, Yersinia pseudotuberculosis IP 32953
MKNLFSLENRKVLITGSAQGIGFLLAKGLAEFGAEIIINDITAERAEKAVAELRASGFIAHAAAFNVTNHDEVNEAIEKIESHIGAIDVLINNAGIQRRHAFTEFPEKDWDDVIAVNQKSVFLVSQAVARYMIKRQRGKIINICSMQSELGRDTITPYAASKGAVKMLTRGMCVELARYNIQVNGIAPGYFKTDMTKALVDDQAFTDWLCKRTPAARWGDPEELIGAAVYLSSKASDFVNGHLLFVDGGMLVAV

SEQ ID NO: 1888 - DNA, 765 bp, Symbiobacterium thermophilum IAM 14863
  CDS (1)..(765): transl_table=11
atgcagctcttctcgctggaaggccgggtcgccctggtgaccggggctgggcgggggatcggccgggccctggcgctgggcctggcggacgccggggcggacgtggtttgcctggccaggaccggctccgaggtggaggccgcggcggaggaggtccgggccaggggccgccgggcgctggcggtgaccgcagacgtgacgagccaggcgcaggtgacggaggccgtcgaggcggccctggaccggttcggcaagatcgacatcctggtgaacaacgcgggcatcaacatccgcaagccggcgctggaggtggcggaggcggactgggaccgggtggtgcagaccaatctgaagggtcccttcctggtcgcccagacggtgggccggcacatgtgcgagcggggctacggccggatcatcaacgtcgcatcggtaggcggagcggtggcgctgcgcaccggggttgcctacggcgccagcaaggcggggctgatgcacatgacccgtatcctggccatggagtgggcccggtacggggtgacggtgaacggcatcggcccctggtacttccgcacgccgctgacggagaagctgctgcaggacgaacagtacgtggcggagattctggcccgcacgccgatgcggcgcatcggcgacctggcggagctggtggggccggtggtgttcctcgcgtcggacgcgtccagctacgtcaccgggcaggtgctgatggtggacgggggcatgtctgtctacgggttctga

SEQ ID NO: 1889 - protein, 254 aa, Symbiobacterium thermophilum IAM 14863
MQLFSLEGRVALVTGAGRGIGRALALGLADAGADVVCLARTGSEVEAAAEEVRARGRRALAVTADVTSQAQVTEAVEAALDRFGKIDILVNNAGINIRKPALEVAEADWDRVVQTNLKGPFLVAQTVGRHMCERGYGRIINVASVGGAVALRTGVAYGASKAGLMHMTRILAMEWARYGVTVNGIGPWYFRTPLTEKLLQDEQYVAEILARTPMRRIGDLAELVGPVVFLASDASSYVTGQVLMVDGGMSVYGF

SEQ ID NO: 1890 - DNA, 801 bp, Mannheimia succiniciproducens MBEL55E
  CDS (1)..(801): transl_table=11
gtggtaaacacactgttaatacattttctacataggagaatttacatgaacttatttgatttaacaggaaaagttgcattagtaaccggttgtaacacgggtcttggtcagggaatggctttaggcttagcacaggcagggtgcgatattgtcggcgtgaatttagtcgaacctttagataccaaagaaaaaatcgaagccttaggccgtaaattcgttaatatcgaagcgaacctgatgaaacaggaaggccttacggacgttgtagaaaaagcggttagtgttttcggcaaaattgatattttagtgaataatgccggtattatccgtcgtgaagatgctattgatttttccgaacaaaactgggacgacgtgattaatattaacttaaaaacggtatttttcctttctcaacttgtggctaaacaatttatcgcccaaggtcacggcggtaaaattattaatgttgcgtcaatgctttctttccagggcggtattcgcgtgccttcttacaccgcatcaaaaagtgcgattatgggtataacccgcgcaatggcaaacgaatgggcaaaatataacattaatgtgaatgccgtcgctccgggctatatggcaacggataacaccgcggcattacgcgcggatgaagctcgcagtaaagaaattttagatcgtattcccgccggtcgttgggggacaccgaatgatttagtcggaccttgcgtattcctggcttctgcagcaggtgattacgtaaacggttatacagtcgcagttgacggcggttggttagcacgttaa

SEQ ID NO: 1891 - protein, 266 aa, Mannheimia succiniciproducens MBEL55E
MVNTLLIHFLHRRIYMNLFDLTGKVALVTGCNTGLGQGMALGLAQAGCDIVGVNLVEPLDTKEKIEALGRKFVNIEANLMKQEGLTDVVEKAVSVFGKIDILVNNAGIIRREDAIDFSEQNWDDVININLKTVFFLSQLVAKQFIAQGHGGKIINVASMLSFQGGIRVPSYTASKSAIMGITRAMANEWAKYNINVNAVAPGYMATDNTAALRADEARSKEILDRIPAGRWGTPNDLVGPCVFLASAAGDYVNGYTVAVDGGWLAR

SEQ ID NO: 1892 - DNA, 819 bp, Mannheimia succiniciproducens MBEL55E
  CDS (1)..(819): transl_table=11
gtgataaagataatatttctaaagtgcaactttcatttgaatgaggagcaaaaaatgagtgaactcttttctttaaagaataaacgaattttaattaccggttccactcgtggtattggtaatttattggcaaacggattagccgaacatggtgccgagatcattattcatggaactcgattggaaactgcggaaaaaattgccgcagattttaatacaaaaggctttaaagcttatgccgttgccttcgatgtaaccgattcaaaagcggcgcaagacaccatagattatattgaaaaagaaatcggtccgattgacgtactgataaataatgcgggtattcagcgccgttatccgttctgtgaatttccggaaaaagactatgacgatgtgattagtgtgaatcaaaaagccgtttttattatttctcaggcggttgccagatatatggtaaaacgccaacggggcaaaattatcaatatcggttcaatgcaaagcgaattaggccgtgacactatcacgccttatgccgcctctaaaggtgcggtaaaaatgctgacccggggaatgtgcgtcgaactagcccgctataacattcaggtcaacggcatcgctccgggttatttcgcaaccgaattgaccaaacctttagtagaaaatcaggaatttacatcctggttatgcaaacgtacgcctgccggtcgttggggcgatccaaaagaattaattggcgcggcggtatttttatcatccaaagcgtcagactttgtcaacggacatctgttattcgttgacggcggtatgttagcagccgtttga

SEQ ID NO: 1893 - protein, 272 aa, Mannheimia succiniciproducens MBEL55E
MIKIIFLKCNFHLNEEQKMSELFSLKNKRILITGSTRGIGNLLANGLAEHGAEIIIHGTRLETAEKIAADFNTKGFKAYAVAFDVTDSKAAQDTIDYIEKEIGPIDVLINNAGIQRRYPFCEFPEKDYDDVISVNQKAVFIISQAVARYMVKRQRGKIINIGSMQSELGRDTITPYAASKGAVKMLTRGMCVELARYNIQVNGIAPGYFATELTKPLVENQEFTSWLCKRTPAGRWGDPKELIGAAVFLSSKASDFVNGHLLFVDGGMLAAV

SEQ ID NO: 1894 - DNA, 765 bp, Bacillus licheniformis ATCC 14580
  CDS (1)..(765): transl_table=11
atgggatatcttgaatcgtatttttcacttgaaggcaaaacggcgcttgtcacaggcccgggaacgggaatcggcaaagggattgccgaagcgctggcaaaagcgggagcggatatcatcggcacttcgcatacgagcggacttgatgaaacaaagcggctgatcgaagaagccggcagaacgtttacttcttatcagcttgatatgggcaaccttgacgaggtcgaggcttttgcaaaagaggtgcctgaccgccatcaaattgatattctcgttaacaacgccgggacgatccgcagagaaaaagcggctgatttttcccgggagaactgggaagcggtgatcaatgtcaatttgaacagcttatttttgctgacgcaggctatcggccggcagatgattgagcgaaagcaagggaaaatcatcaatattgcctctcttctttcatttcaaggaggcattcttgtccctgcatatacggcaagcaaacatgcagtagccggattgacgaagtcttttgccaatgaatgggcggcttataatgtccaggtcaatgcgattgctccgggctatatcgcgacgaacaatacaaagcagatccgcgacgatcaaaaccgcaatgccgaaatcttaaaacggattccggccgagcgctggggtcagccggatgacattgccggcgccgccgtattcctttcgtcgccggcatccgattatgtgaatggacatgtgttagccgtcgatggcggatggctggcaaggtaa

SEQ ID NO: 1895 - protein, 254 aa, Bacillus licheniformis ATCC 14580
MGYLESYFSLEGKTALVTGPGTGIGKGIAEALAKAGADIIGTSHTSGLDETKRLIEEAGRTFTSYQLDMGNLDEVEAFAKEVPDRHQIDILVNNAGTIRREKAADFSRENWEAVINVNLNSLFLLTQAIGRQMIERKQGKIINIASLLSFQGGILVPAYTASKHAVAGLTKSFANEWAAYNVQVNAIAPGYIATNNTKQIRDDQNRNAEILKRIPAERWGQPDDIAGAAVFLSSPASDYVNGHVLAVDGGWLAR

SEQ ID NO: 1896 - DNA, 762 bp, Silicibacter pomeroyi DSS-3
  CDS (1)..(762): transl_table=11
atggacttgttcgatctgaagggccgtcgcgcgctggtcaccggatcttcgatgggcattggttatgctctggcgcgcggactggcgcaggcgggcgcgtcggtggtgctgaacgcccgagatggcgcccggctcgcgggcgcggccgaacagttgcgcggacaggggatcgaggtcgagacactggtgttcgacgtcaccgacgctgatgccgtgcgcaaggcggtcgacggtttcgaggccgagatcgggcagatcgacattctggtcaacaatgccgggatgcagcaccgcaccccgctggaagagttcccggtcgaggcgttcgaccggctgatgcgcaccaatgtcaacagcgccttttacgtcggacaggcggtggcgcggcacatgatcgggcgcggcgctggcaagatcgtcaatatcgcctcggttcagtcggcgctggcccggcccgggatcgcgccttacaccgcctccaagggcgcggtgagcaatctgaccaagggcatggccaccgactgggcgcgccacgggctgaactgcaacgccattgcgccgggctatttcgacacgccgctgaatgccgcgctggtggcggatcccgaattctcggcctggctggaaaaacgcacccctgcgggccgctggggcgaggtagaggaactggtcggggcctgtatctttctgtgctcggatgcggcgagttttgtgaacgggcatgttctgttcgtcgacggaggaatcaccgccagcctttag

SEQ ID NO: 1897 - protein, 253 aa, Silicibacter pomeroyi DSS-3
MDLFDLKGRRALVTGSSMGIGYALARGLAQAGASVVLNARDGARLAGAAEQLRGQGIEVETLVFDVTDADAVRKAVDGFEAEIGQIDILVNNAGMQHRTPLEEFPVEAFDRLMRTNVNSAFYVGQAVARHMIGRGAGKIVNIASVQSALARPGIAPYTASKGAVSNLTKGMATDWARHGLNCNAIAPGYFDTPLNAALVADPEFSAWLEKRTPAGRWGEVEELVGACIFLCSDAASFVNGHVLFVDGGITASL

SEQ ID NO: 1898 - DNA, 753 bp, Bacillus clausii KSM-K16
  CDS (1)..(753): transl_table=11
atgtttgatttaacgggaaagaaagcggttgttactggaggagcaagaggattaggaaaagggatagccaccgccttagggaacgctggcgcagaagtggtgcttattgatatttcgcatcaacttgaccatattgtccaagaattaaagccacgttttaaagttcacagtgtttatggcgatttgtctacatttgcaggcagagaagaggcgtttcaaaaagcaatttctctattaaacggaaaagtagatattcttgtcaatagcgcaggcattcatgataggcgtgcttgctttgatctcccagtaacggattttaataaagtgatggaaatcaaccatacagccgtgtaccatgcatgccaatttttcggaaagacaatggtagagcagggaagtggaaaaatgatcaaccttgcgtctatgcttacattctttggcggattcaatgccactgcctatgcagcaagcaaaggggccgttggtcagctgacgaaatcgctttcaaacgaatgggctggctatggtgtgcaagtgaatgccattgctccaggctatatggcaacggaaatgaacaaggatttgttagaggaaacaaatgagaggcttccgcaaattaatgcccgcattcctgctcggcgctggggaaccccagaagacgtagggggagccgcagtatttttagcatccgatgcagcaaattatgtaagcggtgtcatcctgccagtcgatggcgggtatgcagcccgttag

SEQ ID NO: 1899 - protein, 250 aa, Bacillus clausii KSM-K16
MFDLTGKKAVVTGGARGLGKGIATALGNAGAEVVLIDISHQLDHIVQELKPRFKVHSVYGDLSTFAGREEAFQKAISLLNGKVDILVNSAGIHDRRACFDLPVTDFNKVMEINHTAVYHACQFFGKTMVEQGSGKMINLASMLTFFGGFNATAYAASKGAVGQLTKSLSNEWAGYGVQVNAIAPGYMATEMNKDLLEETNERLPQINARIPARRWGTPEDVGGAAVFLASDAANYVSGVILPVDGGYAAR

SEQ ID NO: 1900 - DNA, 777 bp, Bacillus cereus E33L
  CDS (1)..(777): transl_table=11
atgaacttaaatgaattttcaatggatttctttagtttaaaagggaaggtagctattgttactgggggaaatacaggattaggtcaaggatatgcagtagcattagcgaaagctggagcagatctatatattgcagcatctggtgacaattgggatgaaactcgtcaattgattgaggaatgcggacaacgagtagaattcattcaagtagatttaacacaagatgatgcagcagaaaaagtggtgcaaggttgtttagacaatttcgggaaaattgatattttaattaataatgcaggtacaattcgtcgtgcaccattgcttgaatataagaaggaagattggaatgccgtaatgagcattaacttgaatactgtttatttactaagtcaagcagtagctcgtgttatggcagagcaaaagagtggaaaaatcattaatattgcttctatgttgtctttccaaggagggaaattcgtaccgccttatactgccagcaaacatggggtggcaggattaacgaaagcatttgctaacgaattaagtaaatataatattcaagtaaacgcaattgctcctggctatatagcaacagctaatactgccccaattcgtgcggatgaacaacggaataaagaaattttagatcgtatcccagctgaaagatggggagtaccattcgatttaatgggtacggctgtatttttatcaagtaaagcgtcagattatgtaacaggtcatattctagctgttgatggtggatggttagtgcgttaa

SEQ ID NO: 1901 - protein, 258 aa, Bacillus cereus E33L
MNLNEFSMDFFSLKGKVAIVTGGNTGLGQGYAVALAKAGADLYIAASGDNWDETRQLIEECGQRVEFIQVDLTQDDAAEKVVQGCLDNFGKIDILINNAGTIRRAPLLEYKKEDWNAVMSINLNTVYLLSQAVARVMAEQKSGKIINIASMLSFQGGKFVPPYTASKHGVAGLTKAFANELSKYNIQVNAIAPGYIATANTAPIRADEQRNKEILDRIPAERWGVPFDLMGTAVFLSSKASDYVTGHILAVDGGWLVR

SEQ ID NO: 1902 - DNA, 765 bp, Rhodobacter sphaeroides 2.4.1
  CDS (1)..(765): transl_table=11
atgagcggccccttcgacctgacgggtcgggtcgccgtcgtcaccggggccggtcgcggcctcggcgcggcgatggccgaggcgctggccgccgcgggcgccacggtcgtgctctcggggcgcgatccgggcccgctcgaacgcaccgccgcggccatccgcgcggcgggcggcgcggcctcggtcacgctctgcgacataacgaagcgcgccgaggtcgaggctctggtggcggagaccgaagcgcgtcacggccgcctcgacgtgctcgtgaacaatgcgggcatcaccgggcgctcggcgctgaccgaggtcgaggatgccgactgggatctgatgctccgcacccacatgaccggccccttcatggcctgccgcgcggcgctgcccggcatgatgcggcgcggcgcgggcaagatcgtcaacaccgtctcggtgctgggagagctcggccggccctgggtggtgccctatgcggcggccaagggcgggctgcggatgctgacgcgggcccttgccaccgaggtggcgggcgccaacattcaggtcaacggcatcggcccgggctatttcgagaccgagatgaatgcggccatcgtccagaacgaggcgctccatgccgagcgcgtggcccgcgtgcccgcccggcgctggggccgccctgtcgaactcggcggaaccgcggtctatctcgcctcggcggcgtccgattacgtcaacgggcagatcatctatgtcgacggcggcctgaccgcctcattctag

SEQ ID NO: 1903 - protein, 254 aa, Rhodobacter sphaeroides 2.4.1
MSGPFDLTGRVAVVTGAGRGLGAAMAEALAAAGATVVLSGRDPGPLERTAAAIRAAGGAASVTLCDITKRAEVEALVAETEARHGRLDVLVNNAGITGRSALTEVEDADWDLMLRTHMTGPFMACRAALPGMMRRGAGKIVNTVSVLGELGRPWVVPYAAAKGGLRMLTRALATEVAGANIQVNGIGPGYFETEMNAAIVQNEALHAERVARVPARRWGRPVELGGTAVYLASAASDYVNGQIIYVDGGLTASF

SEQ ID NO: 1904 - DNA, 726 bp, Rhodobacter sphaeroides 2.4.1
  CDS (1)..(726): transl_table=11
gtgatctccttctcgctcgaggggcagcgcgcgctggtgaccggcgccaacaccgggatcggacaggcgatcgcggtgggtctggccggggcgggggccgaggtgatcgccgccggccgctcctcctgcgccgagacggtggccatgaccggcgggcgcgagctgcggctcgacttcgccgatccgatggccgcgcgggacgtgttcgaggccgagcgcatcgacatcctcgtgaacaatgcgggcatcatccggcgggccgatgcggtggagttcaccgaagaggactgggacgcggtgatggatgtgaacctcaaggccctcttcttcacctgtcaggccttcggccgcgcggcgctggcgcgtggaacgggcgggcggatcgtgaacatcgcctcgctcctcagctttcagggcggcatccgcgtgccctcctacacggccgccaaacatggcgtcgcgggcatcacgaagctgctcgccaacgaatgggcgggcaggggcatcaacgtgaacgccatcgcgccgggctatatcgagaccaacaacaccgaggcgctccgcgccgacgaggcgcgcaaccgcgcgatcctcgagcggatcccggccgggcgctggggcaaggccgacgacatcgcgggcgccgcggtcttcctcgcctcgcccgccgcggcctatgtccatggcgcgatcctcaatgtcgatggaggctggcttgcccgctga

SEQ ID NO: 1905 - protein, 241 aa, Rhodobacter sphaeroides 2.4.1
MISFSLEGQRALVTGANTGIGQAIAVGLAGAGAEVIAAGRSSCAETVAMTGGRELRLDFADPMAARDVFEAERIDILVNNAGIIRRADAVEFTEEDWDAVMDVNLKALFFTCQAFGRAALARGTGGRIVNIASLLSFQGGIRVPSYTAAKHGVAGITKLLANEWAGRGINVNAIAPGYIETNNTEALRADEARNRAILERIPAGRWGKADDIAGAAVFLASPAAAYVHGAILNVDGGWLAR

SEQ ID NO: 1906 - DNA, 810 bp, Burkholderia sp. 383
  CDS (1)..(810): transl_table=11
atgggccgccggctcgactggcacgaggagacacgcatgaccaacgcgcttgaacggttccgcctcgacggccgccgcgcactgattaccggttccggacgcggaatcgggctgacgcttgcccgtgggctggccgaagcgggggcggcgatcgtcatcaacgatcgcaatgaggagaaggccgcgacgctcgtgcggcatctgcgcgaggaaggcttcacggccgactacgcggtattcgacgtcgccgagcacgcacaggtgcgcgcggcgatcgacgatttcgaggcgcgcgtcggtgcgatcgacatcctcgtgaacaacgcgggcatccagcgccgcgcaccgctcgacgcgttcgaacccgatgactggcacgcgctgatgcgcgtgaacctcgacggcgtgttcaacgtcgcgcaggccgttgcgcggcacatgatcgcgcgcggccgcggcaagatcatcaacatctgctcggtgcagagcgagctcgcgcggccgacgatcgcgccgtacgcggcgaccaagggcgcggtgcggatgctgacgaaagggatgtgcgccgactgggcacgccacggcatccaggcgaacggcctcgcgcccggctatttcgaaaccgaactcaaccgcgcgctggtcgacgacgcagcgttctcggactggctgtgcaagcgcacgccggccggccgctgggggcgcgtcgacgagctgtgcggcgcggcgatcttcctcgcgtcggccgcgtccgatttcgtgaacggccagacgctgttcgtcgacggcggcttgaccagcgccgtttaa

SEQ ID NO: 1907 - protein, 269 aa, Burkholderia sp. 383
MGRRLDWHEETRMTNALERFRLDGRRALITGSGRGIGLTLARGLAEAGAAIVINDRNEEKAATLVRHLREEGFTADYAVFDVAEHAQVRAAIDDFEARVGAIDILVNNAGIQRRAPLDAFEPDDWHALMRVNLDGVFNVAQAVARHMIARGRGKIINICSVQSELARPTIAPYAATKGAVRMLTKGMCADWARHGIQANGLAPGYFETELNRALVDDAAFSDWLCKRTPAGRWGRVDELCGAAIFLASAASDFVNGQTLFVDGGLTSAV

SEQ ID NO: 1908 - DNA, 768 bp, Geobacter metallireducens GS-15
  CDS (1)..(768): transl_table=11
atgggcttggaacgtttcagtctgaaaggtaaaaccgctatcgtcaccggtgccagtcaggggctgggtgaagccatggcactgggtctggcggaagcaggtgccaatctggtgctggcgagccgcaacgaagccagtatggccaaggtcgcttccgaggtgacctcaaaaggggtccagtgtcttacggtcaaaacggacatgctgaaggccgatgacattcaggcgatggtggataaggggatcgcccaattcggaacgatcgatatcctggtcaacaatgccggcatcaatctggtcaagccgtttgtgaatcttaccgaggaggactgggactcggtcgttgatacgaacctcaaaggatatttcctctgtagccaggttgtgggcagggaaatgatcaagaacaagaacggctgtgttatcaacaatgcctccgtcttcggtctcaggggctttcccaatattgcgtcatacatagccagcaagggtggggttgtccaactgaccaggggattggccgtggaatgggcccgtcacaatatccgggtgaactgtattgccccgggctatatcgttaccgaaatggccaagagggatattgagacaaatccgaagattctggagcagaacctgctgaagatccccatgaaaaggggcggtcagccccgggaagtcgccgatgtcgtggtgttcctggcgtcggaggcctcaagctacatgacaggacagatcgtctccatggatggcggctggtcggctttctag

SEQ ID NO: 1909 - protein, 255 aa, Geobacter metallireducens GS-15
MGLERFSLKGKTAIVTGASQGLGEAMALGLAEAGANLVLASRNEASMAKVASEVTSKGVQCLTVKTDMLKADDIQAMVDKGIAQFGTIDILVNNAGINLVKPFVNLTEEDWDSVVDTNLKGYFLCSQVVGREMIKNKNGCVINNASVFGLRGFPNIASYIASKGGVVQLTRGLAVEWARHNIRVNCIAPGYIVTEMAKRDIETNPKILEQNLLKIPMKRGGQPREVADVVVFLASEASSYMTGQIVSMDGGWSAF

SEQ ID NO: 1910 - DNA, 774 bp, Burkholderia thailandensis E264
  CDS (1)..(774): transl_table=11
atggcaaatacgttagataagtttcgcctggacggccgccgtgctctgatcacgggctctggacgcggaatcgggctgacgctcgctcgtggactggctgaggccggcgcggcgatcgtaatcaacgatcgtgatgaggaaagagtagcggcgctcgcaaagcgcttccgtgatgatgggtttgcggcagactacgcagtgttcgatgtctccgagcacgcactggtgcgctcggcgatcgacgacttcgaggcgcgcaacggcgctatcgacatcctcgtgaacaacgcgggcatccagcgccgtgcaccgctcgacgcgtttgagcctggcgactggcatgcgctgatgcgcgttaatctcgacggcgtattcaatgtcgcgcaggccgttgcgcgccatatgatcacgcgcaggtgcgggaagatcatcaacatctgttcggtgcagagtgaactcgccaggccaacgatcgcaccgtatgcggcgacgaagggtgcggtacggatgctcacgaaaggaatgtgcgcggactgggctaggcacggaattcaggcgaacggcctcgcgcccggctatttcgaaacggaactgaatcgcgcgctggtcgacgatgcggcgttctccgactggttgtgcaagcgcacgccagccggccgttgggggcgcgtcgacgagctgtgcggcgcagcgattttccttgcgtcagccgcgtccgattttgtgaatggtcagacgctgttcgtcgacggtggcctgacgagcgcggtataa

SEQ ID NO: 1911 - protein, 257 aa, Burkholderia thailandensis E264
MANTLDKFRLDGRRALITGSGRGIGLTLARGLAEAGAAIVINDRDEERVAALAKRFRDDGFAADYAVFDVSEHALVRSAIDDFEARNGAIDILVNNAGIQRRAPLDAFEPGDWHALMRVNLDGVFNVAQAVARHMITRRCGKIINICSVQSELARPTIAPYAATKGAVRMLTKGMCADWARHGIQANGLAPGYFETELNRALVDDAAFSDWLCKRTPAGRWGRVDELCGAAIFLASAASDFVNGQTLFVDGGLTSAV

SEQ ID NO: 1912 - DNA, 795 bp, Saccharophagus degradans 2-40
  CDS (1)..(795): transl_table=11
atgagtactcaactattcgatttaaccggcaaggttgcccttgtaactggtgcaacccacgggttgggcatgtctatggctgttggcttaggtaaagccggcgccacgctggttattaatggccattccagccaagaaaaaattgataaagcggtagagctttataaagaacaaggcattaacgcatacggttaccgctttgatgtaaccagcgaaaacgaagcggaagccgccgtagaaaaaatagaaagcgaagtgggccccatcgatattctggtaaataatgccggtattattcgccgcatccccttgctagaaatgcctctagacgaatgggaaaacgttattagaaccgacttaaccggcgtgttcattatgactaagcccgtcgcccaacgcatggttaaacgtcgtcagggtaaaattattaacgtgtgttccatgatgagtgagctaggccgtaactcggtaggcgcatacgccgcagccaaaggcgggttaaaaatgcttacgcgtaatatggctaccgaatgggcgaagcacaatgtgcaggtaaacggtattgggccaggttattttgcaacaagccaaaccgccccaattcgcgtggatggcaacccatttaacgagtttattgttaaccgtacacccgctggccgctggggcgaccccgatgacttacaaggcacaacagtgtttttagcatctaacgccagtaattttgttaccggccaaatcgtgtatgtagatggcggtattctcgccaccattggcaaaccctctaacgaagagtaa

SEQ ID NO: 1913 - protein, 264 aa, Saccharophagus degradans 2-40
MSTQLFDLTGKVALVTGATHGLGMSMAVGLGKAGATLVINGHSSQEKIDKAVELYKEQGINAYGYRFDVTSENEAEAAVEKIESEVGPIDILVNNAGIIRRIPLLEMPLDEWENVIRTDLTGVFIMTKPVAQRMVKRRQGKIINVCSMMSELGRNSVGAYAAAKGGLKMLTRNMATEWAKHNVQVNGIGPGYFATSQTAPIRVDGNPFNEFIVNRTPAGRWGDPDDLQGTTVFLASNASNFVTGQIVYVDGGILATIGKPSNEE

SEQ ID NO: 1914 - DNA, 777 bp, Saccharophagus degradans 2-40
  CDS (1)..(777): transl_table=11
atgagtgaagtgttttttaaagaaatgttcggcctaaacggtaaagttgccattgtgacaggcgcaacgcgtgggttaggtcaagcaatggcgttagcgttggcgaaagccggcgctagcgtggtggcagtaggttcgaagttagaaaatttagaatcgaccatggcgctgcttgcagagtacgacgtaccgacattggcgttagcttgtgatcagaccaaacctgcagccattacccaagtagttactgatacggttgaaaagtttggccgaattgatgtgctaataaataatgccggcactatacgcagagcaccagctgtagatttttctgatgacgactgggaaaacgttatagaaaccaatcttaatggtgtttttcgattttgtcgcgccgttggcaaggtcatgcttgagcaacgtagcggtaaaataattaatatcgcctcgctattaagtttctctggcggtttaactgtgccagcttatgccgcaagcaaaggtggtgtggcgcagttaaccaaagcgttagcgaatgagtgggcggctagtaacgttcaaatcaatgctattgcgccagggtactttaataccgataacaccgaaaatattcgcaaagacgcagcgcgttttgaaagcattagcgcgcgtattcctgcggggcgttggggcgagcctgatgacttaacgggtgctgcggtgtttttagcaagtaatgcatctaattatgtgaatggccacataatgttggtagatggtggttggatggcgcgttaa

SEQ ID NO: 1915 - protein, 258 aa, Saccharophagus degradans 2-40
MSEVFFKEMFGLNGKVAIVTGATRGLGQAMALALAKAGASVVAVGSKLENLESTMALLAEYDVPTLALACDQTKPAAITQVVTDTVEKFGRIDVLINNAGTIRRAPAVDFSDDDWENVIETNLNGVFRFCRAVGKVMLEQRSGKIINIASLLSFSGGLTVPAYAASKGGVAQLTKALANEWAASNVQINAIAPGYFNTDNTENIRKDAARFESISARIPAGRWGEPDDLTGAAVFLASNASNYVNGHIMLVDGGWMAR

SEQ ID NO: 1916 - DNA, 771 bp, Rubrobacter xylanophilus DSM 9941
  CDS (1)..(771): transl_table=11
atgggcgtgctggatagcttccggctggacgggagggtggccctggtgaccggggcggcccaggggctggggcaggggatcgccgtcgggctcgccgaagccggggcgcacatcgccgcgctggacgtcatgcccctcgacgagacgcgggagagcgtcgccgcggagggccgcaggttccatgccatggagtacgacctgcggaagaccggcgccggcctcgccgccaggatcgtaggcgagtgcgtagaggcgatgggccgcctggacatcctggtgaacaacgcgggcatcatccgccgcgcccccgcgctggagttctccgaggaggactgggaagaggtcatccgcgtcaacctctcggccgccttctacctctcccaagccgccgcccggcatttcgtggaggccgggcggggaggcaagatcatcaacctggcctcggtcctctcctacgaaggcggcatcctcgtcccctcctactcggcctcgaaggcgggcatcgccaacctcacccgggcgctggcgaacgagtgggccccgatgggcatcaacgtgaacgcaatcgcccccagttacttcgccaccagcctgacgagcgcgctgcgcgcggacccggagcgctcggaggccctgcttgcgcgcatcccggcggggcgctggggcaccccggaagacctgaagggcgcggccgtcttcctggcctcggacaccgcctcctacgtacacggcgccgtggtgccggtggacggcggctggctgggacgctag

SEQ ID NO: 1917 - protein, 256 aa, Rubrobacter xylanophilus DSM 9941
MGVLDSFRLDGRVALVTGAAQGLGQGIAVGLAEAGAHIAALDVMPLDETRESVAAEGRRFHAMEYDLRKTGAGLAARIVGECVEAMGRLDILVNNAGIIRRAPALEFSEEDWEEVIRVNLSAAFYLSQAAARHFVEAGRGGKIINLASVLSYEGGILVPSYSASKAGIANLTRALANEWAPMGINVNAIAPSYFATSLTSALRADPERSEALLARIPAGRWGTPEDLKGAAVFLASDTASYVHGAVVPVDGGWLGR

SEQ ID NO: 1918 - DNA, 777 bp, Clostridium perfringens ATCC 13124
  CDS (1)..(777): transl_table=11
atgaatatggagaaattttctttagacttttttaaattagatggtaaagtagctatagtaactggtggaaacactggattaggaatggcttatgtagaagctcttgcagcagcaggtgctgatgttttagtaacaacttttgataacaatactgaagaggtaaaaaatattgttgaatcattaggaagaaaaattgtatttgtacaaggagatttaactaaaaaagaaacaagagataaggttgtatcaacttgtttagaggaatttggaaaaatagatatattagtaaataatgcaggaacaataagaagagcaccattacttgagtacaaagatgaagattggcaagctgtaatggatataaacttaaattcagtttactatttatcacaagcagttgctaaagtaatggctaagcaaggatatggtaagattataaacatagcatctatgttatcattccaaggtggaaaatttgttcctccatacactgcaagtaaacatggagttgcaggaataacaaaggcatttgctaatgaattagcagatttaaatatacaagtaaatgctattgcacctggatatataaaaactgctaacactgcaccaattagagcagataaagctagaaaccaagaaattctttcaagaataccagcaggtagatggggagaagtttcagatttaatgggaacagttgtattcttatcaagtaaagcatctgattacttaaatggacacatattagctatagacggtgggtggttagtgagatga

SEQ ID NO: 1919 - protein, 258 aa, Clostridium perfringens ATCC 13124
MNMEKFSLDFFKLDGKVAIVTGGNTGLGMAYVEALAAAGADVLVTTFDNNTEEVKNIVESLGRKIVFVQGDLTKKETRDKVVSTCLEEFGKIDILVNNAGTIRRAPLLEYKDEDWQAVMDINLNSVYYLSQAVAKVMAKQGYGKIINIASMLSFQGGKFVPPYTASKHGVAGITKAFANELADLNIQVNAIAPGYIKTANTAPIRADKARNQEILSRIPAGRWGEVSDLMGTVVFLSSKASDYLNGHILAIDGGWLVR

SEQ ID NO: 1920 - DNA, 774 bp, Rhodococcus sp. RHA1
  CDS (1)..(774): transl_table=11
gtgagttcgcacgggaatttcgatgtggcgggcaagatcgcgctcgtcacggggtcgagccggggaatcggcttcgcgctcgccaacggactcgccgaggcgggtgcggaggtcgtgctcaacggccgcgacgccgacgccctcgcacgcagccgcgacgagatcgtccgcgccaccggcgcgacagtccacacctgcgccttcgacgtgaccgctcccggagaggtcgcggccgccgcgcagcgggtcgaggacgagatcggtcccgtcgagatcgtcgtgaacaacaccggcgtccagcaccgcagccccctgctcgagttcggcgacgacgacttccgtcgcgtgctcgacaccaacctgagcagcgccttcttcgtcggccgcgagtttgcgcgggcgatggtccggcgcgggcaggggaagatcgtcaacatctgttccgtccagagtgagctcggccgggcgggcatcgccccgtacgccgcgagcaagggcgggctcaagatgctcacacgaggaatgtgcgccgactgggcgccactgggcctgcagaccaacgccatcgcaccggggtacttcgacacccagctcaccgaggcgctcgtgaacgatgccgacttcagtgcgtggctgaccaagcgcacgcccgccgggcggtggggtcgcaccgaggaactcgtgggtgcactgctcttcctctcgtcgccggcgtcggacttcgtcaacggccagatcctgtacgtcgacggcggcctcaccgccgtagtgtga

SEQ ID NO: 1921 - protein, 257 aa, Rhodococcus sp. RHA1
MSSHGNFDVAGKIALVTGSSRGIGFALANGLAEAGAEVVLNGRDADALARSRDEIVRATGATVHTCAFDVTAPGEVAAAAQRVEDEIGPVEIVVNNTGVQHRSPLLEFGDDDFRRVLDTNLSSAFFVGREFARAMVRRGQGKIVNICSVQSELGRAGIAPYAASKGGLKMLTRGMCADWAPLGLQTNAIAPGYFDTQLTEALVNDADFSAWLTKRTPAGRWGRTEELVGALLFLSSPASDFVNGQILYVDGGLTAVV

SEQ ID NO: 1922 - DNA, 768 bp, Rhodococcus sp. RHA1
  CDS (1)..(768): transl_table=11
gtgaatctcttcgatctgtccgggcgcatcgccctggtcaccggttcgagccggggaatcggctacgcactcgcgcgcggcctggccgaggcgggcgccacgatcgtcctcaacggggtttcgggtgagcgcctcgcgcaggcacgtgagcgcctccgcgaggagttcggcgagacccgcgtccacgcgtacgcgttcgacgtcacggatcccgatcgggtgaccgacgccgtcgaacggatcgaatcggaggtcgggccgatcgagattctggtgaacaacgctgcgctgcaacaccgtcagccgctgctcgacgtcactctcgacgactggaacagggtgctcaccaccgacctcaccagcgccttcctcgtcgggcgcgcggtcgcacggtgccagatcgcccgcgggagcgggaagatcataaacgtctgctcggtgcagagcgacctggcccggcccaccatcgcgccgtacaccgcggcgaagggcggactgcggaatctgacccgcgcgatgacggccgaatgggcggcgtccgggttgcagatcaacggcctcgcgcccggttacattcacaccgagatgacgcaggccctcgtcgacgaccccgagttcgactcgtggctccgcggccgcgcgccggcaggccggtggggcaccccggacgatctcgtcggtcccgcggtgtggctggcgtcggacggttcccggtacgtcaacggtcaggtgatcttcatcgacggcgggatgacatcggtggtgtga

SEQ ID NO: 1923 - protein, 255 aa, Rhodococcus sp. RHA1
MNLFDLSGRIALVTGSSRGIGYALARGLAEAGATIVLNGVSGERLAQARERLREEFGETRVHAYAFDVTDPDRVTDAVERIESEVGPIEILVNNAALQHRQPLLDVTLDDWNRVLTTDLTSAFLVGRAVARCQIARGSGKIINVCSVQSDLARPTIAPYTAAKGGLRNLTRAMTAEWAASGLQINGLAPGYIHTEMTQALVDDPEFDSWLRGRAPAGRWGTPDDLVGPAVWLASDGSRYVNGQVIFIDGGMTSVV

SEQ ID NO: 1924 - DNA, 771 bp, Rhizobium leguminosarum bv. viciae 3841
  CDS (1)..(771): transl_table=11
atgagcatattggatagattttcactggctggtcaggtggcgctcgtgaccggcggcggccgtggtctgggcttcgagatggcgcgcgccctcgcagaagccggcgcgcatgtcatcgtcaacggacgcacggcggcgacgctggaagacgccgtaaaggctatccgtgccgcgggcggcacggcggaggccgccgcattcgacatcgccgaccgcggggcacagcgtgctgcgatggccgatatcgacaagatccatggtcgtctggatatcctgatcaacaatgtcggcgcccgcgacaggcggccgctggccgaattcgacgatgatgccatcatcgagctgctgcgcaccgacctggcggcggccatgacgctgtcgcgggacgctgccgtgctgatgaagcgacgcaatcacggtcgcctgatcgccgtgacctcgatcagcggccatgtcgtcatgcccggcgactgcgtctatccggcggccaagcagggactgaccggactgatgcgcggcatggcggtcgaattcggcccgcacggcatcaccagcaatgcgattgcgcccggctggttcgccaccgagacgaacgcggcgatggctgcgaacgaggaattgatgcccttcgtgcgtcaacgcatcccggttcagcgctggggacggccggacgagatcgccggcgcggcgctgtttcttgcaagcgacgccgcttccttcgtcaacggtcacgtgctgacggtggacggcggtatgacagtcaggatgtga

SEQ ID NO: 1925 - protein, 256 aa, Rhizobium leguminosarum bv. viciae 3841
MSILDRFSLAGQVALVTGGGRGLGFEMARALAEAGAHVIVNGRTAATLEDAVKAIRAAGGTAEAAAFDIADRGAQRAAMADIDKIHGRLDILINNVGARDRRPLAEFDDDAIIELLRTDLAAAMTLSRDAAVLMKRRNHGRLIAVTSISGHVVMPGDCVYPAAKQGLTGLMRGMAVEFGPHGITSNAIAPGWFATETNAAMAANEELMPFVRQRIPVQRWGRPDEIAGAALFLASDAASFVNGHVLTVDGGMTVRM

SEQ ID NO: 1926 - DNA, 765 bp, Rhizobium leguminosarum bv. viciae 3841
  CDS (1)..(765): transl_table=11
atgaagaacttgtttgatcttaccggacggcgcgccctgatcaccggctcgagccaggggatcggctatgccctggccgaaggcctggcgcagcatggcgccgaggtgatcatcaatggccgcacgcccgaaagcgtcaaacgtgcggtcgagagcctcaaggatcaaggcctgtctgcccatgcggcgatcttcgacgtgaccagcaaggacgctgccaaagaaggcatagacgcgatcgaaaccgatatcgggccgctcgacatcctgatcaacaatgccggcatgcagtttcgcacgccgctggaagattttcctgcggacaaatgggaactgctgctgaccaccaatatttcgagcgtgttctacgtcggccaagcggcagccaaacccatgatcgcccgcggccagggcaagatcatcaacatcgcttccgttcaaagcgaactggcgcgccccggcattgctccctatacggcgaccaagggtgcggtgcgcaatctgacccgcggcatgtgcgccgattgggccaagtacggcctgcagatcaacgcgattgcgccgggctatttcaagacgccgctcaatcaggcgctcgtcgacaatcccgagttctcgtcctggctcgagaagcggacaccagccggacgctggggcaatgtcgaggaattggtgggtgccgccgttttcctgtcaggccgcggctcgtcgtttatcaacgggcacacgctttatgtcgacggcggcatcacgacctccctttga

SEQ ID NO: 1927 - protein, 254 aa, Rhizobium leguminosarum bv. viciae 3841
MKNLFDLTGRRALITGSSQGIGYALAEGLAQHGAEVIINGRTPESVKRAVESLKDQGLSAHAAIFDVTSKDAAKEGIDAIETDIGPLDILINNAGMQFRTPLEDFPADKWELLLTTNISSVFYVGQAAAKPMIARGQGKIINIASVQSELARPGIAPYTATKGAVRNLTRGMCADWAKYGLQINAIAPGYFKTPLNQALVDNPEFSSWLEKRTPAGRWGNVEELVGAAVFLSGRGSSFINGHTLYVDGGITTSL

SEQ ID NO: 1928 - DNA, 801 bp, Rhizobium leguminosarum bv. viciae 3841
  CDS (1)..(801): transl_table=11
atgcagagtgcaaatgaaatcaggagcagcctcgtgaccttcccccttttcgatctctccggccgccgcgccctcgtcaccggctccagccagggcatcggccgcgcattggcggtcgggcttgccgagcatggcgcttcgatcatcatcaacggccgcaacgcgcagaaggcggaggccgccgccgaggatatccgtcgcagccatcgccatgccgtcagtgccgccttcgacgtcaccgacgcggaggccagccgcaccgccatcgactatatcgaggcggagatcggcccgatcgacatcctcgtcaacaatgccggcatgcagttccgcgcaccgctggagaactttccggtcgacaaatgggacgagatcttcaagaccaatgtctccagcctgttctatgtcagccagccggtcgcccaggcgatgattgcgcgcggccgcggcaagatcatcaacatcgcctccgtccaggccgaactcgcccgtcccggcatcgcgccctataccgcgacaaagggcgcggtgaagaacctgacgcgcggcatggcgaccgactgggcgaaatacggcttgcagatcaatgcgatcgcacccggctatttccgcacgccgctcaaccaggcgctcgtcgacgatccgaagttttccggctggcttgaaaaccgcacgccggccggccgctggggcgaggtcaaggagctcgtcggcgccgccgtcttcctggcctcggatgcctcctccttcgtcaacggccatatgttgaccgtcgacggcggcatcaccgcctcgctctag

SEQ ID NO: 1929 - protein, 266 aa, Rhizobium leguminosarum bv. viciae 3841
MQSANEIRSSLVTFPLFDLSGRRALVTGSSQGIGRALAVGLAEHGASIIINGRNAQKAEAAAEDIRRSHRHAVSAAFDVTDAEASRTAIDYIEAEIGPIDILVNNAGMQFRAPLENFPVDKWDEIFKTNVSSLFYVSQPVAQAMIARGRGKIINIASVQAELARPGIAPYTATKGAVKNLTRGMATDWAKYGLQINAIAPGYFRTPLNQALVDDPKFSGWLENRTPAGRWGEVKELVGAAVFLASDASSFVNGHMLTVDGGITASL

SEQ ID NO: 1930 - DNA, 765 bp, Rhizobium leguminosarum bv. viciae 3841
  CDS (1)..(765): transl_table=11
gtgagcatcgtggcaaatcccttcgacctttccggccgggttgccgtcgtcaccggcgccaatacagggctcggccaggccatcgcggcagcgttggcgcaggccggtgcgtcgatcgtcgccgtcgggcgctcctcgatggacgaaaccgaggcgctggtgaaggaagcgggaagccgcttccatgtcgtcaaggccgatcttgccagcatcgaaccggtcaaggggatcgtcgctgagaccatccagaccttcggcggcctcgacatcctcgtcaacaatgccggcatcatccgccgcgccgatgcactcgacttcaccgaggaagactgggacgcggtgatcgacgtcaatctgaagactgccttcttcctgtcgcaggcggccggccgccacatggtcgacaagggcaggggcaagatcatcaacatcgcctcgctgctctccttccagggcggcatccggatcccgtcttatactgcctcgaaaagtggccttgccgggctgaccaagctgcttgcctgcgaatgggccggcaagggcgtcaacgtcaacgccatcgcccccggttactttgtgaccaacaacaccacggcgctgcgcgaggatgccgaccgcaacgccgccatccttgcccgcatcccggccgggcgctggggaacgccgtccgaactcggcggtgcggccgtattcctggcatcgtcggcatccgactacgtgcatggaacggtgctgcccgtcgatggcggttggctggctcggtga

SEQ ID NO: 1931 - protein, 254 aa, Rhizobium leguminosarum bv. viciae 3841
MSIVANPFDLSGRVAVVTGANTGLGQAIAAALAQAGASIVAVGRSSMDETEALVKEAGSRFHVVKADLASIEPVKGIVAETIQTFGGLDILVNNAGIIRRADALDFTEEDWDAVIDVNLKTAFFLSQAAGRHMVDKGRGKIINIASLLSFQGGIRIPSYTASKSGLAGLTKLLACEWAGKGVNVNAIAPGYFVTNNTTALREDADRNAAILARIPAGRWGTPSELGGAAVFLASSASDYVHGTVLPVDGGWLAR

SEQ ID NO: 1932 - DNA, 771 bp, Mycobacterium smegmatis str. MC2 155
  CDS (1)..(771): transl_table=11
gtgaccggcctgttcgacctgaccgggcggctcgcggtcgtcacgggctcgagccgggggatcggtctggccatcgccgcggggctggccgaggccggtgcgcgtgtggtgctcaacggtgtcgacggaccccgtctcgaacacacgtgtgacggtctgcgcgagaagttcggcacggacgccgtgtacgccgcgcgattcgacgtgacggatcccgacgaggtgtcatccgccatcgatgacatcgaacagcgcatcgggcccatcgaggtgctggtcaacaacgccggcctgcagcatcgtgaacccctgctcgaggtgagcctggcgaattggcagcgcgtgatcgacgtggacctcaccagcgcatttctggtgggacgtgaggttgcgcgacaccagctggcccgcggatcgggaaagatcatcaacatctgttcggtgcaaacagatctcgcgcgaccctcgatcgcggcctacaccgccgcgaagggcggcctgcgcaacctcacccgcgcgatgacggccgaatgggcaggcggcggcttgcagatcaacggcttggcccccgggtacatccacaccgagatgacccaggctctcgtcgacgatacgtcgttcaacaactggattctgggccgtacgccggcggggaggtgggggacggtcgacgatctcgtcgggcccgcgatcttcctcgcctcgccggcatctgcctatgtgaatgggcaggtgctgttcgtcgacgggggcatgacggccgtcgtgtga

SEQ ID NO: 1933 - protein, 256 aa, Mycobacterium smegmatis str. MC2 155
MTGLFDLTGRLAVVTGSSRGIGLAIAAGLAEAGARVVLNGVDGPRLEHTCDGLREKFGTDAVYAARFDVTDPDEVSSAIDDIEQRIGPIEVLVNNAGLQHREPLLEVSLANWQRVIDVDLTSAFLVGREVARHQLARGSGKIINICSVQTDLARPSIAAYTAAKGGLRNLTRAMTAEWAGGGLQINGLAPGYIHTEMTQALVDDTSFNNWILGRTPAGRWGTVDDLVGPAIFLASPASAYVNGQVLFVDGGMTAVV

SEQ ID NO: 1934 - DNA, 789 bp, Flavobacteria bacterium BBFL7
  CDS (1)..(789): transl_table=11
atgaacctatttgacatcaaaggtaaagtggctctggtcactggtagcactcatggactaggcatgtctatggcacatgggttagggcttgccggtgcaacgattgtagtaaacggtaattcttctcagcaaaaaattgatgatgctgttgctcaatataaagaagcaggaatacatgcggtaggttacaaatttgatgtctcaaatgaagctgccgtagaatcggctattgaaaaaatcgaaaaggaagtcggtcctatagacattcttatcaataacgcaggaatcataaaaagagttccgctggttgatatggatgtggaagaatttaaacaagtcgtaaatatcgatttagtaagtccttttatagtttctaaacacgtagtaaaaggtatgatgcagcgcaaggctgggaaaatcattaatatttgttctatgatgagccagttaggtagaaatacagttggtgcttatgctgctgcaaaaggtggattggtcatgctcactaaaaatatggcgaccgaatgggcaaaacataacatacaggtaaatggaataggtccaggatattttgctacatcacaaacggctcctatacgtgtggatggtcatccatttaatgattttattgtgaaccgtactccagcagcaaaatggggcgatccagatgatcttgctggcgcggcgattttcctttcgtctaaggcgagtgattttgtaaatggtcacattctgtatgtagatggtgggatactagccactataggtaaaccatacaatgaagaataa

SEQ ID NO: 1935 - protein, 262 aa, Flavobacteria bacterium BBFL7
MNLFDIKGKVALVTGSTHGLGMSMAHGLGLAGATIVVNGNSSQQKIDDAVAQYKEAGIHAVGYKFDVSNEAAVESAIEKIEKEVGPIDILINNAGIIKRVPLVDMDVEEFKQVVNIDLVSPFIVSKHVVKGMMQRKAGKIINICSMMSQLGRNTVGAYAAAKGGLVMLTKNMATEWAKHNIQVNGIGPGYFATSQTAPIRVDGHPFNDFIVNRTPAAKWGDPDDLAGAAIFLSSKASDFVNGHILYVDGGILATIGKPYNEE

SEQ ID NO: 1936 - DNA, 888 bp, Picea sitchensis
  CDS (1)..(888)
atggttgcccttaggagggttgaaacatcttcaatggaaggcaaaacagagaagaaggggttgaattatagagaagatttggtagggaaggtggccttagtcacaggggcctctgcaggtctgggacgagaattcgccctctcattagcaaaaaacggatgccacgttgtggtcacagctcgcaggcaggacctccttcgttctgtatgccatgaaatcgacctactcaattccttctccccctttcaaccagccaagtccatgatgcttcagcttgacgttagcgcttccgagaaggacattgatatggctgtagaaaaagcctggcaaggctttggtgcgatagacatcctcgtcaacaatgccggatacagaggcactgtaaagtcaccgctgcaatatgacgaggaagaatggaacactgtgataaacacaaatatgaggggtgtgtggctcgtttccaagtgtgttgccaagcgcatgcgagatgctggaaagaagggctccatcatcaatatctcatctacagccagtgctaaccgtgggaaccttccaggatcaatgatctatgctacctccaaggttggggtcaaccagatcactaagatgatggctctggagcttgggagatatggtatcagagtgaatgccatagctgcaggtattttcaaatctgagatgacaaaaggtatatttgagaaagattggtctcacaaggttgcagaaaaggttgttcctgcacagagatggggtagtacagatcctgatttcacaagtttattgctattgcttgccagcaatgctgcttcttcttatgttacaggaaatatttttattttagatggaggccacactatacctggccttcctttatggtcttcactctaa

SEQ ID NO: 1937 - protein, 295 aa, Picea sitchensis
MVALRRVETSSMEGKTEKKGLNYREDLVGKVALVTGASAGLGREFALSLAKNGCHVVVTARRQDLLRSVCHEIDLLNSFSPFQPAKSMMLQLDVSASEKDIDMAVEKAWQGFGAIDILVNNAGYRGTVKSPLQYDEEEWNTVINTNMRGVWLVSKCVAKRMRDAGKKGSIINISSTASANRGNLPGSMIYATSKVGVNQITKMMALELGRYGIRVNAIAAGIFKSEMTKGIFEKDWSHKVAEKVVPAQRWGSTDPDFTSLLLLLASNAASSYVTGNIFILDGGHTIPGLPLWSSL

SEQ ID NO: 1938 - DNA, 849 bp, Ostreococcus tauri
  CDS (1)..(849)
atgtccctcgcctctcgcgccgcgcttcgcacgaccagcgctctcggtagacgctccgtctctcgatccacccgcaccgtgcgctccgtcacgcgatgcgacgccacgggccccgtgtgcgtcgtcaccggtgcctcgagagggatcggcgccgcgatcgcgttgaaactcggtgaatccggtgcccgcgtcgtcgtcaactacgccgcgtccgagggtccggcgaacgcggtgtgcgaacaaatcaaagccgcgggcggggacgcgatcgcggtgaaggcgaacgtggcgaatccggaagaggttgacgcgttgttcaaggcgacaatggataagtttggcgaggtgaacgtcctggtgaacaacgccgggatcaccagagatacgctgatgatgcgaatgaagctgcaacagtggcaggaggttatcgatttgaacctcacgggggttttcctgtgcacgcaggcggcgacgaagctcatggggaagaagaagccggtgagcggacggatcgtgaacattacctccgtggtgggggtgacggggaacgccggtcaggtgaactactccgcggccaaggcgggggtgatcggtctcaccaagacggtggcgcgtgaatacgccggacgtaacattcagtgcaacgccatcgcgccgggtttcatcgcttcagatatgacggcggttctcggcgaggagctcgaaaagaagattctcacgacaatcccggcgggccgatacggtcaaccggaagagatcgccggtatggtcaagttcttggcgatggatccggcggcggcgtacatcaccggccagacgatccacgtcgacggtggcatggtcatgtaa

SEQ ID NO: 1939 - protein, 282 aa, Ostreococcus tauri
MSLASRAALRTTSALGRRSVSRSTRTVRSVTRCDATGPVCVVTGASRGIGAAIALKLGESGARVVVNYAASEGPANAVCEQIKAAGGDAIAVKANVANPEEVDALFKATMDKFGEVNVLVNNAGITRDTLMMRMKLQQWQEVIDLNLTGVFLCTQAATKLMGKKKPVSGRIVNITSVVGVTGNAGQVNYSAAKAGVIGLTKTVAREYAGRNIQCNAIAPGFIASDMTAVLGEELEKKILTTIPAGRYGQPEEIAGMVKFLAMDPAAAYITGQTIHVDGGMVM

SEQ ID NO: 1940 - DNA, 765 bp, Rhizobium sp
  CDS (1)..(765): transl_table=11
atgaccgccgcaggccttttcgacctatccggaaagcgcgcgctggtgaccggggcgcgcaccggcctggggcagggcctcgctttggcgcttgcttccgccggcgccgacatcatcgggctcggatcgcagcacatgcccgagacacggcgtgccgtcgaggcactcggaaggcggttcgaagaggtcgtctacgatctgcgcaacccgggcggcattgcgaagatgtttgccggcctcgtcgaagacggcgcggctgtcgatatcctgatcaacaatgccggccagattcggcggtccgacttcaccgaattcacggaagaagactgggacgacgtcctcaacatcaacctgaagagcgctttcgtgctctcccaggcggtggtccggcatatgctcgaacgcggcatcaaggggcggatcgtcaacgtcgcctcgctgctttccttccagggcggaatccgcgtcgcctcctatacggcctccaaacatggcgtggcggggctcaccaagctgatggccaacgaactcgctgccaaggggatcaccgtcaacgcgatcgcaccgggctatatggtgaccgacaatacggaagcgctgcgcaacgatcctgaccgctatcgtgccattatcgagcgcattccctccggccgctggggcgagccgagcgacctggacaccgcggtcctgttctttgcttcgcccgccagcagctacgttaccgggcaggtcctcgccgtcgacggcggatggctggcccgctag

SEQ ID NO: 1941 - protein, 254 aa, Rhizobium sp
MTAAGLFDLSGKRALVTGARTGLGQGLALALASAGADIIGLGSQHMPETRRAVEALGRRFEEVVYDLRNPGGIAKMFAGLVEDGAAVDILINNAGQIRRSDFTEFTEEDWDDVLNINLKSAFVLSQAVVRHMLERGIKGRIVNVASLLSFQGGIRVASYTASKHGVAGLTKLMANELAAKGITVNAIAPGYMVTDNTEALRNDPDRYRAIIERIPSGRWGEPSDLDTAVLFFASPASSYVTGQVLAVDGGWLAR

SEQ ID NO: 1942 - DNA, 762 bp, Erwinia carotovora subsp
  CDS (1)..(762): transl_table=11
atgattttaaattcttttgatttgcaaggtaaagttgctctgatcactggttgtgatacaggtttgggtcaaggcatggctatcggtctggcacaagcaggctgtgatatcgtcggcgtcaacatcgttgaaccgaaagacactatcgagaaagtcaccgcactgggacgccgtttcctgagcctgaccgccgacatgagcaatgtctctggtcatgcagagctggtagagaaagctgttgctgaatttggtcacgttgacattctggtcaacaacgccggtatcatccgtcgtgaagatgcgatcgagttcagcgagaaaaactgggacgacgtaatgaacctgaacattaagagcgttttctttatgtctcagaccgttgctcgccagttcatcaagcaaggtaaaggcggtaagatcatcaacatcgcttctatgctgtccttccagggtggtatccgcgtaccttcttataccgcatcaaaaagcgccgttatgggtgtaacccgtctgatggcgaacgagtgggcaaaacacggtatcaacgtcaacgcaattgcaccgggatatatggctaccaacaatacccagcaactgcgcgccgatgaagaacgcagcaaagaaattctggatcgtatcccagctggccgttggggtttgccacaggatctgatgggcccatccgtcttcctggcatccagcgcatctgattacatcaatggttacacgattgccgttgatggtggctggctggctcgctaa

SEQ ID NO: 1943 - protein, 253 aa, Erwinia carotovora subsp
MILNSFDLQGKVALITGCDTGLGQGMAIGLAQAGCDIVGVNIVEPKDTIEKVTALGRRFLSLTADMSNVSGHAELVEKAVAEFGHVDILVNNAGIIRREDAIEFSEKNWDDVMNLNIKSVFFMSQTVARQFIKQGKGGKIINIASMLSFQGGIRVPSYTASKSAVMGVTRLMANEWAKHGINVNAIAPGYMATNNTQQLRADEERSKEILDRIPAGRWGLPQDLMGPSVFLASSASDYINGYTIAVDGGWLAR

SEQ ID NO: 1944 - DNA, 771 bp, Gluconobacter oxydans
  CDS (1)..(771): transl_table=11
atgtcccatcccgatcttttttctctctccggtgcgcgcgcccttgtgaccggggcgtcacggggaattggcctgacgctggcaaaggggcttgcgcgctacggggctgaggttgtcctgaatggccggaatgctgaaagtctggactctgcgcagtccgggttcgaggcggaaggattgaaagccagtacggcggttttcgatgtgacggatcaggatgcggtgattgatggcgtcgcggcgattgagcgggacatgggaccgatcgatatcctgatcaataatgccgggatacagcgccgagcgcctctggaggagttttcgcgcaaggactgggatgatctgatgtcaaccaatgtcaacgcggttttcttcgtcgggcaggcggtggcgcggcacatgattccccgcggacggggcaagatcgtcaatatctgttccgtccagagtgaactcgcccgtccgggaattgcgccctatacggcgaccaagggagcggtcaaaaacctgacaaaaggtatggcgacggactggggcaggcacggacttcagatcaacgggctggcaccggggtattttgcgacggaaatgacagaaaggctcgtggcggacgaagaattcacggactggctgtgcaaacggacgccggcaggacggtgggggcaggttgaggaactggtcggagcagcagtatttctgtcttcccgggcttcaagcttcgtcaacgggcaggtgctgatggttgatggcgggataaccgtatcgctgtag

SEQ ID NO: 1945 - protein, 256 aa, Gluconobacter oxydans
MSHPDLFSLSGARALVTGASRGIGLTLAKGLARYGAEVVLNGRNAESLDSAQSGFEAEGLKASTAVFDVTDQDAVIDGVAAIERDMGPIDILINNAGIQRRAPLEEFSRKDWDDLMSTNVNAVFFVGQAVARHMIPRGRGKIVNICSVQSELARPGIAPYTATKGAVKNLTKGMATDWGRHGLQINGLAPGYFATEMTERLVADEEFTDWLCKRTPAGRWGQVEELVGAAVFLSSRASSFVNGQVLMVDGGITVSL

SEQ ID NO: 1946 - DNA, 765 bp, Bacillus subtilis
  CDS (1)..(765): transl_table=11
atgggttatctacatgacgccttttcattaaaaggaaaaacagcgctggtgacaggcccgggaacagggatcggtcaaggaatagccaaagccctagccggggctggcgctgatattatcggcacatcacatacaagcagtctgtctgaaacacagcagcttgtggaacaggaaggccggatatttacatcttttacattggacatgagcaagccggaagcgataaaggattctgcagctgagctgtttgaaaacaggcagatcgacatccttgtcaataatgccggcattattcatcgggaaaaagcggaagattttccagaagagaactggcagcacgtactgaatgtcaatctaaacagcctgtttattctgacacagcttgctggcaggcacatgctgaaaagaggtcatggaaagattattaatattgcctctctcctgtcttttcaaggcggcatcctcgttccggcttacaccgcgagcaaacacgctgttgccggtttgacaaaatcatttgcaaatgagtgggcagcgtcaggtattcaggtcaacgcaatcgccccaggctatatttctactgcgaatacaaagcctattcgggatgacgaaaagcgaaatgaggacattttaaagagaattcctgccggccgctggggccaagcggatgatatcggggggactgcagtctttttggcatcacgtgcttcagattatgtaaatggacatattttagcagttgatggcggctggctatcccgctga

SEQ ID NO: 1947 - protein, 254 aa, Bacillus subtilis
MGYLHDAFSLKGKTALVTGPGTGIGQGIAKALAGAGADIIGTSHTSSLSETQQLVEQEGRIFTSFTLDMSKPEAIKDSAAELFENRQIDILVNNAGIIHREKAEDFPEENWQHVLNVNLNSLFILTQLAGRHMLKRGHGKIINIASLLSFQGGILVPAYTASKHAVAGLTKSFANEWAASGIQVNAIAPGYISTANTKPIRDDEKRNEDILKRIPAGRWGQADDIGGTAVFLASRASDYVNGHILAVDGGWLSR

SEQ ID NO: 1948 - DNA, 762 bp, Dickeya dadantii
  CDS (1)..(762): transl_table=11
atgattctgaatacattcaatttacagggcaaagtggcactgatcaccggttgcgataccggcctgggtcagggtatggcggtcggtctggctgaagcgggctgcgacatcgtcggcgtcaacatcgttgagccgaaagaaaccatcgaaaaagtcactgcggtaggccgtcgcttcctcagcctgaccgctgatatgagcgatatctccggtcacgccgcgctggtggaaaaagccgttgccgagttcggtaaagtggacattctggtcaacaacgccggtatcatccgtcgtgaagacgccatcgagttcagcgaaaagaactgggacgatgtgatgaacctgaacatcaagagtgtgttcttcatgtcgcagacggttgctcgtcagttcatcaagcagggtcatggcggtaaaattattaatatcgcgtccatgttgtccttccagggcggtatcccggtaccgtcttacaccgcatccaagaagcgcgtcatgggcatcacccgtattgtggccaatgaatgggcgaaacataacatcaacgtcaacgccatcgctcccggctacatggcgaccaacaacacccagcacgtgcgcgccgatcaggaccgtagcaaggaaattctggaccgtatcccagcgggtcgttggggtctgccgcaggacttgcagggtccggccgtgttcctggcatccagcgcatccgattatgtgaacggttacaccattgccgttgatggcggctggttggctcgctaa

SEQ ID NO: 1949 - protein, 253 aa, Dickeya dadantii
MILNTFNLQGKVALITGCDTGLGQGMAVGLAEAGCDIVGVNIVEPKETIEKVTAVGRRFLSLTADMSDISGHAALVEKAVAEFGKVDILVNNAGIIRREDAIEFSEKNWDDVMNLNIKSVFFMSQTVARQFIKQGHGGKIINIASMLSFQGGIPVPSYTASKKRVMGITRIVANEWAKHNINVNAIAPGYMATNNTQHVRADQDRSKEILDRIPAGRWGLPQDLQGPAVFLASSASDYVNGYTIAVDGGWLAR

SEQ ID NO: 1950 - DNA, 762 bp, Escherichia coli
  CDS (1)..(762): transl_table=11
atgattttaagtgcattttctctcgaaggtaaagttgcggtcgtcactggttgtgatactggactgggtcaggggatggcgttggggctggcgcaagcgggctgtgacattgttggcattaacatcgttgaaccgactgaaaccatcgagcaggtcacagcgctggggcgtcgttttttaagcctgaccgccgatctgcgaaagattgatggtattccagcactgctggatcgcgcggtagcggagtttggtcatattgatatcctggtgaataacgccggattgattcgccgcgaagatgctctcgagttcagcgaaaaggactgggacgatgtcatgaacctgaatatcaagagcgtattcttcatgtctcaggcagcggcgaaacactttatcgcgcaaggcaatggcggcaagattatcaatatcgcgtcaatgctctccttccagggcgggatccgtgtgccttcttataccgcatcaaaaagcggcgtgatgggtgtgacgcgattgatggcgaacgaatgggctaaacacaacattaatgttaatgcgatagccccgggttacatggcgaccaacaatactcaacaactacgggcagatgaacaacgtagcgcggaaattctcgaccgcattccagctggtcgttggggactgccgagtgacctgatggggccgatagtgttccttgcctccagcgcttcagattatgtgaatggttataccattgccgtggatggcggttggctggcgcgttaa

SEQ ID NO: 1951 - protein, 253 aa, Escherichia coli
MILSAFSLEGKVAVVTGCDTGLGQGMALGLAQAGCDIVGINIVEPTETIEQVTALGRRFLSLTADLRKIDGIPALLDRAVAEFGHIDILVNNAGLIRREDALEFSEKDWDDVMNLNIKSVFFMSQAAAKHFIAQGNGGKIINIASMLSFQGGIRVPSYTASKSGVMGVTRLMANEWAKHNINVNAIAPGYMATNNTQQLRADEQRSAEILDRIPAGRWGLPSDLMGPIVFLASSASDYVNGYTIAVDGGWLAR

SEQ ID NO: 1952 - DNA, 786 bp, Escherichia coli
  CDS (1)..(786): transl_table=11
atgtcaatcgaatctctcaatgcgttctcaatggattttttctccctgaaaggtaaaaccgcaattgttaccggtgggaatagcggtttaggccaggcatttgccatggcgttggccaaagctggcgcaaatatctttattcctagtttcgtcaaagataacggcgaaacaaaggaaatgattgaaaaacagggtgttgaggtggacttcatgcaggtgggtatcaccgcagaaggcgcgccgcagaagattatcgctgcttgctgtgagcgtttcggtacagttgatattctggttaacaatgccggtatttgtaagctgaataaggtgctggacttcggtcgtgccgactgggatccgatgattgatgtgaacctgaccgccgcattcgagttaagctatgaagctgcaaaaattatgatcccgcagaaaagcggcaaaattattaatatctgttcattgttctcttacttaggtggacaatggtcacctgcatattctgccactaaacatgctcttgccgggttcaccaaagcttattgtgatgaactaggtcaatataatattcaggtaaatggtatcgcccctggctattatgcaacagatattacgctggcgacacgcagtaatccagaaaccaatcagcgcgttcttgatcatattccggcaaaccgttggggcgatactcaggatttaatgggcgcagccgtattcctcgcaagtccggcatcgaattatgtcaacgggcatttattagtggttgatggcggttatttagtgcgctaa

SEQ ID NO: 1953 - protein, 261 aa, Escherichia coli
MSIESLNAFSMDFFSLKGKTAIVTGGNSGLGQAFAMALAKAGANIFIPSFVKDNGETKEMIEKQGVEVDFMQVGITAEGAPQKIIAACCERFGTVDILVNNAGICKLNKVLDFGRADWDPMIDVNLTAAFELSYEAAKIMIPQKSGKIINICSLFSYLGGQWSPAYSATKHALAGFTKAYCDELGQYNIQVNGIAPGYYATDITLATRSNPETNQRVLDHIPANRWGDTQDLMGAAVFLASPASNYVNGHLLVVDGGYLVR

SEQ ID NO: 1954 - DNA, 957 bp, Oryza sativa
  CDS (1)..(957)
atggcgacctccgcgaccgcaggggcagcagcagcagtggcctccccggcggtggccccgcgcggcgccgccgtcgcggcggtggcgcggcgagggttcgtctcgttcggcgcggcggcggccgcgcgctcgcgcgcggtgcggtccggcggcttctccggcgtgcagacccatgttgcagctgttgagcaagcacttgtgcaagatgctacaaagttggaagctccagttgttattgtgaccggtgcctccagggggattggaaaggcgactgcattggctcttggaaaagctgggtgcaaggtcctggtgaactatgcccgatcctcaaaagaggctgaagaagtctccaaagagatcgaagcatgtggtggtcaggctattaccttcgggggagatgtttcaaaagaagccgatgtggattctatgatgaaagcagctcttgataaatggggaacaattgatgtgctggtaaacaatgcaggaattacccgagacacattattaatgaggatgaagaaatcacaatggcaagacgtaattgacctgaatcttactggtgttttcctctgtacacaagctgctacaaaaataatgatgaagaagaaaaagggaaaaatcatcaacatagcatcagttgttggtcttgttggtaatattggccaagctaattacagtgctgccaaggctggggttattggtttgacgaaaacagtagctagggaatatgcaagcagaaatatcaatgtgaatgcaattgcacctggtttcattgcatctgacatgactgctgaacttggagaggatcttgagaagaaaatcttgtcaaccatcccattagggagatatggcaaaccagaggaggttgctggcttggttgagtttttggctctcaatcctgcggccaactacatcacgggacaggttcttaccatcgatggagggatggtgatgtag

SEQ ID NO: 1955 - protein, 318 aa, Oryza sativa
MATSATAGAAAAVASPAVAPRGAAVAAVARRGFVSFGAAAAARSRAVRSGGFSGVQTHVAAVEQALVQDATKLEAPVVIVTGASRGIGKATALALGKAGCKVLVNYARSSKEAEEVSKEIEACGGQAITFGGDVSKEADVDSMMKAALDKWGTIDVLVNNAGITRDTLLMRMKKSQWQDVIDLNLTGVFLCTQAATKIMMKKKKGKIINIASVVGLVGNIGQANYSAAKAGVIGLTKTVAREYASRNINVNAIAPGFIASDMTAELGEDLEKKILSTIPLGRYGKPEEVAGLVEFLALNPAANYITGQVLTIDGGMVM

SEQ ID NO: 1956 - DNA, 828 bp, Oryza sativa
  CDS (1)..(828)
atggcgggtagcagctacggcgacgttcatgagtctgcaagaaagttggtgggcaaggtggcgctgatcaccggcggcgcgagcggcatcggggagtgcacggcgcggctgttcgtgaagcacggggcgcaagtcgtggtcgccgacatccaggacgaggcgggggcgcgactgtgcgccgagctcgggagcgccaccgccagctacgtgcggtgcgacgtgacgagcgaggacgacgtcgcggccgcggtggaccacgccgtggcgaggtacgggaagctggacgtcatgttcaacaacgccgggatcggcggcgcggcgtgccacagcatcctggagagcaccaaggccgactttgaccgcgtgctggccgtgaacctgacgggcccgttcctgggcacgaagcacgcggcgcgggtgatggtggccgcggggcgcggcgggtgcatcatcgggacggcgagcctcgcgtcggcggtggccggcacggcgtcgcacgcgtacacgtgcgccaagcgcgcgctggtggggctgacggagaacgcggcggcggagctgggccgccacgggatccgcgtcaactgcgtgtcgcccgccgcggcggcgacgccgctggccacggggtacgtgggcctggagggggaggcgttcgaggccgccatggaggccgtggccaacctcaagggcgtgcgcctccgcgtggaggacatcgccgccgccgtgctgttcctcgccagcgacgacgcgcgctacgtcagcggccacaacctgctcatcgacggcggctgctccatcgtcaacccgtcctttggcatcttcaaggactga

SEQ ID NO: 1957 - protein, 275 aa, Oryza sativa
MAGSSYGDVHESARKLVGKVALITGGASGIGECTARLFVKHGAQVVVADIQDEAGARLCAELGSATASYVRCDVTSEDDVAAAVDHAVARYGKLDVMFNNAGIGGAACHSILESTKADFDRVLAVNLTGPFLGTKHAARVMVAAGRGGCIIGTASLASAVAGTASHAYTCAKRALVGLTENAAAELGRHGIRVNCVSPAAAATPLATGYVGLEGEAFEAAMEAVANLKGVRLRVEDIAAAVLFLASDDARYVSGHNLLIDGGCSIVNPSFGIFKD

SEQ ID NO: 1958 - DNA, 909 bp, Oryza sativa
  CDS (1)..(909)
atgttcacagcgatgcatcgcatcctcagcagggggaggaggacacctgcagcttcgtcttcctccgtcactgccttcgccaccgcctccgattcacagaggttggccgggaaggtcgccgtcatcaccggcggcgccagcggcatcggcagggcgacggcggaggagttcgtcaggaatggcgccaaggtcatcctcgccgatgtgcaggacgacctgggacacgccgtcgccgcggagctcggcgcggacgcggcgtcgtacgcgcgctgcgacgtcaccgacgaggcgcaggtcgcggccgccgtggacctcgccgtggcacggcacgggcgtctcgacgtcgtcttcaacaacgccggcatccccggtgacctcacgccgacccccgtgggcgcgctggacctcgctgacttcgaccgcgtgatggcggtgaacaccagggcggtggtggcgggcgtcaagcacgccgcgcgcgtcatggtgccgcgccgccgcggcagcatcatctgcacggcgagcacggcgggggtgatcggtggcgtggcggtcccgcactacagcgtgtccaaggccgcggtgctcgggctggtgcgcgccgtggcgggcgagatggcgcgctccggcgtgcgcgtgaacgccatctcccccaactacatctggacgcccatggcggcggtcgccttcgcaaggtggtaccccagccggagcgccgacgaccaccgccggatcgtggagaatgacataaacgagatggatggcgtgacactggaggccgaggacgtggcaagggcggcggtgttcctcgcctccgacgaggctaagtacgtgaacgggcacaacctcgttgtcgacggcgggtacaccgtcggcaaggtgcccaacatgccggtcccagatggccattga

SEQ ID NO: 1959 - protein, 302 aa, Oryza sativa
MFTAMHRILSRGRRTPAASSSSVTAFATASDSQRLAGKVAVITGGASGIGRATAEEFVRNGAKVILADVQDDLGHAVAAELGADAASYARCDVTDEAQVAAAVDLAVARHGRLDVVFNNAGIPGDLTPTPVGALDLADFDRVMAVNTRAVVAGVKHAARVMVPRRRGSIICTASTAGVIGGVAVPHYSVSKAAVLGLVRAVAGEMARSGVRVNAISPNYIWTPMAAVAFARWYPSRSADDHRRIVENDINEMDGVTLEAEDVARAAVFLASDEAKYVNGHNLVVDGGYTVGKVPNMPVPDGH

SEQ ID NO: 1960 - DNA, 897 bp, Oryza sativa
  CDS (1)..(897)
atgtacagcgcccttcacctcgttcagaggggcaagagcagagcagggttgacgatgttgactggattcgtcaaccgcttctcttccgtgtcaagacccgaaaggttggctggaaaggtggccgtgatcaccggcggcgcaagcggcatcggcgaggcgacggccaaggagttcatccgcaatggcgccaaagtcatcatcgccgacgtacaagacgatctcggccacgccgtcgccgccgagctcggcccagatgcggcctacacccgctgcgatgtcaccgacgaggcgcagatcgcggcggccgtggacctcgccgtggcgtgccacggccgcctcgacgtcctgcacaacaacgccggggtcacgtgctcctacgtggggcccctcgcctccctagacctcgccgacttcgaccgcgtcatggcggtgaacgcccgggcggtgctcgccggcatcaagcacgcggcgcgcgtgatggcgccacggcgcgccggctccatcctctgcacggccagcgtggcgggcgtgatcggcagcgatgtcccccacgcgtacagcgtctccaaggcggcagccatcggcgtggtgaggtccgccgccggcgagctggcgcgccacggcgtgcggctgaacgccatctcgccgcacggcatcgcgacgccgctggcgatgcgcgggttcggcgacgtgctggcgtgggcggacgccgagagattgaagcgggtcatcgaggaggacatgaacgagctggagggcgcaaagctggaggcggaggacatcgcgagggcggcggtgtacctcgcctccgacgaggccaagtacatcactgggcataacctcgtcgtcgatggcgggttcaccgtcggcaagcgcctcaacttcgcgcatgcttga

SEQ ID NO: 1961 - protein, 298 aa, Oryza sativa
MYSALHLVQRGKSRAGLTMLTGFVNRFSSVSRPERLAGKVAVITGGASGIGEATAKEFIRNGAKVIIADVQDDLGHAVAAELGPDAAYTRCDVTDEAQIAAAVDLAVACHGRLDVLHNNAGVTCSYVGPLASLDLADFDRVMAVNARAVLAGIKHAARVMAPRRAGSILCTASVAGVIGSDVPHAYSVSKAAAIGVVRSAAGELARHGVRLNAISPHGIATPLAMRGFGDVLAWADAERLKRVIEEDMNELEGAKLEAEDIARAAVYLASDEAKYITGHNLVVDGGFTVGKRLNFAHA

SEQ ID NO: 1962 - DNA, 855 bp, Oryza sativa
  CDS (1)..(855)
atggcgtcgtcgtcacggccggaggaggcggcggcggcggcgccgccgtggagcaggctggaggggcgggtggtgctggtgacgggcgcctcctcggggctcggccgcgagttctgcctcgacctggcgcgcgccggctgcctggtcgtcgccgccgcgcgccgcgccgaccgcctccgctcgctctgcgacgagatcaacgcctccgccccccgggcttcggcggcggcggccgccgtcgagctcgacgtcgcctccggtgggcccgccttggaggccgccgtgcagagcgcctgggacgccttcggccgcatcgacgtcctcatcaacaacgctggccttcgaggaggtgtgcactcaccattggattggcctgaggatgaatgggagacacttatcaagacaaacctcacaggatcatggctcgtcgccaagcatgtatgtagacgcatgcgtgatgccaagctaaagggttcagtaattaacatttcctctgtttctggtcttaaccgtggtcatctgcctggctccactggatacgcagcttccaagtctgccatgcattatgccacaaagctaatggctttggaattaggagcatatggcattagagtgaactcaatagcacctggaatcttcaagtcagagataaccgctcctctattgcaaaagaaatggttgagcactgttgtttcaaagatagtgccacttaagactcatggcactactgatccagcattgacgtcgctggttcgttttctgatccatgaaacatcatcatatgtgactggcaacatcttcattgtagattctggtgccaccttacctggtgttccaatattctcttctctgtaa

SEQ ID NO: 1963 - protein, 284 aa, Oryza sativa
MASSSRPEEAAAAAPPWSRLEGRVVLVTGASSGLGREFCLDLARAGCLVVAAARRADRLRSLCDEINASAPRASAAAAAVELDVASGGPALEAAVQSAWDAFGRIDVLINNAGLRGGVHSPLDWPEDEWETLIKTNLTGSWLVAKHVCRRMRDAKLKGSVINISSVSGLNRGHLPGSTGYAASKSAMHYATKLMALELGAYGIRVNSIAPGIFKSEITAPLLQKKWLSTVVSKIVPLKTHGTTDPALTSLVRFLIHETSSYVTGNIFIVDSGATLPGVPIFSSL

SEQ ID NO: 1964 - DNA, 915 bp, Oryza sativa
  CDS (1)..(915)
atggcctccgccgcatactacgccgggctcgtcgccggcacgccacctccgccgtgtcgccctggccggctccggcggtgtcagccgccggccaataacctcgtctcatcaggtagaagaagccatcaagcaattagggtcaccaatggagtgaacatggatggccgggcaaagcttgcagccccagttgcagtggtcactggagcatctagagggattggaagagccatcgctgtggctcttggcaaagcagggtgcaaggtgattgtgaactatgccaagtcaggtatggaagctgaagaagtgtgcagagagattgaggagtccgggggcaccgcgatcaccttctctgctgacgtctccatcgaagccgaggtcgaatccatgatgagagccgcaattgacacttggggaacactagacgtgctggtgaacaatgcagggatcacaagagacgcactgctgatgcggatgaagcggacacagtggcaggaggtcgtcgacgtcaacctcaccggcgtctacctctgcgctcaggctgcggcgggggtgatgatgatgaagaagaagggaaggatcatcaacatcacctcggtttccgggatcatcggcaacattgggcaggccaactactgcgctgccaaggccggggtgatcggtctgaccaaagccatggccagggagtacggcagcagaaacatcaatgtgaacgccgttgctcctggctgggtgacctccaacatgaccgcaaaactaggcgacaatgtcgaacagaaggctctcgagacgataccgttaggacggtttggcaaaccagaagagatagccggtctggtggagttcctggccgtccatcctgctgcaagctacatcactgggcaggtgctgccggttgatggtggcctgtcaatttga

SEQ ID NO: 1965 - protein, 304 aa, Oryza sativa
MASAAYYAGLVAGTPPPPCRPGRLRRCQPPANNLVSSGRRSHQAIRVTNGVNMDGRAKLAAPVAVVTGASRGIGRAIAVALGKAGCKVIVNYAKSGMEAEEVCREIEESGGTAITFSADVSIEAEVESMMRAAIDTWGTLDVLVNNAGITRDALLMRMKRTQWQEVVDVNLTGVYLCAQAAAGVMMMKKKGRIINITSVSGIIGNIGQANYCAAKAGVIGLTKAMAREYGSRNINVNAVAPGWVTSNMTAKLGDNVEQKALETIPLGRFGKPEEIAGLVEFLAVHPAASYITGQVLPVDGGLSI

SEQ ID NO: 1966 - DNA, 765 bp, Zea mays
  CDS (1)..(765)
atggcagcagtgtccaccgcgccggcgctcgaaggccgcatcgcgctcgtcaccggtggctcccggggcatcggccgcgaggtgtcgtcccacctcgccgcgctcggcgcgcgtgtcgtggtcaactacgccaccaacccggccaaggccgaggagctcgtcgcggagctcgcctcgcgcggcctccgcgccgtggccgtgcgcgcggacgtctccgacccggccgccgtgcgcgcgctcttcgaccgcgccgaggaggcattcgggtccccgccccacgtagtggtcgcctgcgcgggcatcatggacgccaagtaccccgcgctggccgacactgccgtcgaggacttcgacgccacgttcgcggtgaacacgcgcggcaagttcctggtgtgccgggaggccgcccggcgcatcccccccaacagcggtgggcgcatcatgacgttctcgtccacgacggttgccgtgctgccgccgggctacgcggcgtacgctgcgtccaacgccgctgtggaggcgatgacgagggtcctggccaaggaggtggcggcgaaggggatcacggccaacgtggtggcgccgggccctgtgcgcacggagctcttccttgccgggaaggatgaggcgttcctagagaggataaagaactccatgggtatagccgagacgacagacatagcgcccgtggtggcgttcctggcgagcgaggcctcgggctgggtgaacgggcaggttatcagggtcaatgggggcgtcgcatga

SEQ ID NO: 1967 - protein, 254 aa, Zea mays
MAAVSTAPALEGRIALVTGGSRGIGREVSSHLAALGARVVVNYATNPAKAEELVAELASRGLRAVAVRADVSDPAAVRALFDRAEEAFGSPPHVVVACAGIMDAKYPALADTAVEDFDATFAVNTRGKFLVCREAARRIPPNSGGRIMTFSSTTVAVLPPGYAAYAASNAAVEAMTRVLAKEVAAKGITANVVAPGPVRTELFLAGKDEAFLERIKNSMGIAETTDIAPVVAFLASEASGWVNGQVIRVNGGVA

SEQ ID NO: 1968 - DNA, 897 bp, Oryza sativa
  CDS (1)..(897)
atgatgcttaacgcagcagccaaaaaacttgtcagggggaagagcatagctgctcacgtattcttctcctcgtcgtcaagatccagaaagttggatggcaaagtggccgtgataaccggcgcagcgagcggcatcggcgaggccacggcgaaggagttcgtcaggaatggcgccaaggttatcattgccgatatcaaggatgatctcggccgcgccgtggccggcgagctcggcgccgacgccgcgtcgtacacgcactgcgacgtcaccgtcgagaaggatgtcgcctcggccgtcgacctcgccgtggcgcgacacggccgcctcgacgtcgtgtacagcaacgccgccatcgcgggtggcgcgcctccggccacgctcgcggcgctcgacctcgacgagtacgaccgcgtcatggccgtcaacgccaggtccatgttggcgtgcgtcaagcacgcggcgcgcgtcatggcgccccgccgcgccggttgcatcctctgcacggccagcacggcggcggtgctcggcggcatggcggcgccggcgtactccatgtcgaaggcggccgtcgtcggcatggtgcggacggtggcgaggcagctggcgcgcgacggcgtgcgggtgaacgccatctcgccgcacgcagtcccgacgccgatggcgataggtctcttctccgagacgttcccggcggcgaccgcggaggaggtgaggaggatggtgacgagggagatgcaggagctggaaggggcgtcgctggaggtggaagacgtggcgagggcggccgtcttcttggcgtccgacgaggccaagttcatcaccggccacaacctcgtcgtcgacggcgggttcacggcaggcaaggtgctcgtccgggatcctccgggctctgcttga

SEQ ID NO: 1969 - protein, 298 aa, Oryza sativa
MMLNAAAKKLVRGKSIAAHVFFSSSSRSRKLDGKVAVITGAASGIGEATAKEFVRNGAKVIIADIKDDLGRAVAGELGADAASYTHCDVTVEKDVASAVDLAVARHGRLDVVYSNAAIAGGAPPATLAALDLDEYDRVMAVNARSMLACVKHAARVMAPRRAGCILCTASTAAVLGGMAAPAYSMSKAAVVGMVRTVARQLARDGVRVNAISPHAVPTPMAIGLFSETFPAATAEEVRRMVTREMQELEGASLEVEDVARAAVFLASDEAKFITGHNLVVDGGFTAGKVLVRDPPGSA

SEQ ID NO: 1970 - DNA, 855 bp, Brassica napus
  CDS (1)..(855)
atgtcaactgaaaacattcaacattcttccctcccttctcaaaggcttttgggcaaagtggcattgataaccggaggagccacagggataggcgaaagcatcgctcgtctcttccacaagcacggtgccaaagtctgcatcttcgacgtccaagacgatctcggagacaaagtactcaaaactctgttagccaactcggaggatgatgagtcagcttgtttcatccacggtgacgtcacacaagaagacgacatcagcaacgctgttgacttcgccgtcaaacgtttcgggaccctcgacatactcatcaacaacgcaggagtaagcggagcaccctgccccgacatccgcaacaacagtttaaccgagttcgaaaccgtcttcaacgtcaacgtgaaaggagctttcctagggatgaaacacgcggcgcgtgtgatgatccccgccaagaaaggctccatagtctctttatgcagcgttggtggtgttgtcggaggcgtcggtccgcacgcttacgtcggttccaagcacgcggttctaggtttgactaggagcgttgcggcggagctgggacagcatgggatacgcgtgaactgcgtttctccttacgcggttgcgactaacctcgcgttggctcatttgcctgaggacgagaggaatgaaggcgtggtcgctggtttcaggagtttcgcggctgcgaacgcgaatctgaaaggtgttgagttgacggttgatgacgtggccaacgcggttttgtttcttgcgagtgatgagtcgcggtacgtgagtggtgataatctgatggttgatggtgggtttacttgcactaaccactcctttaaagtttttaggtga

SEQ ID NO: 1971 - protein, 284 aa, Brassica napus
MSTENIQHSSLPSQRLLGKVALITGGATGIGESIARLFHKHGAKVCIFDVQDDLGDKVLKTLLANSEDDESACFIHGDVTQEDDISNAVDFAVKRFGTLDILINNAGVSGAPCPDIRNNSLTEFETVFNVNVKGAFLGMKHAARVMIPAKKGSIVSLCSVGGVVGGVGPHAYVGSKHAVLGLTRSVAAELGQHGIRVNCVSPYAVATNLALAHLPEDERNEGVVAGFRSFAAANANLKGVELTVDDVANAVLFLASDESRYVSGDNLMVDGGFTCTNHSFKVFR

SEQ ID NO: 1972 - DNA, 960 bp, Brassica napus
  CDS (1)..(960)
atggccaccaccgtcgcagcaacgaaactcacctccttgaaagccaccgccgggaagctcggttaccgtgagatctgccaggtccggcaatgggctccgcttaagtctgcgatgcctcatttcggtatgctgcgatgtgcgacatccactgttgtgaaagctcaagctcaagctcaagccacggctactgagcaaacaacagaagaagctgttccaaaagtggaatctccagttgtggttgtgactggtgcctctagaggcattggtaaagctattgctctttccttgggcaaagctggctgtaaggtcttggtgaactatgctaggtcggcaaaggaagctgaagaagtttccaaacagattgaagaatatggtggcgaggctattacttttggaggcgatgtctcgaaagaggctgatgtggacgccatgatgaaaactgctgttgataaatggggaaccattgacgtcgtggttaacaatgcaggaattaccagggataccttgttgattcgaatgaagaaatctcaatgggatgaagtgatagatttgaatctcactggagtgtttctctgtacccaggcagcaacaaagatcatgatgaagaagagaaagggaaggatcatcaacatagcgtcagttgttggtctcattggtaacattgggcaagcaaactacgctgcagctaaagctggagttattgggttttccaagactgccgccagagagggtgctagcaggaatataaatgtgaatgtggtgtgccctggattcattgcatctgacatgactgccaagcttggagaagacatggaaaagaaaatcttgggaacaatcccattaggacgatatggacaaccagaagatgtggctggcttggtagaattcttggctctgagcccggcagcgagttacataactggacagacattcaccatcgatggaggtattgcaatctag

SEQ ID NO: 1973 - protein, 319 aa, Brassica napus
MATTVAATKLTSLKATAGKLGYREICQVRQWAPLKSAMPHFGMLRCATSTVVKAQAQAQATATEQTTEEAVPKVESPVVVVTGASRGIGKAIALSLGKAGCKVLVNYARSAKEAEEVSKQIEEYGGEAITFGGDVSKEADVDAMMKTAVDKWGTIDVVVNNAGITRDTLLIRMKKSQWDEVIDLNLTGVFLCTQAATKIMMKKRKGRIINIASVVGLIGNIGQANYAAAKAGVIGFSKTAAREGASRNINVNVVCPGFIASDMTAKLGEDMEKKILGTIPLGRYGQPEDVAGLVEFLALSPAASYITGQTFTIDGGIAI

SEQ ID NO: 1974 - DNA, 789 bp, Brassica napus
  CDS (1)..(789)
atggatagccggtggagtcttcgaggtatgacaggtcttgtaaccggtggaaccaagggaattgggtatgcgatagtggaggaacttgctggttttggtgcaagagttcacacgtgtgccagagaccaaactctgcttgatgaatgcttaaatgaatggaaagccaaagggtatcaagtcactggctcagtctgtgatgtttcctctcgacctcagagagatgagttgatgaagactgtctcttctctattcagtggcaaactcaacatccttatcaacaatgttggtacccttacgtcaaagccggctacagagtttacagcacaagatttctcaagtcaaatagctaccaatttggagtctgcttatcatttatctcaattggcccatcctttacttaaggcatctggatttggtagcattgtgttcatgtcttcagtatgtggggttgtatcagccggtaccgtatccatatacagcttaacaaaaggaggcatgaatcaattggcaagaaacttggcatgtgaatgggcaagtgatggcataagggctaactctgtagctccttgggtgactagaactcctcttgcccaagatcgtcttgatgacaagaaatatgctgaagctatctgctcaagaaccccattaggccgtacgtgtgagccgagtgaggttgcctcgctggttacgtttctttgtctccctgcagcttcttatataacaggacaaaccatttttattgatggtggtctcactgttaatggcttctcctacaagccagaagtttaa

SEQ ID NO: 1975 - protein, 262 aa, Brassica napus
MDSRWSLRGMTGLVTGGTKGIGYAIVEELAGFGARVHTCARDQTLLDECLNEWKAKGYQVTGSVCDVSSRPQRDELMKTVSSLFSGKLNILINNVGTLTSKPATEFTAQDFSSQIATNLESAYHLSQLAHPLLKASGFGSIVFMSSVCGVVSAGTVSIYSLTKGGMNQLARNLACEWASDGIRANSVAPWVTRTPLAQDRLDDKKYAEAICSRTPLGRTCEPSEVASLVTFLCLPAASYITGQTIFIDGGLTVNGFSYKPEV

SEQ ID NO: 1976 - DNA, 786 bp, Brassica napus
  CDS (1)..(786)
atgtcggaactaagactggatggcaagatcgtaattataacaggcggagccagcggtatcggagccgaggcggctaggctattcaccgaccacggagctaaagtggtcatagtcgatatacaagaggagctaggccaaaacgtcgccgtttccatcgggaaagagagagccagtttctaccgttgcgacgtaacagaggagacagaagtggagaacgccgtcaagttcaccgtcgagaagcacggaaagctcgacgttcttttcagcaacgccggcgtcttggacccgcggggaagcatcctcgacttggatcttgaccggttcgaccgcataatggcggttaacgtgcgcggcgcggctgcgtttatcaaacacgcggcacgtgcgatggtggagaaaggcacgcgtgggtctatcgtgtgtaccacgagcgtgtcgtcggagattggtggtgggagacgtcacgggtacacggcgtctaaacatggactgctcgggctgatcagaacggcgtgtggggagctggggaagtatgggattagagtcaacggtgtggcaccgtacgcgctcgcgacgccgttgactagccacgacgaggaaacggcgaggcaggtggaggaagaatttgcggccaagggggtgctcaagggtgtggtgcttaacgctcgccacgtggcgcaagtggctctgtttttggcttctgatgagtcggtttatgtcagtggtcagaatttggcggtggatggaggttatagtatgtgtcgttcaggcaatgttcaaatttag

SEQ ID NO: 1977 - protein, 261 aa, Brassica napus
MSELRLDGKIVIITGGASGIGAEAARLFTDHGAKVVIVDIQEELGQNVAVSIGKERASFYRCDVTEETEVENAVKFTVEKHGKLDVLFSNAGVLDPRGSILDLDLDRFDRIMAVNVRGAAAFIKHAARAMVEKGTRGSIVCTTSVSSEIGGGRRHGYTASKHGLLGLIRTACGELGKYGIRVNGVAPYALATPLTSHDEETARQVEEEFAAKGVLKGVVLNARHVAQVALFLASDESVYVSGQNLAVDGGYSMCRSGNVQI

SEQ ID NO: 1978 - DNA, 777 bp, Brassica napus
  CDS (1)..(777)
atgtcaggaagcagaagattggatggcaaagtcgtgattataacaggcggagccagcgggattggagcagaatctgctaggctattcactgaccacggagctaaagtggttattgttgacatacaagaggagttaggccagaacgttgccgtttcaataggtaaagacaaagcaagttattacaaatgcgatatcacaaacgaaacagaggtagagaatgctgttaagttcaccgtcgaaatgcatggaaaactcgacgttctgttcagcaacgccggcgtcttagatacgccgggaagcatcctcgacttgaatctcgaacattttgaccgtgtaatgggggttaacgttcgcggtgcagctgcgtttatcaaacatgcagcacgtgccatggtgggtagtggcacacgtggttccattgtttgtacgactagcgttacggcggagattggtggtcagggacctcatggatacacagcgtcgaagcatgccctcctggggctgattaagtcagcttgtggtgagttggggaaacatggcattagagtaaacggcgtggcgccgtttgcggtggcgacgagtatgactagccgtgatgaggagacggcgaagcaggtggagggatattgtgaagccgtgggaattctgaagggtgttgcgttgaaacccaatcacgtggcgaaggctgctttgtttctagcttctgatgattctatttatattagtgggcataatctagttttggacggtggatttagcgtcgttaagcctctttaa

SEQ ID NO: 1979 - protein, 258 aa, Brassica napus
MSGSRRLDGKVVIITGGASGIGAESARLFTDHGAKVVIVDIQEELGQNVAVSIGKDKASYYKCDITNETEVENAVKFTVEMHGKLDVLFSNAGVLDTPGSILDLNLEHFDRVMGVNVRGAAAFIKHAARAMVGSGTRGSIVCTTSVTAEIGGQGPHGYTASKHALLGLIKSACGELGKHGIRVNGVAPFAVATSMTSRDEETAKQVEGYCEAVGILKGVALKPNHVAKAALFLASDDSIYISGHNLVLDGGFSVVKPL

SEQ ID NO: 1980 - DNA, 828 bp, Glycine max
  CDS (1)..(828)
atggcaacttcaacctctgcactcaataaaaggctggaaggaaaagttgcactgatcacaggaggagctagtggcatcggcaaacgcactgcagaagtgttcgctcagcaaggagccaaagtagtgatcgctgacatccaagacgaactgggacattccgttgctcagtccatagggccatcaacatgttgttatgtccattgcgatgtcaccgatgagaaccaaataaaaaatgccgtccaaaaagccgtagatgcttatgggaagctagacatcatgttcaacaacgccggcattgttgatcccaacaagaaccgaatcattgacaacgataaggcagatttcgaacgtgtcctaagcgtcaatgtcacgggtgttttccttgggatgaagcatgcggcgcaggcgatgatcccagcacgcagtggtagcatcatctctacggccagcataagctcctacgttggtggtgcagcctcgcatgcttactgttgtgctaagcatgctgtggttggtctaactaaaaatgcagcagttgagcttggacagttcggaataagggtgaattgtttgtcaccttacgctcttgctacacctttggccaccaagtttgttggagctaatgatgaggagcttgagactatcatgaactcactggctaatctcaagggtgtcactcttaaagctgaggatgtggctaatgccgcactttattttgctagtgatgattccaggtacgtcagtgggcaaaatttgctcatagatggaggcttcagcattgttaatccttcctttcacatgtttcagtacccggactcggagtcttga

SEQ ID NO: 1981 - protein, 275 aa, Glycine max
MATSTSALNKRLEGKVALITGGASGIGKRTAEVFAQQGAKVVIADIQDELGHSVAQSIGPSTCCYVHCDVTDENQIKNAVQKAVDAYGKLDIMFNNAGIVDPNKNRIIDNDKADFERVLSVNVTGVFLGMKHAAQAMIPARSGSIISTASISSYVGGAASHAYCCAKHAVVGLTKNAAVELGQFGIRVNCLSPYALATPLATKFVGANDEELETIMNSLANLKGVTLKAEDVANAALYFASDDSRYVSGQNLLIDGGFSIVNPSFHMFQYPDSES

SEQ ID NO: 1982 - DNA, 897 bp, Glycine max
  CDS (1)..(897)
atggaatcaccgttcagaccagagattctgaagggaaaggttgctctaatcaccggtggagcctccggaatcggattcgaaatttccacccaattcggcaaacatggagcctcggtcgcgctcatgggccgccgcaagcaagttcttcagtccgctgtctccgttctccaatccctcgccattcccgcggttgggtttgagggggatgtgcggaagcaagaggatgcggtgagggtggtggaatcgactttcaagcattttggaaggattgatatacttgtgaatgctgcagctgggaactttctcgtttctgcagaggatttgtccccaaatggctttcggacagttctggacattgattctgttggcacattcacaatgtgccatgaagcactaaaatatctcaaaaaggggggagaaggaaggagcaactcttctagtgggggatcaataataaacattagtgctaccttgcattacacagcttcttggtatcaaattcacgtgtctgcagcaaaggctgcagttgatgccactacgagaaacttggcactagaatggggaacagactatgatattagagtcaatgggattgcaccaggtccaataagtgacacccctggcatgagtaaactggctcctgatgaaataagtagcaaagccagagattacatgccgctgtataaacttggggagaagtgggatattgccatggctgcacttttcctagtatcagatgcaggaaaattcattaatggcgacattatgattgttgacggaggactttggctgagtcggcctcgccatttagcaaaagaggctgtgaagcaggtatctcgatcagtagaaaacagatccagaaatgcatctgtcagtgttccaaaaagcaagctgtga

SEQ ID NO: 1983 - protein, 298 aa, Glycine max
MESPFRPEILKGKVALITGGASGIGFEISTQFGKHGASVALMGRRKQVLQSAVSVLQSLAIPAVGFEGDVRKQEDAVRVVESTFKHFGRIDILVNAAAGNFLVSAEDLSPNGFRTVLDIDSVGTFTMCHEALKYLKKGGEGRSNSSSGGSIINISATLHYTASWYQIHVSAAKAAVDATTRNLALEWGTDYDIRVNGIAPGPISDTPGMSKLAPDEISSKARDYMPLYKLGEKWDIAMAALFLVSDAGKFINGDIMIVDGGLWLSRPRHLAKEAVKQVSRSVENRSRNASVSVPKSKL

SEQ ID NO: 1984 - DNA, 816 bp, Glycine max
  CDS (1)..(816)
atggcaagtgcttctgcggtctcagctcatgttagaaggcttgaggggaaagtggcgattatcactggtggtgcaagcggcataggtgaggccactgcaagactcttctctaagcacggagcacaccttgtcatagctgacattcaagacgatttgggcctctctctttgcaaacacttggaatccgcttcctatgttcactgcgacgtgacaaaggaagaggacgttgaaaactgcgtgaacacagcggtttccaagtatggaaaactagacatcatgcttaataacgcaggtatatgtgatgagatcaaaacaagcatactagacaacaacaagtctgattttgagagtgtcataagcgtgaacttggttggtccttttctgggaacaaagcacgctgcaagagtcatgatccctgctaaaaggggaagcataattaacacagctagtgttgctggaaccttaggtggagtggctacacatgcctacacaagttcaaagcacgcgctaattggactgatgaaaaacactgcggtggagcttggacagtttggtattcgggtgaattgtgtgtccccttatgtggttcccacaccgttgaccaagaaacatgccaatattgacgaagaaggagttcgtgagatttattccaacctaaaaggtgttcatcttgtgccgaacgatgtggccgaagctgctctttacttggcaggtgatgagtctaagtatgttagtggtcacaatctcgtgttagatggtgggtacactgatgtaaatataggattttctgtgtttgatcaaaataaacttaactaa

SEQ ID NO: 1985 - protein, 271 aa, Glycine max
MASASAVSAHVRRLEGKVAIITGGASGIGEATARLFSKHGAHLVIADIQDDLGLSLCKHLESASYVHCDVTKEEDVENCVNTAVSKYGKLDIMLNNAGICDEIKTSILDNNKSDFESVISVNLVGPFLGTKHAARVMIPAKRGSIINTASVAGTLGGVATHAYTSSKHALIGLMKNTAVELGQFGIRVNCVSPYVVPTPLTKKHANIDEEGVREIYSNLKGVHLVPNDVAEAALYLAGDESKYVSGHNLVLDGGYTDVNIGFSVFDQNKLN

SEQ ID NO: 1986 - DNA, 795 bp, Glycine max
  CDS (1)..(795)
atggctgaaacaaagttgagctttaaggacaaaagatggtcactccatgggatgactgctctagtcacaggagccacccgcggcatagggcatgccattgttgaagaattggcagaatttggggcagctgttcatatttgtgcacggaaccaagatgatattgataaatgtttggaagagtggaaaagcaagggacttactgtgacgagttcagtatgtgatttacaatgttctgaccaacgtataagattaatggaaattctttcctccatcttccacggaaagctcaatattttagtgaacaatgctgcgacaactataacaaagaaaataatagattacactgcagaagatatatcaaccataatgggtactaattttgagtccgtttatcatttgactcaacttgcacacccgcttctaaaagaatctggacaaggaagcatagtatctatttcgtccattgcaggtttaaaagcccttcccgttttctctgtttatgcagcttccaaaggagccatgaatcaattcaccaaaaacttagcattggaatgggcaaaggataatattcgtgcaaatgctgtggcacctggacctgttatgacaaaacttttggactctatcatgaattcttctggaggggatgagtctgtggatggaatagtgtctcaaacacttgttggtcgcatgggagaagctaaagagatatcagcattagttgcctttctttgccttccagctgcatcatacatcactggacaggttatatgtgctgatgggggtttcacaacttag

SEQ ID NO: 1987 - protein, 264 aa, Glycine max
MAETKLSFKDKRWSLHGMTALVTGATRGIGHAIVEELAEFGAAVHICARNQDDIDKCLEEWKSKGLTVTSSVCDLQCSDQRIRLMEILSSIFHGKLNILVNNAATTITKKIIDYTAEDISTIMGTNFESVYHLTQLAHPLLKESGQGSIVSISSIAGLKALPVFSVYAASKGAMNQFTKNLALEWAKDNIRANAVAPGPVMTKLLDSIMNSSGGDESVDGIVSQTLVGRMGEAKEISALVAFLCLPAASYITGQVICADGGFTT

SEQ ID NO: 1988 - DNA, 852 bp, Glycine max
  CDS (1)..(852)
atgactatatttttggagcacttacctttccaagcatgcaggttagaaggcaaggtggcactaataaccggtggagccagtggcatcggcgaagccaccgcaaggcttttcctttgccacggtgccaaggtcatcatcgctgacatccaagacaacctcggacactccctctgccaaaacctcaactcctccgacaacaacatttcctacgttcactgcgacgtcaccaacgataacgacgtccaaaacgccgtcaacgccgccgtctcgcgtcacggcaagctcgacatcctgttcagtaacgccggcactgttggccgtgtgagcccttccatcacggcgtttgacaacgctgacttgaagagggttttcgaggtgaatgtcttcggtgctttctacgccgccaaacacgcggctaaggtaatgattcctgaaaagagagggagcattgtgctcacctcaagtgttgcttcggtgactcacgcggtttcgccgcatgcatacactgcgtcgaagcacgcggtggtgggtctgatgaagaacctgtgcgtggaactggggaatcatggaatcagagttaactgtgtttcaccgtacgcggtggccactcctctgatgacacgtggaaccaggatgaagaaggagatggtagagaaagtgtattctgaggcggggaacctgaagggagtggttttgaaggaagaggatttggcagaagcagctctgtttctggctagtgatgagtcaaagtacgtgagtggggttaacctagttgtggatggaggttacagtgtcaccaatgtttctgttaaagaagctgtgagaaagttttctggtaagcccaagttgtaa

SEQ ID NO: 1989 - protein, 283 aa, Glycine max
MTIFLEHLPFQACRLEGKVALITGGASGIGEATARLFLCHGAKVIIADIQDNLGHSLCQNLNSSDNNISYVHCDVTNDNDVQNAVNAAVSRHGKLDILFSNAGTVGRVSPSITAFDNADLKRVFEVNVFGAFYAAKHAAKVMIPEKRGSIVLTSSVASVTHAVSPHAYTASKHAVVGLMKNLCVELGNHGIRVNCVSPYAVATPLMTRGTRMKKEMVEKVYSEAGNLKGVVLKEEDLAEAALFLASDESKYVSGVNLVVDGGYSVTNVSVKEAVRKFSGKPKL

SEQ ID NO: 1990 - DNA, 810 bp, Glycine max
  CDS (1)..(810)
atggcaagtgtctcactggtctcagctactggaagaaggcttgaggggaaagtggctattatcactggtggtgcaagcggcataggtgaggccactgcaagactcttctctaagcacggagcacacgttgtcatagctgatattcaagacgatttgggtctctctatttgcaaacacttggaatccgcttcctatgttcactgcgacgtgacaaacgaaaccgacgttgaaaactgcgtgaacaccaccgtttccaaacacggcaaactagatatcatgttcaacaacgctggcataaccggtgtgaacaaaaccagcatcctcgacaacacaaagtcagagtttgaggaagtgatcaacgttaacctagttggtgtctttctgggaacaaagcacgccgcaagggtaatgatccctgctagaagaggaagcatagttaacactgcaagtgtttgtggaagcataggtggtgtagcatcacatgcatacacaagttccaaacacgccgtggtggggctcacaaagaacactgcggtggagcttggagcatttggtgttagggttaactgcgtgtcaccctacgtggttgccacgcccttggctaagaatttttttaagcttgatgatgacggagttcaggggatttattcaaaccttaagggtactgatcttgtgcctaatgatgtagccgaagctgctttgtacctggcaagtgatgagtccaagtatgttagtgggcacaatcttgtggttgatggaggcttcactgtggtcaatagtgggttttgtgtccttgggcaatcttcgtga

SEQ ID NO: 1991 - protein, 269 aa, Glycine max
MASVSLVSATGRRLEGKVAIITGGASGIGEATARLFSKHGAHVVIADIQDDLGLSICKHLESASYVHCDVTNETDVENCVNTTVSKHGKLDIMFNNAGITGVNKTSILDNTKSEFEEVINVNLVGVFLGTKHAARVMIPARRGSIVNTASVCGSIGGVASHAYTSSKHAVVGLTKNTAVELGAFGVRVNCVSPYVVATPLAKNFFKLDDDGVQGIYSNLKGTDLVPNDVAEAALYLASDESKYVSGHNLVVDGGFTVVNSGFCVLGQSS

SEQ ID NO: 1992 - DNA, 729 bp, Brassica napus
  CDS (1)..(729)
atgacgatagcgacgcctttcagcggggctgcgaactcggttacgtcggcgaaagtcgtgctgataacgggagtgagcaaaggtctgggaagagccttatctctcgagatggcgaagagaggccacactgtgattggatgcgcccgcactcaggagaagctcaccgctcttcaatcggagctctcctccccggaaaatcatctcctcctcaccgccgatgtgaaatcagatagcagcgtcaaagagatggcacacacaattatggagaagaaaggtgtcccagacatcatagttaacaatgccggtactatcaataagaacaacaagatttgggaagtctctgcagaagattttgacagtgtcatggatacaaacgttaaaggagtagtaaatgtactgcgacatttcatccctttgatgctcccacggaagcaagggattattgttaacatgtcttctggatggggaagatctggtgctgccctggttgcaccttactgtgcatcgaaatgggcgattgagggtttaagccgatcagtggcaaaggaggtagccgaaggaatggcagtggttgcattaaatccaggagtgatcaacacagaaatgctcacttcctgctttggcaacacagcttccttgtatcaagctcctgatgcttgggctgtgaaggctgcaacgatgattctgaaccttacagcgggtgataatggcggatctcttacggtctaa

SEQ ID NO: 1993 - protein, 242 aa, Brassica napus
MTIATPFSGAANSVTSAKVVLITGVSKGLGRALSLEMAKRGHTVIGCARTQEKLTALQSELSSPENHLLLTADVKSDSSVKEMAHTIMEKKGVPDIIVNNAGTINKNNKIWEVSAEDFDSVMDTNVKGVVNVLRHFIPLMLPRKQGIIVNMSSGWGRSGAALVAPYCASKWAIEGLSRSVAKEVAEGMAVVALNPGVINTEMLTSCFGNTASLYQAPDAWAVKAATMILNLTAGDNGGSLTV

SEQ ID NO: 1994 - DNA, 885 bp, Glycine max
  CDS (1)..(885)
atggcaagcaataaggagtctaagttcccagcacagagccagaaaactcagccaggaaaagaacatgtaatgaatccactcccacaagccacaaatcctgatcacaaggccgccaataaactccagggaaaggtggcgttggtgacaggaggtgactcaggaattggcagagcggtttgcctgtgtttcgcaaaagagggtgcaaccgtggcctttacatacgtaaagggccatgaggacagggataaagatgatactctgaagatgctgcttgaagctaagacaagtggtgcagacaatccattggcaatagcagcggatattggctttgatgagaactgcaaacaggtcattgaccttgttgtcaaagaatatggccgccttgatgttctggtcaacaatgcagctgagcagcatttgacaaactctgttgaggaaatcacacaacagcagcttgagagagtcttcggaaccaacatcttttctcagttctttttggtcaagcatgctctgaagcacatgaaagaagggagctgcatcataaactctacttcagttaatgcatacaatgggaatccagaagcgttggactacactgctaccaagggagcaattgtggccttcaccagaggtctttctcagcagctagcgagtaggggaattagggtgaatggtgtggcacctggcccagtttggacgccaatacaaccagcttcaaagcctgctgagatgattcagaacttggggtgtgaggtgccaatgaaccgcgtggctcagccttgtgagattgcaccatgttatttgttcttggcaacttgtcaggactcttcctactttactggccaagtcctccatccaaatggtgggatggtcgtcaacgcttaa

SEQ ID NO: 1995 - protein, 294 aa, Glycine max
MASNKESKFPAQSQKTQPGKEHVMNPLPQATNPDHKAANKLQGKVALVTGGDSGIGRAVCLCFAKEGATVAFTYVKGHEDRDKDDTLKMLLEAKTSGADNPLAIAADIGFDENCKQVIDLVVKEYGRLDVLVNNAAEQHLTNSVEEITQQQLERVFGTNIFSQFFLVKHALKHMKEGSCIINSTSVNAYNGNPEALDYTATKGAIVAFTRGLSQQLASRGIRVNGVAPGPVWTPIQPASKPAEMIQNLGCEVPMNRVAQPCEIAPCYLFLATCQDSSYFTGQVLHPNGGMVVNA

SEQ ID NO: 1996 - DNA, 915 bp, Triticum aestivum
  CDS (1)..(915)
atggcatcaaccatgccgttctccgctggcctcgtttctcttgggtctccgccgccgcagcgccacagctgcaggttccagcgatatcatcgaccgggcactctcatttcatcagctataaggcatggtcaggttaaagctatggctggagtgagcatggatggcttggcacagcctcaagccccagttgcagtggttaccggagcatcgagggggattgggcgagcgatagctgtggctcttggcaaagcagggtgcaaggtagttgtgaactatgccaagtcaggcatggaagctgaagaagtgtgcagagagatcatggagtccggtggcactgccatctccttttcagccgatgtctccattgaagccgaggttgaaaccatgatgagagcggtaattgatacttggggaacgctggacgtgatggtgaacaatgcagggatcacgcgagatgctctgctaatgcggatgaagaaggcgcagtggcaggaagtagtggacgtaaaccttaccggtgtttacctctgcgcccaggctgcggcggcagtgatgatgaagaggaagaagggaagaatcatcaacatcgcctcagttgccgggatgatcggcaacattggccaggccaactactgcgccgccaaggccggggtgattggattgaccaaggccatggcccgggaatacggtggcagaaacataaatgtgaatgcagtttccccgggctgggtcgcgtctgacatgaccgcaaaactaggcgacgacatcgaacgaaaggcgctcgagacaataccactaggacgattcggcaagccagaggagattgctggactggtggagttcttggctgttcatccggctgcaagctacatgaccgggcaggtgctcccagttgatggtggcctgtccatttga

SEQ ID NO: 1997 - protein, 304 aa, Triticum aestivum
MASTMPFSAGLVSLGSPPPQRHSCRFQRYHRPGTLISSAIRHGQVKAMAGVSMDGLAQPQAPVAVVTGASRGIGRAIAVALGKAGCKVVVNYAKSGMEAEEVCREIMESGGTAISFSADVSIEAEVETMMRAVIDTWGTLDVMVNNAGITRDALLMRMKKAQWQEVVDVNLTGVYLCAQAAAAVMMKRKKGRIINIASVAGMIGNIGQANYCAAKAGVIGLTKAMAREYGGRNINVNAVSPGWVASDMTAKLGDDIERKALETIPLGRFGKPEEIAGLVEFLAVHPAASYMTGQVLPVDGGLSI

SEQ ID NO: 1998 - DNA, 819 bp, Triticum aestivum
  CDS (1)..(819)
atggctgcggcggggacgtcgggatcgagccagccgggtgctccaggaaggtggtctcttcacggcaagacggctctcgtcaccggcggcacccgcgggatcgggcgtgcggtggtggaggaacttgcggcgctgggggcggccgtgcacacctgctcccggaaggaggcggagctgggcgagcgcctcaaggagtgggaggccaggggcttccgcgtcacaacctccgtctgcgacctctccgtccgggagcagcgggagcgcctgattggcgacgtcgccgaacgcttcggcggcaagctcaacatcctcgtaaacaatgtggggacaaacataaggaaaccaactactgaatattccgctgaagattactcttttttgatggccactaatcttgaatctgcatatcatctttgccaacttgcacatcctcttctaaaagcatctggcttgggcagcattgttttcatatcatctgtctgtggattagtagccgtatttagcggtactctatatgccatgactaaaggtgccatcaaccagttaaccaagaacctagcatgtgaatgggcaaaagatggcataagaacaaactctgttgctccatggtacataacgacttcgcttacagaaggacttttggctaacaaggaatttgaggcctccgttgtgagtcgaactccactgaggcgtgtcggagaaccaggagaggtatcatcgctggttgcttttctttgcatgcctggttccacttacataacaggccagacgatctcagtggatggaggtatgagtgtcaatgggctctatccagcttga

SEQ ID NO: 1999 - protein, 272 aa, Triticum aestivum
MAAAGTSGSSQPGAPGRWSLHGKTALVTGGTRGIGRAVVEELAALGAAVHTCSRKEAELGERLKEWEARGFRVTTSVCDLSVREQRERLIGDVAERFGGKLNILVNNVGTNIRKPTTEYSAEDYSFLMATNLESAYHLCQLAHPLLKASGLGSIVFISSVCGLVAVFSGTLYAMTKGAINQLTKNLACEWAKDGIRTNSVAPWYITTSLTEGLLANKEFEASVVSRTPLRRVGEPGEVSSLVAFLCMPGSTYITGQTISVDGGMSVNGLYPA

SEQ ID NO: 2000 - DNA, 804 bp, Glycine max
  CDS (1)..(804)
atggctgaggcaagcattggcagcaaaagcagcagatggtctttacagggaatgacagctctcgtcaccggtggatccaaaggaatcggatatgctatcgtggaggagttggcacagcttggagccactgtgcacacttgcgctcggaacgaagctgaactcaatgaatccttaaatgaatggaacacaaaaggatacagagtaactggttccgtctgtgacgtggcgtctcgtgcagaaagacaagacctcattgctagactctccaatgagtttaatggcaaactcaatatccttgtaaacaacgtgggaacaaacgtaccgaaacatacccttgatgttacggaggaagacttctcatttctgataaatacgaatcttgaatctgcttaccacctaagccagcttgcacatcctctcctgaaagcttcagaggctgcaaacatcatttttatatcctccattgctggtgtgctatcaataggagtaggatccacttatggtgcaacaaaaggagcaatgaaccaactgactaaaaatttggcatgtgagtgggccaaagacaatataaggactaattgcgttgcaccagggccaatcaaaacccctctcggtgacaagcattttaaaaatgaaaaacttcttaatgctttcatttcgcaaaccccccttggacggattggagaagcagaggaagtgtcttcattggtggcattcctctgcttacctgcagcctcttacataacaggacagaccatttgtgttgatggtggattaacagtgaatggtctctatataaattag

SEQ ID NO: 2001 - protein, 267 aa, Glycine max
MAEASIGSKSSRWSLQGMTALVTGGSKGIGYAIVEELAQLGATVHTCARNEAELNESLNEWNTKGYRVTGSVCDVASRAERQDLIARLSNEFNGKLNILVNNVGTNVPKHTLDVTEEDFSFLINTNLESAYHLSQLAHPLLKASEAANIIFISSIAGVLSIGVGSTYGATKGAMNQLTKNLACEWAKDNIRTNCVAPGPIKTPLGDKHFKNEKLLNAFISQTPLGRIGEAEEVSSLVAFLCLPAASYITGQTICVDGGLTVNGLYIN

SEQ ID NO: 2002 - DNA, 882 bp, Glycine max
  CDS (1)..(882)
atggcttcgggtgaaaagaaattcccacctcaacaacaacaaacacagcctgggaaggagcatgctatgaatccagtaccccaattcactagccctgactacaagccttcaaataaacttcaaggaaagatagcattagtgactgggggtgactctgggattggacgagcggtgtgtaacttgtttgccttagaaggtgctaccgtgggcttcacatatgtgaaggggcatgaggacaaggacgcgagggacacgttggaaatgatcaagagggcaaagacttcggatgctaaagatccaatggcggtaccagctgatttgggttacgacgagaattgcaagagagtggttgatgaggtcgtgaatgcttatggttgtattgacattctggtcaacaatgcagctgagcaatacgagtgtggaacagtggaggacattgatgagcctaggcttgagagggtctttcgtacaaatatcttctcctatttcttcatgaccaggcatgccttgaagcacatgaaggaaggaagcagcattatcaacacgacatcggtgaatgcatacaagggaaatgcgaaactattggactacacgtccacgaagggagcaattgtggcctatacaaggggacttgctcttcagttggtgagtaagggaattcgggttaatggggtggctcctgggcctatttggaccccattgataccctcctctttcaaggaggaagaaacggctcaatttggtgcccaggtgccaatgaagagagctggccagcctattgaggttgctccgtcttatgtttttcttgcttgcaaccaatgctcctcttacataactggacaagtccttcaccccaatggtggaaccgttgtcaatggttaa

SEQ ID NO: 2003 - protein, 293 aa, Glycine max
MASGEKKFPPQQQQTQPGKEHAMNPVPQFTSPDYKPSNKLQGKIALVTGGDSGIGRAVCNLFALEGATVGFTYVKGHEDKDARDTLEMIKRAKTSDAKDPMAVPADLGYDENCKRVVDEVVNAYGCIDILVNNAAEQYECGTVEDIDEPRLERVFRTNIFSYFFMTRHALKHMKEGSSIINTTSVNAYKGNAKLLDYTSTKGAIVAYTRGLALQLVSKGIRVNGVAPGPIWTPLIPSSFKEEETAQFGAQVPMKRAGQPIEVAPSYVFLACNQCSSYITGQVLHPNGGTVVNG

SEQ ID NO: 2004 - DNA, 951 bp, Zea mays
  CDS (1)..(951)
atggccaccgccgccgccaccgcagcagcagtagtctcctccccggctgccccacgcgccggggccgccgccgcctcccgccgggggttcgtcacgtttggtggaggcgccgcccgcttctctcccacgctgcggtccggccgtgggttctctggtgtgcaaacccatgttgccgctgttgaacaagcaattgtaaaagatgctaccaagctggaagctccagttgttgttgttacaggtgcatctagagggattggtaaggcaactgctctagcccttggaaaagcaggatgcaaggttctggtaaactatgcccggtcctcgaaagaggctgaagaggtctccaaagagattgaagcatctggtggtgaggctatcaccttcggaggagatgtttcaaaagaagctgatgtagagtctatgatgaaagcagctctagataaatggggaacaatagatgtgctggtaaataatgcagggattacacgagacacattgttgatgaggatgaagaaatctcagtggcaagacgtaattgatctgaatcttactggtgtcttcctttgtacacaggctgcaacaaaagtaatgatgaaaaagagaaagggaaaaattatcaacattgcatctgtagttggtcttactggcaatgttggccaagctaattatagcgcagccaaggctggagtgattggtttcacaaaaacagttgccagggagtatgcaagcagaaatatcaatgtgaatgctattgcaccagggttcattgcatctgatatgactgccgaacttggagaagagcttgagaagaaaatcttgtcaaccattccgttagggagatatggccaaccagaggaagttgcagggttggtcgagttcctggcccttaaccccgcagctagctatatgactggacaggtgcttacaattgacggagggatggtaatgtaa

SEQ ID NO: 2005 - protein, 316 aa, Zea mays
MATAAATAAAVVSSPAAPRAGAAAASRRGFVTFGGGAARFSPTLRSGRGFSGVQTHVAAVEQAIVKDATKLEAPVVVVTGASRGIGKATALALGKAGCKVLVNYARSSKEAEEVSKEIEASGGEAITFGGDVSKEADVESMMKAALDKWGTIDVLVNNAGITRDTLLMRMKKSQWQDVIDLNLTGVFLCTQAATKVMMKKRKGKIINIASVVGLTGNVGQANYSAAKAGVIGFTKTVAREYASRNINVNAIAPGFIASDMTAELGEELEKKILSTIPLGRYGQPEEVAGLVEFLALNPAASYMTGQVLTIDGGMVM

SEQ ID NO: 2006 - DNA, 969 bp, Linum usitatissimum
  CDS (1)..(969)
atggctgctagtaccggatccaccgccgtcgtattcaaatccgccggcttcgccacctcctccggcgaaaggagcattaaccagttccgccactggtctccggttcccgccagcctccactcctcccgcgctggcctccgctgtagatcgagaagctcggtatcctcttccggtgtgagagctcaggttgctgcagttgaaccagtcagcagtgagtcagttaagaaggtggaatctccagtagttattgtaactggagcttccagaggaatcgggaaagcgattgcattgtcgttggggaaagcaggttgcaaggttctggttaactatgcaaggtcatctaaggaggctgaggaagtctccaaagagattgaagcttccggtggtcaagctgtaacctttggtggtgatgtctctaaagaagaggatgtggaggccatgatgaaaactgctattgatgcttttggaacagttgacatactgataaacaatgcagggatcacaagggacactttgttgatgcggatgaagaaacagcagtggcaggatgttattgacctcaatcttactggtgtcttcctttgtacacaggctgcagccaagatcatgatgaagaaaagaaagggaaggattatcaatatcgcttcagttgttggtttggttggtaacgttgggcaagctaactacagtgctgcaaaggcaggagtcattggattcacaaagagtgtcgcaaaggaatattcaagcagaaatatcaacgtcaatgctgttgctcctggattcattgcatctgacatgactgccaagcttggggatgacattgaaaagaaaatcttggagacgattcctttagggcggtacggtcagccggaagaggtggccggattggtggaattcctcgctctgaacccagctgctggctacatgaccgggcaggtgcttaccatcgacggaggaatggtgatgtaa

SEQ ID NO: 2007 - protein, 322 aa, Linum usitatissimum
MAASTGSTAVVFKSAGFATSSGERSINQFRHWSPVPASLHSSRAGLRCRSRSSVSSSGVRAQVAAVEPVSSESVKKVESPVVIVTGASRGIGKAIALSLGKAGCKVLVNYARSSKEAEEVSKEIEASGGQAVTFGGDVSKEEDVEAMMKTAIDAFGTVDILINNAGITRDTLLMRMKKQQWQDVIDLNLTGVFLCTQAAAKIMMKKRKGRIINIASVVGLVGNVGQANYSAAKAGVIGFTKSVAKEYSSRNINVNAVAPGFIASDMTAKLGDDIEKKILETIPLGRYGQPEEVAGLVEFLALNPAAGYMTGQVLTIDGGMVM

SEQ ID NO: 2008 - DNA, 834 bp, Linum usitatissimum
  CDS (1)..(834)
atgagtgccactaacgccgctagttccgtcattagaaggctggaaggcaaagtggcgctgatcaccggcggagctagcgggataggagaagccacggccaagctgttcgtccaacacggcgccaaggtcgtcatcgccgatgtcaaagaccaactcggcgggtcactcactgagaagctggggggcccacacgcggccacctacgtccactgcgacgtcacacatcctgcccacgtcagcgatgcggttgacgcggcagtgtccacgtatggccagctggacatcatgcacaacaatgccggcatcgccggcaactttgatcctcgcatcctcaactccgacgacgataattttaagcgagtcatcgacattaacctcttcggcgccttcctaggtgccaagcatgccgccagggtgatggtaccggcggggagaggcggctgcatcctgttcacagccagtgcagtctcggtgactagcggcaacatttcgtacgcatacaaggtgtcgaagaacggggtagtggggctggccaacaatctgtgcgcggagctgggacagcatgggattcgagtcaacgcgatatcgcctttcgcgctggcgacgccgttactgagggcggcgctgggcgggatgggaaaggaggagggtgacgcgttcgtcgagaagatagggaacttgaaagggactgttctgaaagagggggatattgcagcggcggcattgtacctggctagcgacgatgctaagtacgtgagcgggatgaatttggtcgtggatggaggtcacaggcagaacaaccccatatttcctgcttcgacgttcactaagtag

SEQ ID NO: 2009 - protein, 277 aa, Linum usitatissimum
MSATNAASSVIRRLEGKVALITGGASGIGEATAKLFVQHGAKVVIADVKDQLGGSLTEKLGGPHAATYVHCDVTHPAHVSDAVDAAVSTYGQLDIMHNNAGIAGNFDPRILNSDDDNFKRVIDINLFGAFLGAKHAARVMVPAGRGGCILFTASAVSVTSGNISYAYKVSKNGVVGLANNLCAELGQHGIRVNAISPFALATPLLRAALGGMGKEEGDAFVEKIGNLKGTVLKEGDIAAAALYLASDDAKYVSGMNLVVDGGHRQNNPIFPASTFTK

SEQ ID NO: 2010 - DNA, 870 bp, Linum usitatissimum
  CDS (1)..(870)
atggctagcgaggtgtcagcccagctggagccacggtgcaacttaccagacaaagtagtccttgtaaccggtgcttcttcaggtataggccgagagttctgccttgacctagccaaagctgggtgcaagattgtggcggctgctaggcgtattgaccgcctacaatctttgtgcaaagagatcaatatgattcagtttccgaccagtgcttcttcatctgccggagagctaagtggcacacgtgctgtggccgtggagctggatgtgtccgcagacggggttgcaattgataaggctgtgcagagctcttgggaagcatttggaaggatagatgtgttgatcaacaatgctggcattagtggtaactcgaagaactcgttagatttgtctgaagaggaatggaatcatttgatcaagacaaatttgaaaggaacttggttggtttccaagtcagttgggatacggatgcgtgatgcaaagcttggaggttccataatcaatatctcatcgatctttggtcttaatcgtggctatgcacccggagttgtcggttatgcttcttcgaagaccggtgtaaattccatgacgaaggtgatggctttggagttgggggtttacaagatcagagttaactctatatcacctggactgttcaaatccgagatcacagaaagtctcatgaataaaccctggatgactaccgttgctgagaagacggtcccactacgaacatttggaactgtagatccagcattgacatcactcgttcgatacctcatccatgattcaacccagtatgtgacgggcaatattttcattgtagatgccggaacaaccttatcaggtgtccctattttctcatcactctga

SEQ ID NO: 2011 - protein, 289 aa, Linum usitatissimum
MASEVSAQLEPRCNLPDKVVLVTGASSGIGREFCLDLAKAGCKIVAAARRIDRLQSLCKEINMIQFPTSASSSAGELSGTRAVAVELDVSADGVAIDKAVQSSWEAFGRIDVLINNAGISGNSKNSLDLSEEEWNHLIKTNLKGTWLVSKSVGIRMRDAKLGGSIINISSIFGLNRGYAPGVVGYASSKTGVNSMTKVMALELGVYKIRVNSISPGLFKSEITESLMNKPWMTTVAEKTVPLRTFGTVDPALTSLVRYLIHDSTQYVTGNIFIVDAGTTLSGVPIFSSL

SEQ ID NO: 2012 - DNA, 843 bp, Linum usitatissimum
  CDS (1)..(843)
atggctagcgaggtgtcagcccagctggagccatggtataacttggaagacaaagtggtctttgtaactggtgcttcttcaggtttgggcagagatttctgcctcgacctggcgaaagctgggtgcaagattgtggctgctgctaggcgtattgaccgcctacaatctttgtgcgatgaaatcaatctgactgctggagagccaagtggtttacgtgctgccgctgtggagctggatgtgtcggcagacggtgcttcgatcgacaaggctgtacagaccgcttgggaagcctttggaaagatagatgcgttgatcaacaatgctggagttagaggtagtgtgaagaccccattggatttttctgaagaagagtggaatcacacgatcaagacgaatctgacaggagtttggttggtttccaagtcagttgggattcggatgcgtgatgcgaagctgggaggttccataatcaatatttcatcgatagctggtctgaatcgtggtctattacctggagctgttggctatgcttcttcgaagactggagtaaacgccatgacaaaggtgatggcactggagttgggggttcacaagatcagagttaactctatatcacctggacttttcaaatctgagatcacgcaaggtcttatgcagaaagactggctcagtaacgttgctgagaagacggttcctctactaacatatggaactgcagacccagcattgacatcaatcgcccgatacctcatccacgattcatcccagtatgtgacgggtaatatcttcattgtggacgctggagccaccttacctggtgtccctattttctcatcgctctga

SEQ ID NO: 2013 - protein, 280 aa, Linum usitatissimum
MASEVSAQLEPWYNLEDKVVFVTGASSGLGRDFCLDLAKAGCKIVAAARRIDRLQSLCDEINLTAGEPSGLRAAAVELDVSADGASIDKAVQTAWEAFGKIDALINNAGVRGSVKTPLDFSEEEWNHTIKTNLTGVWLVSKSVGIRMRDAKLGGSIINISSIAGLNRGLLPGAVGYASSKTGVNAMTKVMALELGVHKIRVNSISPGLFKSEITQGLMQKDWLSNVAEKTVPLLTYGTADPALTSIARYLIHDSSQYVTGNIFIVDAGATLPGVPIFSSL

SEQ ID NO: 2014 - DNA, 819 bp, Hordeum vulgare
  CDS (1)..(819)
atggctgcggcggagacgtcgggatcgagccagccgggcgctccaggacggtggtctcttcacggcaaaacggctctcgtcaccggaggcacccgcgggatcgggcgtgcggtggtggaggagcttgccgcgctgggggcggccgtgcacacctgctcccggaaggaggcggagcttggcgagcgcctcaaggagtgggaggccaggggcttccgcgtcacaacctccgtctgcgacctctccgtccgggagcagcgggagcgcctgattggcgaggtcgccgaacgcttcggaggcaagctcaacatcctcgtaaataatgtggggacaaacataaggaaaccaactactgaattttctgctgaagattactcttttttgatggccactaaccttgaatctgcatatcatctgtgccaacttgcacatcctcttctaaaagcatctggtttgggcagcattgtttttgtatcatctgtctgtggattagtagccgtatttagcggctctatatatgctatgaccaaaggtgccatcaaccaattaaccaagaacctagcatgtgaatgggcgaaagatggcataagaacaaactctgttgctccatggtacataacaacgtcacttacagaaggacttttggctaacaaggaatttgaggcctccgttgtgagtcgaacaccacttgggcgtgtcggagaaccaggagaagtatcatcgctggttgcttttctttgcatgcctggtgccacttacataacaggccagacgatctcagtggatggaggtatgactgtcaatgggatgtatccagcataa

SEQ ID NO: 2015 - protein, 272 aa, Hordeum vulgare
MAAAETSGSSQPGAPGRWSLHGKTALVTGGTRGIGRAVVEELAALGAAVHTCSRKEAELGERLKEWEARGFRVTTSVCDLSVREQRERLIGEVAERFGGKLNILVNNVGTNIRKPTTEFSAEDYSFLMATNLESAYHLCQLAHPLLKASGLGSIVFVSSVCGLVAVFSGSIYAMTKGAINQLTKNLACEWAKDGIRTNSVAPWYITTSLTEGLLANKEFEASVVSRTPLGRVGEPGEVSSLVAFLCMPGATYITGQTISVDGGMTVNGMYPA

SEQ ID NO: 2016 - DNA, 789 bp, Hordeum vulgare
  CDS (1)..(789)
atggcggccggcggcatgagcagggaggagaggtggagcctggccggcgcgacggcgctcgtcaccggcggcagcaaaggcatcggccaggcgatcgtggaggagctggcggggcacggggcgcgggtgcacacgtgcgccaggagcgcggcggagctggaggagtgccgccgccggtgggaggccaaggggctcccggtcaccgtctccgtctgcgacgtctccctgcgcgccagcagggagcagctcgtggagacggtcaagcaagtcttcggcggcaagctcgacatactggtgaacaacgcggcacagattcttgccaaggcggccgtggagtggacatcggaggagtactcgcacctcatggcgaccaatctagagtcgtgcttccacctcagccagctcgcgcaccccttgctcctcaacgcctccatcgctggaggtagcatcgtcaacatatcctcccttgggggcacacttggtttcacgggccttgcgctttacagtatgacaaaaggaggaataaaccagcttacaaggagccttgctactgaatgggcccagaacaagatccgggtgaattgcgtcgccccgggcgcgaccaagagtgacatgttaagcagtctcccactggagattagagagaacgagttggcgaggactccaatgcggcgggcaggcgagccagcggaggtggctgcaatggtgtcgttcctctgcatgccggcggcatccttcgtcaccggccaggtcatcgccgtcgacggtggtcggacaattagtgcttag

SEQ ID NO: 2017 - protein, 262 aa, Hordeum vulgare
MAAGGMSREERWSLAGATALVTGGSKGIGQAIVEELAGHGARVHTCARSAAELEECRRRWEAKGLPVTVSVCDVSLRASREQLVETVKQVFGGKLDILVNNAAQILAKAAVEWTSEEYSHLMATNLESCFHLSQLAHPLLLNASIAGGSIVNISSLGGTLGFTGLALYSMTKGGINQLTRSLATEWAQNKIRVNCVAPGATKSDMLSSLPLEIRENELARTPMRRAGEPAEVAAMVSFLCMPAASFVTGQVIAVDGGRTISA

SEQ ID NO: 2018 - DNA, 762 bp, Zea mays
  CDS (1)..(762)
atggatgtcaagtgccggcgtctggaggggaaggtggccatcgtgacggcgtccacgatggggatcggcctcgccatcgccgagcgcctcggtctggagggcgccgccgtggtcatctcctcccgcaagcagaagaacgttaacgaggcggtggaggggctcagggccaagggtatcaccgcggttggtgccctctgccacgtctccgacgcacagcagcgcaagagcctcatcgagacggccgtcaagagctttgggcacatagatatccttgtctccaatgctgccgcaaatccttctgtagatagcatacttgaaatgaaagagtctgttctcgataagctgtgggatattaacgtcaaggcttctatccttcttattcaggatgctgctcctcacctacggaaggggtcatctgtgattattatttcttcaattgctggttacaatccagaacaaggattgacaatgtatggtgtcacaaagactgctctctttggtctcacgaaggctcttgctggtgagatgggacccgatactcgtgttaactgtgtagcccctggttttgttcctacacggtttgctagtttcctcacagaaaatgagaccattaggaaagagcttaacgagaggaccaagcttaagagattgggtactgtggaagacatggctgcggctgcggcttttctggcgtctgacgacgcatcatacattacggctgaaaccattgttgttgctggaggggtgcagtctaggctgtaa

SEQ ID NO: 2019 - protein, 253 aa, Zea mays
MDVKCRRLEGKVAIVTASTMGIGLAIAERLGLEGAAVVISSRKQKNVNEAVEGLRAKGITAVGALCHVSDAQQRKSLIETAVKSFGHIDILVSNAAANPSVDSILEMKESVLDKLWDINVKASILLIQDAAPHLRKGSSVIIISSIAGYNPEQGLTMYGVTKTALFGLTKALAGEMGPDTRVNCVAPGFVPTRFASFLTENETIRKELNERTKLKRLGTVEDMAAAAAFLASDDASYITAETIVVAGGVQSRL

SEQ ID NO: 2020 - DNA, 792 bp, Brassica napus
  CDS (1)..(792)
atggagaataatgacaagagatggtccctcgccggaaaaaccgctctggtaaccggtggtactcgcggaatcgggcgagcggtcgtggaggagctagcgagattcggggcaacggttcatacatgttcaaggagccaggaggagctcaaatcatgcttggatgattggaagtccaatggtttagtggtaaccggttcggtttgcgatgcttcggatagggatcagagggagaagttgattcaggaggtttcgtctgcctttagcggcaagattaacatccttgtaaacaatgttggaactaatttaaggaagccaacggtcgagtattcgagtgaggattatgctaaaatcatgtcgaccaatttggaatccgctttccatttttcccaaattgcacatcctcttttaaaagcatctggggttgggagcattgtgttcatctcctctgtagctggcctggtgcatcttagtagtggatctgtctatggtgcaactaaaggagcacttaatcagcttacaaggaatctagcttgcgagtgggcaggagacaacattagaaccaattgtgtggcgccatggtacatcaagacctcacttgtgaaaccgctactcgagaagaaaggttttgaggaggcgatagtttcgcgtaccccacttgggcgcgttggagaaccagaggaagtctcgtcgctagtggctttcctctgccttcccgcagcgtcttacatcaccggtcaggtcatttctgttgatggaggattcacagtcaacggcttcagttacaccatgtaa

SEQ ID NO: 2021 - protein, 263 aa, Brassica napus
MENNDKRWSLAGKTALVTGGTRGIGRAVVEELARFGATVHTCSRSQEELKSCLDDWKSNGLVVTGSVCDASDRDQREKLIQEVSSAFSGKINILVNNVGTNLRKPTVEYSSEDYAKIMSTNLESAFHFSQIAHPLLKASGVGSIVFISSVAGLVHLSSGSVYGATKGALNQLTRNLACEWAGDNIRTNCVAPWYIKTSLVKPLLEKKGFEEAIVSRTPLGRVGEPEEVSSLVAFLCLPAASYITGQVISVDGGFTVNGFSYTM

SEQ ID NO: 2022 - DNA, 849 bp, Brassica napus
  CDS (1)..(849)
atgagcaatcatcaaaccacggtgttgaaacaactagagccatggtgtgagctaaacggcaaagtggttcttctgaccggagcttcttctggtataggaagtgaggtctgtctcgatctgggcaaagctggctgtaagattatcgcagcagctcgtcgcgtccaccgtctcgaatctctctgctccgaaatcaacagcttaagctcaaccgggatccaattagccgcaccgctcgagctagacgtttcatcagacgcagccaccattcaaaaagctgtcaaacaagcttgggacatctacggaaagatagatgtgttgatcaacaacgctggaatcagaggcaatgtcaagacgagtttagatctgactgaagacgagtggaacacagtgttcagaaccaacttaaccggaccttggttagtatccaaatacgtctgcagtctaatgcgtgacgcaaaacgcggcggctcagtaataaacgtctcctccatcgccggtctccaccgaggtttgttacccggtggagtcgcctatgcttgttccaaaggtggtgttgacaccatgacgaggatgatggctattgagttaggtgtatacaacatcagagtgaactcgatcgcaccggggcttctcaagtcagagatcacgcaaggtcttatgcaaaaagagtggctcaagaacgtgaccgagaggactatcccgttaaaggtgcaacagaccgtggatccggggcttacctcgctcgttcgctatctcagtcatgactcttctcaatatgtctccggcaacacatacatacttgactccggagctacaatacctggcctgcctattttttcttctctttga

SEQ ID NO: 2023 - protein, 282 aa, Brassica napus
MSNHQTTVLKQLEPWCELNGKVVLLTGASSGIGSEVCLDLGKAGCKIIAAARRVHRLESLCSEINSLSSTGIQLAAPLELDVSSDAATIQKAVKQAWDIYGKIDVLINNAGIRGNVKTSLDLTEDEWNTVFRTNLTGPWLVSKYVCSLMRDAKRGGSVINVSSIAGLHRGLLPGGVAYACSKGGVDTMTRMMAIELGVYNIRVNSIAPGLLKSEITQGLMQKEWLKNVTERTIPLKVQQTVDPGLTSLVRYLSHDSSQYVSGNTYILDSGATIPGLPIFSSL

SEQ ID NO: 2024 - DNA, 960 bp, Brassica napus
  CDS (1)..(960)
atggccaccaccgtcgcagcaacgaaactcacctccttgaaagccaccgccgggaagctcggttaccgtgagatctgccaggtccggcaatgggctccgcttaagtctgcgatgcctcatttcggtatgctgcgatgtgcgacatccactgttgtgaaagctcaagctcaagctcaagccacggctactgagcaaacaacagaagaagctgttccaaaagtggaatctccagttgtggttgtgactggtgcctctagaggcattggtaaagctattgctctttccttgggcaaagctggctgtaaggtcttggtgaactatgctaggtcggcaaaggaagctgaagaagtttccaaacagattgaggcatatggtggccaggctattacttttgggggtgatgtctccaaagaggctgatgtggatgccatgatgaaaaccgctgttgatgcatggggaaccattgatgtcgtcgttaacaatgcaggaattactcgggataccttgttgatacgaatgaagaagtcccaatgggatgaagtgattgatttgaatctcactggagtctttctctgtacccaggcagcaacaaagatcatgatgaagaagagaaagggaagaatcatcaacattgcgtcagttgttggtctcattggtaatattggccaagcaaactacgctgctgctaaagctggtgttattgggttctccaagactgccgccagagagggtgcgagcaggaatataaatgtcaatgtggtttgccctgggttcattgcatctgacatgactgccaagcttggagaagacatggaaaagaaaatcttgggaacaatcccattaggacgatatggacaacctgaagatgtggctggcttggtagaattcttggctctcagtcctgcagccagttacatcacaggacaggcattcaccattgatggaggtattgccatctag

SEQ ID NO: 2025 - protein, 319 aa, Brassica napus
MATTVAATKLTSLKATAGKLGYREICQVRQWAPLKSAMPHFGMLRCATSTVVKAQAQAQATATEQTTEEAVPKVESPVVVVTGASRGIGKAIALSLGKAGCKVLVNYARSAKEAEEVSKQIEAYGGQAITFGGDVSKEADVDAMMKTAVDAWGTIDVVVNNAGITRDTLLIRMKKSQWDEVIDLNLTGVFLCTQAATKIMMKKRKGRIINIASVVGLIGNIGQANYAAAKAGVIGFSKTAAREGASRNINVNVVCPGFIASDMTAKLGEDMEKKILGTIPLGRYGQPEDVAGLVEFLALSPAASYITGQAFTIDGGIAI

SEQ ID NO: 2026 - DNA, 849 bp, Brassica napus
  CDS (1)..(849)
atgagcaatcatcaaaccacggtgttgaaacaactagagccatggtgtgagctaaacggcaaagtggttcttctgaccggagcttcttctggtataggaagtgaggtctgtctcgatctgggcaaagctggctgtaagattatcgcagcagctcgtcgcgtccaccgtctcgaatctctctgctccgaaatcaacagcttaagctcaaccgggatccaattagccgcaccgctcgagctagacgtttcatcagacgcagccaccattcaaaaagctgtcaaacaagcttgggacatctacggaaagatagatgtgttgatcaacaacgctggaatcagaggcaatgtcaagacgagtttagatctgactgaagacgagtggaacacagtgttcagaaccaacttaaccggaccttggttagtatccaaatacgtctgcagtctaatgcgtgacgcaaaacgcggcggctcagtaataaacgtctcctccatcgccggtctccaccgaggtttgttacccggtggagtcgcctatgcttgttccaaaggtggtgttgacaccatgacgaggatgatggctattgagttaggtgtatacaacatcagagtgaactcgatcgcaccagggcttctcaagtcagagatcacgcaaggtcttatgcaaaaagagtggcttaagaacgtgaccgagaggactatcccgttaaaggtgcaacagaccgtggatccgggacttacctcgctggttcgctatctcattcatgactcttcccaatatgtctcaggcaacacatacattctcgactccggagctacaatacctggcctgcctattttttcttctctttga

SEQ ID NO: 2027 - protein, 282 aa, Brassica napus
MSNHQTTVLKQLEPWCELNGKVVLLTGASSGIGSEVCLDLGKAGCKIIAAARRVHRLESLCSEINSLSSTGIQLAAPLELDVSSDAATIQKAVKQAWDIYGKIDVLINNAGIRGNVKTSLDLTEDEWNTVFRTNLTGPWLVSKYVCSLMRDAKRGGSVINVSSIAGLHRGLLPGGVAYACSKGGVDTMTRMMAIELGVYNIRVNSIAPGLLKSEITQGLMQKEWLKNVTERTIPLKVQQTVDPGLTSLVRYLIHDSSQYVSGNTYILDSGATIPGLPIFSSL

SEQ ID NO: 2028 - DNA, 801 bp, Brassica napus
  CDS (1)..(801)
atggctggagaagagcaaagacgaagatggagccttcaaggcaaaaccgcacttgtcaccggtggaaccaaaggcattgggcatgctatagtagaggaacttgcaggatttggagcaataatacatacatgtgctcgagacgaagcacatctcaacgagtgtttaagcaactggaaaaataaagggtttcaagtcactggttcagtctgtgacgcatcgtcctggaccgaaagagagaagctgatgcaaactgtgtacactttgtttgatgccaagctcagtatcctcatcaacaacgttggcgcaatccggtcaaagccaacaattgaaaatacggcagaggatttctcgttccacatttccaccaacttggaatctgcataccattttagccagcttgcacatcctctgctcaagtcttcagggtgtggtaatatcgtcttcatatcctccattactggggtcgtctcacgtagcatcagctccatctacagtgccacaaaaggggcaatgaatcagctagcaaggaatttggcatgcgagtgggcgagcgacagcataagagctaattctgtagctcctacattcattgccactccactggttgataatgcgtttgatgatgaatttaaaaaagtggtagaatcaacaaatcccttggggcgcataggaaaaccagaggaggtagcatcggtggtggcatttctttgtatgcctgcagcttcttacataacgggtcagaccatttgcgttgatggaggtctttcggtcaatggcttctcgtatcagccacacgcttaa

SEQ ID NO: 2029 - protein, 266 aa, Brassica napus
MAGEEQRRRWSLQGKTALVTGGTKGIGHAIVEELAGFGAIIHTCARDEAHLNECLSNWKNKGFQVTGSVCDASSWTEREKLMQTVYTLFDAKLSILINNVGAIRSKPTIENTAEDFSFHISTNLESAYHFSQLAHPLLKSSGCGNIVFISSITGVVSRSISSIYSATKGAMNQLARNLACEWASDSIRANSVAPTFIATPLVDNAFDDEFKKVVESTNPLGRIGKPEEVASVVAFLCMPAASYITGQTICVDGGLSVNGFSYQPHA

SEQ ID NO: 2030 - DNA, 789 bp, Brassica napus
  CDS (1)..(789)
atggataaaagatggagccttcaagggatgaccgcccttgtaaacggtggagccagcggaatcgggtatgccatagtagaagagttagctagttttggagctagaatccacgtatgcgacatctctgaaacatttctcaatcaaagcttaagcgaatgggaaaagaaagggtttcaagtgagtggctcaatctgtgatgtaacctctcgtccccagagagaaacattaatacaaaaagtctccgcgctattcgatggcaaactcaacattcttgtgaacaatgtgggagtacttcgtggaaagccaacaacagaatatgcgaaagaggatttcaatttccacatctcaacaaacttagaacctgctttcaatttttcccagctttcacatcctctactaaaggcttcaggctatggaagcatcatcttcatttcctctgttgcaggaattgtatcatttgactgtggatccatttatagtctagcaaaaggagctctgaatcagctagcaagaaatttggcatgtgaatgggcaaaagacggcataagagccaacgctgttgcccctaatgctatcaggactcctctgtctcaacaatatcttgatgacgtcagtttcaaggaggaattgttcagtagaactccacttggtcgcgctggagagccaaatgaagttgcatcactagtggcattcttgtgtctacctgcggcttcttatataactggtcaaaccatttgtgttgatggaggcctcactgttaacggtttctcctatcaaccacatgcttga

SEQ ID NO: 2031 - protein, 262 aa, Brassica napus
MDKRWSLQGMTALVNGGASGIGYAIVEELASFGARIHVCDISETFLNQSLSEWEKKGFQVSGSICDVTSRPQRETLIQKVSALFDGKLNILVNNVGVLRGKPTTEYAKEDFNFHISTNLEPAFNFSQLSHPLLKASGYGSIIFISSVAGIVSFDCGSIYSLAKGALNQLARNLACEWAKDGIRANAVAPNAIRTPLSQQYLDDVSFKEELFSRTPLGRAGEPNEVASLVAFLCLPAASYITGQTICVDGGLTVNGFSYQPHA

SEQ ID NO: 2032 - DNA, 849 bp, Brassica napus
  CDS (1)..(849)
atgtcaactgaaaacattcaacattcttctctccctactcaaaggcttttgggtaaagtggcattgataaccggaggagccacagggataggcgaaagcatcgctcgtctgttccacaagcacggtgccaaagtctgcatcgtcgacgtccaagacgatctcggagacaaagttctcaaaactctgttagccaactcggaggagtcagcttgtttcatccacggtgacgtcacacaagaagacgacatcagtaacgctgttgacttcgccgtcaagcgtttcgggacacttgacatactcatcaacaacgcaggagtaagcgaagcaccgtgtccggacatccgcaacaacagtttaaccgagttcgagatggtcttcaacgtcaacgtgaaaggagctttcctagggatgaaacatgcggcgcgtgtgatgatccccgccaagaaaggctcgatagtctctttatgcagcgttggcggcgttgtcggaggcgttggtccgcacgcttacgtcggctccaagcacgcggttctaggtttgactaggagcgttgcggcggagctaggacagcatgggatacgcgtgaactgcgtttctccttacgcggttttgactaacctcgcgttggctcatttgcctgaggatgagaggaaggaaggcgtggtcgctggtttcaggagtttcgccgctgcgaacgcgaatctgaaaggtgttgagttgacggttgatgacgtggcgaacgcggttttgtttctggcgagtgatgagtcgcggtatgtgagtggagataatctgatggttgatggtgggttcacttgcactaaccactcctttaaagtttttagatga

SEQ ID NO: 2033 - protein, 282 aa, Brassica napus
MSTENIQHSSLPTQRLLGKVALITGGATGIGESIARLFHKHGAKVCIVDVQDDLGDKVLKTLLANSEESACFIHGDVTQEDDISNAVDFAVKRFGTLDILINNAGVSEAPCPDIRNNSLTEFEMVFNVNVKGAFLGMKHAARVMIPAKKGSIVSLCSVGGVVGGVGPHAYVGSKHAVLGLTRSVAAELGQHGIRVNCVSPYAVLTNLALAHLPEDERKEGVVAGFRSFAAANANLKGVELTVDDVANAVLFLASDESRYVSGDNLMVDGGFTCTNHSFKVFR

SEQ ID NO: 2034 - DNA, 801 bp, Brassica napus
  CDS (1)..(801)
atggctggagaagagcaaagacgtagatggagccttcaaggcaagaccgcacttgtcaccggtggaaccaaaggcattgggcatgctatagtagaggaacttgcaggatttggggtgataatacatacatgtgctcgagacgaagcacatctcaacgagtgtttaagcaagtggaagaataaagggtttcaagtcactggttcagtctgtgacgtatcgtcctggaccgaaagagagaagctaatgcaaactgtgtactctttgtttgatgccaagctcagtatccttatcaacaatgctggcgcaatccggtcaaagccaacaatagagcatacggctgaggatttctcgttccacatttcgaccaacttggaatctgcgtatcattttagccagcttgcacatcctctgctcaaagcttcaggatgtggtaacatcgtgttcatatcctccatttctggggtcgtctcacttagcatcagctccatctacagtgccacaaaaggggcaatgaatcagctagcaaggaatttggcatgcgagtgggcgagcgacagcataagagctaattctgtagctcctacattcattgccactccactggttgataatgcgtttgatgatgaatttaaaaaagtggtagaatcaacaaatcccttggggcgcataggaaaaccagaggaggtagcatcggtggtggcatttctttgtatgcctgcagcttcttacataacgggtcagaccatttgcgttgatggaggtctttcggtcaatggcttctcgtatcagccacacgcttaa

SEQ ID NO: 2035 - protein, 266 aa, Brassica napus
MAGEEQRRRWSLQGKTALVTGGTKGIGHAIVEELAGFGVIIHTCARDEAHLNECLSKWKNKGFQVTGSVCDVSSWTEREKLMQTVYSLFDAKLSILINNAGAIRSKPTIEHTAEDFSFHISTNLESAYHFSQLAHPLLKASGCGNIVFISSISGVVSLSISSIYSATKGAMNQLARNLACEWASDSIRANSVAPTFIATPLVDNAFDDEFKKVVESTNPLGRIGKPEEVASVVAFLCMPAASYITGQTICVDGGLSVNGFSYQPHA

SEQ ID NO: 2036 - DNA, 858 bp, Brassica napus
  CDS (1)..(858)
atgagcagcaatcatcagactgtgatgaagcaactagagccatggtgcgagctcaaagacaaagtggttctcctaacaggagcttcatccggcatcggaagagagatctgcctcgatctagccaaatccggctgcaagatcatcgcagcagctcgtcgtctcgaccgtctccaatccctctgctccgagatcaacgccttattctccccaacaaaaaccaaacaagccgcacctctcgagctagacgtctcctcagactcatccaccatccgaaacgcagtcaaacaagcttgggacatcttcggaaacatcgacgtcttgatcaacaacgcaggcatcagaggcaacgtcaagtcgagtctggacctatccgaagaagaatgggaaagagtcttcagaacaaacctaaccggaccttggctagtatcaaaacacgtctgcgttctgatgcgcgacgccaaacgccgcggcggaggatcggtgataaacgtttcctccatcgcggggcttcagcgcgggaagctacccggcgcgttggcgtacgcgtgttcgaaaggaggtcttgatattatgacgaagatgatggcggttgagctgggtgagtatggtataagagtgaactcgatagctccggggctgtttaagtcggagatcacggaaggtctggtgaggaaagagtggatgaagaatgtgaggaagaggattgttccgttgaaggtgcagcagactgtggacccggggcttacctcgctggttaggtatctgattccccactcttccaggtatgtctctcgcaatgtttacattgttgacgcgggtgctacattgtctggtctaacgattttttcttcactttga

SEQ ID NO: 2037 - protein, 285 aa, Brassica napus
MSSNHQTVMKQLEPWCELKDKVVLLTGASSGIGREICLDLAKSGCKIIAAARRLDRLQSLCSEINALFSPTKTKQAAPLELDVSSDSSTIRNAVKQAWDIFGNIDVLINNAGIRGNVKSSLDLSEEEWERVFRTNLTGPWLVSKHVCVLMRDAKRRGGGSVINVSSIAGLQRGKLPGALAYACSKGGLDIMTKMMAVELGEYGIRVNSIAPGLFKSEITEGLVRKEWMKNVRKRIVPLKVQQTVDPGLTSLVRYLIPHSSRYVSRNVYIVDAGATLSGLTIFSSL

SEQ ID NO: 2038 - DNA, 798 bp, Glycine max
  CDS (1)..(798)
atggcttctagttcagaatctcaatctcagtctaaaccgctccaagaccgagttgcaatcgtcaccggctcgtcccgcggaatcggccgagaaatcgcgcttcacctcgcctcactcggcgcgcgactcgtcgtcaactacacctccaactcggcccaagccgactcagtcgcggcgcagatcaacgccggttccgccaccacgacaccgcgcgccgtcgtggtccaagccgacgtgtccgatccggctcaggtgaagtcgctcttcgactcggccgagcgcgccttcgactcgccgatccacatccttgtcaactcggcgggcgtgatcgacggcacgtatccctccgtcgccgacaccaccgtggagtccttcgaccgcactttcgcggtgaacgcgcgtggcgccttcgcgtgcgccagggaggccgcgaaccgcctcaagcgcggcggcggagggcggatcattctactgacgacatcgcaggtggtggcgctgaggccggggtacggggcgtacgcggcgtcgaaggcggcggtggaggcaatggtgaagatcctggcgaaggaactgaaagggacgcagataacggcgaattgcgttgcgccgggaccgattgcgacggagatgttcttcgagggtaagacggaggaggtggtgaatcggatcgtgcaagagagtcccttggggaggctcggtgagaccaaagacgtggcacccgttgtgggattcttggccactgatgcttctgaatgggtcaacggtcaaattgttcgtgtcaacggtggctatatttag

SEQ ID NO: 2039 - protein, 265 aa, Glycine max
MASSSESQSQSKPLQDRVAIVTGSSRGIGREIALHLASLGARLVVNYTSNSAQADSVAAQINAGSATTTPRAVVVQADVSDPAQVKSLFDSAERAFDSPIHILVNSAGVIDGTYPSVADTTVESFDRTFAVNARGAFACAREAANRLKRGGGGRIILLTTSQVVALRPGYGAYAASKAAVEAMVKILAKELKGTQITANCVAPGPIATEMFFEGKTEEVVNRIVQESPLGRLGETKDVAPVVGFLATDASEWVNGQIVRVNGGYI

SEQ ID NO: 2040 - DNA, 963 bp, Glycine max
  CDS (1)..(963)
atggcttccattgccggatccaactgcgtcgctctccgaaccgccaacttcggcgcctccggtaaccggaaaatcggccagatccgccaatggtctccgattctcacgaatctccgtcccgtttccggtcttcgtcaccgatcgaatactccgtttagctcctccggtgtgagagcacaggttgctactctggaggaagcaggaaccggagcaactcagaaagtggaagcgccggttgcagtggtgaccggagcttccagaggcattggaaaagcgattgcactgtcattaggtaaagcaggttgcaaggttctggtcaactatgcaaggtcatccaaggaagctgaggaggtttccaaggagattgaggagtttggtggtcaagctcttacatttggtggagatgtttctaacgaggctgatgtggagtctatgattaaaactgcagttgatgcttggggaacagttgatgtattaataaacaatgcaggaataacaagagatggtttattaatgagaatgaagaaatctcaatggcaggatgttattgatctaaatctcactggtgtttttctttgcacacaggctgctgctaagattatgatgaagaaaaagaagggaaggatcgtcaatattgcatcagttgttggtttggttggcaatgttggacaagccaattatagtgctgcaaaagcaggagtaattggcctgacaaaaactgttgcgaaggaatatgctagtagaaacatcactgttaatgcagttgctccagggtttattgcatctgacatgactgccaagctaggacaagacattgagaaaaagattttggagacaatcccattaggaagatatggccagccagaggaagttgctggactggttgaattcttggctcttaatcaagctgccagttacatcactgggcaggttttcaccattgatggaggtatggtgatgtaa

SEQ ID NO: 2041 - protein, 320 aa, Glycine max
MASIAGSNCVALRTANFGASGNRKIGQIRQWSPILTNLRPVSGLRHRSNTPFSSSGVRAQVATLEEAGTGATQKVEAPVAVVTGASRGIGKAIALSLGKAGCKVLVNYARSSKEAEEVSKEIEEFGGQALTFGGDVSNEADVESMIKTAVDAWGTVDVLINNAGITRDGLLMRMKKSQWQDVIDLNLTGVFLCTQAAAKIMMKKKKGRIVNIASVVGLVGNVGQANYSAAKAGVIGLTKTVAKEYASRNITVNAVAPGFIASDMTAKLGQDIEKKILETIPLGRYGQPEEVAGLVEFLALNQAASYITGQVFTIDGGMVM

SEQ ID NO: 2042 - DNA, 759 bp, Glycine max
  CDS (1)..(759)
atggaaacgccgaagagatttgaaggtaaggtagccatcgtgactgcttccacacagggaatcggcttagcaatagccgagaggcttggcctcgagggtgcatctgtcgtcatctcttctcgcaaacagcaaaatgttgatgcggccgcggaacaactgagggccaaaggaattcaagtgttgggggttgtttgccatgtttcaagtgctcagcaaaggaagaatttgatcgacaaaactgtccagaagtatggaaagatagatgttgttgtgtccaatgctgctgcaaatccttctgttgatgccatcttgcaaacaaaagactcggtccttgacaagctatgggagataaatgtcaaagccactatacttcttctgaaggacgcagtgcctcacttgcagaagggttcttctgttgttatcatttcctcaattgcaggttttaacccgccaccttctctggctatgtatggagtgaccaaaacagcccttcttggacttactaaagccctggctgctgagatggccccaaacactcgtgtaaactgtgttgctcctggttttgtgccaaccaattttgcttcattcattacaagtaacgatgctgtgaagaaagaactggaagagaagacattacttggaaggcttggtacaacagaagacatgggtgctgcagcagcttttttggcatctgacgatgctgcttatataacaggagagaccattgtagttgctgggggaacgccttccaggttgtag

SEQ ID NO: 2043 - protein, 252 aa, Glycine max
METPKRFEGKVAIVTASTQGIGLAIAERLGLEGASVVISSRKQQNVDAAAEQLRAKGIQVLGVVCHVSSAQQRKNLIDKTVQKYGKIDVVVSNAAANPSVDAILQTKDSVLDKLWEINVKATILLLKDAVPHLQKGSSVVIISSIAGFNPPPSLAMYGVTKTALLGLTKALAAEMAPNTRVNCVAPGFVPTNFASFITSNDAVKKELEEKTLLGRLGTTEDMGAAAAFLASDDAAYITGETIVVAGGTPSRL

SEQ ID NO: 2044 - DNA, 810 bp, Glycine max
  CDS (1)..(810)
atggctagtgtttcttcggttttagctccatttagaaggcttgatgggaaggtggcgattatcactggtggtgcgagtggtctaggtgcagccactgcaagactcttctctaagcatggagcatatgtagtcatagctgatattcaagacgacttgggtctctctgttgccaaagagttagaatctgcttcctatgtccattgcgatgtgacaaaggaagaggacgttgaaaactgcgtgaacacaacggtttccaagtatggcaaattagatatcatgtttaacaatgcaggtgtatctgatgagatcaaaacaagcattcttgacaacaacaagtctgattttgagagagtgataagtgttaacttggttggtccttttctgggaacaaagcatgctgcaagggtcatgattcctgctaaaaagggatgcataatcaacacagctagtgttgctggatgcataggtggaggtgctacacatgcctacacaagttcaaagcacgcactaattggactgacaaaaaacactgcggtggagcttggacaacatggtattagggtaaattgtttgtcaccttatcttgttgtcacaccgttaagtaagaaatatttcaatattgatgaagacaaaattcgtgagatatattcaaacctaaaaggtgctcatcttgtgcctaacgatgtggccgaagctgctctttacttggcaggtgatgagtccaagtatgttagtggtcacaatcttgtgatagatggagggtacactgatgtaaatgcaggatttaccgtgtttgggcagtctcagtaa

SEQ ID NO: 2045 - protein, 269 aa, Glycine max
MASVSSVLAPFRRLDGKVAIITGGASGLGAATARLFSKHGAYVVIADIQDDLGLSVAKELESASYVHCDVTKEEDVENCVNTTVSKYGKLDIMFNNAGVSDEIKTSILDNNKSDFERVISVNLVGPFLGTKHAARVMIPAKKGCIINTASVAGCIGGGATHAYTSSKHALIGLTKNTAVELGQHGIRVNCLSPYLVVTPLSKKYFNIDEDKIREIYSNLKGAHLVPNDVAEAALYLAGDESKYVSGHNLVIDGGYTDVNAGFTVFGQSQ

SEQ ID NO: 2046 - DNA, 768 bp, Glycine max
  CDS (1)..(768)
atggagagaaccaaatatggcaagagatttcaaggtaaggtagccattgtgacagcttccacccttggaattggctttagcatagcagagaggcttggcttggagggtgcatctgttgtcatctcttctcgcaaacagcaaaatgttgatgaggctgctggtaaactgagagctaaaggaatcgaagtattggcggttgtttgccacgtttcaaatgctcaacaaaggaagaatttgatagacaaaactttacagaagtatggaaagatagatgttgttgtgtccaatgctgccgtacatccttctgtagatcccattttgcaaacacaagaatcgatccttgacaagttgtgggagataaatgtcaaatccactatacttcttctcaaggatgcagctcctcacttgaagaagggttcttctgttgttctcattgcctcacttgttgcttataatccaccacctactatggctatgtatggagtgaccaaaacagcagttcttggacttaccaaagctatggctagtgaaatgggccctaatactcgggtgaattgtgttgttcctgggattgtgccaactcattttgttgcactttatacctcaaatgatgctacaagagaggaacttgaaagaaaggcattgcttggaaggcttggtacaactgaagacatggctgctgcgacagcgtttttggcgtctgatgatgcttcttacataacaggagaaaatctagtggtttctgggggaatgccttctaggttgtag

SEQ ID NO: 2047 - protein, 255 aa, Glycine max
MERTKYGKRFQGKVAIVTASTLGIGFSIAERLGLEGASVVISSRKQQNVDEAAGKLRAKGIEVLAVVCHVSNAQQRKNLIDKTLQKYGKIDVVVSNAAVHPSVDPILQTQESILDKLWEINVKSTILLLKDAAPHLKKGSSVVLIASLVAYNPPPTMAMYGVTKTAVLGLTKAMASEMGPNTRVNCVVPGIVPTHFVALYTSNDATREELERKALLGRLGTTEDMAAATAFLASDDASYITGENLVVSGGMPSRL

SEQ ID NO: 2048 - DNA, 804 bp, Glycine max
  CDS (1)..(804)
atggctgaggcaagcattggcagcaaaagcagcagatggtctttacagggaatgacagctctcgtcaccggtggatccaaaggaatcggatatgctatcgtggaggagttggcacagcttggagccactgtgcacacttgcgctcggaacgaagctgaactcaatgaatccttaaatgaatggaacacaaaaggatacagagtaactggttccgtctgtgacgtggcgtctcgtgcagaaagacaagacctcatagctagagtctccaatgagtttaatggcaaactcaatatccttgtaaacaacgtgggaacaaacgtaccgaaacatacccttgatgttacggaggaagacttctcatttctgataaatacaaatcttgaatctgcttaccacctaagccagcttgcacatcctctcctgaaagcttcagaggctgcaaacatcatttttatatcctccattgctggtgtgctatcaataggtataggatccacttatggtgcaacaaaaggagcaatgaaccaactgactaaaaatttggcatgtgagtgggccaaagacaatataaggactaattgcgttgcaccagggccaatcaaaacccctctcggtgacaagcattttaaaaatgaaaaacttcttaatgctttcatttcgcaaaccccccttggacggattggagaagcagaggaagtgtcttcattggtggcattcctctgcttacctgcagcctcttacataacaggacagaccatttgtgttgatggtggattaacagtgaatggtctctatataaattag

SEQ ID NO: 2049 - protein, 267 aa, Glycine max
MAEASIGSKSSRWSLQGMTALVTGGSKGIGYAIVEELAQLGATVHTCARNEAELNESLNEWNTKGYRVTGSVCDVASRAERQDLIARVSNEFNGKLNILVNNVGTNVPKHTLDVTEEDFSFLINTNLESAYHLSQLAHPLLKASEAANIIFISSIAGVLSIGIGSTYGATKGAMNQLTKNLACEWAKDNIRTNCVAPGPIKTPLGDKHFKNEKLLNAFISQTPLGRIGEAEEVSSLVAFLCLPAASYITGQTICVDGGLTVNGLYIN

SEQ ID NO: 2050 - DNA, 843 bp, Glycine max
  CDS (1)..(843)
atgtccactactggtactgttctggcttccactccaacacaaaggctattaggcaaagtggcattggttactggtggagcgtctggaattggagaaagcattgtgcgcctcttccatatccatggtgctaaaatatgtatagctgatgtgcaagacaaccttggaaagcaggtctgtcagtctcttggtgatgaagcaaatgttgtttttgtccattgtgatgttacagtagaggatgatgtttcccatgcagtggacttcactgtgggtaaatttggcacccttcacatcatagtcaacaatgccggaatttctggatcaccttgttccgatatccgcaatgcagacttatcagaattcgataaggtgtttagtgtaaatacgaagggagtgttccacgggatgaaacacgctgctcgaattatgatcccgaagaagaagggctcaatcatttctttatgcagtgtagcaagtgccataggtggcttaggaccgcatgcatacacagggtccaagtatgctgtattggggctcacaaagaatgttgcagctgaattggggaaacatgctataagagtgaactgtgtgtcaccttatggtgttgcaacaggtttggccttggctcatttgcctgaggatgagagaactgatgatgccttggtcagttttcgtgattttactgggagaatggccaacttgcagggggtagaattaactactcacgatgtggctaatgctgtgctcttccttgcaagtgatgatgctaaatatataagtggagagaatctcatggttgatggaggcttcacaagtgcaaatcactcactccaagtttttagatga

SEQ ID NO: 2051 - protein, 280 aa, Glycine max
MSTTGTVLASTPTQRLLGKVALVTGGASGIGESIVRLFHIHGAKICIADVQDNLGKQVCQSLGDEANVVFVHCDVTVEDDVSHAVDFTVGKFGTLHIIVNNAGISGSPCSDIRNADLSEFDKVFSVNTKGVFHGMKHAARIMIPKKKGSIISLCSVASAIGGLGPHAYTGSKYAVLGLTKNVAAELGKHAIRVNCVSPYGVATGLALAHLPEDERTDDALVSFRDFTGRMANLQGVELTTHDVANAVLFLASDDAKYISGENLMVDGGFTSANHSLQVFR

SEQ ID NO: 2052 - DNA, 897 bp, Glycine max
  CDS (1)..(897)
atggaatcaccgttcagaccagagattctgaagggaaaggttgctctaatcaccggtggagcctccggaatcggattcgaaatttccacccaattcggtaaacatggagcctctgttgcgctcatgggtcgccgcaaacaagtccttcagtccgctgtctccgttctccaatccctcgtcattcccgctgttgggtttgagggggatgtacggaagcaagaggatgccgcaagggtggtggaatccacgttcaagcattttggaaggattgatatactcgtcaatgctgcagctgggaactttctcgtttctgcagaggatttgtcctcaaatggctttcgaacagttctggacatcgattctgttggcacattcacaatgtgccatgaagcactaaaatatctcaaaaaagggggagaaggaaggagcaactcttctagtgggggatcaataataaacattagtgctaccttgcattacacagcttcttggtatcaaattcacgtgtctgcagcaaaggcagcagttgatgccactacaagaaacttggcactagaatggggaacagactatgatattagagtcaatgggattgcaccaggtccaataagtgacacccctggcatgagtaaactggctcctgatgaaataagtagcaaagccagagattacatgccgctgtataaacttggggagaagtgggatattgccatggctgcactttttctagcatcagatgcaggaaaattcattaatggcgacattatgattgttgacggaggactttggctgagtcggcctcgccatttagcaaaagaggctgtgaagcaggtatctcgatcagtagaaaacagatccagaaatgcatctgtcagtgttccaaaaagcaagctgtga

SEQ ID NO: 2053 - protein, 298 aa, Glycine max
MESPFRPEILKGKVALITGGASGIGFEISTQFGKHGASVALMGRRKQVLQSAVSVLQSLVIPAVGFEGDVRKQEDAARVVESTFKHFGRIDILVNAAAGNFLVSAEDLSSNGFRTVLDIDSVGTFTMCHEALKYLKKGGEGRSNSSSGGSIINISATLHYTASWYQIHVSAAKAAVDATTRNLALEWGTDYDIRVNGIAPGPISDTPGMSKLAPDEISSKARDYMPLYKLGEKWDIAMAALFLASDAGKFINGDIMIVDGGLWLSRPRHLAKEAVKQVSRSVENRSRNASVSVPKSKL

SEQ ID NO: 2054 - DNA, 795 bp, Glycine max
  CDS (1)..(795)
atggctgaaacaaagtgggtcatgaaggacaaaagatggtctctccatggaatgacagctctagtcacaggaggcacccgaggcatagggcatgccattgttgaagagttagctgagtttggagcaactgttcatatatgtgcacgtaatcaagatgatatagataaatgtttagaagagtggaaaagcaagggacttaatgtgactggttcagtatgtgatttactatgttctgaccaacgtaaaagattaatggaaattgttggctccatctttcatggaaagctcaatattctagtgaacaatgctgctacaaatataacaaagaagataacagattacacagcagaggatatatcagccataatgggcaccaattttgagtccgtttaccatttgtgtcaagttgcacacccacttctaaaagattctgggaatgggagcatagtatttatttcttccgtagcaggtttaaaagctcttcctgtgttctctgtttatgcagcctctaaaggagccatgaatcaattcaccaaaaacttggcattggaatgggcaaaggataatattcgtgcaaatgctgttgcccctggacctgttaagactaaacttttggagtgtatcgtgaattcttcggaagggaatgagtctataaatggagtagtgtctcaaacatttgttggtcgcatgggagaaactaaagagatatcagcattagttgcttttctttgccttccggctgcatcatacatcactggacaggttatatgtgtagatgggggtttcacaacttag

SEQ ID NO: 2055 - protein, 264 aa, Glycine max
MAETKWVMKDKRWSLHGMTALVTGGTRGIGHAIVEELAEFGATVHICARNQDDIDKCLEEWKSKGLNVTGSVCDLLCSDQRKRLMEIVGSIFHGKLNILVNNAATNITKKITDYTAEDISAIMGTNFESVYHLCQVAHPLLKDSGNGSIVFISSVAGLKALPVFSVYAASKGAMNQFTKNLALEWAKDNIRANAVAPGPVKTKLLECIVNSSEGNESINGVVSQTFVGRMGETKEISALVAFLCLPAASYITGQVICVDGGFTT

SEQ ID NO: 2056 - DNA, 822 bp, Glycine max
  CDS (1)..(822)
atgggaagtgttccattggcctccgctgctgctcttgccagaaggctagaagggaaggtggcactgataactggtggagcaagtggtataggtgagtgcacagcaagacttttctccaagcatggagccaaagtggtgattgctgatatccaagacgagttaggccactcaatttgcaaagacttggattcatcttcagctacttacattcattgtgatgtcacaaaagaagaaaacatcgaacacgccgtgaacacgaccgtttccaagtacggtaaactagacatcatgcacagcagcgcaggtatagttggcgcatggaaccccagcatattgcacaacaagaagtctcactttgagcaagttatcagtgtcaacctggtgggcacattcctgggaatcaagcacgccgcgagggtgatgatcccttctgggcgtggcagcatagttgcaatggctagcatttgtggaagaattggtggcgtggcttcgcatgcctatacgagctcgaagcacggcatcgtgggactggtgcgaaacactgccgtggagcttggaaccttagggatcagagtgaatagtgtgtctccttatgcggtccctacgcccatgagtaaaactttcctcaacactgatgatgaggggattgctgcactgtattccaatcttaaagggactgttcttaagccccaggatgtggctgaagctgttctttacttgggaagtgacgagtccaagtatgttagtggccatgaccttgttgtagatgggggtttcactgtcgtaaaccctggtttgtgtgtgtttgggcaatccgtgtag

SEQ ID NO: 2057 - protein, 273 aa, Glycine max
MGSVPLASAAALARRLEGKVALITGGASGIGECTARLFSKHGAKVVIADIQDELGHSICKDLDSSSATYIHCDVTKEENIEHAVNTTVSKYGKLDIMHSSAGIVGAWNPSILHNKKSHFEQVISVNLVGTFLGIKHAARVMIPSGRGSIVAMASICGRIGGVASHAYTSSKHGIVGLVRNTAVELGTLGIRVNSVSPYAVPTPMSKTFLNTDDEGIAALYSNLKGTVLKPQDVAEAVLYLGSDESKYVSGHDLVVDGGFTVVNPGLCVFGQSV

SEQ ID NO: 2058 - DNA, 963 bp, Glycine max
  CDS (1)..(963)
atggcttccattgccggatccaactgcgtcgctctccgaaccgccaacttcggcgcctccggtaaccggaaaatcggccagatccgccaatggtctccgattctcacgaatctccgtcccgtttccggtcttcgtcaccgatcgaatactccgtttagctcctccggtgtgagagcacaggttgctactctggaggaagcaggaaccggagcaactcagaaagtggaagcgccggttgcagtggtgaccggagcttccagaggcattggcaaagcgattgcactgtcattaggtaaagcaggttgcaaggttctggtcaactatgcaaggtcatccaaggaagctgaggaggtttccaaggagattgaggagtttggtggtcaagctcttacatttggtggagatgtttctaacgaggatgacgtggagtctatgattaaaactgcagttgatgcttggggaacagttgatgtattaataaacaatgcaggaataactagagatggtttattaatgagaatgaagaaatctcaatggcaggatgttattgatctaaatctcactggtgtttttctttgcacccaggctgctgctaagattatgatgaagaaaagaaagggaagaattgtcaatattgcatcagttgttggtttggttggcaatgttggacaagccaattatagtgctgcgaaagcaggagtaattggcctgacaaaaactgttgcaaaggaatatgctagcagaaacatcactgttaatgcagttgctccagggtttattgcatccgacatgactgccaagctaggacaagacattgagaaaaagattttggagacgatcccattaggaagatatggccaaccagaagaagttgccggactggttgaattcttggctcttaatcaagctgccagttacatcactgggcaggttttcaccattgatggaggtatggtgatgtaa

SEQ ID NO: 2059 - protein, 320 aa, Glycine max
MASIAGSNCVALRTANFGASGNRKIGQIRQWSPILTNLRPVSGLRHRSNTPFSSSGVRAQVATLEEAGTGATQKVEAPVAVVTGASRGIGKAIALSLGKAGCKVLVNYARSSKEAEEVSKEIEEFGGQALTFGGDVSNEDDVESMIKTAVDAWGTVDVLINNAGITRDGLLMRMKKSQWQDVIDLNLTGVFLCTQAAAKIMMKKRKGRIVNIASVVGLVGNVGQANYSAAKAGVIGLTKTVAKEYASRNITVNAVAPGFIASDMTAKLGQDIEKKILETIPLGRYGQPEEVAGLVEFLALNQAASYITGQVFTIDGGMVM

SEQ ID NO: 2060 - DNA, 810 bp, Glycine max
  CDS (1)..(810)
atggcaagtatttctactgtctcggttcttgatagaaggcttgaagggaaagtggctcttatcagtggtggtgctagcggtataggtgaggccactgcaagactcttctctaagcatggagcacacgttgtgatagctgatattcaagacgatttgggtctctctctttgcaaacacttggaatccgcttcctatgtccattgcgatgtcacaaacgaaaacgacgttcaaaacgccgttaacacagcgatttccaagtatggcaatctagatatcatgtttaataatgctggcataattgatgagataaaaacaagcatacttgacaacagcaagtttgattttgagagagtgataagtgtgaacttggttggtccttttctgggaacaaagcacgctgctagggttatgattcctgctaaaaggggaagcataattaacactgctagtgttgctggaacctttagtggaggggcttcacatgcctacacaagttcaaagcacgcactaattggactgatgaaaaacactgcggtggagcttggacagtttggtattagggtaaattgcttgtccccttatgtggttgccacaccattgactaagaaatgtttcaatcttgatgaagaccgaaatggtgagatttattccaacctaaaaggtgttcatcttgtgccaaacgatgtggccgaagctgctctatatttggcaggtgatgagtcaaagtatgttagtggtcacaatcttgtgttagatggagggttcaccaatctaaatgtaggattttctgtgtttgggcagtctgagtaa

SEQ ID NO: 2061 - protein, 269 aa, Glycine max
MASISTVSVLDRRLEGKVALISGGASGIGEATARLFSKHGAHVVIADIQDDLGLSLCKHLESASYVHCDVTNENDVQNAVNTAISKYGNLDIMFNNAGIIDEIKTSILDNSKFDFERVISVNLVGPFLGTKHAARVMIPAKRGSIINTASVAGTFSGGASHAYTSSKHALIGLMKNTAVELGQFGIRVNCLSPYVVATPLTKKCFNLDEDRNGEIYSNLKGVHLVPNDVAEAALYLAGDESKYVSGHNLVLDGGFTNLNVGFSVFGQSE

SEQ ID NO: 2062 - DNA, 963 bp, Glycine max
  CDS (1)..(963)
atggcttccattgccggatccaactgcgtcgctctccgaaccgccaacttcggcgcctccggtaaccggaaaatcggccagatccgccaatggtctccgattctcacgaatctccgtcccgtttccggtcttcgtcaccgatcgaatactccgtttagctcctccggtgtgagagcacaggttgctactctggaggaagcaggaaccggagcaactcagaaagtggaagcgccggttgcagtggtgaccggagcttccagaggcattggcaaagcgattgcactgtcattaggtaaagcaggttgcaaggttctggtcaactatgcaaggtcatccaaggaagctgaggaggtttccaaggagattgaggagtttggtggtcaagctcttacatttggtggagatgtttctaacgaggctgatgtggagtctatgattaaaactgcagttgatgcttggggaacagttgatgtattaataaacaatgcaggaataactagagatggtttattaatgagaatgaagaaatctcaatggcaggatgttattgatctaaatctcactggtgtttttctttgcacccaggctgctgctaagattatgatgaagaaaagaaagggaagaattgtcaatattgcatcagttgttggtttggttggcaatgttggacaagccaattatagtgctgcaaaagcaggagtaattggcctgacaaaaactgttgcgaaggaatatgctagcagaaacatcactgttaatgcagttgctccagggtttattgcatctgacatgactgccaagctaggacaagacattgagaaaaagattttggagacgatcccattaggaagatatggccaaccagaggaagttgctggactggttgaattcttggctcttaatcaagctgccagttacatcactgggcaggttttcaccattgatggaggtatggtgatgtaa

SEQ ID NO: 2063 - protein, 320 aa, Glycine max
MASIAGSNCVALRTANFGASGNRKIGQIRQWSPILTNLRPVSGLRHRSNTPFSSSGVRAQVATLEEAGTGATQKVEAPVAVVTGASRGIGKAIALSLGKAGCKVLVNYARSSKEAEEVSKEIEEFGGQALTFGGDVSNEADVESMIKTAVDAWGTVDVLINNAGITRDGLLMRMKKSQWQDVIDLNLTGVFLCTQAAAKIMMKKRKGRIVNIASVVGLVGNVGQANYSAAKAGVIGLTKTVAKEYASRNITVNAVAPGFIASDMTAKLGQDIEKKILETIPLGRYGQPEEVAGLVEFLALNQAASYITGQVFTIDGGMVM

SEQ ID NO: 2064 - DNA, 819 bp, Glycine max
  CDS (1)..(819)
atggcagaagcaggaagcagcattaacagaggagcaagatggtctctcaatggaacgacggctctcgtcaccggcggcacccgtgggatcgggcacgccatagtgagtgacttggccgcgtttggcgctgctgtgcacacttgctccaggacccaaacagagctcaacaaatgcttacaagagtggcagagtctgggctttcaggtaactgggtcggtgtgtgacgtgtcctcaccatcccagagagagaagctcattgaggaagtcacttccatcttgaatggcaagcttaacatctatgtgaacaatgttggaacaaactttagaaagccaaccattgagtacactgctgaagaatattcacagcttatgacagttaatttagactcctcattccatctgtgccaacttgcatatcctcttctgaaagcatctgaaaatggaagcattgtgtttatttcatctgttgctggtgtggtgagcttgggtactggagctgtttatgcagcaagtaaagctgcaattaatcagcttacaaaaaacctggcttgtgaatgggccaaagacaacataaggagcaactgtgttgtaccatgggcaaccagaaccccacttgtagaacatttgttgagagaccaaaagtttgtggatgatattatgtctcgaactccgattaaacgtatagcagaacccgaagaagtgtcatcgttggtgactgtcctttgcttgcctgctgcttcttacatcactggacaggttatttgtgttgatggaggattaacggtgaatggatgtcaacccagcatgagaattacctga

SEQ ID NO: 2065 - protein, 272 aa, Glycine max
MAEAGSSINRGARWSLNGTTALVTGGTRGIGHAIVSDLAAFGAAVHTCSRTQTELNKCLQEWQSLGFQVTGSVCDVSSPSQREKLIEEVTSILNGKLNIYVNNVGTNFRKPTIEYTAEEYSQLMTVNLDSSFHLCQLAYPLLKASENGSIVFISSVAGVVSLGTGAVYAASKAAINQLTKNLACEWAKDNIRSNCVVPWATRTPLVEHLLRDQKFVDDIMSRTPIKRIAEPEEVSSLVTVLCLPAASYITGQVICVDGGLTVNGCQPSMRIT

SEQ ID NO: 2066 - DNA, 804 bp, Glycine max
  CDS (1)..(804)
atgacaaaacaaagttctaggttggagggtaaggtggctcttatcactggagcagcaagtgggattggtgaagagacagtgagattgttcgctgaacatggagcacttattgttgcaacagatattcaagatgaacaaggtcaccgagttgctgcttcaatagggtcagagagagtgacttaccatcattgtgatgtgagagatgaaaaccaagttgaagaaacaatcaatttcactttggaaaaacatggtcgcatagatgttttgttcagcaacgctggagtaataggttccttatctgggatccttgaccttgatctgaatgagtttgacaacaccatggccacaaatgttcgtggtgtagctgccacaattaagcacacggcacgtgccatggttgctaaaagcacccgtggatccatcatatgcaccactagtgtggctgctactattggtggaacaggtcctcatggttataccacatcaaaacatgctcttctggggttggtgaaatcagcttgtagtgaacttggtgcttatggaataagagttaatagcatatcccctttcggagttgcaacacctcttgcatgcaaagctttcaactttgagcctgagcaagttgaagctaatagctgctcacaggctaatctgaagggtgttgtgttgaaggctaggcatatagctgaagcagctttgtttcttgcttctgatgatgctgctgtttacatcagtggtcacaacttggtggtggatggtgggttctctgtggttaatagaagttattctttcacaccagcttaa

SEQ ID NO: 2067 - protein, 267 aa, Glycine max
MTKQSSRLEGKVALITGAASGIGEETVRLFAEHGALIVATDIQDEQGHRVAASIGSERVTYHHCDVRDENQVEETINFTLEKHGRIDVLFSNAGVIGSLSGILDLDLNEFDNTMATNVRGVAATIKHTARAMVAKSTRGSIICTTSVAATIGGTGPHGYTTSKHALLGLVKSACSELGAYGIRVNSISPFGVATPLACKAFNFEPEQVEANSCSQANLKGVVLKARHIAEAALFLASDDAAVYISGHNLVVDGGFSVVNRSYSFTPA

SEQ ID NO: 2068 - DNA, 882 bp, Glycine max
  CDS (1)..(882)
atggcttccggtgaacagaaattccctcctcaacaacaacaaacacagcctgggaaggagcatgctatgactccagtaccccaattcactagccctgactacaagccttcaaataaacttcaagggaagattgcattagtcactgggggtgattctgggattggacgagcggtgtgtaacttgtttgccttagaaggtgctaccgtggccttcacgtatgtgaaggggcatgaggacaaggacgcgagggacacattggaaatgatcaagagagcaaagacttcggatgccaaggatccaatggcaataccatctgatttgggttacgatgagaactgcaagagggtggttgatgaggtcgtgagtgcttatggtcgtattgacattctggtcaacaatgcagctgagcagtacgagtgtggaaccgtggaggacatagacgagcctaggcttgagagggtctttcgtacaaatatcttctcctatttcttcatggcgaggcatgccttgaagcacatgaaggaaggaagcagcattatcaacacgacatcagtgaatgcatacaagggacatgcgaaactattggactacacgtccaccaagggggcaattgtggcctatacaaggggtcttgcccttcagctggtgagtaagggaattcgggttaatggggtggctccagggcccatttggacccctttgataccagcctctttcaaggaggaagaaacggcccaatttggagcgcaggtcccaatgaagagagctggtcaacctattgaggttgctccttcctatgtttttcttgcttccaaccaatgctcctcttacataactggacaagtccttcaccccaatggtggaaccgttgtgaatggttaa

SEQ ID NO: 2069 - protein, 293 aa, Glycine max
MASGEQKFPPQQQQTQPGKEHAMTPVPQFTSPDYKPSNKLQGKIALVTGGDSGIGRAVCNLFALEGATVAFTYVKGHEDKDARDTLEMIKRAKTSDAKDPMAIPSDLGYDENCKRVVDEVVSAYGRIDILVNNAAEQYECGTVEDIDEPRLERVFRTNIFSYFFMARHALKHMKEGSSIINTTSVNAYKGHAKLLDYTSTKGAIVAYTRGLALQLVSKGIRVNGVAPGPIWTPLIPASFKEEETAQFGAQVPMKRAGQPIEVAPSYVFLASNQCSSYITGQVLHPNGGTVVNG

SEQ ID NO: 2070 - DNA, 816 bp, Glycine max
  CDS (1)..(816)
atggcgaaccctgaaggcagtagcagaggctctagatggtcccttaagggaaccactgctctcgttactggaggaacgcgtggaattgggcacgctgtggtggaggaactagcggagtttggtgccacagtgtacacttgttcgaggaatgaagaagagctgaatgcatgcttgaaggagtggaaagagaagggattttcggtttctgggttggtttgtgatgcgtcttctccaccccatagagagaacctcattcaacaagtggcctctgctttcaacggcaagctcaacatacttgtaaacaatgttggaacaaatgtgaggaagccgacaattgagtatacagccgaagaatattcaaaattgatggcaactaacttggactccacataccatttgtgccaacttgcatatcctcttcttaaagcatctggaaatggaagtattgtgtccatttcctctgttgcaagtcagacaagcgtaggttctggagccatttacgcagcaactaaagctgctattgatcagcttaccaaatattttgcttgtgaatgggcaaaagacaatataaggagcaacggtgttgcaccctggtataccataacttcacttgtggaacctttgcttgcgaacaaacagcttgttagtgagataatatctcgaacgccgataaagcggatggcagaaacacatgaagtttcatccttggtgactttcctttgcctgccagcagcatcctacatcactggacagattgtttcagttgatggaggattcactgctaatggatttcaacccagcatgagaatttcttaa

SEQ ID NO: 2071 - protein, 271 aa, Glycine max
MANPEGSSRGSRWSLKGTTALVTGGTRGIGHAVVEELAEFGATVYTCSRNEEELNACLKEWKEKGFSVSGLVCDASSPPHRENLIQQVASAFNGKLNILVNNVGTNVRKPTIEYTAEEYSKLMATNLDSTYHLCQLAYPLLKASGNGSIVSISSVASQTSVGSGAIYAATKAAIDQLTKYFACEWAKDNIRSNGVAPWYTITSLVEPLLANKQLVSEIISRTPIKRMAETHEVSSLVTFLCLPAASYITGQIVSVDGGFTANGFQPSMRIS

SEQ ID NO: 2072 - DNA, 864 bp, Glycine max
  CDS (1)..(864)
atgcaagcatgttcctcctcagacgctccactctccaagaggttagatggcaaagtagcactcataatcggcggagccagtggcatcggtgaagccaccgccaagcttttccttcgctacggtgccaaggtcgtcatcgccgacatccaagacaacctcggacactccctatgccaaagtctcaattcctccgacaaaaacaacaacgacgacatttcctatgttcactgcgacgtcaccaacgacaaagacgtcgaaaccgccgtcaacgctgccgtctcgcgacacggcaagctcgacatcctcttcagcaacgccggcatcacgggccgttccgactgttctaactccatcacggccatcgacagcggtgacctgaagagggtcttcgaggtgaacgtcttcggtgccttctacgccgccaaacacgccgctaaggtcatgattcccagaaagaaagggagcattgttttcactgctagcatcgcttctgtgtcgaatgcgggttgggcgcacccgtacgcggcgtcgaagaacgcagtggtgggtttgatgaagaacctgtgcgtggaattggggaaacatggaatcagagttaactgtgtttcgccctatgcggtggggactccaatgctgacacgtgcgatgaggatggagaaggagaaagcagaggagatatatttggaggcggcgaacttgaagggagtggttttaaaggaaaaggatgtggcagaagcaactttgtttttggctagtgatgagtcaaaatacgtgagtggagtgaatctagttgtggacggaggttatactaccaccaattcttcttccaaacaagctttcacaaagttttcttttaatgtttaa

SEQ ID NO: 2073 - protein, 287 aa, Glycine max
MQACSSSDAPLSKRLDGKVALIIGGASGIGEATAKLFLRYGAKVVIADIQDNLGHSLCQSLNSSDKNNNDDISYVHCDVTNDKDVETAVNAAVSRHGKLDILFSNAGITGRSDCSNSITAIDSGDLKRVFEVNVFGAFYAAKHAAKVMIPRKKGSIVFTASIASVSNAGWAHPYAASKNAVVGLMKNLCVELGKHGIRVNCVSPYAVGTPMLTRAMRMEKEKAEEIYLEAANLKGVVLKEKDVAEATLFLASDESKYVSGVNLVVDGGYTTTNSSSKQAFTKFSFNV

SEQ ID NO: 2074 - DNA, 969 bp, Hordeum vulgare
  CDS (1)..(969)
atggccgccgccaccgcagccgccgtctcctccccggcggtcaccgcccccttgcctcgcgccgcctcgtcctcggcgcgccgggggttcgtctccttcggcggggccgccgcccgtacgtccgcgctccgatccgaccgcctccgggcagccgccgccggcttctcctctggtgtgcgcacccacgtcgctgctgttgaacaagcagtcgtgcacgatgctacagagctggaagctccagttgttgttgttacgggtgcttccagagggatcggaaaagctgttgcattggctcttggaaaagctggctgcaaggtcctagtgaattatgcacgatcctcgaaagaggctgaagcagtctctgaagagattgaagcatctggtggtcaggctattacctttggaggagatgtttctaaagaagctgatgtagaatctatgatgaaagcagctcttgataaatggggaacaattgacatcctggtaaataatgcagggattacgagggatacattgttgatgaggatgaagaaatctcagtggcaagatgtaattgatctaaatcttactggtgttttcctctgtacacaggctgccacaaaagtaatgatgaagaagaaaaagggaagagtcatcaacatagcatcagttgttggtcttactggcaatgctggtcaagctaattacagtgctgccaaggctggagtcattggtttcacaaaaacactcgctagggaatatgcaagcaggaatatcaatgtgaatgcaatcgcacctggatccatagcatcagacatgaccgcggaactaggagaggagcttgagaagagaatcttgtcgactattcccttggggaggtatggacagccagaggaagttgctgggttggttgagttcttggccctgaacccggcggccagttacatcaccgggcaggtgcttaccatcgatggtgggatggtaatgtga

SEQ ID NO: 2075 - protein, 322 aa, Hordeum vulgare
MAAATAAAVSSPAVTAPLPRAASSSARRGFVSFGGAAARTSALRSDRLRAAAAGFSSGVRTHVAAVEQAVVHDATELEAPVVVVTGASRGIGKAVALALGKAGCKVLVNYARSSKEAEAVSEEIEASGGQAITFGGDVSKEADVESMMKAALDKWGTIDILVNNAGITRDTLLMRMKKSQWQDVIDLNLTGVFLCTQAATKVMMKKKKGRVINIASVVGLTGNAGQANYSAAKAGVIGFTKTLAREYASRNINVNAIAPGSIASDMTAELGEELEKRILSTIPLGRYGQPEEVAGLVEFLALNPAASYITGQVLTIDGGMVM

SEQ ID NO: 2076 - DNA, 972 bp, Linum usitatissimum
  CDS (1)..(972)
atggctgctagtaccggatccaccgccgtcgcattcaaatccgccgggttcgtcgctgcctcctccggcgaaaggggcattaaccagttccgccactggtctcctgttcccgccagcctccacttctcccgcgctggcctccgctgcagatcgagaagctcggtatcctcttccggtgtgagagctcaggttgctgcagttgaaccagtaagcagtgagtcagttaagaaggtggaatctccagtcgttattgtaactggagcttccagaggaatcgggaaagcgattgcattgtcgttggggaaagcaggttgcaaggttctggttaactatgcaaggtcatccaaggaggctgaggaagtctccaaagagattgaagcttccggtggtcaagctgtaacctttggtggtgatgtctctaaagaagaggatgtggaggccatgatgaaaactgctattgatgcttttggaacagttgacatactgataaacaatgcagggatcacaagggacactttgttgatgcggatgaagaaacagcagtggcaggatgttattgacctcaatcttactggtgtcttcctttgtacacaggctgcagccaagatcatgatgaagaaaagaaagggaaggattatcaatatcgcttcagttgttggtttggttggtaacattgggcaagctaactacagtgctgcaaaggctggagtcattggcttcacaaagagtgttgcgaaggaatattcaagcagaaatatcaacgtcaatgctgtcgctcctggattcattgcatctgacatgactgccaagcttggggatgacattgaaaagaaaatattggagacaattcctttagggcggtacggtcagccggaagaggtggccggattggtggaattcctcgctctgaacccagctgctggctacatgaccgggcaggtgcttaccatcgacggaggaatggtgatgtaa

SEQ ID NO: 2077 - protein, 323 aa, Linum usitatissimum
MAASTGSTAVAFKSAGFVAASSGERGINQFRHWSPVPASLHFSRAGLRCRSRSSVSSSGVRAQVAAVEPVSSESVKKVESPVVIVTGASRGIGKAIALSLGKAGCKVLVNYARSSKEAEEVSKEIEASGGQAVTFGGDVSKEEDVEAMMKTAIDAFGTVDILINNAGITRDTLLMRMKKQQWQDVIDLNLTGVFLCTQAAAKIMMKKRKGRIINIASVVGLVGNIGQANYSAAKAGVIGFTKSVAKEYSSRNINVNAVAPGFIASDMTAKLGDDIEKKILETIPLGRYGQPEEVAGLVEFLALNPAAGYMTGQVLTIDGGMVM

SEQ ID NO: 2078 - DNA, 903 bp, Brassica napus
  CDS (1)..(903)
atgccggctcaagtgatcactgagcagacctttcaatccctccacgacaccatcatggaggatacaaattcaactttatttcataagaggttggaaggaaaagtagccatcataaccggaggagcacatgggatcggcaaagctaccgtcaagatattcgcgagacacggtgccacggtggtgatcgctgacgtggacgccacagccggatcttccctggctaaatcgatctcatcatcccaagtcgccttcataagctgcgatgtctcggtcgaagctgacgtggaaaacctagtgaacgtgaccatcgcacgttacggtcgacttgacgtgctattcaacaacgcaggagttctcggagaccaaaagaaacacaaaagcatattagacttcaacgctgaagagttcgaccaagtgatgcgtgtgaacgtgcgaggcgcagggctaggcatgaaacacgcggcacgtgccatgatcaaaagaggctttaaaggttgcataatctcgacggcgagtgtggccggcgtgatgggtggaatgggcccacatgcttacacggcgtcgaagcatgcgatcgttggactgaccaagaacgcagcttgtgagcttgggaggtatgggattagggttaactgcatatcaccatttggagttgctacgtccatgctggtgaacgcgtggaggaagacgagtggatgtggtgacatggaagatggtgatgatgtagaggagatggaggagttcgtgaggagtttggctaatttgaaaggagagacattgagagcgacggatatagctgaagcggcgttgtatttggcgagtgatgagtcaaagtatgttaatggacataaccttgttgttgacgggggtgttacgactgcgaggaactgtgttggcctgtga

SEQ ID NO: 2079 - protein, 300 aa, Brassica napus
MPAQVITEQTFQSLHDTIMEDTNSTLFHKRLEGKVAIITGGAHGIGKATVKIFARHGATVVIADVDATAGSSLAKSISSSQVAFISCDVSVEADVENLVNVTIARYGRLDVLFNNAGVLGDQKKHKSILDFNAEEFDQVMRVNVRGAGLGMKHAARAMIKRGFKGCIISTASVAGVMGGMGPHAYTASKHAIVGLTKNAACELGRYGIRVNCISPFGVATSMLVNAWRKTSGCGDMEDGDDVEEMEEFVRSLANLKGETLRATDIAEAALYLASDESKYVNGHNLVVDGGVTTARNCVGL

SEQ ID NO: 2080 - DNA, 858 bp, Brassica napus
  CDS (1)..(858)
atgagcagcaatcatcagactgtgatgaagcaactagagccatggtgcgagctcaaagacaaagtggttctcctaacaggagcttcatccggcatcggaagagagatctgcctcgatctagccaaatccggctgcaagatcatcgccgcagctcgccgtctcgaccgtctccaatccctctgctccgagatcaacgccttattctccccaacaaaaaccaaacaagccgcacctctcgagctagacgtctcctcagactcatccaccatccgaaacgcagtcaaacaagcttgggacatcttcggaaacatcgacgtcttgatcaacaacgcaggcatcagaggcaacgtcaagtcgagtctggacctatccgaagaagaatgggaaagagtcttcagaacaaacctaaccggaccttggctagtatcaaaacacgtctgcgttctgatgcgcgacgccaaacgccgcggcggaggatcggtgataaacgtttcctccatcgcggggcttcagcgcgggaagctacccggcgcgttggcgtacgcgtgttcgaaaggaggtcttgatattatgacgaagatgatggcggttgagctgggtgagtatggtataagagtgaactcgatagccccggggctgtttaagtcggagatcacggaaggtctgatgaggaaagagtggatgaagaatgtgagggagaggattgttccgttgaaggtgcagcagagtgtggacccggggcttacctcgctggttaggtatctgattcatgactcttccaggtatgtctctgggaatgtttacattgttgacgctggtgctacgttgtctggtctgccgattttttcttctctttga

SEQ ID NO: 2081 - protein, 285 aa, Brassica napus
MSSNHQTVMKQLEPWCELKDKVVLLTGASSGIGREICLDLAKSGCKIIAAARRLDRLQSLCSEINALFSPTKTKQAAPLELDVSSDSSTIRNAVKQAWDIFGNIDVLINNAGIRGNVKSSLDLSEEEWERVFRTNLTGPWLVSKHVCVLMRDAKRRGGGSVINVSSIAGLQRGKLPGALAYACSKGGLDIMTKMMAVELGEYGIRVNSIAPGLFKSEITEGLMRKEWMKNVRERIVPLKVQQSVDPGLTSLVRYLIHDSSRYVSGNVYIVDAGATLSGLPIFSSL

SEQ ID NO: 2082 - DNA, 897 bp, Oryza sativa
  CDS (1)..(897)
atgtacagcgccattcacctcgttcagaggggcaagaacagagcagggttgacgatgttgactggattcgtcaacagtttctcctccgtgtcaagacccgaaaggttggctggaaaggtggccgtgatcaccggcggcgcaagcggcatcggcgaggcgacggccaaggagttcatccgcaatggcgccaaagtcatcatcgccgacgtacaagacgatctcggccacgccgtcgccgccgagctcggcccaggcgcggcctacacccgctgcgatgtcaccgacgaggcgcagatcgcggcggccgtggacctcgccgtggcgcgccacggccgcctcgacgtcctgcacaacaacgccggggtcacgtgctcctacgtggggcccctcgcctccctagacctcgccgacttcgaccgcgtcatggcggtgaacgcccgggcggtgctcgccggcatcaagcacgccgcgcgcgtgatggcgccacggcgcgccggctccatcctctgcacggccagcgtggcgggcgtgatcggcagcgaggtcccccacgcgtacagcgtctccaaggcggcagccatcggcgtggtgaggtccgccgccggcgagctggcgcgccacggcgtgcggctgaacgccatctcgccgcacggcatcgcgacgccgctggcgatgcgcgggttcggcgacgtgctggcgtgggcggacgccgagagattgaagcgggtcatcgaggaggacatgaacgagctggagggcgcaaagctggaggcggaggacatcgcgagggcggcggtgtacctcgcctccgacgaggccaagtacatcactgggcataacctcgtcgtcgatggcgggttcaccgtcggcaagcgcctcaacttcgcgcatgcttga

SEQ ID NO: 2083 - protein, 298 aa, Oryza sativa
MYSAIHLVQRGKNRAGLTMLTGFVNSFSSVSRPERLAGKVAVITGGASGIGEATAKEFIRNGAKVIIADVQDDLGHAVAAELGPGAAYTRCDVTDEAQIAAAVDLAVARHGRLDVLHNNAGVTCSYVGPLASLDLADFDRVMAVNARAVLAGIKHAARVMAPRRAGSILCTASVAGVIGSEVPHAYSVSKAAAIGVVRSAAGELARHGVRLNAISPHGIATPLAMRGFGDVLAWADAERLKRVIEEDMNELEGAKLEAEDIARAAVYLASDEAKYITGHNLVVDGGFTVGKRLNFAHA

SEQ ID NO: 2084 - DNA, 762 bp, Oryza sativa
  CDS (1)..(762)
atggaggtgaagtgccgtcggctggaggggaaggtagccgtcgtgacggcctccacgcagggcatcggtctcgccatcgccgagcgcctcggcctcgagggcgccgccgtcgtcatctcctcccgcaagaagaagaacgtcgacgaggcggtcgtgggcctcagggcgaaggggatcaccgtcgtcggggtggtctgccatgtctccatcccggagcagcgcaagaacctcatcgacacggcggtcaagaattttgggcatatcgacatagttgtctccaatgctgctgccaatccttccgtagataacatattagaaatgaaagagcctatccttgacaaactatgggatattaatgttaaggcatctattcttcttcttcaggatgctgctgcatatttgcggaagggatcatccgtgatattgatttcttcaattactggctataatccagaaccagcattgtcgatgtatgctgttacaaaaactgccctgcttggtctcacaaaggctcttgctgctgagatggggccaaatactcgtgttaactgtatagcccctggttttgttcctacaaattttgctcgtttcctcacaactaatgacaccattaaaaatgagcttattgacaggagcacacttaagagattgggtactgtggaagacatggctgcagccgcagctttcttggcatcagacgatgcatcattcattacagctgaaactattgttgttgctggaggaactcgatctaggctgtag

SEQ ID NO: 2085 - protein, 253 aa, Oryza sativa
MEVKCRRLEGKVAVVTASTQGIGLAIAERLGLEGAAVVISSRKKKNVDEAVVGLRAKGITVVGVVCHVSIPEQRKNLIDTAVKNFGHIDIVVSNAAANPSVDNILEMKEPILDKLWDINVKASILLLQDAAAYLRKGSSVILISSITGYNPEPALSMYAVTKTALLGLTKALAAEMGPNTRVNCIAPGFVPTNFARFLTTNDTIKNELIDRSTLKRLGTVEDMAAAAAFLASDDASFITAETIVVAGGTRSRL

SEQ ID NO: 2086 - DNA, 888 bp, Oryza sativa
  CDS (1)..(888)
atgatgcagagaacaatgcagctcgttctcagggtgaagagatcgtcgggtttactacaccaattctccactgcggcgaactcgcagaggttggccgggaaggtggccgtcatcaccggcgccgccagcggcatcggcaaggcgtcggcgaaggagttcatcggcaatggcgccaaggttatactcgccgacgtccaggacgacctcggccgcgccgtcgccgccgagctcggccctggcgcgacgtacacgcggtgcgacgtcacggacgaggcgcaggtcgccgcggcggtggacctcgccgtggcgcgccacggggcgctcgacgtgttctacagcaacgccggcgtcctgggctccatcgcgccggcgccgctcgcctccctggacctgggcgagttcgaccgcgtcatggccgtgaacgcccgcgccgccgtcgccgccgccaagcacgcggcgcgcgccatggtgccgcgccggagcgggtgcgtcctcttcacggggagcgtgtcgggcgtggtgggcggcacggggccgacgtcgtacggcgtgtcgaaggcggccgtgctgggcgtggtgcgcgccgtggccggggagctggcgcgccacggcgtgcgggcgaacgccgtctcgccgtgcggcgtcgcgacgccgctgtccatggtgcaggtccttgaggcctaccccgggatgagcttcgaggagctcaagaacgccatggcggcgtccatggagcagatggaagctggcccgttgatcgaccccgaggacgtggcgagggcggccgtcttcctggcgtccgacgaggccaggtacatcaacggccataacctcgtcgtcgacggcggcttcacaacgcataaaggagacgacaatcgcatgaattaa

SEQ ID NO: 2087 - protein, 295 aa, Oryza sativa
MMQRTMQLVLRVKRSSGLLHQFSTAANSQRLAGKVAVITGAASGIGKASAKEFIGNGAKVILADVQDDLGRAVAAELGPGATYTRCDVTDEAQVAAAVDLAVARHGALDVFYSNAGVLGSIAPAPLASLDLGEFDRVMAVNARAAVAAAKHAARAMVPRRSGCVLFTGSVSGVVGGTGPTSYGVSKAAVLGVVRAVAGELARHGVRANAVSPCGVATPLSMVQVLEAYPGMSFEELKNAMAASMEQMEAGPLIDPEDVARAAVFLASDEARYINGHNLVVDGGFTTHKGDDNRMN

SEQ ID NO: 2088 - DNA, 846 bp, Oryza sativa
  CDS (1)..(846)
atgtccgccgccgccgccgccgccgcatcctcccccgctccccggttggaaagcaaggttgcgctggttaccggtggtgcttcaggtattggtgaagcaattgttcgcctctttagagagcatggtgcaaaggtatgtattgcagatatccaagatgaagcaggtcagaagctccgggactcccttggaggtgaccaagatgtcttatttgtccactgcgatgtttcggtggaagaggatgtagcccgagcggtcgatgcaacagctgaaaagtttggtactcttgacatcatggtcaacaatgctggctttacaggccagaaaatcacagatatccgaaacatcgacttttctgaagtcaggaaggtaatcgacatcaatttagttggtgtattccacgggatgaaacacgcagcgcgcatcatgatccccaataagaaggggtccatcatctcattgggaagtgtttctagtgtcattggagggttgggacctcattcatacacagcaaccaagcatgctgtggtgggtctaaccaagaatgtagctggggaattggggaagcatgggatacgcgtgaactgcgtatctccctatgcagtgcccacggctctctccatgccgtatctgccccagggcgagcgcaaggatgatgccctgaaagactttttcgcctttgttggtggtgaagcaaacctgaaaggtgtggatctgctacctaaggatgttgctcaagcagtgctctacttggcaagcgatgaagcgaggtacatcagcgcgctcaacctcatggtggatggtggctttacctctgtgaatcacaatttgagagcatttgaagattaa

SEQ ID NO: 2089 - protein, 281 aa, Oryza sativa
MSAAAAAAASSPAPRLESKVALVTGGASGIGEAIVRLFREHGAKVCIADIQDEAGQKLRDSLGGDQDVLFVHCDVSVEEDVARAVDATAEKFGTLDIMVNNAGFTGQKITDIRNIDFSEVRKVIDINLVGVFHGMKHAARIMIPNKKGSIISLGSVSSVIGGLGPHSYTATKHAVVGLTKNVAGELGKHGIRVNCVSPYAVPTALSMPYLPQGERKDDALKDFFAFVGGEANLKGVDLLPKDVAQAVLYLASDEARYISALNLMVDGGFTSVNHNLRAFED

SEQ ID NO: 2090 - DNA, 1107 bp, Oryza sativa
  CDS (1)..(1107)
atgcgcgcgctctccctcgccagagcaagtagcccgccgcctcttcttcttcacctccgacgagcccttgcacccgcgtcgtcgtcttctccggcgccggtgctgttgctgcgtcctgcggtttcttgttcttctttgtttgttagcgacagggcggcggcggcggcggcggctcgccggagcagcggcagcagcaggagaagcatggcgtcgcagcagttcccgccgcagaagcaggagacgcagccggggaaggagcacgccatggatccccgccccgaggccatcatccagagctacaagccagccaacaagctgaaggacaaggtggcgatcgtgaccggcggcgactccggcatcgggcgggcggtgtgcctgtgcttcgcgctggagggcgcgacggtggcgttcacgtacgtgaaggggcaggaggagaaggacgcggaggagacgctccgcgcgctgcgcgacatcagggcgcgcaccggcgccaaggaccccatggcgatccccgccgacctcgggtacgacgacaactgccgcaaggtggtcgacgaggtcgccggcgcgtacggcggcgccatcgacatcctcgtcaacaacgccgccgagcagtacgagcgcccctccatcaccgacatcaccgaggacgacctggaacgcgtgttccgcaccaacatcttctcctacttcttcatgtcgaagcacgccgtgaagcggatgcgcgatcgccgcggcggcgccggcgccggcgggtgcagcatcatcaacacgtcgtcgatcaacgcgtacaaggggaacaagacgctgctggactacacggcgaccaagggcgccatcgtggcgttcacgagggcgctggcgctgcagctggcggaggaggggatccgggtgaacggcgtcgcgccggggccgatctggacgccgctgatcccggcgtcgttcgcggaggagaaggtgaggcagttcggctcccaggtgcccatgggccgcgccggccagccgtcggaggtggcgcccagcttcgtcttcctcgccagcgacgacgcctcctacatgtccggccagatgctgcacgtcaacggcggcgtcatcgtcaacggctag

SEQ ID NO: 2091 - protein, 368 aa, Oryza sativa
MRALSLARASSPPPLLLHLRRALAPASSSSPAPVLLLRPAVSCSSLFVSDRAAAAAAARRSSGSSRRSMASQQFPPQKQETQPGKEHAMDPRPEAIIQSYKPANKLKDKVAIVTGGDSGIGRAVCLCFALEGATVAFTYVKGQEEKDAEETLRALRDIRARTGAKDPMAIPADLGYDDNCRKVVDEVAGAYGGAIDILVNNAAEQYERPSITDITEDDLERVFRTNIFSYFFMSKHAVKRMRDRRGGAGAGGCSIINTSSINAYKGNKTLLDYTATKGAIVAFTRALALQLAEEGIRVNGVAPGPIWTPLIPASFAEEKVRQFGSQVPMGRAGQPSEVAPSFVFLASDDASYMSGQMLHVNGGVIVNG

SEQ ID NO: 2092 - DNA, 795 bp, Oryza sativa
  CDS (1)..(795)
atggccatggcgactaccagctctaaaaacgagaggtggagcctcgccggcgccaccgcgctcgtcaccggcggcagcaaaggcatcggccgcgccatcgtcgaggagctcgccagcttgggcgcgacggtgcacacctgcgcccggaccgaggcgccgctgaacagatgccgggaggagttgacggccaagggccttgccgtcaccgtctccgtctgtgacgtctcgttgcgtgccgacagggaggcgctcgccggcacggtgcgcgagctcttcggcggcaagctcagcatcctggtgaactgcgccgggatgtcgttcctgaagccggcggtggagctgacgccggacgattgctcgcaggtgatggggatgaacttcgagtcgtgcttccacttgagccagctggcgtaccctctcctcaaggcctctcagagaggttgtatcatcaacatctcgtccattgcttcggtggtcgcgttctgctctcttcccaacgccgtctactcagctgctaaaggagcaatgaaccaagtcacaaggaacctggctgctgagtgggcgaacgatgggatcagagttaactgtgttgcgccaggcttcattcgtactccgctcctatctgaattcgtggagggtaacgagttggggcgagcagagttcagccgtgttcccatgggccgtctcggtgaaccagaggacatcgcatcgctggtggcgtttctgtcaatgccagcgtcctcctatataaccggtcaggtcatatgcgccgacggcggtcgctgcctttcttga

SEQ ID NO: 2093 - protein, 264 aa, Oryza sativa
MAMATTSSKNERWSLAGATALVTGGSKGIGRAIVEELASLGATVHTCARTEAPLNRCREELTAKGLAVTVSVCDVSLRADREALAGTVRELFGGKLSILVNCAGMSFLKPAVELTPDDCSQVMGMNFESCFHLSQLAYPLLKASQRGCIINISSIASVVAFCSLPNAVYSAAKGAMNQVTRNLAAEWANDGIRVNCVAPGFIRTPLLSEFVEGNELGRAEFSRVPMGRLGEPEDIASLVAFLSMPASSYITGQVICADGGRCLS

SEQ ID NO: 2094 - DNA, 1077 bp, Zea mays
  CDS (1)..(1077)
atgcgcgcgctactgcatctgcggctcatcaatccgtgcagtcccagagcaccccgtcttcccgctactcccgcaagggcgctcgtcgcttccttctccggggcgtggcaggcaccttctggtagagcgagagcgagagcagcgccgccggcagttcgcgctatggcgtcccagcaggtgttccgggctcagcagcagcagcagcagcagttcccggctcagcagcaggagtcccagccggggaaggagcacgcgatggacccccggcccgaggccatcgtccaggactacaaggccgccaacaagctcaaggacaaggtggcgctcgtgaccggcggcgactccggcatcgggcgcgccgtgtgcctgtgcttcgcgaaggagggcgcgacggtggccttcaccttcgtgagggggcaggaggagaaggacgcggaggagacgctgcgtgcgctgcgcgacatcgggtccgagacgggcgcgcgcgagccgatggccctgcccgccgacctcgggtacgaggccaactgccgggaggtggtggagcgggtggcgtcggcgtacggcgggcgcatcgacgtggtggtgaacaacgcggcggagcagtacgagcgggagagcatcggggacgtgacggaggcggacctggagcgcgtgttccgcaccaacatcttctcctacttcctggtgtccaagcacgcggtgccgcgcatggagcccggcgcctgcatcatcaacacctcctccgtcaacgcgtacaagggcaacaagacgctgctggactacacggccaccaagggcgccatcgtggccttcacgcgcgcgctctcgctgcagctggccgacaggggcatccgcgtcaacggcgtcgcgccgggccccgtctggacgccgctcatcccggcgtccttcggcaaggagaaggtggagcagttcgggtcccaggtgcccatgaagcgcgccgcgcagccggccgagatcgcgcccagcttcgtcttcctcgccagcaaccaggattcgtcctacatgtccggccagatcctccacgtcaacggaggcgtcatcgtcaatagctag

SEQ ID NO: 2095 - protein, 358 aa, Zea mays
MRALLHLRLINPCSPRAPRLPATPARALVASFSGAWQAPSGRARARAAPPAVRAMASQQVFRAQQQQQQQFPAQQQESQPGKEHAMDPRPEAIVQDYKAANKLKDKVALVTGGDSGIGRAVCLCFAKEGATVAFTFVRGQEEKDAEETLRALRDIGSETGAREPMALPADLGYEANCREVVERVASAYGGRIDVVVNNAAEQYERESIGDVTEADLERVFRTNIFSYFLVSKHAVPRMEPGACIINTSSVNAYKGNKTLLDYTATKGAIVAFTRALSLQLADRGIRVNGVAPGPVWTPLIPASFGKEKVEQFGSQVPMKRAAQPAEIAPSFVFLASNQDSSYMSGQILHVNGGVIVNS

SEQ ID NO: 2096 - DNA, 762 bp, Zea mays
  CDS (1)..(762)
atggatgtcaagtgccggcgtctggaggggaaggtggccatcgtgacggcgtccacgatggggatcggcctcgccatcgccgagcgcctcggtctggagggcgccgccgtcgtcatctcctcccgcaagcagaagaacgtgaacgaggcggtggaggggctcagggccaagggtatcaccgcggttggtgccgtctgccacgtctccgacgcacagcagcgcaagagcctcatcgagacggccgtcaagagctttgggcacatagatattcttgtctccaatgctgccgcaaatccttctgtagatagcatacttgaaatgaaagagtctgttctcgataagctgtgggatattaacgtcaaggcttctatccttcttattcaggatgctgctcctcacctacggaaggggtcatctgtgattattatttcttcaattgctggttacaatccagaacaaggattgacaatgtatggtgtcacaaagactgctctctttggtctcacgaaggctcttgctggtgagatgggacccgatactcgtgttaactgtatagcccctggttttgttcctacacggtttgctagtttcctcacagaaaatgagaccattaggaaagagcttaacgagaggaccaagcttaagagattgggtactgtggaagacatggctgcggctgcggcttttctggcgtctgacgacgcatcatacattacggctgaaaccattgttgttgctggaggggtgcagtctaggctgtaa

SEQ ID NO: 2097 - protein, 253 aa, Zea mays
MDVKCRRLEGKVAIVTASTMGIGLAIAERLGLEGAAVVISSRKQKNVNEAVEGLRAKGITAVGAVCHVSDAQQRKSLIETAVKSFGHIDILVSNAAANPSVDSILEMKESVLDKLWDINVKASILLIQDAAPHLRKGSSVIIISSIAGYNPEQGLTMYGVTKTALFGLTKALAGEMGPDTRVNCIAPGFVPTRFASFLTENETIRKELNERTKLKRLGTVEDMAAAAAFLASDDASYITAETIVVAGGVQSRL

SEQ ID NO: 2098 - DNA, 819 bp, Triticum aestivum
  CDS (1)..(819)
atggctgcggcggagccgtcgggatcgagccagccgggtgctccaggaaggtggtctcttcacggcaagacggctctcgtcaccggcggcacccgcgggatcgggcgtgcggtggtggaggaacttgcggcgctgggggcggccgtgcacacctgctcccggaaggaggcggagctgggcgagcgcctcaaggagtgggaggccaggggcttccgcgtcacaacctccgtctgcgacctctccgtccgggagcagcgggagcgcctgattggcgacgtcgccgaacgcttcggcggcaagctcaacatcctcgtaaacaatgtggggacaaacataaggaagccaactactgaattttccgctgaagattactcttttttgatggccactaatcttgaatctgcatatcatctttgccaacttgcacatcctcttctaaaagcatctggtttgggaagcattgttttcatatcatctgtctgtggattagtagccgtatttagcggtactctatatgccatgactaaaggtgccatcaaccagttaaccaagaacctagcatgtgaatgggcaaaagatggcataagaacaaactctgttgctccatggtacataacgacttcgcttacagaaggacttttggctaacaaggaatttgaggcctccgttgtgagtcgaactccactggggcgtgtcggagaaccaggagaggtatcatcgctggttgcttttctttgcatgcctggttccacttacataacaggccagacgatctcagtggatggaggtatgagtgtcaatgggctctatccagcttga

SEQ ID NO: 2099 - protein, 272 aa, Triticum aestivum
MAAAEPSGSSQPGAPGRWSLHGKTALVTGGTRGIGRAVVEELAALGAAVHTCSRKEAELGERLKEWEARGFRVTTSVCDLSVREQRERLIGDVAERFGGKLNILVNNVGTNIRKPTTEFSAEDYSFLMATNLESAYHLCQLAHPLLKASGLGSIVFISSVCGLVAVFSGTLYAMTKGAINQLTKNLACEWAKDGIRTNSVAPWYITTSLTEGLLANKEFEASVVSRTPLGRVGEPGEVSSLVAFLCMPGSTYITGQTISVDGGMSVNGLYPA

SEQ ID NO: 2100 - DNA, 792 bp, Triticum aestivum
  CDS (1)..(792)
atggcagccgctggagttaacagggagcagaggtggagcctcgccggcgcaaccgcgctggtcaccggaggcagcagaggaattgggcatgcaatcgtggaggagcttgtcgggctcggggcgcgggtgcacacgtgctccgagaacgcggcggagctggaggagagccgccggcggtgggaggagatgaagctgccggtcaccgtctccgtctgcgacgtctccgtgcgagcagagagggagaagctcatagagacggcgacgcagaccttcgacggcaagctcgacatactagtaaacaacgtgggacggaatctggccaaggcgtcggtggagtgcacggcggaggagtactcgcatctcatgtcgacaaacttagaggcggcgttccacctaagccagctcgcacaccccttcctccgagacgcctccatcgccggaggaggcagcatcgttaacatctcctcggttgcaagctcacttggctactcgaccctcgcagtatactgcatatctaaaggaggagttaatcagcttacaaggagccttgctgcggagtgggctcaagacaagatccgtgtcaactccgtcgctccgggtgggatcaataccgagctgcaaaagagtgtggatccggagattgtagaaaatacgttgtcaagaactccgatgcataggctcggtgagccagtggaggtggcatcaatggtgtcgttcctgtgcatgccagcagcttcctacgtcaccggccaggtcatctatgtcgatggaggccgaaccatcagcggctaa

SEQ ID NO: 2101 - protein, 263 aa, Triticum aestivum
MAAAGVNREQRWSLAGATALVTGGSRGIGHAIVEELVGLGARVHTCSENAAELEESRRRWEEMKLPVTVSVCDVSVRAEREKLIETATQTFDGKLDILVNNVGRNLAKASVECTAEEYSHLMSTNLEAAFHLSQLAHPFLRDASIAGGGSIVNISSVASSLGYSTLAVYCISKGGVNQLTRSLAAEWAQDKIRVNSVAPGGINTELQKSVDPEIVENTLSRTPMHRLGEPVEVASMVSFLCMPAASYVTGQVIYVDGGRTISG

SEQ ID NO: 2102 - DNA, 813 bp, Triticum aestivum
  CDS (1)..(813)
atggccgcggcagacgacatcggcgccagtgcggggaggtggtccctccacggcaggagggcgctcgtcaccggcggcacccgcggcatcgggcgcgcggtggtggaggagctggcggcgctcggggccgccgtgcacacgtgctcccggaaggaagccgagctcggcgagcgcttgaaggagtgggaggccaagggattccgcgtcacgggctccgtctgcgacgtctccgtgcgcgaccagcgcgagctcctgctccaagacgtcgccggccgcttcgccggcaagctggacatcctcataaacaacgtgggcacaaaccatagaaaaccaaccactgaatactcggcagatgaatattcgttcataatggccaccaatcttgaatctgcatatcatctatgccaacttgcacaccctcttctcaaagcatccggggtggccagcattgtcttcatatcatcagtctctggagtggtagccatatctagtggctccatttatgccatgacaaaaggtgcgatgaatcagttggccaagaacctagcgtgtgagtgggcgaaagacaacataagaatcaactctgttgctccatggtacatcaagacttcactcgtggaagaggatttggcgaaagaagatttcgtggatagcatcgcccgtcgaactccgatgaggcgtgtgggagaacctgaagaagtatcatcgctggtggcgtttctctgtatgcccggttcatcttatatcactggccagacgatctcggttgatggcggcatgactataaatggcatgtacccgactgagaactag

SEQ ID NO: 2103 - protein, 270 aa, Triticum aestivum
MAAADDIGASAGRWSLHGRRALVTGGTRGIGRAVVEELAALGAAVHTCSRKEAELGERLKEWEAKGFRVTGSVCDVSVRDQRELLLQDVAGRFAGKLDILINNVGTNHRKPTTEYSADEYSFIMATNLESAYHLCQLAHPLLKASGVASIVFISSVSGVVAISSGSIYAMTKGAMNQLAKNLACEWAKDNIRINSVAPWYIKTSLVEEDLAKEDFVDSIARRTPMRRVGEPEEVSSLVAFLCMPGSSYITGQTISVDGGMTINGMYPTEN

SEQ ID NO: 2104 - DNA, 969 bp, Triticum aestivum
  CDS (1)..(969)
atggccgccgccaccgcagccgccgtctcctccccggcggtcaccgcccccttgcctcgcgccgcctcgtccgcggcgcgccggggcttcgtctccttcagcggggccgccgcccgtccgtccgcgctccgatccgaccgcctccgggcagccgccgccggcttctcctccggtgtgcgcacccacgttgctgctgttgaacaagcagttgtgcaagatgctacagagctggaagctccagttgttgttgttacgggtgcttccagagggattggaaaagccgttgcattggctcttggaaaagctggctgcaaggtcctagtgaattatgcacgatcctcgaaagaggctgaagcagtctccgaagagattgaagcatctggtggtcaggctattacctttggaggagatgtttctaaagaagctgatgtagaatctatgatgaaagcagctcttgataaatggggaacaattgacatcctggtaaataatgcagggattacgagggatacattgttgatgaggatgaagaaatctcagtggcaagatgtaattgatctaaatcttactggtgttttcctctgtacacaggctgccacaaaagtaatgatgaagaagaaaaagggaagagtcatcaacatagcatcagttgttggtcttactggcaatgctggccaagctaattacagtgctgccaaggctggagtcattggtttcactaaaacagttgctagggaatatgcaagcaggaatatcaatgtgaatgcaatcgcacctggattcatagcatcagacatgaccgcggaacttggagaggaggttgagaagagaatcttgtcgactattcccttggggaggtatggccagccagaggaagttgctgggttggttgagttcttggccctgaatcccgcggccagctacatcactggacaggtgcttaccatcgatggtgggatggtaatgtga

SEQ ID NO: 2105 - protein, 322 aa, Triticum aestivum
MAAATAAAVSSPAVTAPLPRAASSAARRGFVSFSGAAARPSALRSDRLRAAAAGFSSGVRTHVAAVEQAVVQDATELEAPVVVVTGASRGIGKAVALALGKAGCKVLVNYARSSKEAEAVSEEIEASGGQAITFGGDVSKEADVESMMKAALDKWGTIDILVNNAGITRDTLLMRMKKSQWQDVIDLNLTGVFLCTQAATKVMMKKKKGRVINIASVVGLTGNAGQANYSAAKAGVIGFTKTVAREYASRNINVNAIAPGFIASDMTAELGEEVEKRILSTIPLGRYGQPEEVAGLVEFLALNPAASYITGQVLTIDGGMVM

SEQ ID NO: 2106 - DNA, 843 bp, Zea mays
  CDS (1)..(843)
atgtcgtcggcggggccaccgccgccgctgccgccgtggagcaggctggaggggcaggtggtgctggtgacgggcgcttcctccggcatcggacgcgacttctgcctcgacctggcgcgcgccggctgccgcgtcgtcgccgccgcccgccgcgccgatcgtctccgctcgctctgcgacgagatcaacccctccgctgcctcccgagccccccgcgcggtggctgtggaggtcgacgtcgccgccggtggttcggccctggaggcggcggtgcagaaggcctgggacgcctttggccgtatcgacgccttggtcaacaacgccggcatacgaggtgcagtgcattctccattagattggcccgaggatgagtgggacagaatcatcaagacgaaccttaccggatcatggctcgtggccaaacatgtctgtcgacgcatgcgtgatgccaagctgaagggttcagtggttaacatcacctctattgctggccttaaccgtgggcatctgcctggctccacgggatacgcatcctcaaaggctgctgtgcattatgccaccaagattatggctttggaattgggcgcggatcgcatcagagtgaactcgattgcacctggactcttcaaatcagagataactgctcctctgtttcaaaagaggtggttgagcaccgttgcttcaaagatagtgccgcttaaggagcatggcgctactgatcctgcattgacgtcgctggtccgttttctgatccatgaagcatcgtcgtatgtgactggcaacatcttcattgtagactcaggtgccaccatacctggtgttccgatattctcatccctgtaa

SEQ ID NO: 2107 - protein, 280 aa, Zea mays
MSSAGPPPPLPPWSRLEGQVVLVTGASSGIGRDFCLDLARAGCRVVAAARRADRLRSLCDEINPSAASRAPRAVAVEVDVAAGGSALEAAVQKAWDAFGRIDALVNNAGIRGAVHSPLDWPEDEWDRIIKTNLTGSWLVAKHVCRRMRDAKLKGSVVNITSIAGLNRGHLPGSTGYASSKAAVHYATKIMALELGADRIRVNSIAPGLFKSEITAPLFQKRWLSTVASKIVPLKEHGATDPALTSLVRFLIHEASSYVTGNIFIVDSGATIPGVPIFSSL

SEQ ID NO: 2108 - DNA, 939 bp, Zea mays
  CDS (1)..(939)
atggccgctgccacagccgccgccgccgcgctcgcctccccggcgggcctctccacatcgctggcgcgccgcggcctcgtcagcttcgcacccgcgctccgccccggccctgaccgcagctctcgcgccgtcgccctcctcggtgtacgaactcatgtcacggctgttgatcaagccattgtaaaaggtgatacaaagttggaaggtcctgtggttgttgttactggtgcttccagggggattggaaaagccactgcattggctcttggaaaagcaggctgcaaggtcttggtgaattatgctcgatcttcaaaggaggctgaagaagtctccaaggagattgaagcatctggaggccaggccattacctttggaggagatgtttccaaagaggctgatgttgaatctatgataaaagtggctgttgatacatggggaacgattgatgtactagtaaataatgcaggaatcacacgggacacattgttgatgagaatgaagaaatcacagtggcaagatgtgattgatttgaatcttacaggcgttttcctttgcacgcaggctgcaacaaaagtaatgatgaagaagaaaaagggaagaattatcaatatagcatcggttgttggtcttactggtaatgctggacaagctaattatgctgctgccaaggctggggttattgggttcacaaaaacagttgctagggagtatgccagcagaaatattaatgcaaacgttatcgctcctggatttattgcttcagatatgactgctgaacttggtgaagagttagagaagaaaattctgtcaactattcctttagggcgctatggtcggccagaggatgtagcaggcctggtggaattcttagccctcagccctgctgcaagctacatcactggacaggtcctcaccatcgatggaggaatggtaatgtaa

SEQ ID NO: 2109 - protein, 312 aa, Zea mays
MAAATAAAAALASPAGLSTSLARRGLVSFAPALRPGPDRSSRAVALLGVRTHVTAVDQAIVKGDTKLEGPVVVVTGASRGIGKATALALGKAGCKVLVNYARSSKEAEEVSKEIEASGGQAITFGGDVSKEADVESMIKVAVDTWGTIDVLVNNAGITRDTLLMRMKKSQWQDVIDLNLTGVFLCTQAATKVMMKKKKGRIINIASVVGLTGNAGQANYAAAKAGVIGFTKTVAREYASRNINANVIAPGFIASDMTAELGEELEKKILSTIPLGRYGRPEDVAGLVEFLALSPAASYITGQVLTIDGGMVM

SEQ ID NO: 2110 - DNA, 843 bp, Zea mays
  CDS (1)..(843)
atgtcgtcggcggggccaccgccgccgctgccgccgtggagcaggctggaggggcaggtggtgctggtgacgggcgcttcctccggcatcggacgcgacttctgcctcgacctggcgcgcgccggctgccgcgtcgtcgccgccgcccgccgcgccgatcgtctccgctcgctctgcgacgagatcaacccctccgctgcctcccgagccccccgcgcggtggctgtggaggtcgacgtcgccgccggtggttcggccctggaggcggcggtgcagaaggcctgggacgcctttggccgtatcgaccccttggtcaacaacgccggcatacgaggtgcagtgcattctccattagattggcccgaggatgagtgggacagaatcatcaagacgaaccttaccggatcatggctcgtggccaaacatgtctgtcgacgcatgcgtgatgccaagctgaagggttcagtggttaacatcacctctattgctggccttaaccgtgggcatctgcctggctccacgggatacgcatcctcaaaggctgctgtgcattatgccaccaagattatggctttggaattgggcgcggatcgcatcagagtgaactcgattgcacctggactcttcaaatcagagataactgctcctctgtttcaaaagaggtggttgagcaccgttgcttcaaagatagtgccgcttaaggagcatggcgctactgatcctgcattgacgtcgctggtccgttttctgatccatgaagcatcgtcgtatgtgactggcaacatcttcattgtagactcaggtgccaccatacctggtgttccgatattctcatccctgtaa

SEQ ID NO: 2111 - protein, 280 aa, Zea mays
MSSAGPPPPLPPWSRLEGQVVLVTGASSGIGRDFCLDLARAGCRVVAAARRADRLRSLCDEINPSAASRAPRAVAVEVDVAAGGSALEAAVQKAWDAFGRIDPLVNNAGIRGAVHSPLDWPEDEWDRIIKTNLTGSWLVAKHVCRRMRDAKLKGSVVNITSIAGLNRGHLPGSTGYASSKAAVHYATKIMALELGADRIRVNSIAPGLFKSEITAPLFQKRWLSTVASKIVPLKEHGATDPALTSLVRFLIHEASSYVTGNIFIVDSGATIPGVPIFSSL

SEQ ID NO: 2112 - DNA, 1011 bp, Zea mays
  CDS (1)..(1011)
atgcacgctagcctcgcctcctacgccgcggcagctatgccggcgctggacctccgccccgagatagcgcacgcgcaccagcccgtcatgtcgccctctcaccacggctgggacggcaatggcgccacagccgtgcccacaccgatgcccaagaggctggacgggaaggtggccattgtgacgggcggcgcgcgcgggatcggcgaggccatcgtgcggctgttcgccaagcacggggcccgggtggtgatcgcggacatcgacgacgccgcgggggaggcgctggcgtcggcgctgggcccgcaggtcagcttcgtgcgctgcgacgtgtccgtggaggacgacgtccggcgcgccgtggactgggcgctgtcgcgccacggcggccgcctcgacgtctactgcaacaacgccggggtgctgggccgccagacgcgcgccgccaggagcatcctgtccttcgacgcggccgagttcgaccgcgtgctccgcgtcaacgcgctgggcgccgcgctcgggatgaagcacgcggcgcgcgccatggcgccgcgccgcgcggggagcatcgtctccgtcgccagcgtcgcggccgtgctgggcggcctcggcccgcacgcctacaccgcctccaagcacgccatcgtcgggctcaccaagaacgccgcctgcgagctgcgcgcgcacggggtccgggtcaactgcgtctcgcccttcggcgtcgccacgcccatgctcatcaacgcctggcgccagggacacgacgacaccaccgccgacgccgaccgagacctcgacctcgacctcgacgtcaccgtgcccagcgaccaggaggtggagaagatggaggaggtggtcaggggcctggccacgctcaagggccccacgctcaggcccagggacatcgccgaggcggtgctcttcctggccagcgacgaggccaggtatatatcgggccacaacctcgtcgtggacggcggcgtcaccacatccaggaacctcatcggcttgtga

SEQ ID NO: 2113 - protein, 336 aa, Zea mays
MHASLASYAAAAMPALDLRPEIAHAHQPVMSPSHHGWDGNGATAVPTPMPKRLDGKVAIVTGGARGIGEAIVRLFAKHGARVVIADIDDAAGEALASALGPQVSFVRCDVSVEDDVRRAVDWALSRHGGRLDVYCNNAGVLGRQTRAARSILSFDAAEFDRVLRVNALGAALGMKHAARAMAPRRAGSIVSVASVAAVLGGLGPHAYTASKHAIVGLTKNAACELRAHGVRVNCVSPFGVATPMLINAWRQGHDDTTADADRDLDLDLDVTVPSDQEVEKMEEVVRGLATLKGPTLRPRDIAEAVLFLASDEARYISGHNLVVDGGVTTSRNLIGL

SEQ ID NO: 2114 - DNA, 957 bp, Zea mays
  CDS (1)..(957)
atggccaccgccgccgccaccgcagcagcagcagcagtctcctccccggctgccccacgagcagccggggccgccgccgcctcccgccgggggttcgtcacgtttggtggaggcgccgcccgcttctctcccacgctgcggtccggccgtgggttctctggtgtgcaaacccatgttgccgctgttgaacaagcaattgtaaaagatgctaccaagctggaagctccagttgttgttgttacaggtgcatctagagggattggtaaggcaactgctctagcccttggaaaagcaggatgcaaggttctggtaaactatgcccggtcctcgaaagaggctgaagaggtctccaaagagattgaagcatctggtggtgaggctatcaccttcggaggagatgtttcaaaagaagctgatgtagagtctatgatgaaagcagctctagataaatggggaacaatagatgtgctggtaaataatgcagggattacacgagacacattgttgatgaggatgaagaaatctcagtggcaagacgtaattgatctgaatcttactggtgtcttcctttgtacacaggctgcaacaaaagtaatgatgaaaaagagaaagggaaaaattatcaacattgcatctgtagttggtcttactggcaatgttggccaagctaattatagcgcagccaaggctggagtgattggtttcacaaaaacagttgccagggagtatgcaagcagaaatatcaatgtgaatgctattgcaccagggttcattgcatctgatatgactgccgaacttggagaagagcttgagaagaaaatcttgtcaaccattccgttagggagatatggccaaccagaggaagttgcagggttggtcgagttcctggcccttaaccccgcagctagctatatgactggacaggtgcttacaattgacggagggatggtaatgtaa

SEQ ID NO: 2115 - protein, 318 aa, Zea mays
MATAAATAAAAAVSSPAAPRAAGAAAASRRGFVTFGGGAARFSPTLRSGRGFSGVQTHVAAVEQAIVKDATKLEAPVVVVTGASRGIGKATALALGKAGCKVLVNYARSSKEAEEVSKEIEASGGEAITFGGDVSKEADVESMMKAALDKWGTIDVLVNNAGITRDTLLMRMKKSQWQDVIDLNLTGVFLCTQAATKVMMKKRKGKIINIASVVGLTGNVGQANYSAAKAGVIGFTKTVAREYASRNINVNAIAPGFIASDMTAELGEELEKKILSTIPLGRYGQPEEVAGLVEFLALNPAASYMTGQVLTIDGGMVM

SEQ ID NO: 2116 - DNA, 939 bp, Zea mays
  CDS (1)..(939)
atggccgctgccacagccgccgccgccgcgctcgcctccccggcgtgcctctccacatcgctggcgcgccgcggcctcgacagcttcgcacccgcgctccgccccggccctgaccgcagctctcgcgccgtcgccctcctcggtgtacgaactcatgtcacggctgttgatcaagccattgtaaaaggtgatacaaagttggaaggtcctgtggttgttgttactggtgcttccagggggattggaaaagccactgcattggctcttggaaaagcaggctgcaaggtcttggtgaattatgctcgatcttcaaaggaggctgaagaagtctccaaggagattgaagcatctggaggccaggccattacctttggaggagatgtttccaaagaggctgatgttgaatctatgataaaagtggctgttgatacatggggaacgattgatgtactagtaaataatgcaggaatcacacgggacacattgttgatgagaatgaagaaatcacagtggcaagatgtgattgatttgaatcttacaggcgttttcctttgcacgcaggctgcaacaaaagtaatgatgaagaagaaaaagggaagaattatcaatatagcatcggttgttggtcttactggtaatgctggacaagctaattatgctgctgccaaggctggggttattgggttcacaaaaacagttgctagggagtatgccagcagaaatattaatgcaaacgttatcgctcctggatttattgcttcagatatgactgctgaacttggtgaagagttagagaagaaaattctgtcaactattcctttagggcgctatggtcggccagaggatgtagcaggcctggtggaattcttagccctcagccctgctgcaagctacatcactggacaggtcctcaccatcgatggaggaatggtaatgtaa

SEQ ID NO: 2117 - protein, 312 aa, Zea mays
MAAATAAAAALASPACLSTSLARRGLDSFAPALRPGPDRSSRAVALLGVRTHVTAVDQAIVKGDTKLEGPVVVVTGASRGIGKATALALGKAGCKVLVNYARSSKEAEEVSKEIEASGGQAITFGGDVSKEADVESMIKVAVDTWGTIDVLVNNAGITRDTLLMRMKKSQWQDVIDLNLTGVFLCTQAATKVMMKKKKGRIINIASVVGLTGNAGQANYAAAKAGVIGFTKTVAREYASRNINANVIAPGFIASDMTAELGEELEKKILSTIPLGRYGRPEDVAGLVEFLALSPAASYITGQVLTIDGGMVM

SEQ ID NO: 2118 - DNA, 915 bp, Zea mays
  CDS (1)..(915)
atggcgtcccagcaggtgttccgggctcagcagcagcagcagcagcagttcccggctcagcagcaggagtcccagccggggaaggagcacgcgatggacccccggcccgaggccatcgtccaggactacaaggccgccaacaagctcaaggacaaggtggcgctcgtgaccggcggcgactccggcatcgggcgcgccgtgtgcctgtgcttcgcgaaggagggcgcgacggtggccttcaccttcgtgagggggcaggaggagaaggacgcggaggagacgctgcgtgcgctgcgcgacatcgggtccgagacgggcgcgcgcgagccgatggccctgcccgccgacctcgggtacgaggccaactgccgggaggtggtggagcgggtggcgtcggcgtacggcgggcgcatcgacgtggtggtgaacaacgcggcggagcagtacgagcgggagagcatcggggacgtgacggaggcggacctggagcgcgtgttccgcaccaacatcttctcctacttcctggtgtccaagcacgcggtgccgcgcatggagcccggcgcctgcatcatcaacacctcctccgtcaacgcgtacaagggcaacaagacgctgctggactacacggccaccaagggcgccatcgtggccttcacgcgcgcgctctcgctgcagctggccgacaggggcatccgcgtcaacggcgtcgcgccgggccccgtctggacgccgctcatcccggcgtccttcggcaaggagaaggtggagcagttcgggtcccaggtgcccatgaagcgcgccgcgcagccggccgagatcgcgcccagcttcgtcttcctcgccagcaaccaggattcgtcctacatgtccggccagatcctccacgtcaacggaggcgtcatcgtcaatagctag

SEQ ID NO: 2119 - protein, 304 aa, Zea mays
MASQQVFRAQQQQQQQFPAQQQESQPGKEHAMDPRPEAIVQDYKAANKLKDKVALVTGGDSGIGRAVCLCFAKEGATVAFTFVRGQEEKDAEETLRALRDIGSETGAREPMALPADLGYEANCREVVERVASAYGGRIDVVVNNAAEQYERESIGDVTEADLERVFRTNIFSYFLVSKHAVPRMEPGACIINTSSVNAYKGNKTLLDYTATKGAIVAFTRALSLQLADRGIRVNGVAPGPVWTPLIPASFGKEKVEQFGSQVPMKRAAQPAEIAPSFVFLASNQDSSYMSGQILHVNGGVIVNS

SEQ ID NO: 2120 - DNA, 843 bp, Zea mays
  CDS (1)..(843)
atgtcgtcggcggggccaccgccgccgctgccgccgtggagcaggctggaggggcaggtggtgctggtgacgggcgcttcctccggcatcggacgcgacttctgcctcgacctggcgcgcgccggctgccgcgtcgtcgccgccgcccgccgcgccgatcgtctccgctcgctctgcgacgagatcaacgcctccgctgcctcccgagccccccgcgcggtggctgtggaggtcgacgtcgccgccggtggttcggccctggaggcggcggtgcagaaggcctgggacgcctttggccgtatcgacgccttggtcaacaacgccggcatacgaggtgcagtgcattctccattagattggcccgaggatgagtgggacagaatcatcaagacgaaccttaccggatcatggctcgtggccaaacatgtctgtcgacgcatgcgtgatgccaagctgaagggttcagtggttaacatcacctctattgctggccttaaccgtgggcatctgcctggctccacgggatacgcatcctcaaaggctgctgtgcattatgccaccaagattatggctttggaattgggcgcggatcgcatcagagtgaactcgattgcacctggactcttcaaatcagagataactgctcctctgtttcaaaagaggtggttgagcaccgttgcttcaaagatagtgccgcttaaggagcatggcgctactgatcctgcattgacgtcgctggttcgttttctgatccatgaagcatcgtcgtatgtgactggcaacatcttcattgtagactcaggtgccaccatacctggtgttccgatattctcatccctgtaa

SEQ ID NO: 2121 - protein, 280 aa, Zea mays
MSSAGPPPPLPPWSRLEGQVVLVTGASSGIGRDFCLDLARAGCRVVAAARRADRLRSLCDEINASAASRAPRAVAVEVDVAAGGSALEAAVQKAWDAFGRIDALVNNAGIRGAVHSPLDWPEDEWDRIIKTNLTGSWLVAKHVCRRMRDAKLKGSVVNITSIAGLNRGHLPGSTGYASSKAAVHYATKIMALELGADRIRVNSIAPGLFKSEITAPLFQKRWLSTVASKIVPLKEHGATDPALTSLVRFLIHEASSYVTGNIFIVDSGATIPGVPIFSSL

SEQ ID NO: 2122 - DNA, 813 bp, Zea mays
  CDS (1)..(813)
atgactgcagaaactctctcacttgaaggcaagactgccttgatcactggctcgggcagagaaaatggcattggcgctgccatcgccagagcttttgcccggaacggtgcagctgttgcaatccactatgtctcggagagctccaaggtgcgggctgagaaggttgcagcagacattagtcgggagtttggaaccaaaactaccgttgtacaaggggcggtggagaaagctagcaatgcgacgaagatagtcaaagaaaccttggaaggacttggcgcttcccacattgacattctcgtgaataacgctggatatggaaatcctaaaagtctcttggaggcaacgccagaattgctcgaagccgaattcgggatcaatgtctttggctcagtttacctaacacaagctgtcattggaatagggaaaatgcctagaggcgggcgtataatcaatgtcggctctatttcctcaaaacttggtcctgaagtcagtgcagtctacggcgcatcaaaggctgcgcaagatagtctcacggcatcctgggctggccagcttggccgtagccgcggaattaccgttaacacccttgccccggggccaatcctaaccgacatggcgaaaccgttcttggaggcaaaggaaggagcttcagctgatttgttgaaagcggtagaggcgcagacgcgagctgaggcacgaattgggacagttgaggacatggccgacgctgcgttgctcctagtttcggagaagagccgctggcttaccgcccaatggatctcggtcagcggtggggtcacaggaactatgtaa

SEQ ID NO: 2123 - protein, 270 aa, Zea mays
MTAETLSLEGKTALITGSGRENGIGAAIARAFARNGAAVAIHYVSESSKVRAEKVAADISREFGTKTTVVQGAVEKASNATKIVKETLEGLGASHIDILVNNAGYGNPKSLLEATPELLEAEFGINVFGSVYLTQAVIGIGKMPRGGRIINVGSISSKLGPEVSAVYGASKAAQDSLTASWAGQLGRSRGITVNTLAPGPILTDMAKPFLEAKEGASADLLKAVEAQTRAEARIGTVEDMADAALLLVSEKSRWLTAQWISVSGGVTGTM

SEQ ID NO: 2124 - DNA, 762 bp, Zea mays
  CDS (1)..(762)
atggatgtcaaatgccggcgtctggaggggaaggtggccgtcgtgacggcgtccacgcaggggatcggcctcgccatcgccgagcgcctcggcctggagggcgccgccgtcgtcgtctcctcccgcaagcagaagaacgtggacgaggccgtggaggggctcaaggccaaggggatcaccgtggtgggcgccgtctgccacgtatccgacgcacagcaacgcaagaacctcgtcgagacggccgtcaagaactttgggcacattgatattcttgtctccaacgctgctgcaaatcctactgtgaatgtcatacttgaaatgaaagaggttgttctcgataagttgtgggatattaacgtcaaggcttctattcttcttattcaggatgctgctccccacctacgagcaaggtcatctgtgatccttatttcttcaattgctggttacaatcctgagcaaggattgacaatgtatggtgttacaaagaccgctctctttggtctcacaaaggctcttgctggtgagatgggacccgatattcgtgttaattgtatagcccctggttttgttccgacacggtttgctagtttcttcatagacaacgagaccattaggaaaaagcttaacgagaggactatgcttaagagattgggttccgtggaagatatggcggcagctgccgcattcctggcatctgacgatgcatcattcatcacagctgaaaccattgttgttgctggaggggtgccgtcgagattgtaa

SEQ ID NO: 2125 - protein, 253 aa, Zea mays
MDVKCRRLEGKVAVVTASTQGIGLAIAERLGLEGAAVVVSSRKQKNVDEAVEGLKAKGITVVGAVCHVSDAQQRKNLVETAVKNFGHIDILVSNAAANPTVNVILEMKEVVLDKLWDINVKASILLIQDAAPHLRARSSVILISSIAGYNPEQGLTMYGVTKTALFGLTKALAGEMGPDIRVNCIAPGFVPTRFASFFIDNETIRKKLNERTMLKRLGSVEDMAAAAAFLASDDASFITAETIVVAGGVPSRL

SEQ ID NO: 2126 - DNA, 969 bp, Zea mays
  CDS (1)..(969)
atgatgcaccggcttgtcgtcgaagctaggagaagagcagccccggtggcgatggccgccggcggggtggcgggcggcgagcggtggatgtcgtcgtcggcagccagcaaaggaaggctagtagggaagattgcgctgatcaccggaggcgcgagcgggctgggcaaggccgcggcccgcgagttcatcgaggaaggcgcgggggccgtagtcctcgcggacatcaactccaagctgggcctcgagacggcccacgagctgggcccggacgcccacttcgtgcactgcgacgtggccgtcgaggacagcgtcgccgcggccgtggacgccgccgtggcgcgccacggccggctggacgtcatgctcaacagcgccggcgtagtgggcccgctgaccccaggcacgtcgcgggtcgccagcctggacctggcgcagttcgactccgtcatgtccgtgaacgtgcgcgggacgctggccgggatcaagcacgccgcgcgcgccatgctggcggcggcgcccgcgggggcaggaggaggaggaggaggagcaggagggtcgatcctctgcatggcgagcgtcagcggcatcctcggcgggctgggcacgtacctgtactcggtgtccaagttcgccatcgcggggatcgtcaaggccgcggcggccgagctgtcgcgcctcggcgtccgcgtcaactgcatctcgccgtacgcggtgcccacgccgatggtgctgggccagttttccgcgatgctgggcggggcagccgacgaggcgcaggtggcggccatcgtcaggggcctcggggagctcaggggcgccacctgcgaggccgtcgacatcgccagggccgccgtgtacctggcctccgacgacgccaagtacgtgtctggccacaaccttgtggtcgacggtggcttcacgagctacaagcacatgaacctgcccttccctaccaagccacatgagtga

SEQ ID NO: 2127 - protein, 322 aa, Zea mays
MMHRLVVEARRRAAPVAMAAGGVAGGERWMSSSAASKGRLVGKIALITGGASGLGKAAAREFIEEGAGAVVLADINSKLGLETAHELGPDAHFVHCDVAVEDSVAAAVDAAVARHGRLDVMLNSAGVVGPLTPGTSRVASLDLAQFDSVMSVNVRGTLAGIKHAARAMLAAAPAGAGGGGGGAGGSILCMASVSGILGGLGTYLYSVSKFAIAGIVKAAAAELSRLGVRVNCISPYAVPTPMVLGQFSAMLGGAADEAQVAAIVRGLGELRGATCEAVDIARAAVYLASDDAKYVSGHNLVVDGGFTSYKHMNLPFPTKPHE

SEQ ID NO: 2128 - DNA, 762 bp, Zea mays
  CDS (1)..(762)
atggatgtcaaatgccggcgtctggaggggaaggtggccgtcgtgacggcgtccacgcaggggatcggcctagccatcgccgagcgcctcggcctggagggcgccgccgccgtcgtctcctcccgcaagcagaagaacgtggacgaggccgtggaggggctcaaggccaaggggatcaccgtggtgggcgccgtctgccacgtatccgacgcacagcaacgcaagaacatcatcgagacggccgtcaagaactttgggcacattgatattcttgtctccaacgctgctgcaaatcctactgtgaatgtcatacttgaaatgaaagaggttgttctcgataagttgtgggatattaacgtcaaggcttctattcttcttattcaggatgctgctccccacctacgggcagggtcatctgtgatccttatttcttcaattgctggttacaatcctgagcaaggattgacaatgtatggtgttacaaagaccgctctctttggtctcacaaaggctcttgctggtgagatgggacccgatattcgtgttaattgtatagcccctggttttgttccgacacggtttgctagtttcttcatagacaacgagaccattaggaaaaagcttaacgagaggactatgcttaagagattgggttccgtggaagatatggcggcagctgccgcattcctggcatctgacgatgcatcattcatcacagctgaaaccattgttgttgctggaggggtgccgtcgagattgtaa

SEQ ID NO: 2129 - protein, 253 aa, Zea mays
MDVKCRRLEGKVAVVTASTQGIGLAIAERLGLEGAAAVVSSRKQKNVDEAVEGLKAKGITVVGAVCHVSDAQQRKNIIETAVKNFGHIDILVSNAAANPTVNVILEMKEVVLDKLWDINVKASILLIQDAAPHLRAGSSVILISSIAGYNPEQGLTMYGVTKTALFGLTKALAGEMGPDIRVNCIAPGFVPTRFASFFIDNETIRKKLNERTMLKRLGSVEDMAAAAAFLASDDASFITAETIVVAGGVPSRL

SEQ ID NO: 2130 - DNA, 762 bp, Zea mays
  CDS (1)..(762)
atggatgtcaagtgccggcgtctggaggggaaggtggccatcgtgacggcgtccacgatggggatcggcctcgccatcgccgagcgcctcggtctggagggcgccgccgtcgtcatctcctcccgcaagcagaagaacgtgaacgaggcggtggaggggctcagggccaagggtatcaccgcggttggtgccgtctgccacgtctccgacgcacagcagcgcaagagcctcatcgagacggccgtcaagagctttgggcacatagatattcttgtctccaatgctgccgcaaatccttctgtagatagcatacttgaaatgaaagagtctgttctcgataagctgtgggatattaacgtcaaggcttctatccttcttattcaggatgctgctcctcacctacggaaggggtcatctgtgattattatttcttcaattgctggttacaatccagaacaaggattgacaatgtatggtgtcacaaagactgctctctttggtctcacgaaggctcttgctggtgagatgggacccgatactcgtgttaactgtgtagcccctggttttgttcctacacggtttgctagtttcctcacagaaaatgagaccattaggaaagagcttaacgagaggaccaagcttaagagattgggtactgtggaagacatggctgcggctgcggcttttctggcgtctgacgacgcatcatacattacggctgaaaccattgttgttgctggaggggtgcagtctaggctgtaa

SEQ ID NO: 2131 - protein, 253 aa, Zea mays
MDVKCRRLEGKVAIVTASTMGIGLAIAERLGLEGAAVVISSRKQKNVNEAVEGLRAKGITAVGAVCHVSDAQQRKSLIETAVKSFGHIDILVSNAAANPSVDSILEMKESVLDKLWDINVKASILLIQDAAPHLRKGSSVIIISSIAGYNPEQGLTMYGVTKTALFGLTKALAGEMGPDTRVNCVAPGFVPTRFASFLTENETIRKELNERTKLKRLGTVEDMAAAAAFLASDDASYITAETIVVAGGVQSRL

SEQ ID NO: 2132 - DNA, 957 bp, Zea mays
  CDS (1)..(957)
atggccaccgccgccgccaccgcagcagcagcagcagtctcctccccggctgcgcgtggagcagccggggccgccgccgcctcccgccgggggttcgtcacgtttggtggaggcgccgcccgcttctctcccacgctgcggtccggccgtgggttctctggtgtgcaaacccatgttgctgctgttgaacaagcagttgtaaaagatgctaccaagctggaagctccagttgttgttgttacaggtgcatctagagggattggtaaggcaactgctctagcccttggaaaagcaggatgcaaggttctggtaaactatgcccggtcctcgaaagaggctgaagaggtctccaaagagattgaagcatctggtggtgaggctatcaccttcggaggagatgtttcaaaagaagctgatgtagagtctatgatgaaagcagctctagataaatggggaacaatagatgtgctggtaaataatgcagggattacacgagacacattgttgatgaggatgaagaaatctcagtggcaagacgtaattgatctgaatcttactggcgtcttcctttgtacacaggctgcaacaaaagtaatgatgaaaaagagaaagggaaaaattatcaacattgcatctgtagttggtcttactggcaatgttggccaagctaattatagcgcagccaaggctggagtgattggtttcacaaaaacagttgccagggagtatgcaagcagaaatatcaatgtgaatgctattgcaccagggttcattgcatctgatatgactgccgaacttggagaagagcttgagaagaaaatcttgtcaaccattccgttagggagatatggccaaccagaggaagttgcagggttggtcgagttcctggcccttaaccccgcagctagctatatgactggacaggtgcttacaattgacggagggatggtaatgtaa

SEQ ID NO: 2133 - protein, 318 aa, Zea mays
MATAAATAAAAAVSSPAARGAAGAAAASRRGFVTFGGGAARFSPTLRSGRGFSGVQTHVAAVEQAVVKDATKLEAPVVVVTGASRGIGKATALALGKAGCKVLVNYARSSKEAEEVSKEIEASGGEAITFGGDVSKEADVESMMKAALDKWGTIDVLVNNAGITRDTLLMRMKKSQWQDVIDLNLTGVFLCTQAATKVMMKKRKGKIINIASVVGLTGNVGQANYSAAKAGVIGFTKTVAREYASRNINVNAIAPGFIASDMTAELGEELEKKILSTIPLGRYGQPEEVAGLVEFLALNPAASYMTGQVLTIDGGMVM

SEQ ID NO: 2134 - DNA, 822 bp, Zea mays
  CDS (1)..(822)
atggccacggtggagacctcgggcacggcgatagggtcctccgggagatgggcactacacggcaagacagccctcgtcaccggcggcacccgcggcatcgggcgtgcggtagtggaggagctggcggcgctgggggcggccgtgcacacatgctcccggaaggcggaggagctcggcgagcgcatcaaggagtgggaggccaggggattcagcgttaccgggtccgtctgcgacctctccgagagggaccagcgggagcggttgctccgcgaggttgccgaccgcttcggcggcaagctcaacatcctcgtaaacaatgtaggaacaaacataaggaaaccaactactgagtttactgcagaggaatactcgtttctgatggctactaatcttgaatctgcatatcacttgtgccaaattgcacatcctcttttgaaattatctgggtcaggcagcattatattcatatcatctgttgctggagcgataggaatctttagtggaactatatatgctatgactaaaggtgccattaaccagctaaccaagaatttagcttgtgaatgggctaaggacaacataagagccaactctgtcgctccgtggtacatcaccacttcacttacggaaggaattttggcaaataagaactttgaggaacaagttgtgagtcgaactccgcttggacgtgtcggagaacctggagaagtatcggcacttgttgcttttctttgcatgccgggttccacttatattagcggccagacgattgcggtcgacggaggtatgactgtgaacgggttttaccctcccaagccctag

SEQ ID NO: 2135 - protein, 273 aa, Zea mays
MATVETSGTAIGSSGRWALHGKTALVTGGTRGIGRAVVEELAALGAAVHTCSRKAEELGERIKEWEARGFSVTGSVCDLSERDQRERLLREVADRFGGKLNILVNNVGTNIRKPTTEFTAEEYSFLMATNLESAYHLCQIAHPLLKLSGSGSIIFISSVAGAIGIFSGTIYAMTKGAINQLTKNLACEWAKDNIRANSVAPWYITTSLTEGILANKNFEEQVVSRTPLGRVGEPGEVSALVAFLCMPGSTYISGQTIAVDGGMTVNGFYPPKP

SEQ ID NO: 2136 - DNA, 792 bp, Zea mays
  CDS (1)..(792)
atggcgccaggaggcagcggcgagcggtggagcctggccggcgcgacagcgctggtcaccggtggcagcaaggggatcgggcaagccgtcgtggaggagctggccaggctcggcgcgcgcgtgcacacgtgcgcccgcagcgcggcggacctggaggagtgccgccggcggtgggccgagaaggggctccgcgtcaccgtctccgtgtgcgacgtcgccgtgcgcgccgaccgggagaggctcgtcctggacacggtcagcgcggccttcgacggcaagctcgatatcctggtcaacaacgctgcgctgctgctgctcaagccggcggcggagtgggcggcggaggactacgcgcggatcatggcgaccaacctggagtcgtgcttgcacatctcccagctcgcgcacccgctgctcctcaacgcctccgtcgccggaggggcgagcatcgtcaacgtctcctccatcgccagcgtccttggcttcccgcaggaagttatgtacagcgtcaccaaaggaggactgaatcagatgacgagaagtctagctgtggagtgggcctgcgataggatccgtgtgaactgcgtcgcgccgggcgtgatcatgacggacatgggtaaagagctaccggcggcgttggtggagcaggagcggtcacgcatcccgctgcggcggaccggcgagccggaggaggtggcgtccctggtgtcgttcctctgcatgccggcggcgtcctacgtcaccgggcaggtcatcttcgtcgacggcggccggaccattagtggcgcctga

SEQ ID NO: 2137 - protein, 263 aa, Zea mays
MAPGGSGERWSLAGATALVTGGSKGIGQAVVEELARLGARVHTCARSAADLEECRRRWAEKGLRVTVSVCDVAVRADRERLVLDTVSAAFDGKLDILVNNAALLLLKPAAEWAAEDYARIMATNLESCLHISQLAHPLLLNASVAGGASIVNVSSIASVLGFPQEVMYSVTKGGLNQMTRSLAVEWACDRIRVNCVAPGVIMTDMGKELPAALVEQERSRIPLRRTGEPEEVASLVSFLCMPAASYVTGQVIFVDGGRTISGA

SEQ ID NO: 2138 - DNA, 957 bp, Zea mays
  CDS (1)..(957)
atggccaccgccgccgccaccgcagcagcagcagcagtctcctccccggctgcgcgtggagcagccggggccgccgccgcctcccgccgggggttcgtcacgtttggtggaggcgccgcccgcttctctcccacgctgcggtccggccgtgggttctctggtgtgcaaacccatgttgctgctgttgaacaagcagttgtaaaagatgctaccaagctggaagctccagttgttgttgttacaggtgcatctagagggattggtaaggcaactgctctagcccttggaaaagcaggatgcaaggttctggtaaactatgcccggtcctcgaaagaggctgaagaggtctccaaagagattgaagcatctggtggtgaggctatcaccttcggaggagatgtttcaaaagaagctgatgtagagtctatgatgaaagcagctctagataaatggggaacaatagatgtgctggtaaataatgcaggaatcacacgggacacattgttgatgagaatgaagaaatcacagtggcaagatgtgattgatttgaatcttacaggcgttttcctttgcacgcaggctgcaacaaaagtaatgatgaagaagaaaaagggaagaattatcaatatagcatcggttgttggtcttactggtaatgctggacaagctaattatgctgctgccaaggctggggttattgggttcacaaaaacagttgctagggagtatgccagcagaaatattaatgcaaacgttatcgctcctggatttattgcttcagatatgactgctgaacttggtgaagagttagagaagaaaattctgtcaactattcctttagggcgctatggtcggccagaggatgtagcgggcctggtggaattcttagccctcagccctgctgcaagctacatcactggacaggtcctcaccatcgatggaggaatggtaatgtaa

SEQ ID NO: 2139 - protein, 318 aa, Zea mays
MATAAATAAAAAVSSPAARGAAGAAAASRRGFVTFGGGAARFSPTLRSGRGFSGVQTHVAAVEQAVVKDATKLEAPVVVVTGASRGIGKATALALGKAGCKVLVNYARSSKEAEEVSKEIEASGGEAITFGGDVSKEADVESMMKAALDKWGTIDVLVNNAGITRDTLLMRMKKSQWQDVIDLNLTGVFLCTQAATKVMMKKKKGRIINIASVVGLTGNAGQANYAAAKAGVIGFTKTVAREYASRNINANVIAPGFIASDMTAELGEELEKKILSTIPLGRYGRPEDVAGLVEFLALSPAASYITGQVLTIDGGMVM

SEQ ID NO: 2140 - DNA, 762 bp, Zea mays
  CDS (1)..(762)
atggatgtcaaatgccggcgtctggaggggaaggtggccgtcgtgacggcgtccacgcaggggatcggcctcgccatcgccgagcgcctcggcctggagggcgccgccgtcgtcgtctcctcccgcaagcagaagaacgtggacgaggccgtggaggggctcaaggccaaggggatcaccgtggtgggcgccgtctgccacgtatccgacgcacagcaacgcaagaacctcgtcgagacggccgtcaagaactttgggcacattgatattcttgtctccaacgctgctgcaaatcctactgtgaatgtcatacttgaaatgaaagaggttgttctcgataagttgtgggatattaacgtcaaggcttctattcttcttattcaggatgctgctccccacctacgagcaaggtcatctgtgatccttatttcttcaattgctggttacaatcctgagcacggattgacaatgtatggtgttacaaagaccgctctctttggtctcacaaaggctcttgctggtgagatgggacccgatattcgtgttaactgtatagcccctggttttgttccgacacggtttgctagtttcttcgtagacaacgagaccattaggaaaaagcttaacgagaggactatgcttaagagattgggttccgtggaagatatggcggcagctgccgcattcctggcatctgacgatgcatcattcatcacagctgaaaccattgttgttgctggaggggtgccgtcgagattgtaa

SEQ ID NO: 2141 - protein, 253 aa, Zea mays
MDVKCRRLEGKVAVVTASTQGIGLAIAERLGLEGAAVVVSSRKQKNVDEAVEGLKAKGITVVGAVCHVSDAQQRKNLVETAVKNFGHIDILVSNAAANPTVNVILEMKEVVLDKLWDINVKASILLIQDAAPHLRARSSVILISSIAGYNPEHGLTMYGVTKTALFGLTKALAGEMGPDIRVNCIAPGFVPTRFASFFVDNETIRKKLNERTMLKRLGSVEDMAAAAAFLASDDASFITAETIVVAGGVPSRL

SEQ ID NO: 2142 - DNA, 25 bp, Artificial sequence
  primer
atgaacgatctattttcactggcag

SEQ ID NO: 2143 - DNA, 22 bp, Artificial sequence
  primer
ttaaacagccactaacatgccg

SEQ ID NO: 2144 - protein, 324 aa, Artificial sequence
  consensus sequence
  Variant (2)..(2): Xaa in position 2 is any amino acid
  Variant (4)..(6): Xaa in position 4 to 6 is any amino acid
  Variant (7)..(8): Xaa in position 7 to 8 is any or no amino acid
  Variant (11)..(12): Xaa in position 11 to 12 is any amino acid
  Variant (13)..(15): Xaa in position 13 to 15 is any or no amino acid
  Variant (17)..(17): Xaa in position 17 is any amino acid
  Variant (19)..(28): Xaa in position 19 to 28 is any amino acid
  Variant (30)..(54): Xaa in position 30 to 54 is any amino acid
  Variant (55)..(75): Xaa in position 55 to 75 is any or no amino acid
  Variant (77)..(92): Xaa in position 77 to 92 is any amino acid
  Variant (93)..(102): Xaa in position 93 to 102 is any or no amino acid
  Variant (104)..(104): Xaa in position 104 is any amino acid
  Variant (106)..(106): Xaa in position 106 is any amino acid
  Variant (111)..(131): Xaa in position 111 to 131 is any amino acid
  Variant (132)..(136): Xaa in position 132 to 136 is any or no amino acid
  Variant (138)..(154): Xaa in position 138 to 154 is any amino acid
  Variant (155)..(170): Xaa in position 155 to 170 is any or no amino acid
  Variant (172)..(172): Xaa in position 172 is any amino acid
  Variant (173)..(178): Xaa in position 173 to 178 is any or no amino acid
  Variant (180)..(183): Xaa in position 180 to 183 is any amino acid
  Variant (185)..(196): Xaa in position 185 to 196 is any amino acid
  Variant (197)..(198): Xaa in position 197 to 198 is any or no amino acid
  Variant (200)..(202): Xaa in position 200 to 202 is any amino acid
  Variant (204)..(209): Xaa in position 204 to 209 is any amino acid
  Variant (211)..(213): Xaa in position 211 to 213 is any amino acid
  Variant (215)..(215): Xaa in position 215 is any amino acid
  Variant (217)..(223): Xaa in position 217 to 223 is any amino acid
  Variant (224)..(225): Xaa in position 224 to 225 is any or no amino acid
  Variant (227)..(229): Xaa in position 227 to 229 is any amino acid
  Variant (231)..(234): Xaa in position 231 to 234 is any amino acid
  Variant (236)..(261): Xaa in position 236 to 261 is any amino acid
  Variant (262)..(299): Xaa in position 262 to 299 is any or no amino acid
  Variant (302)..(307): Xaa in position 302 to 307 is any amino acid
  Variant (308)..(311): Xaa in position 308 to 311 is any or no amino acid
  Variant (313)..(313): Xaa in position 313 is any amino acid
  Variant (314)..(321): Xaa in position 314 to 321 is any or no amino acid
LXGXXXXXTGXXXXXGXGXXXXXXXXXXGXXXXXXXXXXXXXXXXXXXXXXXXXXXXXXXXXXXXXXXXXXXXXXDXXXXXXXXXXXXXXXXXXXXXXXXXXDXLXNNAGXXXXXXXXXXXXXXXXXXXXXXXXXXNXXXXXXXXXXXXXXXXXXXXXXXXXXXXXXXXXGXXXXXXXIXXXXSXXXXXXXXXXXXXXYXXXKXXXXXXTXXXAXEXXXXXXXXXNXXXPXXXXTXXXXXXXXXXXXXXXXXXXXXXXXXXXXXXXXXXXXXXXXXXXXXXXXXXXXXXXXXXXXXXXXFLXXXXXXXXXXGXXXXXXXXXDGG

SEQ ID NO: 2145 - protein, 20 aa, Artificial sequence
  protein pattern
  Variant (2)..(2): Xaa in position 2 is any amino acid
  Variant (3)..(3): Xaa in position 3 is Ala, Asp or Gly
  Variant (4)..(6): Xaa in position 4 to 6 is any amino acid
  Variant (7)..(7): Xaa in position 7 is Phe, Ile, Leu, Met or Val
  Variant (8)..(8): Xaa in position 8 is Ile, Leu or Val
  Variant (11)..(13): Xaa in position 11 to 13 is any amino acid
  Variant (15)..(15): Xaa in position 15 is Ile or Leu
  Variant (17)..(19): Xaa in position 17 to 19 is any amino acid
  Variant (20)..(20): Xaa in position 20 is Ala, Cys, Ser, Thr or Val
LXXXXXXXTGXXXGXGXXXX

SEQ ID NO: 2146 - DNA, 438 bp, Synechocystis sp.
  CDS (1)..(438): transl_table=11
atggggagcattcgtttgatgcacgcaaaattacatcgggtctgtgtgacggaggccaatgttaattatgtgggcagtatcaccattgacccagtaatgttggagcgggtgggattgttgcccctagaggaggtggatattatcaatctcagcaacggtaatcgcttttccacctatgtcctgcccggtcaagcccattccaaggaaatttgccccaacggtggagccgccttgctttgtcaaccaggcgatcgcctgattatttttgcctacgaactgtgcgatcgccgtgaggtattacaaaaggggcaccaagctaaggtgctagtgaccaacgaaagtaatgaaacggtggatttttatttacaagaactgatacccaaggaagatggggtgaaattcatcaacaatatttgttcggaagccatcccccattaa

SEQ ID NO: 2147 - protein, 145 aa, Synechocystis sp.
MGSIRLMHAKLHRVCVTEANVNYVGSITIDPVMLERVGLLPLEEVDIINLSNGNRFSTYVLPGQAHSKEICPNGGAALLCQPGDRLIIFAYELCDRREVLQKGHQAKVLVTNESNETVDFYLQELIPKEDGVKFINNICSEAIPH

SEQ ID NO: 2148 - DNA, 528 bp, Agrobacterium rhizogenes
  CDS (1)..(528): transl_table=11
atgggttgttgcggaatgctgcatcgcacaaatataggtgggattgcgaatataccgactggggaggggcaggccgtggaaaaatacgtgggcgcgaagctgcatggccttcgagtgaccgacgcaaaactgaactaccacggctcgatcacgatcgatgcggacttctgccgggaggtcggtctgaaaccgctggaatatgtggagatctggaacaagatgtccggagcgaggatcagcacttatgtgctctacggcgatcccggctccaggtgctgcattctcaacggtgcggccgcccgcacgtgtcagcaaggcgatgagattatcatcgcatccagcgtcttttgcgaagtcgatgacatcatcaagctcaagccacgcgtgctggtcttcggagaaaaaaacgaaatcatcgacaggatcacctacgaggtctttcgccgcgcagacaattctctcgacatggcggtgagctccgagctttccgacaatagctacggatttccggcctccatttccggatag

SEQ ID NO: 2149 - protein, 175 aa, Agrobacterium rhizogenes
MGCCGMLHRTNIGGIANIPTGEGQAVEKYVGAKLHGLRVTDAKLNYHGSITIDADFCREVGLKPLEYVEIWNKMSGARISTYVLYGDPGSRCCILNGAAARTCQQGDEIIIASSVFCEVDDIIKLKPRVLVFGEKNEIIDRITYEVFRRADNSLDMAVSSELSDNSYGFPASISG

SEQ ID NO: 2150 - DNA, 396 bp, Staphylococcus epidermidis ATCC 12228
  CDS (1)..(396): transl_table=11
atgactatattgattagaacatttatgaactcaaaaatccatagagctagagttacagaatctaatttaaattacgttggaagcataacaatagatgccaatatattagatgcggttgatattttacccaatgaaaaggttgctattgttaataataataatggtgctcgatttgaaacatatgtcattgctggagaacgtggtagtggaaagatgtgtttaaatggcgcggcttcaagactagttgaagttggagacgtcattattattatgacatatgcacaattaaatgaagatgaaatggtagatcactcaccaaaagtagctgtgttaaatgaaaataatgaaattatagaaatgataaatgagaaagaaaatacgatatcaaatgtataa

SEQ ID NO: 2151 - protein, 131 aa, Staphylococcus epidermidis ATCC 12228
MTILIRTFMNSKIHRARVTESNLNYVGSITIDANILDAVDILPNEKVAIVNNNNGARFETYVIAGERGSGKMCLNGAASRLVEVGDVIIIMTYAQLNEDEMVDHSPKVAVLNENNEIIEMINEKENTISNV

SEQ ID NO: 2152 - DNA, 513 bp, Helicobacter hepaticus ATCC 51449
  CDS (1)..(513): transl_table=11
ttgataataagattcttatatggaataatcaataagaaagcttactccaagccttatctgattaatttatttactcatcatataatgatattacatatttttatgataaaattacactatttttatatcccaaatcaaataaggcataaaatgcaatttgaaatgctttactcaaagattcatcgtgctaaagtcagtgatgctaatcttaattatgtcggctcaattacgattgataaaacacttgcccaaagtgcaaatcttttagcaggtatgaaagtagagattgtgaatatcaataatggcgaacgttttagcacttatgtcatttatggcgataaaaagggtgaaatttgtctcaatggagctgctgcacgcaaagttcaaataggcgatattattataataattgcttatgccacatatacccacaatgagcttgaacactataaacctactattgtgcaagtcaatgaatctaatcagattctatctattacaaatgaggtgtaa

SEQ ID NO: 2153 - protein, 170 aa, Helicobacter hepaticus ATCC 51449
MIIRFLYGIINKKAYSKPYLINLFTHHIMILHIFMIKLHYFYIPNQIRHKMQFEMLYSKIHRAKVSDANLNYVGSITIDKTLAQSANLLAGMKVEIVNINNGERFSTYVIYGDKKGEICLNGAAARKVQIGDIIIIIAYATYTHNELEHYKPTIVQVNESNQILSITNEV

SEQ ID NO: 2154 - DNA, 384 bp, Dehalococcoides sp. BAV1
  CDS (1)..(384): transl_table=11
gtgagaatcatgctgaaaagcaaaatccaccgggctaccatcacggatgcctgcatagactatgaaggcagtattaccattgataaaaaccttatgcaggcagccaacttgctgccttacgaacaggtacatgtggtaaatgtaaataacgggacacggctggaaacctatgttatagagggttcagccggcagtggccagatatgcctaaacggggcggccgcccgcatgggcatgaagggtgacaaagtaattatccttggctatagcctgataaccgaagaagatacccttattcaccagccaaatctggtgtatgtagatgcgcttaaccgtataaccaaagtaaaaaacggggttgccaatcagggtttagaggtataa

SEQ ID NO: 2155 - protein, 127 aa, Dehalococcoides sp. BAV1
MRIMLKSKIHRATITDACIDYEGSITIDKNLMQAANLLPYEQVHVVNVNNGTRLETYVIEGSAGSGQICLNGAAARMGMKGDKVIILGYSLITEEDTLIHQPNLVYVDALNRITKVKNGVANQGLEV

SEQ ID NO: 2156 - DNA, 453 bp, Xanthobacter autotrophicus Py2
  CDS (1)..(453): transl_table=11
atgcgtaagatcgtcgccggcaagctgcacggcctgaccgtgacgggggccgacctcaactatcacggctccatcacgcttgatcccgagcattgcgaggaggcggggatcctgccgctggaattcgtcgagatctggaaccgcaattccggggcgcggatctccacctatgtcatcctcggcgagcgcggctcgcgctgctgcgtgctcaatggcgccgccgcccgcacctgccagccgggcgacgaggtcatcatctgcaattcggtctacgtgccggaaggcgagatcgtggcgctgcgcccgcgcgtcctgaccttcgacaaggataaccgcgtcacgagccgcctcacctatgaggtgacgcgcgacagccagggcgcctaccacttcgccgtgcgcgacgaacgcggcgacgagaagccgatcccgctccgggtcgaggcgtcctga

SEQ ID NO: 2157 - protein, 150 aa, Xanthobacter autotrophicus Py2
MRKIVAGKLHGLTVTGADLNYHGSITLDPEHCEEAGILPLEFVEIWNRNSGARISTYVILGERGSRCCVLNGAAARTCQPGDEVIICNSVYVPEGEIVALRPRVLTFDKDNRVTSRLTYEVTRDSQGAYHFAVRDERGDEKPIPLRVEAS

SEQ ID NO: 2158 - DNA, 426 bp, Mycobacterium abscessus
  CDS (1)..(426): transl_table=11
atgatgttccgcacgatgatgaagtcgaagatccatcgcgccacggtgacgcacgccgacctgcattacgtcggctcggtgaccatcgaccccgatctcatggaggccgctgatctgttggaaggcgagcaggtcaccatcgtcgacatcgacaacggggcccggctggagacctacgcgattaccggcacgcggggcagtggcgtgatcggaatcaatggggccgcagcgcatctagtgcaccccggggatctggtgatcatcatcgcctacggtgtgatgactgatgaagaggcccgcgcgttcacaccgcgggtggtgttcgtcgattcggataacaagcaggtagaactgggcgagcattccgatgacccggcgtacgtgcccgagaacttcggcctggtgtcaccacgcggtctggtgtaa

SEQ ID NO: 2159 - protein, 141 aa, Mycobacterium abscessus
MMFRTMMKSKIHRATVTHADLHYVGSVTIDPDLMEAADLLEGEQVTIVDIDNGARLETYAITGTRGSGVIGINGAAAHLVHPGDLVIIIAYGVMTDEEARAFTPRVVFVDSDNKQVELGEHSDDPAYVPENFGLVSPRGLV

SEQ ID NO: 2160 - DNA, 576 bp, Synechococcus sp. PCC 7002
  CDS (1)..(576): transl_table=11
atggcccaaatcaaactgatgcacgcgaaactccaccatttgcgggtgacccaggctgagctagattatgtgggcagcatcaccatcgaccaagccctgatcgaaaaagtaggtattttgccccttgaagaagtgaatatttggaacgtcgaaaatggcaaccgcttaacgacctatgttcttcctggtgagcgggatagtggtgttgtctgtctaaatggtgcggcggcccatctttgtagcccaggcgatcgcctgattgtcgcagcctatgaattacgcgatcgccgcgatgttttagcgcaaggccacacggcaaaggtaatcctggccgacgagcaaaaccgctgtcagacgttttttgaacaacgcctcaatccccaaggtgccattggtgagaatttatcagtgacaacgcccagctctgtcaatcaaactcagccaaatcatctgcacttctcaaaaactacatctgtgaagtacacgacgctgacgcaaacatacaaaacatacagttcaagcctcctccaaaaaactgtcttaacaacagatcgacgtgctctattgccctggtga

SEQ ID NO: 2161 - protein, 191 aa, Synechococcus sp. PCC 7002
MAQIKLMHAKLHHLRVTQAELDYVGSITIDQALIEKVGILPLEEVNIWNVENGNRLTTYVLPGERDSGVVCLNGAAAHLCSPGDRLIVAAYELRDRRDVLAQGHTAKVILADEQNRCQTFFEQRLNPQGAIGENLSVTTPSSVNQTQPNHLHFSKTTSVKYTTLTQTYKTYSSSLLQKTVLTTDRRALLPW

SEQ ID NO: 2162 - DNA, 345 bp, Thermotoga sp. RQ2
  CDS (1)..(345): transl_table=11
atgttgaacatatatttgaagtcgaaaatccacatggcaacggtaacaggaaaaaagctgttctacgagggaagtatagagatagatgaagagttgatggaaagggccggtatcagcgaaggagagatggtactggttgtgaacgtcaacaacgcagaaaggtttgtaacgtatgtcataaaaggaaagaggggaagccgggagataaatctgaacggagcggcggcaaggcttgccgaagagggggacagggtgatcatcatggccttcactctgagcgagacacccgtgaagtccaaaacgataattttgaacgacaaaaacgagatcgttcaggagaaatga

SEQ ID NO: 2163 - protein, 114 aa, Thermotoga sp. RQ2
MLNIYLKSKIHMATVTGKKLFYEGSIEIDEELMERAGISEGEMVLVVNVNNAERFVTYVIKGKRGSREINLNGAAARLAEEGDRVIIMAFTLSETPVKSKTIILNDKNEIVQEK

SEQ ID NO: 2164 - DNA, 456 bp, Cyanothece sp. ATCC 51142
  CDS (1)..(456): transl_table=11
atgggaacgattcgattaatgcacgctaagttacatcgagtacaggtaactgaagcgaatattgactatgtcggtagtatcacgatcgatccgatcttactggataaagtaggcattttgccgttagaagaagtggatattgttaacttaaataacgggaatcgattttctacctatgtgatcccaggagaaacgggaaaaggggaaatttgtcccaatggtggggctgctttattatgtcaaccaggggatttattaattatttatgcttatgaaaattgcgatcgccaggaagtgatacaaaggggtcacacagcacgggtgatcgtagctgatgaagataataagattcaagactttcttattcaaaccttagttccctgtgaagatggaaacaaagtggaatttcataatagttctatgattgatactatactagaaagcagtcagacgtaa

SEQ ID NO: 2165 - protein, 151 aa, Cyanothece sp. ATCC 51142
MGTIRLMHAKLHRVQVTEANIDYVGSITIDPILLDKVGILPLEEVDIVNLNNGNRFSTYVIPGETGKGEICPNGGAALLCQPGDLLIIYAYENCDRQEVIQRGHTARVIVADEDNKIQDFLIQTLVPCEDGNKVEFHNSSMIDTILESSQT

SEQ ID NO: 2166 - DNA, 384 bp, Exiguobacterium sibiricum 255-15
  CDS (1)..(384): transl_table=11
atgttacgtacattcatgcatgcaaaattacacaaagcccgtgtcacggaagcgaatctgcattacgtcggttcgattacgatcgatgaagatttactggacgcggtcgggattcttgaaaacgagaaggtccaagtgacgaacaatcaaaacggggcccggattgaaacatacgccattaagggagcccgtggttctggtgtcatttgtctgaacggagcagcagcccgtcatttccaaatcggtgatgaagtcatcatcatggcttatgcgcaattgacaaacgaagaaattgcgacacatgttccgaaagtcgcggttcttgatcaagagaattcgattaagcagatgttatcgcaggaaatcgcacatacgatcttatga

SEQ ID NO: 2167 - protein, 127 aa, Exiguobacterium sibiricum 255-15
MLRTFMHAKLHKARVTEANLHYVGSITIDEDLLDAVGILENEKVQVTNNQNGARIETYAIKGARGSGVICLNGAAARHFQIGDEVIIMAYAQLTNEEIATHVPKVAVLDQENSIKQMLSQEIAHTIL

SEQ ID NO: 2168 - DNA, 489 bp, Mycobacterium marinum M
  CDS (1)..(489): transl_table=11
atgagccggatcagactgttgcgcgccaagctccatcaggtgcgggtgacacaccgcgaacgcgactacgtcggcagtatcgccgtcgacgtcgacctgatggaacaagtcgggatgctgccgttggaggaagtcgaagtcgtcaacctcgaaaacggcaatcggtggtcgacctacctcatcccggccgaccgtggatcttcgcggatctgcccgaacgggggcggggcgctgctgtgcgagccgggcgaccggttgatcatcttcagctacgcaaccgtgcgcagcggcgcgctgcgtcgccgcccgcacgtggctcgggtattgctcagcgacgccgataaccgcgtcgagagcttgttcgaacaagtcctcgagcaggacgacgaccgtcttcgatacagcgtgcgcggctgttatggggacatcccggcccagcccgatctgctactgcgcgccgaaacacagctgctcgacgggccgcactga

SEQ ID NO: 2169 - protein, 162 aa, Mycobacterium marinum M
MSRIRLLRAKLHQVRVTHRERDYVGSIAVDVDLMEQVGMLPLEEVEVVNLENGNRWSTYLIPADRGSSRICPNGGGALLCEPGDRLIIFSYATVRSGALRRRPHVARVLLSDADNRVESLFEQVLEQDDDRLRYSVRGCYGDIPAQPDLLLRAETQLLDGPH

SEQ ID NO: 2170 - DNA, 450 bp, Mycobacterium marinum M
  CDS (1)..(450): transl_table=11
ttgcagcggacggtccttggagggaagattcatcgcgccaccgtcacacaggccgacttgaactacgttggatcgatcactctcgacgccgacctcatggcggcatccgggattgttgaaggcgaacaggtccacgtcctcgacatcaccaacggagcgcgactggtcacctacgcgatcgcgggtcctgggggttccggtgtcgtcggaataaatggcgcggcagcacatcttattgcgccgggcgatctggtcatcatcatgtcgtacctcatcgttggcgaagaggagcgttgtggccattcggcgaaggtggtgcacgtcgacgcggtcaacagcattgttggactggggtccgatccggcgcagcccgtccccggcgctctagccgagtcggtttccggaccaatttccggtcgggacctgttcggcgccgccgatgcgctgtga

SEQ ID NO: 2171 - protein, 149 aa, Mycobacterium marinum M
MQRTVLGGKIHRATVTQADLNYVGSITLDADLMAASGIVEGEQVHVLDITNGARLVTYAIAGPGGSGVVGINGAAAHLIAPGDLVIIMSYLIVGEEERCGHSAKVVHVDAVNSIVGLGSDPAQPVPGALAESVSGPISGRDLFGAADAL

SEQ ID NO: 2172 - DNA, 384 bp, Nostoc punctiforme PCC 73102
  CDS (1)..(384): transl_table=11
atgcagcgtactctccttttggcaaaaattcataattgcacccttacaggggcgaatatcaactacgtgggtagtatcagcatcgatgaaatccttttggaaaaggctgggatcttaccttatgaacaagtgcaagtagttaatagtgccaatggtcagcgttttattacttatgcgatcccggctccagcccattcaggagtaattgagctaaatgggggtgcagcacgtttaggcattattggcgatcgcttgattataatgacttacgggcagttcactccagaagagttaaaaaattactctcctacggtagtcattgtggacgaaaaaaacaggctgttggaagttcggcgctacgatgacctgctcgttaaggtctaa

SEQ ID NO: 2173 - protein, 127 aa, Nostoc punctiforme PCC 73102
MQRTLLLAKIHNCTLTGANINYVGSISIDEILLEKAGILPYEQVQVVNSANGQRFITYAIPAPAHSGVIELNGGAARLGIIGDRLIIMTYGQFTPEELKNYSPTVVIVDEKNRLLEVRRYDDLLVKV

SEQ ID NO: 2174 - DNA, 351 bp, Thermus thermophilus HB27
  CDS (1)..(351): transl_table=11
atgttccacgccaagatccaccgggccacggtgacccaggccgacctccactacgtgggctcggtgacggtggaccaggacctcctggacgccgccgggatccttccttttgagcaggtggacatctacgacatcaccaacggggcccggctcaccacctacgcccttcccggggaacgggggtccggcgtcatcgggatcaacggggccgcggcccacctggtgaagcccggggacctggtcatcctcgtggcctacggcgtctttgacgaggaggaggcgaggaacctcaagcccaccgtggtcctggtggacgagaggaaccggatcctcgaggtgcgcaaagggtaa

SEQ ID NO: 2175 - protein, 116 aa, Thermus thermophilus HB27
MFHAKIHRATVTQADLHYVGSVTVDQDLLDAAGILPFEQVDIYDITNGARLTTYALPGERGSGVIGINGAAAHLVKPGDLVILVAYGVFDEEEARNLKPTVVLVDERNRILEVRKG

SEQ ID NO: 2176 - DNA, 465 bp, Desulfotalea psychrophila LSv54
  CDS (1)..(465): transl_table=11
ttgtgcgccccttgtttgggctgtgttctgcattattttattcgcaataggatagtgcgtgtcacctctccccgcttgagggtaaaattttattggtttattattatgttacatcagatgatgaaggctaagttgcaccgagccacaatttcggctgctgacttgaattatgaaggaagtctcactattgataccgatctgctaaaagcttcaggtattcgtccctatgaacgtatctatgtctataacgtaaataatggcgaacgatttgaaacctatgcaattgagggagaagcgggatccggtgcaattcaactcaacggagcagcggcacgtaagggaatgataggcgattttctcattattgtcacctatgccctctgttcagacgatgaagtagatgagcatagaccaaatgttgttctgcttaacccagataatacaattaaagaaatcgtgaagtag

SEQ ID NO: 2177 - protein, 154 aa, Desulfotalea psychrophila LSv54
MCAPCLGCVLHYFIRNRIVRVTSPRLRVKFYWFIIMLHQMMKAKLHRATISAADLNYEGSLTIDTDLLKASGIRPYERIYVYNVNNGERFETYAIEGEAGSGAIQLNGAAARKGMIGDFLIIVTYALCSDDEVDEHRPNVVLLNPDNTIKEIVK

SEQ ID NO: 2178 - DNA, 408 bp, Nocardioides sp. JS614
  CDS (1)..(408): transl_table=11
atgatgaagagcaagatccaccgggccacggtgacccaggccgacctgcactacgtcggctcggtgacggtcgacgaggacctcctcgacgccgccgacctgctgccgggcgagctggtgcacatcgtcgacatcgacaacggtgcgcgcctggagacctacacgatcgccggcgagcgtggctcgggcgtgatcggcatcaacggtgccgctgcccggctcgtgcaccccggggacctggtgatcctgatcgcctacggccagatggaggacgtcgaggccaagggcttcgagccgcacgtggtcttcgtcgacgccgacaaccgggtcgtgagcaccggcagcgacccggccgacgccccggccggatccggactgctgcgcggcgaccgcccggccggacgctag

SEQ ID NO: 2179 - protein, 135 aa, Nocardioides sp. JS614
MMKSKIHRATVTQADLHYVGSVTVDEDLLDAADLLPGELVHIVDIDNGARLETYTIAGERGSGVIGINGAAARLVHPGDLVILIAYGQMEDVEAKGFEPHVVFVDADNRVVSTGSDPADAPAGSGLLRGDRPAGR

SEQ ID NO: 2180 - DNA, 543 bp, Magnetospirillum magnetotacticum MS-1
  CDS (1)..(543): transl_table=11
atgatgaagatcattcgcgcgaagctgcatggcattcgcgtcaccaatgccgacctcaattatcacggctcgatcacccttgatcccgagcagtgcgagatggccggcatctatcccatggaattcgtcgacatctggaataagaattcggcggcccgcatttcgacctatgtcatcttcggcgagccgggctcgcgctgctgcgtgctgaacggcgccgcggcgcgcacctgtcagaagggcgacgaactgatcatcgctgcctcggcggatatttccggaccggaaaagctttacgagatcaagccgcgcatcctgaccttcctgcccgacaatcacgtcgatcaggtgctgtattacgacgtcttccaaagcgagaagcgtccttacgacttccgcatcgtcgatgccgacaagcataccatcgagagctgccacacctggcccaacgtggatatcaccaaactgcgctccgatctggcggccaagggctggagcgaggccgaaatcgacgccttcatcgcgtcgcatttttctctgtag

SEQ ID NO: 2181 - protein, 180 aa, Magnetospirillum magnetotacticum MS-1
MMKIIRAKLHGIRVTNADLNYHGSITLDPEQCEMAGIYPMEFVDIWNKNSAARISTYVIFGEPGSRCCVLNGAAARTCQKGDELIIAASADISGPEKLYEIKPRILTFLPDNHVDQVLYYDVFQSEKRPYDFRIVDADKHTIESCHTWPNVDITKLRSDLAAKGWSEAEIDAFIASHFSL

SEQ ID NO: 2182 - DNA, 384 bp, Listeria monocytogenes str. 4b H7858
  CDS (1)..(384): transl_table=11
atgtttagaacaatgatgaatggcaaaattcaccgagcgactgtaacagaagccaatctaaattatgttggaagtattacgattgattctgctattttagaagcagtggatatgcttccaaacgaaaaagttcaaattgtaaataacaataacggtgctagaattgaaacctatattatcccaggtgagccaggaagtggtgtgatttgtctaaacggagctgcagctagacacgtccaagttggcgacgtagtaattattatgagttacggaatgtttactaccgaagaagcgaaaacacatgaacccaaaatagttgttttagatgaaaaaaatcatattgaaatgattcttccagaagaaaaagcgcatacgactttataa

SEQ ID NO: 2183 - protein, 127 aa, Listeria monocytogenes str. 4b H7858
MFRTMMNGKIHRATVTEANLNYVGSITIDSAILEAVDMLPNEKVQIVNNNNGARIETYIIPGEPGSGVICLNGAAARHVQVGDVVIIMSYGMFTTEEAKTHEPKIVVLDEKNHIEMILPEEKAHTTL

SEQ ID NO: 2184 - DNA, 384 bp, Bacillus cereus G9241
  CDS (1)..(384): transl_table=11
atgtttcgcacaatgatgagagcgaagttacatcgcgcaacagtaacagaggcaaatttaaattatgtaggtagtattacaattgatgaagatttaatggatgcagtaaatattgtagaaaatgaaaaagtacaaattgtaaataataataatggtgctcgcttagagacatatgttattagaggagaacgtggtagcggtgttgtttgtttgaatggtgcagctgcaaggcttgtacagccaggagataaagttattattatttgctacggtctagtggcagaagaaaatattcataaacaagagccgaaaattgcagtattagacgataataatcaaattattgaaatgttaggtgctgaaaaagcgggcacgatattataa

SEQ ID NO: 2185 - protein, 127 aa, Bacillus cereus G9241
MFRTMMRAKLHRATVTEANLNYVGSITIDEDLMDAVNIVENEKVQIVNNNNGARLETYVIRGERGSGVVCLNGAAARLVQPGDKVIIICYGLVAEENIHKQEPKIAVLDDNNQIIEMLGAEKAGTIL

SEQ ID NO: 2186 - DNA, 390 bp, Prosthecochloris aestuarii DSM 271
  CDS (1)..(390): transl_table=11
atgagactgcatttgcttaagtcgaaaattcacaatgctatcgttaccagcggagatcttgaatacgaaggaagtataacgattgattcccagttgcttgaactggctgacatgcttcccaatgagaaagtgctttgcgtcaataacaacaatggcgaacggtttgaaacctatattatcaaaggaaaagccggctcacgcgaaattcagctcaatggcgctgccgcgcgttgcgcacttccgggcgatgagattatcatcatgacatttgcagaaatcgaagccgaaaaagcaaaggatttcaaaccgatgatcctgattgtcgatcaccagaacaatcccaaacgccgtcatctggtaggcgaggaagacacccccctgccgcactga

SEQ ID NO: 2187 - protein, 129 aa, Prosthecochloris aestuarii DSM 271
MRLHLLKSKIHNAIVTSGDLEYEGSITIDSQLLELADMLPNEKVLCVNNNNGERFETYIIKGKAGSREIQLNGAAARCALPGDEIIIMTFAEIEAEKAKDFKPMILIVDHQNNPKRRHLVGEEDTPLPH

SEQ ID NO: 2188 - DNA, 429 bp, Xylella fastidiosa Ann-1
  CDS (1)..(429): transl_table=11
atgtctgtcattggctacaatcactttccctactttgctgcgtttcccatgcaactgtccttgcttaaagctaagatccaccgtgctaccgtcagtcattctgaactcaactatgaagggtctatcgcaatagacggactactgttggaggctgccggtctctatgagtttgagaaagtccacatctggaatgtgacgaatggtgcccgtttcactacttatgcaatacgtgccgagcatggcagtggcatcatttcagtgaatgggggtgctgcgcgttacgtgcaggttggagatttggtgatcgttgctgcgtttgcacaaatgagtgaggacgaggcagcagttttcagaccgaatttggtatacgtcgatgctgccaatgcgatgactcataccaaccacagtattcctacacaggtcgcatga

SEQ ID NO: 2189 - protein, 142 aa, Xylella fastidiosa Ann-1
MSVIGYNHFPYFAAFPMQLSLLKAKIHRATVSHSELNYEGSIAIDGLLLEAAGLYEFEKVHIWNVTNGARFTTYAIRAEHGSGIISVNGGAARYVQVGDLVIVAAFAQMSEDEAAVFRPNLVYVDAANAMTHTNHSIPTQVA

SEQ ID NO: 2190 - DNA, 351 bp, Croceibacter atlanticus HTCC2559
  CDS (1)..(351): transl_table=11
atgcttgtaacagtagtaaaatctaaaattcaccgtgtgaaagtcacaggtgcagaccttaactatattggtagcattaccatagatgaagatttaatggatgctgcaaatttagttgaaggcgaaaaagttcaaattgtgaacaacaacaatggcgaacgtcttgaaacttatgcaattcctggccctagaggaagtggtgaaattactttaaatggagcagctgctcgtaaagttgcaaaaggagatattcttattcttattacttatggtatgatgaccatggatgaggctaagaactttaaaccgtctttagtgtttcctaatgaagagaataaccttctgaaataa

SEQ ID NO: 2191 - protein, 116 aa, Croceibacter atlanticus HTCC2559
MLVTVVKSKIHRVKVTGADLNYIGSITIDEDLMDAANLVEGEKVQIVNNNNGERLETYAIPGPRGSGEITLNGAAARKVAKGDILILITYGMMTMDEAKNFKPSLVFPNEENNLLK

SEQ ID NO: 2192 - DNA, 435 bp, Neptuniibacter caesariensis
  CDS (1)..(435): transl_table=11
atgctgcagacattcttgaagtgtaagctacaccgagtaaccgtaactcacgcagagctacactatgaaggttcatgtgcaattgatggtgtactgcttgataagtcaggcattcgtgaatatgaattaattcatatctacaacatcaacaacggtgaacgattcagtacttatgcaattcgtgccgaagaaaacagtggcattatctctgttaacggtgcggcagcgcacaaagcaagcaaaggtgatctgctgatcattgcttcttacgttcaactggacgagaaagaagctgacgagcatcagccaacactatgctacttcgaaaacgccaaggcagatggcggtgtaggtgcatctgatgaagaacttcatcagcgcaatgtacttaccggaatgaagcaggctatccctgttcagccaaaagatatctga

SEQ ID NO: 2193 - protein, 144 aa, Neptuniibacter caesariensis
MLQTFLKCKLHRVTVTHAELHYEGSCAIDGVLLDKSGIREYELIHIYNINNGERFSTYAIRAEENSGIISVNGAAAHKASKGDLLIIASYVQLDEKEADEHQPTLCYFENAKADGGVGASDEELHQRNVLTGMKQAIPVQPKDI

SEQ ID NO: 2194 - DNA, 351 bp, Flavobacteria bacterium BBFL7
  CDS (1)..(351): transl_table=11
atgttaattacagtagtaaaatccaaaattcaccgagttaaagtaaccggtgcagacctcaattatataggtagtatcaccattgacgaagatttaatggacggtgcaaacattgttgaaggtgaaaaagttcaaatcgttaataataataacggtaatcgattagaaacctatgccattcctggacctcgcggtagcggagaaatcacattaaatggtgctgctgcaagaaaagtatctccaggtgatgtattgattcttatctgctatgcacaaatgacgatggaagaagcgcgagcttttaagcctacacttcttttccctaatgaagaggacaacaccttatcataa

SEQ ID NO: 2195 - protein, 116 aa, Flavobacteria bacterium BBFL7
MLITVVKSKIHRVKVTGADLNYIGSITIDEDLMDGANIVEGEKVQIVNNNNGNRLETYAIPGPRGSGEITLNGAAARKVSPGDVLILICYAQMTMEEARAFKPTLLFPNEEDNTLS

SEQ ID NO: 2196 - DNA, 384 bp, delta proteobacterium MLMS-1
  CDS (1)..(384): transl_table=11
atgttaagaacgatgttgaaatcaaagatccaccgggccacggtggtggatgccgagctccactacgagggcagcctggcggtggatgccgagttgatggcggcggtggacctggcacccttcgagcgggtccacgtttacaatatgaacaacggggagcgttttgaaacctacgtgatcaaggccccggccggttcggggatgatcggcctgcgcggcgcggcggcccgcaagggacagcccggggatatggtgatcatcgtcaattacgcccattatagcgctaaggagttgagtgaccaccagccgcaaatagtcctgctcgatgaacagaaccggatcaagcgccggggattggccaccgccgctgatcccggggcttga

SEQ ID NO: 2197 - protein, 127 aa, delta proteobacterium MLMS-1
MLRTMLKSKIHRATVVDAELHYEGSLAVDAELMAAVDLAPFERVHVYNMNNGERFETYVIKAPAGSGMIGLRGAAARKGQPGDMVIIVNYAHYSAKELSDHQPQIVLLDEQNRIKRRGLATAADPGA

SEQ ID NO: 2198 - DNA, 381 bp, Oceanobacter sp. RED65
  CDS (1)..(381): transl_table=11
atgcagtccattatgcttaaagccaaattacaccaagctcgtgtaactcatgccgttcttgagtacgaaggttcatgtgccatcgacggaaatcttttggatatggccggtattcaagaatacgaacaaatccaaatctacaacctagaaaacggcgagcgcttcacgacctatgctattcgaggggaagaaggcagtaatatgattagtgtcaatggcgcagctgctcacttagcggatgttggccatcgcgttatcatctgtgcctacgcaaactactctgaagaagaactaaaaaacttcaagccgcgcatgatctacatgcaagagggcaatgaagtaagccatacttctaacgcgatccctgtacagctcgcctaa

SEQ ID NO: 2199 - protein, 126 aa, Oceanobacter sp. RED65
MQSIMLKAKLHQARVTHAVLEYEGSCAIDGNLLDMAGIQEYEQIQIYNLENGERFTTYAIRGEEGSNMISVNGAAAHLADVGHRVIICAYANYSEEELKNFKPRMIYMQEGNEVSHTSNAIPVQLA

SEQ ID NO: 2200 - DNA, 384 bp, Bacillus sp. SG-1
  CDS (1)..(384): transl_table=11
atgtttagaacgatgatgagcggtaaaatccatagagcaacagtaaccgaagcaaacctgaactatgttggaagtattacgatagaccaggatatacttgacagtgtggggatgcttccaaacgaaaaagttcaaatcgtcaataataacaatggagcaagactcgagacgtatatcattcccggtgaacgcggaagcggggtattctgcttgaatggtgctgctgcaagacttgtacagccaggggatgtgatcatcgtcatttcttacaaactggtggcggaagaaaatgcccacactcatgtaccgaaagtggcgattatggataaagataataacattgttgagatgctgggaacagaaccagaagcaactgtatactaa

SEQ ID NO: 2201 - protein, 127 aa, Bacillus sp. SG-1
MFRTMMSGKIHRATVTEANLNYVGSITIDQDILDSVGMLPNEKVQIVNNNNGARLETYIIPGERGSGVFCLNGAAARLVQPGDVIIVISYKLVAEENAHTHVPKVAIMDKDNNIVEMLGTEPEATVY

SEQ ID NO: 2202 - DNA, 408 bp, Opitutaceae bacterium TAV2
  CDS (1)..(408): transl_table=11
ttgagcgtttcatttcgttcgttcaacctcccccttgtgcatcgcacctttctcaagaccaaacttcaccgggccacgctcaccgcggcggaccccgattatgaaggttcgatctccatcgaccgcgccctctgtcgtgccgccggcatgctcgaatacgagcaagtggacgtgctcgacatcaacaacggcgcccgtttcacgacctacgtgatctacggcgaacccggccaggtgcaggtcaacggcgccgccgcccgtcttgtgcgccccggcgacctcgtgatcgtcctcgcctattgccgcctcgacgaaaaggaagtgcccgcgcacaaaccacgcgtcgtcctcatgggccccggcaacaccatcgtctcgactgaggacaagccgctcgcgcaaccgtaa

SEQ ID NO: 2203 - protein, 135 aa, Opitutaceae bacterium TAV2
MSVSFRSFNLPLVHRTFLKTKLHRATLTAADPDYEGSISIDRALCRAAGMLEYEQVDVLDINNGARFTTYVIYGEPGQVQVNGAAARLVRPGDLVIVLAYCRLDEKEVPAHKPRVVLMGPGNTIVSTEDKPLAQP

SEQ ID NO: 2204 - DNA, 399 bp, Cyanothece sp. PCC 8801
  CDS (1)..(399): transl_table=11
atgaaacgtacttttttgaacagcaaaattcaccgagccactgtcaccggttcagaactcaactatgtgggatcgatggcgattgatgctgaactgatgaaagcagccaacattctcccctttgaaagaatagaaatcgttaacgttaataacggacaacgatgggcaacctatgttattgaagctgaaccgggcagtggcattatggaggtcagaggggctgctgctagactggcggaagttggggatattgtaattatctttacctatatcgagatcgaagaacccatccctgtcccttggcatccgcgtgtcgtcatggtcaatgaaaagaatcaaatctctgaaattcgccacatagctgctgataaaccttctgaattgctcttttcactctaa

SEQ ID NO: 2205 - protein, 132 aa, Cyanothece sp. PCC 8801
MKRTFLNSKIHRATVTGSELNYVGSMAIDAELMKAANILPFERIEIVNVNNGQRWATYVIEAEPGSGIMEVRGAAARLAEVGDIVIIFTYIEIEEPIPVPWHPRVVMVNEKNQISEIRHIAADKPSELLFSL

SEQ ID NO: 2206 - DNA, 471 bp, Cyanothece sp. PCC 7424
  CDS (1)..(471): transl_table=11
atgggaaaaatacgactaatgcacgccaaattacatcgggtgcgcgtaacagaagcgaatgtaggttatattggcagtattacgatcgatccgcaattactcgatcgggtggggatattacccctagaagaggtagatatcgtgaacctcaataacggaaaacgattctcaacctatgtgtttccaggcgaagcggggacaggggaagtctgtcctaatggaggggcggccttactttgtcaaccgggggatcttttaattatttatgcttatgaagaacgcgatcgcagtgaagttttacaacagggacatcacgcccgggtcattgtagcagatgaaaacaaccagataaagcagttttttcaccaaactctgattcctacagaagaagggaaaggggtgagttttcattctgatgaaattattctcaatggtcaaccgaaaaataatccgatcctatcggaaaattaa

SEQ ID NO: 2207 - protein, 156 aa, Cyanothece sp. PCC 7424
MGKIRLMHAKLHRVRVTEANVGYIGSITIDPQLLDRVGILPLEEVDIVNLNNGKRFSTYVFPGEAGTGEVCPNGGAALLCQPGDLLIIYAYEERDRSEVLQQGHHARVIVADENNQIKQFFHQTLIPTEEGKGVSFHSDEIILNGQPKNNPILSEN

SEQ ID NO: 2208 - DNA, 342 bp, Nostoc sp
  CDS (1)..(342): transl_table=11
atgcgtattatgttgaagtcgaaaattcacagagcgacggtgacggaagccaacgttaactacatcggaagtattacagtagacaaagttctgatggaaaaggcagacatactaccgggtgaaaaggttatggtggtggacaacactaatggtaatcgtctagaaacctatgtcctagaaggtgaggaaaattccggggtaatctgtatgaacggtggctccgcccacctagtcaattcaggagaccttatcacattgctagcattcgaggtaactgacgaaatcaaggaaccgaaaaaaattatcgtggatgaaaacaacaagtttctcaagtacctgtaa

SEQ ID NO: 2209 - protein, 113 aa, Nostoc sp
MRIMLKSKIHRATVTEANVNYIGSITVDKVLMEKADILPGEKVMVVDNTNGNRLETYVLEGEENSGVICMNGGSAHLVNSGDLITLLAFEVTDEIKEPKKIIVDENNKFLKYL

SEQ ID NO: 2210 - DNA, 543 bp, Magnetospirillum gryphiswaldense
  CDS (1)..(543): transl_table=11
atgatgaaggttatccgcgccaagttccatggcatccgcgtcaccagcgccgatctgaactatcacggttcgatcacgctcgaccccgagcaatgcgccctggccggcatctatcccatggaattcgtggaaatctggaacaagagttccggcgcccgcatttccacctatgtcatcttcggccagcccggatcgcgctgctgcatcctgaacggcgccgccgcccgcacctgccagaccggtgacgaggtgatcatcgccgccgccgattacatcaaggggccggaagagctttataccctgaagccgcgcatcctcaccttcctgcccgacaaccacgtcgatcaggtgctttattacgacgtcttccaaagcgaacagcgcccctatgatttccgcatcatggacgccgataaacatacggtggacagctgccacacctggcccaatgtggatgtcaacgccatccgcaccgacctcaaggccaagggctgggccgaggccgatatcgattccttcgtcgcctcgcatttctcgctgtaa

SEQ ID NO: 2211 - protein, 180 aa, Magnetospirillum gryphiswaldense
MMKVIRAKFHGIRVTSADLNYHGSITLDPEQCALAGIYPMEFVEIWNKSSGARISTYVIFGQPGSRCCILNGAAARTCQTGDEVIIAAADYIKGPEELYTLKPRILTFLPDNHVDQVLYYDVFQSEQRPYDFRIMDADKHTVDSCHTWPNVDVNAIRTDLKAKGWAEADIDSFVASHFSL

SEQ ID NO: 2212 - DNA, 522 bp, Agrobacterium rhizogenes
  CDS (1)..(522): transl_table=11
atgggttgttgcggaatgctgcgtcgcacaaatataggatgcgaggatatcaactggaaggggcaggctgtggaaaaatacgtgggcgcgaagctgcatggcattcgagtgaccgacgcaaagctgaactaccacggctcgatcacgatcgatgcggacttctgccgggaggtcggtctgaaaccgctggaatatgtggaaatctggaacaagatgtccggagcaaggatcagcacttacgtgctctacggtgatccgggctccaggtgctgcattcttaacggtgcggccgctcgcacgtgccagcaaggcgatgagattatcatcgcgtccagcgtcttttgcgaaatcgatgacatcatcaagctcaagccacgcgtgctggtcttcggagaaaacaatgaaatcgtcgacaggatcacctacgaggtctttcgccgtgcagacaattctctcgacatggccgtgagctccgagctgcccgacaacagctacggatttccggcctccatttccggatag

SEQ ID NO: 2213 - protein, 173 aa, Agrobacterium rhizogenes
MGCCGMLRRTNIGCEDINWKGQAVEKYVGAKLHGIRVTDAKLNYHGSITIDADFCREVGLKPLEYVEIWNKMSGARISTYVLYGDPGSRCCILNGAAARTCQQGDEIIIASSVFCEIDDIIKLKPRVLVFGENNEIVDRITYEVFRRADNSLDMAVSSELPDNSYGFPASISG

SEQ ID NO: 2214 - DNA, 420 bp, Streptomyces collinus
  CDS (1)..(420): transl_table=11
gtgtaccgagagatgctcaagtcgaagatccaccgcgccaccgtgacgcaggcggacctgcactacgtcggctcgctgacgctcgactcgacgctgatggccgccgcgaacctgctgcccggggagaaggtcgacgtcgtcgacatcgacaacggcgcccggctcagcacgtacgtcatcgaggggccggccggcagcggagtggtgggcatcaacggcgcggcggcccggctgatcagtcccggcgacctggtgatcgtcatctcctacgcggcgatgaccgaggaacaggctcgcgcgtaccggccgagcgtggtcttcgtcgacgacggcaaccgaccgcagcacgtcggttccgaccccgccgaggcgccggacggcgccgacgacctgatacgcggcgacaccgtcgacgcgtga

SEQ ID NO: 2215 - protein, 139 aa, Streptomyces collinus
MYREMLKSKIHRATVTQADLHYVGSLTLDSTLMAAANLLPGEKVDVVDIDNGARLSTYVIEGPAGSGVVGINGAAARLISPGDLVIVISYAAMTEEQARAYRPSVVFVDDGNRPQHVGSDPAEAPDGADDLIRGDTVDA

SEQ ID NO: 2216 - DNA, 363 bp, Candidatus Kuenenia stuttgartiensis
  CDS (1)..(363): transl_table=11
atgctgcgagagatgtgtaaatccaaaatacatggcgctacggtaactgaaaccaatctggaatataacggaagcattaccatcgataagtctcttctcactgcggtagatattctgcattatgagcgggtgcaggttttgaatataaataatggaacaagagtagaaacatatgtcattgaaggagaacaagactccgggataatttgcttaaacggggcagctgcaagatgggcgcaacctggagatcgtgttattattattgcatattgccttatcaataacaaagacgctataggatggaaaccaaagattattttggttgacgcaaaaaataaactcatcaaaaacctgccaacatga

SEQ ID NO: 2217 - protein, 120 aa, Candidatus Kuenenia stuttgartiensis
MLREMCKSKIHGATVTETNLEYNGSITIDKSLLTAVDILHYERVQVLNINNGTRVETYVIEGEQDSGIICLNGAAARWAQPGDRVIIIAYCLINNKDAIGWKPKIILVDAKNKLIKNLPT

SEQ ID NO: 2218 - DNA, 453 bp, Rhizobium loti
  CDS (1)..(453): transl_table=11
atgcgaaaactagtcgccggcaagctgcacggcatccacgtcaccgaagcgaacctcaactaccatggttcgataacgctcgaccccgaccactgcgaggcagccgggatcctgccgatggaattcgtggagatatggaacaagaattccggtgcgcggatttcgacctatgtcatcctcggcgagcgcggttcacggtgctgcatcctcaacggagcggcggctcgcacctgtcagcccgacgacccaattatcgtctgcaactccatctacctggacgaagcgcatatcacctcgctgaagccgcgcatcgtcacgttcgaccaggataactacatactcgaccgcctgagctactccgtcgatcttgacacagacggccgttacagtttctcgatccttgatgaggcgaatgaagctttggcaattccagccttggtttccggggcgtga

SEQ ID NO: 2219 - protein, 150 aa, Rhizobium loti
MRKLVAGKLHGIHVTEANLNYHGSITLDPDHCEAAGILPMEFVEIWNKNSGARISTYVILGERGSRCCILNGAAARTCQPDDPIIVCNSIYLDEAHITSLKPRIVTFDQDNYILDRLSYSVDLDTDGRYSFSILDEANEALAIPALVSGA

SEQ ID NO: 2220 - DNA, 465 bp, Frankia sp
  CDS (1)..(465): transl_table=11
atgatctaccgcgagatgctcaaatccaaaatccatcgtgccgtcgtgcgacaggccgatcttcactatgttggttcgatcaccatcgacgccaccctgatggcggccgccggcctgtggccgggagaaaaggtcgacgtgctggacatcaccaacggtgcgcggctcagcacgtacgtcatcgaaggtgaggcggacagcgggaccatcggcatcaacggcgccgccgctcacctgatcagtccaggcgatctggtgatcatcgtcggctatgcgttgatggccgaggaggacgcccgctcttaccagcccaacgtcgtgttcgtgaacggcgacaaccaactggtgcgcatgggcaccgacccggccgaggcgtacgacggcgtcggtctggtgcgcggtgacaccaacagcccccagccctccctttccgagcaggccggagacccgcggagagcgcagtga

SEQ ID NO: 2221 - protein, 154 aa, Frankia sp
MIYREMLKSKIHRAVVRQADLHYVGSITIDATLMAAAGLWPGEKVDVLDITNGARLSTYVIEGEADSGTIGINGAAAHLISPGDLVIIVGYALMAEEDARSYQPNVVFVNGDNQLVRMGTDPAEAYDGVGLVRGDTNSPQPSLSEQAGDPRRAQ

SEQ ID NO: 2222 - DNA, 357 bp, Gloeobacter violaceus
  CDS (1)..(357): transl_table=11
atgttgcggaccgttttgttgagcaaaattcaccgcgctaccgtcaccggggcttgcctggagtacatgggttcgatcagcctggatgcgcagttgctcgcggcggcccacatcttggcgtttgaacaggtgcatgtcgtcaacctcaacaatggagcgcgtttgatcacctacgcgatcgaggcgaccgcgggctcgggggccgtcgtgctcaacggcgccgccgcccgtcttgccgcacccggcgatcgggtgatcgtgcttgcctacgggcagggcaccaccgaggaattggagaaccaccaaccccgtgtcgtgcacgtcgacaccggcaatcggatcgtcgcgtgcgtttga

SEQ ID NO: 2223 - protein, 118 aa, Gloeobacter violaceus
MLRTVLLSKIHRATVTGACLEYMGSISLDAQLLAAAHILAFEQVHVVNLNNGARLITYAIEATAGSGAVVLNGAAARLAAPGDRVIVLAYGQGTTEELENHQPRVVHVDTGNRIVACV

SEQ ID NO: 2224 - DNA, 453 bp, Rhizobium loti
  CDS (1)..(453): transl_table=11
atgcgaaaactagtcgccggcaagctgcacggcatccacgtcacagaagcgaacctcaactaccatggttcgataacgctcgaccccgaccactgcgaggcagccgggatcctgccgatggaattcgtggagatatggaacaagaattccggtgcgcggatttcgacctatgtcatcctcggcgagcgcggctcacggtgctgcatcctcaacggagcggcggctcgcacctgtcagcccgacgacccgattatcgtctgcaactccatctacctggacgaagcgcatatcacttcgctgaagccgcgcatcgtcacgttcgaccaggataaccacatactcgaccgcctgagctactccgtcgatattgacacagacggccgttacagtttcgccattcttgacgaggcggatgagcctttggtcattcctgccctggtctccggggcgtga

SEQ ID NO: 2225 - protein, 150 aa, Rhizobium loti
MRKLVAGKLHGIHVTEANLNYHGSITLDPDHCEAAGILPMEFVEIWNKNSGARISTYVILGERGSRCCILNGAAARTCQPDDPIIVCNSIYLDEAHITSLKPRIVTFDQDNHILDRLSYSVDIDTDGRYSFAILDEADEPLVIPALVSGA

SEQ ID NO: 2226 - DNA, 483 bp, Frankia sp
  CDS (1)..(483): transl_table=11
gtgttgcgcaccatgctcaccgccaagatccaccgtgccacggtcacccaggccgatctgcactacgtgggctccgtgacgatcgacgcggacctgctggccgccgccgacctgctgcctggcgagcaggtcacgatcgtcgacatcaacaacggcgcccggctggagacgtacgccatcgcgggaccggcgggaagcgggatcatcggtattaacggtgccgcggcgcgcctggtccagccgggcgacctagtgatcatcattgcgtacgggctcatggacgacgccgaggcgcgccggcacgtcccgaaggtgctgttcgtcgacgcggcaaaccggatcatcgggcacggcgacgacccggccgaaccgctccccggcgacccgtcgagcctgcgtggcgacatcccggtcgacatcccggtcgacatcccggtacccacagccgcggcggcggtccgatcggccatggctacgcagtga

SEQ ID NO: 2227 - protein, 160 aa, Frankia sp
MLRTMLTAKIHRATVTQADLHYVGSVTIDADLLAAADLLPGEQVTIVDINNGARLETYAIAGPAGSGIIGINGAAARLVQPGDLVIIIAYGLMDDAEARRHVPKVLFVDAANRIIGHGDDPAEPLPGDPSSLRGDIPVDIPVDIPVPTAAAAVRSAMATQ

SEQ ID NO: 2228 - DNA, 378 bp, Gloeobacter violaceus
  CDS (1)..(378): transl_table=11
atgctacgcaccgtactactcggcaaaatccaccgcgccactgtgactggagcctgtctggagtatgtgggttcgatcagcgtcgacagccgtttgctcgcggcggcgggtatcctgccccacgaacaggtgcacgtcgtcaacctcaacaacggcgcgcgcctggtcacctacgccatcgaggccagcgaaggttccggggcggtggtcctcaacggtgcagcggcccgcttggcagcagccggcgatcaggtgattgtccttgcctacggccagggcacggccgttgaactggagcaccaccaaccccaggtggtgtacgtcgatgctcagaaccgcatcgtctcggtccacaggagcgtcgaacacgctggttga

SEQ ID NO: 2229 - protein, 125 aa, Gloeobacter violaceus
MLRTVLLGKIHRATVTGACLEYVGSISVDSRLLAAAGILPHEQVHVVNLNNGARLVTYAIEASEGSGAVVLNGAAARLAAAGDQVIVLAYGQGTAVELEHHQPQVVYVDAQNRIVSVHRSVEHAG

SEQ ID NO: 2230 - DNA, 453 bp, Rhizobium loti
  CDS (1)..(453): transl_table=11
atgcgcaaaatagtcgccggcaagctgcacggcatccacgtcaccgaagcaaacctcgattaccatggttcgataacgctcgacccagaccactgcgaagaagcagggatcctgcccatggaattcgtggagatttggaacaagaattccggtgcgcggatttcgacctatgtcatcctcggcgagcgcggctcacgatgctgtattctaaacggagcagctgcccgcacctgccagcccggcgaccagatcattgtctgcaactccatctatctggacgaagcgcacattacctcgctgaagccgcggatcgtcacgttcgaccaggataacaacatactcgaccgcctgagctactcggtcgatctcgacccagatggccgatactgtttctccatccttgatgaggcggatgaggctttggccattcccgccctggtctctggcgcgtga

SEQ ID NO: 2231 - protein, 150 aa, Rhizobium loti
MRKIVAGKLHGIHVTEANLDYHGSITLDPDHCEEAGILPMEFVEIWNKNSGARISTYVILGERGSRCCILNGAAARTCQPGDQIIVCNSIYLDEAHITSLKPRIVTFDQDNNILDRLSYSVDLDPDGRYCFSILDEADEALAIPALVSGA

SEQ ID NO: 2232 - DNA, 381 bp, Acinetobacter sp
  CDS (1)..(381): transl_table=11
atgctatctcgattattaaaatgcaaaattcaccgtgctgtcgttacacatgccgagctccattatgaaggttcttgtgcgattgatggtgtattgatggatttggcagggattcgtgaatatgaagaaattcatgtctggaatgtgaccaatggtaaacgttttacaacttatgccattcgcggcgaagaccattcaggtattatttcagtgaatggcggtgcagcacatcaggcagaagtcggtgacttggtaattattgcgactttcggtgattttaccgaagtcgaagcaaatgcacacaaacctcgtctggtttatgcaaatccagacaatacagtcaatcataccgcaaactgcattcctgtacaggtcgcataa

SEQ ID NO: 2233 - protein, 126 aa, Acinetobacter sp
MLSRLLKCKIHRAVVTHAELHYEGSCAIDGVLMDLAGIREYEEIHVWNVTNGKRFTTYAIRGEDHSGIISVNGGAAHQAEVGDLVIIATFGDFTEVEANAHKPRLVYANPDNTVNHTANCIPVQVA

SEQ ID NO: 2234 - DNA, 381 bp, Acidovorax sp
  CDS (1)..(381): transl_table=11
atgtaccgcaccctgctcaagtccaagatccaccgtgtgaagaccacgcactgcgagttgcactacgaaggctcgtgcgccatcgacgaagacctgctggaggccgccaacatctgcgagaacgaacaggtgcacatctggaacgtggacaacggcgaacgcttcgtcacctacgccatcaagggccagcgcggcagcggcatgatctcggtgaacggatcggccgcgcgccgcgcctgcgtgggcgacctgctcatcatcgcggccttcgcccaagtggcagaagccgacgtggccgcacaccagccgcaactggtgttcgtgaacgaccagaaccgccaagtggaactgcgccaccacgtacccacgcaggcactttga

SEQ ID NO: 2235 - protein, 126 aa, Acidovorax sp
MYRTLLKSKIHRVKTTHCELHYEGSCAIDEDLLEAANICENEQVHIWNVDNGERFVTYAIKGQRGSGMISVNGSAARRACVGDLLIIAAFAQVAEADVAAHQPQLVFVNDQNRQVELRHHVPTQAL

SEQ ID NO: 2236 - DNA, 468 bp, Agrobacterium tumefaciens
  CDS (1)..(468): transl_table=11
ttgatacgcatcgtcagagccgagctgcacggcatcaccgtaacgggagccgatctcgattatcacggatccatcacgctggatcccgagcattgtgacctcgccgggatcagaccgctggaatttgtcgacatctggaacaagcagagcggcgccagaatttcgacctatgtgattttcggcgaagccggatcgaaatgctgcatcctgaacggcgctgcggcgcgtacctgccagcgtggcgatcaggtcatcatatgctcgtcgtcttacgttgaggaaacggcgctttatgacaccgctccgatggtgctgacgtttacgccgaaaaacgatgtgaaggacgttctgcgttatcgcgtcaaggaaacggcgcgccgccctttcgatttctttatcgaaaccctgccgcgcgcagaaaactccgatgtggacgacggtagcgctgcagatcgcgccattgcctga

SEQ ID NO: 2237 - protein, 155 aa, Agrobacterium tumefaciens
MIRIVRAELHGITVTGADLDYHGSITLDPEHCDLAGIRPLEFVDIWNKQSGARISTYVIFGEAGSKCCILNGAAARTCQRGDQVIICSSSYVEETALYDTAPMVLTFTPKNDVKDVLRYRVKETARRPFDFFIETLPRAENSDVDDGSAADRAIA

SEQ ID NO: 2238 - DNA, 381 bp, Alkalilimnicola ehrlichei
  CDS (1)..(381): transl_table=11
atgcaattgaacatgctgaaatgcaagctgcaccaggcctgcgtgacggatacagagctggactacgaggggtcctgcgccattgatgccaacctcatggatgccgccggtatccgcgagttcgagcagatccatgtctacaatctggcgaacggtgcgcggttcaccacctatgccatccgtggcgaggccggttcgcgcatgatctccatgaacggtgcggcggcgcatctgtgcagtgagggtgaccgtatcatcatctgctgctacgccaacgtggacgagtcggagctggaccgccacgagcccgcgctggtctactgcgacggcgataaccggattacccaccagcgcaacggcatcccgctgcaggtggcctga

SEQ ID NO: 2239 - protein, 126 aa, Alkalilimnicola ehrlichei
MQLNMLKCKLHQACVTDTELDYEGSCAIDANLMDAAGIREFEQIHVYNLANGARFTTYAIRGEAGSRMISMNGAAAHLCSEGDRIIICCYANVDESELDRHEPALVYCDGDNRITHQRNGIPLQVA

SEQ ID NO: 2240 - DNA, 384 bp, Anabaena sp
  CDS (1)..(384): transl_table=11
atgcaacgtaccctccttttggcaaaaattcataattgcaccctcactggggcaaacatcaattatgtgggtagtatcagcatcgatcaaatcttattagataaatctggcatcttgccttatgaacaagtgcaagtagtgaataatgccaatggacaacgtttcattacttatgcgatcccggctccagcgcattcgggaattattgaactaaatggggctgccgcccgtctaggcattataggcgatcgcgtgattataatgacttacgggcagtttacatctgaggagttaaaaagttacactccaacggtagtcattgtagatgaaaaaaaccgacctttagaagtgcggcgctacgatgacctgctcagtcaggtctaa

SEQ ID NO: 2241 - protein, 127 aa, Anabaena sp
MQRTLLLAKIHNCTLTGANINYVGSISIDQILLDKSGILPYEQVQVVNNANGQRFITYAIPAPAHSGIIELNGAAARLGIIGDRVIIMTYGQFTSEELKSYTPTVVIVDEKNRPLEVRRYDDLLSQV

SEQ ID NO: 2242 - DNA, 375 bp, Aquifex aeolicus
  CDS (1)..(375): transl_table=11
atgctgagggaaatgctcaagtccaaaatacacaggttaacggtaacggatgcggatcttcattacgagggaagtctgtccttagacgagtatttaatggagcttgcggacttaaagcccttcgaaaagatagacgtttacaacattaacaacggtgcgaggtttcagacttacgttatccccgccccgaggtattcgggagaggttaagttaaacggtgcggccgcaagactcgggcacaaaggcgaccttataataatcgcctcttacgcccagtacacggaggaggagctagagaactacgctcccaagctcattttcgttaacgagaagaaccagcctgttgaagtaaaagaaagtacggaggtgaagtga

SEQ ID NO: 2243 - protein, 124 aa, Aquifex aeolicus
MLREMLKSKIHRLTVTDADLHYEGSLSLDEYLMELADLKPFEKIDVYNINNGARFQTYVIPAPRYSGEVKLNGAAARLGHKGDLIIIASYAQYTEEELENYAPKLIFVNEKNQPVEVKESTEVK

SEQ ID NO: 2244 - DNA, 384 bp, Bacillus cereus
  CDS (1)..(384): transl_table=11
atgtttcgcacaatgatgagagcgaagttacatcgcgcaacagtaacagaagcaaatttaaattatgtaggtagtattacaattgatgaagatttaatggatgcagtaaatattgtagaaaacgaaaaagtccaaattgtaaataataataatggtgctcgcttagagacatatgttattaaaggagaacgtggtagcggtgttgtttgtttgaatggtgcagctgcaaggcttgtacaaccaggagataaagttattattatttgctacggtctagtggcagaagaaaatattcataaacaagagccgaaaattgcagtattagacgataataatcaaattattgaaatgttaggtgctgaaaaagcaggaacgatactataa

SEQ ID NO: 2245 - protein, 127 aa, Bacillus cereus
MFRTMMRAKLHRATVTEANLNYVGSITIDEDLMDAVNIVENEKVQIVNNNNGARLETYVIKGERGSGVVCLNGAAARLVQPGDKVIIICYGLVAEENIHKQEPKIAVLDDNNQIIEMLGAEKAGTIL

SEQ ID NO: 2246 - DNA, 384 bp, Bacillus cereus
  CDS (1)..(384): transl_table=11
atgtttcgcacaatgatgagagcaaagttacatcgtgcaactgtaacggaggcaaatttaaattatgtaggtagtattacaattgatgaagacttaatggatgcagtaaatattgtagaaaacgaaaaagtccaaattgtaaataataataatggtgctcgcttagagacatacgttattaaaggggaacgcggtagtggtgttgtttgtttaaacggtgctgcggcaagacttgtacaaccaggggacaaagtaattattatttgttatgggctagttacggaagaagagattcatacacaagaaccaaaaattgcagtactagacgataataatcaaattattgaaatgttaggtgctgaaaaagcgggtacgatattataa

SEQ ID NO: 2247 - protein, 127 aa, Bacillus cereus
MFRTMMRAKLHRATVTEANLNYVGSITIDEDLMDAVNIVENEKVQIVNNNNGARLETYVIKGERGSGVVCLNGAAARLVQPGDKVIIICYGLVTEEEIHTQEPKIAVLDDNNQIIEMLGAEKAGTIL

SEQ ID NO: 2248 - DNA, 354 bp, Bacteroides fragilis
  CDS (1)..(354): transl_table=11
atgatgattgaagtgttgaagtcaaaaattcattgtgcccgtgtcacggaagccaatctgaattatatgggtagtattacgattgatgagaatctattggatgcagctaatatgattgccggtgagaaggtgtacattgccgacaataataacggcgagcgttttgagacctacattatcaaaggtgaacgcggatcaggtaaaatctgcttgaatggcgctgcggcccgtaaagtacaaccggatgatattgtgatcattatgtcgtatgcgttgatggattttgaggaagctaagtcgtttaagccgactgttatttttccggatccggctacaaatagtgtagtgaagtaa

SEQ ID NO: 2249 - protein, 117 aa, Bacteroides fragilis
MMIEVLKSKIHCARVTEANLNYMGSITIDENLLDAANMIAGEKVYIADNNNGERFETYIIKGERGSGKICLNGAAARKVQPDDIVIIMSYALMDFEEAKSFKPTVIFPDPATNSVVK

SEQ ID NO: 2250 - DNA, 384 bp, Bacillus halodurans
  CDS (1)..(384): transl_table=11
atgtttcgtacaatgatgaaagcgaagcttcacagagccagggtgacagaatcaaacttaaactacgttggcagcattacaatcgatgaagatattatggatgctgtggacatagttgaaaacgaaaaagttcaaattgtgaacaataacaatggggctagatttgagacatatgtcataaaaggaccacggggaagcggtgtattttgcttaaatggggcagcggcaaggctcgtacaagaaggtgatgtaattattgtcatttcttatgctctcgtggctgaagagaacgtgaaggagcaccagccaaaagtggcagttctgaatgaatcaaaccaaatcgttgaaatgcttggtacagagccagcttctaccgtattataa

SEQ ID NO: 2251 - protein, 127 aa, Bacillus halodurans
MFRTMMKAKLHRARVTESNLNYVGSITIDEDIMDAVDIVENEKVQIVNNNNGARFETYVIKGPRGSGVFCLNGAAARLVQEGDVIIVISYALVAEENVKEHQPKVAVLNESNQIVEMLGTEPASTVL

SEQ ID NO: 2252 - DNA, 384 bp, Bacillus licheniformis
  CDS (1)..(384): transl_table=11
atgtaccgtacgttaatgagcgcaaaacttcacagagcgagagtgacggaagccaatttgaactacgtcggcagcgtgacaattgatgaagatttgctggatgctgtcggaatgatggcaaatgaaaaagtgcaaattgtgaataataataacggggcccggctggaaacgtacattattcccggtgaaaggggcagcggcgtcgtttgtttaaacggagctgccgcccgccttgtccaggttggagatgtcgtcatcatcgtgtcttatgcgatgatgtctgaagaggaagcaaagacccataagccgaaggttgccgttttgaacgagagaaacgaaatcgaggaaatgctgggtcaggagccagcccgtaccattctgtag

SEQ ID NO: 2253 - protein, 127 aa, Bacillus licheniformis
MYRTLMSAKLHRARVTEANLNYVGSVTIDEDLLDAVGMMANEKVQIVNNNNGARLETYIIPGERGSGVVCLNGAAARLVQVGDVVIIVSYAMMSEEEAKTHKPKVAVLNERNEIEEMLGQEPARTIL

SEQ ID NO: 2254 - DNA, 384 bp, Bacillus clausii
  CDS (1)..(384): transl_table=11
atgtatcggacaatgatgaaagcaaaattgcatcgtgcacgggtgactgaatcaaatttaaactatgtgggcagcatcaccatagatgaagacctcatggatgcagttgatttgcttgaaaatgaaaaagtacaaattgtgaacaacaacaatggtgaacggtttgaaacgtatgtcattaaagggccaagaggagaagggggcatctgtttaaatggtgccgccgcgcgaaaagtccaacctggagacgtcgtcatcattttgtcttatgcgatgatggaaaacgcagaagccctagcccatcagccgaaagtggcgattttggatgagaacaaccgaattgtggaaatgttaggcacagagccagcttctaccgtccgttag

SEQ ID NO: 2255 - protein, 127 aa, Bacillus clausii
MYRTMMKAKLHRARVTESNLNYVGSITIDEDLMDAVDLLENEKVQIVNNNNGERFETYVIKGPRGEGGICLNGAAARKVQPGDVVIILSYAMMENAEALAHQPKVAILDENNRIVEMLGTEPASTVR

SEQ ID NO: 2256 - DNA, 384 bp, Bacillus subtilis
  CDS (1)..(384): transl_table=11
atgtatcgaacaatgatgagcggcaaacttcacagggcaactgttacggaagcaaacctgaactatgtgggaagcattacaattgatgaagatctcattgatgctgtgggaatgcttcctaatgaaaaagtacaaattgtgaataataataatggagcacgtcttgaaacgtatattattcctggtaaacggggaagcggcgtcatatgcttaaacggtgcagccgcacgccttgtgcaggaaggagataaggtcattattatttcctacaaaatgatgtctgatcaagaagcggcaagccatgagccgaaagtggctgttctgaatgatcaaaacaaaattgaacaaatgctggggaacgaaccagcccgtacaattttgtag

SEQ ID NO: 2257 - protein, 127 aa, Bacillus subtilis
MYRTMMSGKLHRATVTEANLNYVGSITIDEDLIDAVGMLPNEKVQIVNNNNGARLETYIIPGKRGSGVICLNGAAARLVQEGDKVIIISYKMMSDQEAASHEPKVAVLNDQNKIEQMLGNEPARTIL

SEQ ID NO: 2258 - DNA, 354 bp, Bacteroides thetaiotaomicron
  CDS (1)..(354): transl_table=11
atgatgattgaagtgttgaagtcgaaaattcattgtgcacgtgtcacagaggcaaatttgaactacatgggtagtatcacgattgacgaagacctgctggatgctgccaacatgattccgggagaaaaagtgtacatcgctgataacaacaatggcgaacgctttgaaacctacattatcaaaggtgaacgcggttccggtaagatttgtctgaacggtgctgccgcccgcaaggtgcaaccggatgatattgtgattatcatgtcgtacgcattgatggattttgaggaagcgaagtcgtttaaaccgaccgtgattttcccggaccctgcgacgaatagcgtagtgaagtaa

SEQ ID NO: 2259 - protein, 117 aa, Bacteroides thetaiotaomicron
MMIEVLKSKIHCARVTEANLNYMGSITIDEDLLDAANMIPGEKVYIADNNNGERFETYIIKGERGSGKICLNGAAARKVQPDDIVIIMSYALMDFEEAKSFKPTVIFPDPATNSVVK

SEQ ID NO: 2260 - DNA, 375 bp, Bdellovibrio bacteriovorus
  CDS (1)..(375): transl_table=11
atgaatatctcattgcttagaaccaaaattcaccgcgccaccgttaccggagccgatctgaactatgagggctccgtcagcatctgtccggatctgatcaaagcctctggtttgctgatgaatgaacgtgtggatatttacaactgcaacaacggcgcccgcttttccacgtacgtgatcaagggtaaaaaaggtgaaatctgcctgaatggggctgctgcccgtcacgtgcaaaaaggcgatctggtgatcatctgttcttactgtggtctgagcatggatgaagccaagaaacatgagccgacagtggtttttgtaaacgcaaaaaacaaagtcactgaaaagcgcaaagaagaccgcaagaacaacaagtag

SEQ ID NO: 2261 - protein, 124 aa, Bdellovibrio bacteriovorus
MNISLLRTKIHRATVTGADLNYEGSVSICPDLIKASGLLMNERVDIYNCNNGARFSTYVIKGKKGEICLNGAAARHVQKGDLVIICSYCGLSMDEAKKHEPTVVFVNAKNKVTEKRKEDRKNNK

SEQ ID NO: 2262 - DNA, 369 bp, Bordetella bronchiseptica
  CDS (1)..(369): transl_table=11
atgcaacgcatcatgctgcgggcgaagctgcaccgcgttacggtcaccgaggccgatctgcactacgagggatcgtgcggcatcgacgaagacctgctggacgccgccggtatgcgcgagttcgaacggatcgagctgtacaacgtcaccaacggcgaacgcttcgacacctacatcatcaaggcggcccgcggcagcggcgcgatctcgctcaacggcgccgcggcgcggcgcgcgcaggtcggcgacctgctgatcatctgcacctacgggccgatgtcggaagagcagtcggccacgcacaagccgcaggtcgtgctggtcgacgacgccaaccgcgtcaaggaaatccgtaaattcccggcctga

SEQ ID NO: 2263 - protein, 122 aa, Bordetella bronchiseptica
MQRIMLRAKLHRVTVTEADLHYEGSCGIDEDLLDAAGMREFERIELYNVTNGERFDTYIIKAARGSGAISLNGAAARRAQVGDLLIICTYGPMSEEQSATHKPQVVLVDDANRVKEIRKFPA

SEQ ID NO: 2264 - DNA, 369 bp, Bordetella pertussis
  CDS (1)..(369): transl_table=11
atgcaacgcatcatgctgcgggcgaagctgcaccgcgttacggtcaccgaggccgatctgcactacgagggatcgtgcggcatcgacgaagacctgctggacgccgccggcatgcgcgagttcgaacggatcgagctctacaacgtcaccaacggcgaacgcttcgacacctacatcatcaaggcggcccgcggcagcggcgcgatctcgctcaacggtgccgcggcgcggcgcgcgcaggtcggcgacctgctgatcatctgcacctacggcccgatgtcggaagagcagtcggccgcgcacaagccgcaggtcgtgctggtcgacgacgccaaccgcgtcaaggaaatccgtaaattcccggcctga

SEQ ID NO: 2265 - protein, 122 aa, Bordetella pertussis
MQRIMLRAKLHRVTVTEADLHYEGSCGIDEDLLDAAGMREFERIELYNVTNGERFDTYIIKAARGSGAISLNGAAARRAQVGDLLIICTYGPMSEEQSAAHKPQVVLVDDANRVKEIRKFPA

SEQ ID NO: 2266 - DNA, 354 bp, Bradyrhizobium japonicum
  CDS (1)..(354): transl_table=11
atgcagataactttgatgaagggcaaaatccatcgcgcctcagtgaccgaagctgatctgcactatgaaggctcgatctcgatagatcgtacgctcctggaggcagcaggaatggtgatcaacgagcgcgtcgaaatctacaatgtagaaacagggacgcgctttgccacctacgtgatcgaggcgccgccgatgtctggtacgatgagcctgaacggtgcggctgcccgactggtgatgcccggagacaagatcattatcgttgcatatgcctcattcgatgaggccgaagcaaagaagttcaagccacacgttgtgcgtgtggaccgagataatcgcatcctggcaagttga

SEQ ID NO: 2267 - protein, 117 aa, Bradyrhizobium japonicum
MQITLMKGKIHRASVTEADLHYEGSISIDRTLLEAAGMVINERVEIYNVETGTRFATYVIEAPPMSGTMSLNGAAARLVMPGDKIIIVAYASFDEAEAKKFKPHVVRVDRDNRILAS

SEQ ID NO: 2268 - DNA, 387 bp, Burkholderia sp
  CDS (1)..(387): transl_table=11
atgcagcgccacatgctcaaatcgaagatccaccgcgcggccgtcacgcactgcgagctgcactacgaaggctcgtgcgcgatcgacgaagatctgctcgaagcatcgggcatcatcgagaacgaacggatcgacatctggaacatcaacaacggcgagcgcttctcgacgtacgcgatcaagggtgagcgcggcagcgggatgatctcgctgaatggctcggccgcgcgtcgcgcgcaactcggcgacctcgtgatcatcgcggcattcgcaatggtcgacgaagccgagctgcaggccggctggaagccgaagctcgtgttcatggacgacggcaacaagatcaagggccaccgcgatcacgtgccgacgcagaactggacctga

SEQ ID NO: 2269 - protein, 128 aa, Burkholderia sp
MQRHMLKSKIHRAAVTHCELHYEGSCAIDEDLLEASGIIENERIDIWNINNGERFSTYAIKGERGSGMISLNGSAARRAQLGDLVIIAAFAMVDEAELQAGWKPKLVFMDDGNKIKGHRDHVPTQNWT

SEQ ID NO: 2270 - DNA, 387 bp, Burkholderia thailandensis
  CDS (1)..(387): transl_table=11
atgcagcgccacatgctgaaatcgaagatccaccgcgcggcggtcacgcactgcgagctgcattacgaaggctcgtgcgcgatcgacgaggatctgctcgaagcggcgaacatcgtcgagaacgagcggatcgacatctggaacatcaacaacggcgaacgcttctcgacgtacgcgatcaagggcgagcgcggcagcgggatgatttcgctgaacggctcggccgcgcgccgcgcgcaattgggcgacctcgtgatcatcgccgcgttcgcgatgatcgacgaggaagagctgaaggcgggctggaagcccgatctcgtgttcgtcgacgaaggcaacaagatcaagggcagccgcgatcacgtgccgacgcagaactggacgtaa

SEQ ID NO: 2271 - protein, 128 aa, Burkholderia thailandensis
MQRHMLKSKIHRAAVTHCELHYEGSCAIDEDLLEAANIVENERIDIWNINNGERFSTYAIKGERGSGMISLNGSAARRAQLGDLVIIAAFAMIDEEELKAGWKPDLVFVDEGNKIKGSRDHVPTQNWT

SEQ ID NO: 2272 - DNA, 387 bp, Burkholderia vietnamiensis
  CDS (1)..(387): transl_table=11
atgcagcgccacatgctcaaatcgaagatccaccgcgcggccgtcacgcactgcgagctgcactacgaaggctcgtgcgcgatcgacgaagacctgctcgaagcggcgggcctgatcgaaaacgaacggatcgacatctggaacatcaacaacggcgagcgcttctcgacctacgcgatcaagggcgagcgcggcagcgggatgatttcgctgaacggttcggccgcgcgtcgcgcgcaactcggcgacctcgtgatcatcgcggcgttcgcgatggtcgatgaagccgagctgcaggccggctggaagcccaagctcgtgttcatcgacgaaggcaacaagatcaagggccaccgcgatcacgtcccgacacagagctggacctga

SEQ ID NO: 2273 - protein, 128 aa, Burkholderia vietnamiensis
MQRHMLKSKIHRAAVTHCELHYEGSCAIDEDLLEAAGLIENERIDIWNINNGERFSTYAIKGERGSGMISLNGSAARRAQLGDLVIIAAFAMVDEAELQAGWKPKLVFIDEGNKIKGHRDHVPTQSWT

SEQ ID NO: 2274 - DNA, 387 bp, Burkholderia xenovorans
  CDS (1)..(387): transl_table=11
atgcaacgcaacatgctgaagtcgaagatccaccgcgtcgcggtcacgcactgcgaactgcactacgaaggttcgtgcgcgatcgacgaagatttgctggaagcggcgaacatcgtcgaaaacgagcggatcgacatctggaacatcaacaacggcgagcgtttctcgacctacgcgatcaagggtgaacgcggcagcggcatgatctcgctgaacggatcggcggcgcggcgcgcgcagctgggcgacctggtgattatcgcggcgttcgcggtggtggacgaagcggagctgaaggccggctggaagccggacctcgtgttcgtggacgacaacaacaggatcaagggcagccgcgatcacgtgccgacgcagaactggacctga

SEQ ID NO: 2275 - protein, 128 aa, Burkholderia xenovorans
MQRNMLKSKIHRVAVTHCELHYEGSCAIDEDLLEAANIVENERIDIWNINNGERFSTYAIKGERGSGMISLNGSAARRAQLGDLVIIAAFAVVDEAELKAGWKPDLVFVDDNNRIKGSRDHVPTQNWT

SEQ ID NO: 2276 - DNA, 384 bp, Carboxydothermus hydrogenoformans
  CDS (1)..(384): transl_table=11
gtgtttttgaccatgatgaaggggaaaattcaccgggctaccgttaccgaagctaatttaaattatgtgggtagcattaccattgatgaagagctgttagatgcttccggaattttacccaacgaaaaagtacaggtggtaaacataaataacggggctcggctggaaacttatactatacccggaccgaggggtagcggaattataagtttaaacggggcggcggccagactttgccagataggggataaggttattattattgcgtatgcgttaatggaagaaaaagaagcaaaacaatggcaacccaaagtagtttttgttgatgaatacaataaaatagttaaaataaaagaaaaagagattcatggccaaacagaatag

SEQ ID NO: 2277 - protein, 127 aa, Carboxydothermus hydrogenoformans
MFLTMMKGKIHRATVTEANLNYVGSITIDEELLDASGILPNEKVQVVNINNGARLETYTIPGPRGSGIISLNGAAARLCQIGDKVIIIAYALMEEKEAKQWQPKVVFVDEYNKIVKIKEKEIHGQTE

SEQ ID NO: 2278 - DNA, 357 bp, Caulobacter crescentus
  CDS (1)..(357): transl_table=11
atgctgctcaccatgctgaaggccaagctgcaccgcgccacggtgacccaggccgacctcgattacgaaggctcgatcgcgatcgaccgcgacctgctggacgcctcgggcatcctgcccaacgagcaggtcgacgtgctcaacatcaccaacggcgcgcgtttcaccacctacgccatcgaggccccgcgtggctcgaaggtcatcggcgtcaacggcgcggccgcccgtctggtgcagaagaacgatctggtgatcgtcgtcacctactgccagatgcccgccgaggaggcgcgcaactacgcccccaccgtcgtcctgctggacgagggcaacctgatcaagaaggcggcctga

SEQ ID NO: 2279 - protein, 118 aa, Caulobacter crescentus
MLLTMLKAKLHRATVTQADLDYEGSIAIDRDLLDASGILPNEQVDVLNITNGARFTTYAIEAPRGSKVIGVNGAAARLVQKNDLVIVVTYCQMPAEEARNYAPTVVLLDEGNLIKKAA

SEQ ID NO: 2280 - DNA, 381 bp, Chromobacterium violaceum
  CDS (1)..(381): transl_table=11
atgcaacgcaatatgctcaagtccaagctccaccgcgtgaccaccacgcatgccgagctgcattacatcggctcctgcgccatcgatgagaacctgctggaagcggcggacattctcgagtacgaagaggtgcagatctggaatgtcaccaacggcgagcgtttcgccacttacgcgatcaaggccgagcgcgggtccggcgtgatttcggtcaacggttccgccgcgcgccgcgccgcgccgggcgacctgctgatcatcgcctcgttcgcgcagtacgaggatgcggaactgaagggccactcgcccaagctggtgttcgtcgacggcgacaaccgcctgaccgaggtgaagggcgccacgccgacccagccggcctga

SEQ ID NO: 2281 - protein, 126 aa, Chromobacterium violaceum
MQRNMLKSKLHRVTTTHAELHYIGSCAIDENLLEAADILEYEEVQIWNVTNGERFATYAIKAERGSGVISVNGSAARRAAPGDLLIIASFAQYEDAELKGHSPKLVFVDGDNRLTEVKGATPTQPA

SEQ ID NO: 2282 - DNA, 384 bp, Clostridium acetobutylicum
  CDS (1)..(384): transl_table=11
atgcatttaaatatgttaaaatctaaaattcatagagcaacagttgttcaagctgatttaaattatgttggaagcataactattgatagaaaccttatggataaagccaatatacttgaatacgaaaaggtagagatagcaaatataaataatggtgctagatttgaaacctacgtaatagctggagaagctggaagtggaataatatgccttaatggagccgctgcaagatgtgcccaagctggcgataaagtaataattatgtgctattgcagcttaacacctgaagaagcatcagaacatagaccaaaagtcgtatttgtaaatgatgacaatagtatatctaatgttacagagtacgaaaagcacgggacaattggctaa

SEQ ID NO: 2283 - protein, 127 aa, Clostridium acetobutylicum
MHLNMLKSKIHRATVVQADLNYVGSITIDRNLMDKANILEYEKVEIANINNGARFETYVIAGEAGSGIICLNGAAARCAQAGDKVIIMCYCSLTPEEASEHRPKVVFVNDDNSISNVTEYEKHGTIG

SEQ ID NO: 2284 - DNA, 381 bp, Clostridium thermocellum
  CDS (1)..(381): transl_table=11
atgtttataacattgatgaaatccaagatccatagggccacggtgaccgaagcgaacttggactatgtgggcagcattacgattgatgaagatttaatggaagctgctgatataatggaaaatgagaaggttcaagtggttgacaataacaacggaaacaggtttgaaacttatgtcattaaaggagaaagaggcagcggaatgatttgccttaacggagcggccgcaaggcttgttcatccgggggatttgataattataatttcctatggaatatttgacagggaagaagctaaaacttttaatccgaaagtagttttcgtggatgaaaagaataaaataattaatattaaaagcgaagagaagcatggggaaatatga

SEQ ID NO: 2285 - protein, 126 aa, Clostridium thermocellum
MFITLMKSKIHRATVTEANLDYVGSITIDEDLMEAADIMENEKVQVVDNNNGNRFETYVIKGERGSGMICLNGAAARLVHPGDLIIIISYGIFDREEAKTFNPKVVFVDEKNKIINIKSEEKHGEI

SEQ ID NO: 2286 - DNA, 411 bp, Corynebacterium efficiens
  CDS (1)..(411): transl_table=11
atgctgcgcaccatcctcggtagcaagattcaccgcgccaccgtcacccaggccgaccttgactatgtcggctccatcaccatcgacgccgacctggtcaatgccgccggcctcatcgagggcgagaaggtcgccgtcgtggacatcaccaacggcgcccgcattgagacctatgtgatcaccggcgatgccggaaccggcagcatctgcatcaatggtgccgccgcccatctgatcaacccgggtgatctggtcatcatcatgagctatctgcaggccaccgatgccgaggcccgcgcctaccagcccaatatcgtccacgtggatgccgacaaccggatcgtcgccctgggcaacgacgccggcgagcccatcccgggttccagcttgctgtcctcgcgctccctctag

SEQ ID NO: 2287 - protein, 136 aa, Corynebacterium efficiens
MLRTILGSKIHRATVTQADLDYVGSITIDADLVNAAGLIEGEKVAVVDITNGARIETYVITGDAGTGSICINGAAAHLINPGDLVIIMSYLQATDAEARAYQPNIVHVDADNRIVALGNDAGEPIPGSSLLSSRSL

SEQ ID NO: 2288 - DNA, 336 bp, Coxiella burnetii
  CDS (1)..(336): transl_table=11
atgctaatttccgttttaaaatcgaaaatttcttatgctactattactcaaaaagaacttttttacataggaagcattaccatcgatgaggcgattatggaaagagctcaactcacgattaatgaacaagtgcagatagttaatctcaacaatggcgaacgcctagaaacctatgtcatcccgggcaaacggaacagtaatatcatcgccttaaacggtcctgccgctcgaaaaggtgaaatcggcgaccaactttttattttatcctatgccttaattgatccaacacaggaaaaacttgaccctgttttggttgatttaaaactgaatgactaa

SEQ ID NO: 2289 - protein, 111 aa, Coxiella burnetii
MLISVLKSKISYATITQKELFYIGSITIDEAIMERAQLTINEQVQIVNLNNGERLETYVIPGKRNSNIIALNGPAARKGEIGDQLFILSYALIDPTQEKLDPVLVDLKLND

SEQ ID NO: 2290 - DNA, 348 bp, Cytophaga hutchinsonii
  CDS (1)..(348): transl_table=11
atgaatattgaagtactaaaatcgaaaatccatcgcgttaaggttacacaggcggaattacattatgttggaagcattacaattgacgaagcgttgatggaggcgtccaatattattgaaaacgaaaaagttcagatcgttaacatcaacaacggtgaacgttttgaaacatacgtgatcaaaggcgaaaaaaacaccggtgtaatttgtttaaacggcccggcagcccgtaaggtagctgtgggtgatatcgtaatcgttatcgcatacgcgtccatggattttgaagaggcaaaaaaatggaaacctaccttgatttttccggatgccaataacagacttatttaa

SEQ ID NO: 2291 - protein, 115 aa, Cytophaga hutchinsonii
MNIEVLKSKIHRVKVTQAELHYVGSITIDEALMEASNIIENEKVQIVNINNGERFETYVIKGEKNTGVICLNGPAARKVAVGDIVIVIAYASMDFEEAKKWKPTLIFPDANNRLI

SEQ ID NO: 2292 - DNA, 384 bp, Dechloromonas aromatica
  CDS (1)..(384): transl_table=11
atgcagagaacaatgctgaaatccaagttgcaccgtgttacggcgacccatgccgacctgcactacgagggttcctgcgccattgatgaagacctgctcgaagcggcaaacatcaaggaatacgaacagatcgacatctggaacgtaaataacggcgagcgtttcacgacctacgccatccgcgccgaacgtggctcgggtgtcatttccgtcaatggctcggcggcccgtcgtgccgccccgggcgatatcctgatcatcgccaccttcgccgtctataacgaggtggaactggccaaacatgagccggatctgatctatgtcgatacgcaaaatcgcatcgtccgtcgcggccacaagattccagtacaagccgctgcctga

SEQ ID NO: 2293 - protein, 127 aa, Dechloromonas aromatica
MQRTMLKSKLHRVTATHADLHYEGSCAIDEDLLEAANIKEYEQIDIWNVNNGERFTTYAIRAERGSGVISVNGSAARRAAPGDILIIATFAVYNEVELAKHEPDLIYVDTQNRIVRRGHKIPVQAAA

SEQ ID NO: 2294 - DNA, 375 bp, Dehalococcoides ethenogenes
  CDS (1)..(375): transl_table=11
atgctcaaaagcaaaatccaccgggctaccattaccgatgcctgcatagactatgaaggcagtattaccattgataaaaaccttatgcaggcagccaacttgctgccctacgaacaggtgcatgtggtaaatgtaaataacggaacgcggctggagacctatgtcatagagggcccggctggcagcgggcagatatgcttaaacggggcagctgcccgtatgggaatgaagggtgataaagtaattatactgggctacagtctgattaccgaagaagatacccttacccaccagccgaatctggtctatgtagacagtcttaaccgcataaccaaagttaaaaacggggttgccagccggaatttagaggtataa

SEQ ID NO: 2295 - protein, 124 aa, Dehalococcoides ethenogenes
MLKSKIHRATITDACIDYEGSITIDKNLMQAANLLPYEQVHVVNVNNGTRLETYVIEGPAGSGQICLNGAAARMGMKGDKVIILGYSLITEEDTLTHQPNLVYVDSLNRITKVKNGVASRNLEV

SEQ ID NO: 2296 - DNA, 375 bp, Dehalococcoides sp
  CDS (1)..(375): transl_table=11
atgctgaaaagcaaaatccaccgggctaccatcacggatgcctgcatagactatgaaggcagtattaccattgataaaaaccttatgcaggcagccaacttgctgccttacgaacaggtacatgtggtaaatgtaaataacgggacacggttggaaacctatgttatagagggttcagccggcagtggccagatatgcctaaacggggcggccgcccgcatgggcatgaagggtgacaagataatcatactgggctatagcctgataaccgaagaagatactcttattcaccagccaaatctggtgtatgtagatgcgcttaaccgtataaccaaagtaaaaaacggggttgccaatcagggtttagaggtataa

SEQ ID NO: 2297 - protein, 124 aa, Dehalococcoides sp
MLKSKIHRATITDACIDYEGSITIDKNLMQAANLLPYEQVHVVNVNNGTRLETYVIEGSAGSGQICLNGAAARMGMKGDKIIILGYSLITEEDTLIHQPNLVYVDALNRITKVKNGVANQGLEV

SEQ ID NO: 2298 - DNA, 363 bp, Deinococcus radiodurans
  CDS (1)..(363): transl_table=11
gtggaacgcatcatgttcagggccaagattcaccgcgcgaccgtaacccaggcagatctggattacgtgggcagcgtgaccatcgatcaggatttgctcgacgctgccgatatcctggtcaacgaaaaggtggacatctggaacatcaccaacggcaaccgcctgcacacttatgccctgagcggcccgcgcggcagcggcgtgatcggcatcaacggcgcggcggcccacctgatgcgccccggcgacatggtgatcatcgcggcgttcggcaacttctccgaggaagaggcacggacgctggaaccgaaggtggttttggtggacgctaagaaccgtctgctggagctgcaacccgtctaa

SEQ ID NO: 2299 - protein, 120 aa, Deinococcus radiodurans
MERIMFRAKIHRATVTQADLDYVGSVTIDQDLLDAADILVNEKVDIWNITNGNRLHTYALSGPRGSGVIGINGAAAHLMRPGDMVIIAAFGNFSEEEARTLEPKVVLVDAKNRLLELQPV

SEQ ID NO: 2300 - DNA, 384 bp, Desulfitobacterium hafniense
  CDS (1)..(384): transl_table=11
atgttccgaacgatgatgaagtccaagattcaccgggccacagttactgaagccaaccttaaatatgtaggaagcattaccattgatgaagaactcttagaggtggcggatatccttcctaatgaaaaagtacaggtcgttaataacaataacggagcccgtttggagacttacgttattcctggaaagcggggggagcgtactgtatgtctcaatggagctgcggcccgcttagttcaagtgggggatgaagtgattattattgcctatggaattttcaccgatgaggcagcccgaacctatgaaccaaaggtcatctttgttgatgaagggaataacccggtgaagatagcccatgaggagatacacgggcagcagtcttag

SEQ ID NO: 2301 - protein, 127 aa, Desulfitobacterium hafniense
MFRTMMKSKIHRATVTEANLKYVGSITIDEELLEVADILPNEKVQVVNNNNGARLETYVIPGKRGERTVCLNGAAARLVQVGDEVIIIAYGIFTDEAARTYEPKVIFVDEGNNPVKIAHEEIHGQQS

SEQ ID NO: 2302 - DNA, 465 bp, Desulfotalea psychrophila; identical to SEQ ID NO: 2176
  CDS (106)..(465): transl_table=11

SEQ ID NO: 2303 - protein, 119 aa, Desulfotalea psychrophila
MLHQMMKAKLHRATISAADLNYEGSLTIDTDLLKASGIRPYERIYVYNVNNGERFETYAIEGEAGSGAIQLNGAAARKGMIGDFLIIVTYALCSDDEVDEHRPNVVLLNPDNTIKEIVK

SEQ ID NO: 2304 - DNA, 396 bp, Enterococcus faecalis
  CDS (1)..(396): transl_table=11
atgaaagttacaatgttaaaaggaaaaatacatagagctaaagttgaacaagctgagttagattatgtaggaagtattactgttgatatggatttattagaagcagcaggaatatatgaatatgaaaaagtacaaatagttgatgttaataatggaaatagatttgaaacttatacaatagctggagagagaggaacagggatgatttgcttgaatggagctgcagctagatgtgtatcaactggagataaaataattttaatggcatattgtgaattaaatgaaaatgaggttaaggatcatagacctaaggttgtttttgtcgatgataataataaagttgaaagagtaacatcatatgaaaaacatggaaggttatcagatataattctttag

SEQ ID NO: 2305 - protein, 131 aa, Enterococcus faecalis
MKVTMLKGKIHRAKVEQAELDYVGSITVDMDLLEAAGIYEYEKVQIVDVNNGNRFETYTIAGERGTGMICLNGAAARCVSTGDKIILMAYCELNENEVKDHRPKVVFVDDNNKVERVTSYEKHGRLSDIIL

SEQ ID NO: 2306 - DNA, 381 bp, Erwinia carotovora subsp
  CDS (1)..(381): transl_table=11
atgatacgtaccatgctgcaaggcaagctgcaccgggtgaaagtaactcaggctgacttgcattatgaaggctcttgcgccatcgatcaggattttatggatgccgcaggcattctggaatacgaagcgattgatatctacaacgttgataacggtcagcgtttctctacctacgccattgcaggcgaaagaggctcacgcattatctccgtgaacggcgccgccgctcgctgcgcctgcgtaggcgacaagctgattatctgttcctacgtgcagatgtcggacgaacaagccagaagccacagccctaaggttgcctatttctctggcgagaatgagctacaacgtcaggccaaagccattccggtccaggtcgcctga

SEQ ID NO: 2307 - protein, 126 aa, Erwinia carotovora subsp
MIRTMLQGKLHRVKVTQADLHYEGSCAIDQDFMDAAGILEYEAIDIYNVDNGQRFSTYAIAGERGSRIISVNGAAARCACVGDKLIICSYVQMSDEQARSHSPKVAYFSGENELQRQAKAIPVQVA

SEQ ID NO: 2308 - DNA, 384 bp, Geobacillus kaustophilus
  CDS (1)..(384): transl_table=11
atgtttcgcacgctcatgaacgccaaaattcaccgcgctcgtgtaacagaggccaatctcgattacgtcggcagcatcacgatcgatgaagatattttggatgccgtcggcattgtggcgaatgaaaaagtacaggtagtgaacaatcataatggagcccgttttgaaacatacgtcatccccggtgagcgcggcagcggcgtcttttgcctaaacggcgccgccgcccgccttgtgcaaaaaggggacgttattatcgtcatctcatatgtgctcgttccagaggaaaaaatcgccgcccatcgaccgaaaatcgcgattatggacgaaaacaaccgaattgtgcagctcatcgccgaagagccggcgcatacggttttatga

SEQ ID NO: 2309 - protein, 127 aa, Geobacillus kaustophilus
MFRTLMNAKIHRARVTEANLDYVGSITIDEDILDAVGIVANEKVQVVNNHNGARFETYVIPGERGSGVFCLNGAAARLVQKGDVIIVISYVLVPEEKIAAHRPKIAIMDENNRIVQLIAEEPAHTVL

SEQ ID NO: 2310 - DNA, 513 bp, Helicobacter hepaticus; identical to SEQ ID NO: 2152
  CDS (151)..(513): transl_table=11

SEQ ID NO: 2311 - protein, 120 aa, Helicobacter hepaticus
MQFEMLYSKIHRAKVSDANLNYVGSITIDKTLAQSANLLAGMKVEIVNINNGERFSTYVIYGDKKGEICLNGAAARKVQIGDIIIIIAYATYTHNELEHYKPTIVQVNESNQILSITNEV

SEQ ID NO: 2312 - DNA, 354 bp, Helicobacter pylori J99
  CDS (1)..(354): transl_table=11
atgacttttgaaatgctttatagtaaaatccatagggcgactatcacagacgctaatctcaactatataggctcgatcaccatagatgaggatttagccaagctcgctaagctcagagagggcatgaaagtggaaatcgtggatgtcaataacggcgaacgcttcagcacctatgtgattttagggaaaaaaaggggcaaaatttgtgtcaatggtgcagcagccagaaaggtggccataggcgatgtggtgatcattttagcttatgcgagcatgaatgaagatgaaatcaatacgcacaagccaagcattgtgctagtggatgaaaaaaacgaaattttagaaaagggttag

SEQ ID NO: 2313 - protein, 117 aa, Helicobacter pylori J99
MTFEMLYSKIHRATITDANLNYIGSITIDEDLAKLAKLREGMKVEIVDVNNGERFSTYVILGKKRGKICVNGAAARKVAIGDVVIILAYASMNEDEINTHKPSIVLVDEKNEILEKG

SEQ ID NO: 2314 - DNA, 354 bp, Helicobacter pylori
  CDS (1)..(354): transl_table=11
atgacttttgaaatgctttatagtaaaatccatagggcgactatcacggacgctaatctcaactatataggctcgatcaccatagatgaggatttagccaagctcgccaagctcagagagggcatgaaagtagaaatcgtggatgtcaataatggcgaacgcttcagcacctatgtgattttagggaaaaaaaggggcgaaatttgcgtcaatggtgcagcagccagaaaggtggccataggcgatgtagtgatcattttagcttatgcgagcatgaatgaagatgaaatcaacgcacacaagccgagcatcgtgctagtggatgaaaaaaacgaaattttagaaaagggttag

SEQ ID NO: 2315 - protein, 117 aa, Helicobacter pylori
MTFEMLYSKIHRATITDANLNYIGSITIDEDLAKLAKLREGMKVEIVDVNNGERFSTYVILGKKRGEICVNGAAARKVAIGDVVIILAYASMNEDEINAHKPSIVLVDEKNEILEKG

SEQ ID NO: 2316 - DNA, 360 bp, Herminiimonas arsenicoxydans
  CDS (1)..(360): transl_table=11
atgcaacgcatcatgctcagagcaaaaattcatcgcgccaaggtgacgcaagcggacctgcattacgagggttcatgcgggatcgacgcggatttgctggaagccgcagatatcaaggttggtgaaaagattgagttgtacaacatcaataacggcgagcgtttttctacctatgccatccaaggcgcaagaggtagtggcgagatttcgctgaacggcgccgccgcacgctgtgctcatctcggtgatttgatgatcatctgtacctatggtccgatgactgatgaagaaattgcgacctacacgcctaagattgtttttgtcgatgaagacaatcatttcgctggaatgaaaaaataa

SEQ ID NO: 2317 - protein, 119 aa, Herminiimonas arsenicoxydans
MQRIMLRAKIHRAKVTQADLHYEGSCGIDADLLEAADIKVGEKIELYNINNGERFSTYAIQGARGSGEISLNGAAARCAHLGDLMIICTYGPMTDEEIATYTPKIVFVDEDNHFAGMKK

SEQ ID NO: 2318 - DNA, 357 bp, Hyphomonas neptunium
  CDS (1)..(357): transl_table=11
ttgatcctcagcatgctcaaagccaagcttcacggcgcaactgtcacccagtgtgacctgcattatgaaggctctgtgtccatcgaccaggacctgctcgatgcgtccggtatcctgccgcatgagaaggtggatatctggaacgtgaccaatggcgcgcgcatccagacctatgctctggaagccccccgtggctcccgcaccattggcgtcaatggcgcggcggcccgccacttcgccgtgggcgacacggtgatcatcgcggcgttctgcggcgtggaagcggaaaaagcccgccagcatgcgccgaccgtggtgctgctcggcgaaggcaacgagatcaagcgcgcctcctga

SEQ ID NO: 2319 - protein, 118 aa, Hyphomonas neptunium
MILSMLKAKLHGATVTQCDLHYEGSVSIDQDLLDASGILPHEKVDIWNVTNGARIQTYALEAPRGSRTIGVNGAAARHFAVGDTVIIAAFCGVEAEKARQHAPTVVLLGEGNEIKRAS

SEQ ID NO: 2320 - DNA, 393 bp, Lactobacillus plantarum
  CDS (1)..(393): transl_table=11
atgttaattgatatgttaaaaggtaagattcaccgggcaaccgttacacaggccgatttggaatatgttggtagtattactattgatgaaacattgatggaagcaagtggaatcttggaatacgaaaaagttcaaattgcggatgtaaataatggcgcgcggtttgaaacttatgtgattgcggggccaagggactcaggcgtgatttgcttgaacggtgctactgctcgatgtgcatcagttggcgataaggttattattatgaattatgcgcaatttgagccagaagaggccaagcatgcaaagccgtatgttgtacttgtcgacgatgaaaatagattgacgaagcgagtacgttatgaaaagcatggattattagcagaagaactatga

SEQ ID NO: 2321 - protein, 130 aa, Lactobacillus plantarum
MLIDMLKGKIHRATVTQADLEYVGSITIDETLMEASGILEYEKVQIADVNNGARFETYVIAGPRDSGVICLNGATARCASVGDKVIIMNYAQFEPEEAKHAKPYVVLVDDENRLTKRVRYEKHGLLAEEL

SEQ ID NO: 2322 - DNA, 402 bp, Legionella pneumophila subsp
  CDS (1)..(402): transl_table=11
atggcttatagaaaaatgcttaaatcaaaaattcatcgtgcttgcgtcacacaggcagatctggattatgaagggagtatcactatttcaccagagcttttaaaagtggcaaacatattgccatatgaagcggttaatgtctggaatatcactgccggaacccgatttgaaacttatgccattacaggtgaaaagggttcaacggatatctgtgtcaatggagcggcagctcatttggtaacccccggtgatttggttattatcgcctcttttacgcaaattctggaagaggattgcgcagcacatgaacccactgttgtttttgttgatcaattcaatcgtctgaaagaaatccgacctgaaagaatcggtgttaaaagtagaattcctaacccggcttga

SEQ ID NO: 2323 - protein, 133 aa, Legionella pneumophila subsp
MAYRKMLKSKIHRACVTQADLDYEGSITISPELLKVANILPYEAVNVWNITAGTRFETYAITGEKGSTDICVNGAAAHLVTPGDLVIIASFTQILEEDCAAHEPTVVFVDQFNRLKEIRPERIGVKSRIPNPA

SEQ ID NO: 2324 - DNA, 351 bp, Leptospira interrogans serogroup Icterohaemorrhagiae serovar
  CDS (1)..(351): transl_table=11
atgcagataaccgtaatgaaaggtaaaatccaccgggccacggtaacagacgcggatttaaactatgaaggaagtctgaccgtggatatggatcttgtagatgctgcgggaatgcgagtatacgagaaggtttccgtagtgaatgtaaacaatggagcccgttttgaaacctatatcatagagggaaaaagaggttccggagaaatctgtttgaatggggcagccgcaagactaggaatgaagggtgataagatcatcatcatcacttatgctcaagtagaagaaaaagaacttgcttcagactacactcctaaagtagttcacgttgacgaaaaaaatcgaaaacgttaa

SEQ ID NO: 2325 - protein, 116 aa, Leptospira interrogans serogroup Icterohaemorrhagiae serovar
MQITVMKGKIHRATVTDADLNYEGSLTVDMDLVDAAGMRVYEKVSVVNVNNGARFETYIIEGKRGSGEICLNGAAARLGMKGDKIIIITYAQVEEKELASDYTPKVVHVDEKNRKR

SEQ ID NO: 2326 - DNA, 351 bp, Leptospira interrogans
  CDS (1)..(351): transl_table=11
atgcagataaccgtaatgaaaggtaaaatccaccgggccacggtaacagacgcggatttaaactatgaaggaagtctgaccgtggatatggatcttgtagatgctgcgggaatgcgagtatacgagaaggtttccgtagtgaacgtaaacaatggagcccgttttgaaacctatatcatagagggaaaaagaggttccggagaaatctgtttgaatggggcagccgcaagactaggaatgaagggtgataagatcatcatcatcacttatgctcaagtagaagaacaagaacttgcttcagactacactcctaaagtagttcacgttgacgaaaaaaatcgaaaacgttaa

SEQ ID NO: 2327 - protein, 116 aa, Leptospira interrogans
MQITVMKGKIHRATVTDADLNYEGSLTVDMDLVDAAGMRVYEKVSVVNVNNGARFETYIIEGKRGSGEICLNGAAARLGMKGDKIIIITYAQVEEQELASDYTPKVVHVDEKNRKR

SEQ ID NO: 2328 - DNA, 384 bp, Listeria innocua
  CDS (1)..(384): transl_table=11
atgtttagaactatgatgaatggcaaaattcaccgagcgactgtaacagaagccaatctgaattatgtaggaagtattacgattgactctgctattttagaagcggtggatatgcttccaaacgaaaaagttcaaattgtaaataataataatggcgcaagaattgaaacgtatattatcccaggtgagccaggtagtggtgtgatttgcctaaatggagctgctgcaagacacgtccaagttggcgatgtggttattatcatgagctacgggatgtttacgtcggaagaagcaaaaacacatgaacccaaaattgtggtattagacgaaaaaaatcatattgaaatgattcttccagaagaaaaagcgcatacgactttataa

SEQ ID NO: 2329 - protein, 127 aa, Listeria innocua
MFRTMMNGKIHRATVTEANLNYVGSITIDSAILEAVDMLPNEKVQIVNNNNGARIETYIIPGEPGSGVICLNGAAARHVQVGDVVIIMSYGMFTSEEAKTHEPKIVVLDEKNHIEMILPEEKAHTTL

SEQ ID NO: 2330 - DNA, 384 bp, Listeria monocytogenes serotype 4b
  CDS (1)..(384): transl_table=11
atgtttagaacaatgatgaatggcaaaattcaccgagcgactgtaacagaagccaatctaaattatgttggaagtattacgattgattctgctattttagaagcagtggatatgcttccaaacgaaaaagttcaaattgtaaataacaataacggtgctagaattgaaacctatattatcccaggtgagccaggaagtggtgtgatttgtctaaacggagctgcagctagacacgtccaagttggcgacgtagtaattattatgagttacggaatgtttactgccgaagaagcgaaaacacatgaacccaaaatagttgttttagatgaaaaaaatcatattgaaatgattcttccagaagaaaaagcgcatacgactttataa

SEQ ID NO: 2331 - protein, 127 aa, Listeria monocytogenes serotype 4b
MFRTMMNGKIHRATVTEANLNYVGSITIDSAILEAVDMLPNEKVQIVNNNNGARIETYIIPGEPGSGVICLNGAAARHVQVGDVVIIMSYGMFTAEEAKTHEPKIVVLDEKNHIEMILPEEKAHTTL

SEQ ID NO: 2332 - DNA, 384 bp, Listeria monocytogenes
  CDS (1)..(384): transl_table=11
atgtttagaacaatgatgaatggcaaaattcaccgagcgactgtaacagaagccaatctgaattatgttggaagtattacgattgattctgctattttagaagcggtggatatgcttccaaacgaaaaagttcaaattgtaaataataataatggtgctagaattgaaacctatattatcccaggtgagccgggaagcggtgtgatttgtctaaacggagctgcagctagacacgtccaagtcggcgatgtagtaattattatgagttacggaatgtttactgacgaagaagcgaaaacacatgaacccaaaatagtcgttttagatgaaaaaaatcatattgaaatgattcttccagaagaaaaagcacatacgactttataa

SEQ ID NO: 2333 - protein, 127 aa, Listeria monocytogenes
MFRTMMNGKIHRATVTEANLNYVGSITIDSAILEAVDMLPNEKVQIVNNNNGARIETYIIPGEPGSGVICLNGAAARHVQVGDVVIIMSYGMFTDEEAKTHEPKIVVLDEKNHIEMILPEEKAHTTL

SEQ ID NO: 2334 - DNA, 381 bp, Methylococcus capsulatus
  CDS (1)..(381): transl_table=11
atgcaaaccacgatgttgaaagccaagttgcaccgagcgcgtgtgacccattcggagctcgaatacgaaggctcctgcgccatcgacggctcactgctcgactgtgccggcattcgcgaatacgagcaaatccagatctacaacgtcaacaacggggaacgcttcaccacctatgccatccgcgccgccgacggatccggcaccatctcagtcaacggcgcagccgcccgcctcgccgccgtgggcgatatcgtcatcatctgcgcctacgtcggtttgaaccaggccgaactggccgcctaccggccgaacctcgtctacgtcgacgaaaacaaccaaatcacccggaccagccacgccatcccggttcaggcggcctga

SEQ ID NO: 2335 - protein, 126 aa, Methylococcus capsulatus
MQTTMLKAKLHRARVTHSELEYEGSCAIDGSLLDCAGIREYEQIQIYNVNNGERFTTYAIRAADGSGTISVNGAAARLAAVGDIVIICAYVGLNQAELAAYRPNLVYVDENNQITRTSHAIPVQAA

SEQ ID NO: 2336 - DNA, 381 bp, Methylobacillus flagellatus
  CDS (1)..(381): transl_table=11
atgcaaagaactatgctcaaatccaagctgcaccgcgtgcatgtaacgcactcggagctggactacgagggctcctgcgccatcgatgaagcgttgctcgaagcagccgacatcaaggaatatcagcagatcgacatctacaatgtcaacaacggcgagcgcttcaccacctatgcgatccgcgccgagcgcaattccggcattatctcggtaaacggtgctgctgcgcgcaaagccagccctggtgacctgctgatcattgccacttacgccagctatactgaagcagaactggcccaattcaaaccccagctggtgtatgtcgatgccgataaccgcatcaaaaaccaacgccagcacatccccgtacaagctgcctaa

SEQ ID NO: 2337 - protein, 126 aa, Methylobacillus flagellatus
MQRTMLKSKLHRVHVTHSELDYEGSCAIDEALLEAADIKEYQQIDIYNVNNGERFTTYAIRAERNSGIISVNGAAARKASPGDLLIIATYASYTEAELAQFKPQLVYVDADNRIKNQRQHIPVQAA

SEQ ID NO: 2338 - DNA, 387 bp, Moorella thermoacetica
  CDS (1)..(387): transl_table=11
atgtggcgcatcatgatgaaaagcaaactccaccgggcgacggtgaccgctgcggacctgaactacatcggcagtataaccattgacagcgacttgatggccgccgccgatattttacccaatgagaaagtccaggtagtcgataacaataacggcgcccgcctggagacctacgctatccccggcccggccggcagcggggtaatctgcgccaacggtgccgctgcccggctggtgcaacccggcgacattataattattattgcctatggcatctttgacgaccgggaggccaggacctaccagccccgggttatttttctggatgcccggaataaaataaccgccgtcaaaaaaggagagcaaccgggccaggtctgggtataa

SEQ ID NO: 2339 - protein, 128 aa, Moorella thermoacetica
MWRIMMKSKLHRATVTAADLNYIGSITIDSDLMAAADILPNEKVQVVDNNNGARLETYAIPGPAGSGVICANGAAARLVQPGDIIIIIAYGIFDDREARTYQPRVIFLDARNKITAVKKGEQPGQVWV

SEQ ID NO: 2340 - DNA, 432 bp, Mycobacterium avium
  CDS (1)..(432): transl_table=11
atgttacggacgatgctcaagtcgaagatccatcgggccaccgtcacgcaggccgacctgcactacgtgggctcggtgaccatcgacgccgacctgatggacgccgccgacctgctcgagggcgaacaggtgaccatcgtcgacatcgacaacggcgcccggctggtcacctacgcgatcaccggtgagcgtggcagcggggtgatcgggatcaacggtgccgcagcgcatctggtccacccgggcgatctggtcatcctgatcgcctacgggaccatggaggaggccgaggcgcgggcgtatcagccgcggatcgtcttcgtcgacgccgacaacaagccggtcgacctcggccacgatccggcattcgtgccggacttcgagatagcaggggcggccgagttgctcgatccccggatcgttgcgcggtag

SEQ ID NO: 2341 - protein, 143 aa, Mycobacterium avium
MLRTMLKSKIHRATVTQADLHYVGSVTIDADLMDAADLLEGEQVTIVDIDNGARLVTYAITGERGSGVIGINGAAAHLVHPGDLVILIAYGTMEEAEARAYQPRIVFVDADNKPVDLGHDPAFVPDFEIAGAAELLDPRIVAR

SEQ ID NO: 2342 - DNA, 420 bp, Mycobacterium bovis
  CDS (1)..(420): transl_table=11
atgttacggacgatgctgaagtcgaagatccaccgcgccacggtgacctgcgccgacctgcactacgtcggctcggtgaccatcgatgccgacttgatggacgccgccgacctgctggaaggcgaacaggtaaccatcgtcgatatcgacaacggtgctcgactggtcacctacgcgatcaccggcgaacgcggcagtggtgtgattggcatcaacggtgccgccgcgcacttggtgcatccgggggatctggtgattctgattgcgtacgcgacgatggacgacgcccgggcccgcacataccagccgcggatcgtgtttgtcgacgcttacaacaaaccgatcgacatgggccacgatccggcatttgtgcccgaaaacgcgggcgagctgctagacccccggctcggtgtgggatag

SEQ ID NO: 2343 - protein, 139 aa, Mycobacterium bovis
MLRTMLKSKIHRATVTCADLHYVGSVTIDADLMDAADLLEGEQVTIVDIDNGARLVTYAITGERGSGVIGINGAAAHLVHPGDLVILIAYATMDDARARTYQPRIVFVDAYNKPIDMGHDPAFVPENAGELLDPRLGVG

SEQ ID NO: 2344 - DNA, 429 bp, Mycobacterium leprae
  CDS (1)..(429): transl_table=11
atgttacggacgatgctaaagtctaagattcatcgcgccaccgtcacgcaggcttatctgcactatgtcggttcggtgaccatcgatgccgatttgatgggcgctgcggacctgcttgagggtgaacaggttaccattgttgacatcaataacggtgcccggctcgtcacctacgcaattgctggcgagcgtggcaccggtgtgattggaatcaatggcgccgcagcgcatcttgttcatccgggcgatctggtaatcctgatctcctatgggaccatggaagatgccgaggcgcacgcttatcagccgcggattgtgttcgtcgacgccgataacaaaccgatcgatctgggccacgatccaggctccgtgcccttggacatatctgtcgcggctgaactatttgatccccggatcggtgcgcggtaa

SEQ ID NO: 2345 - protein, 142 aa, Mycobacterium leprae
MLRTMLKSKIHRATVTQAYLHYVGSVTIDADLMGAADLLEGEQVTIVDINNGARLVTYAIAGERGTGVIGINGAAAHLVHPGDLVILISYGTMEDAEAHAYQPRIVFVDADNKPIDLGHDPGSVPLDISVAAELFDPRIGAR

SEQ ID NO: 2346 - DNA, 411 bp, Mycobacterium smegmatis
  CDS (1)..(411): transl_table=11
atgcaaagagtgctgctggcaagcaagattcaccgcgcaacagtgactcaagcggacctgcactacgtcgggtccataacgatcgacgcggaactgatggcagccgcggacatcgtcgagggtgaacaggtgcacgtcgtggacatcacgagcggggcacgactggtcacctacgccatcaccggcaccccggggtcgggtgtgatcggcatcaacggcgctgccgcccatctcatttcgccaggaaacctggtgatcatcatgtcgttcgtacatctcgacgaagccgaacgtgccgatcaccgggcaaacgtcgtgcacgtcgacgccgacaaccacatcgtcaccatcggatccgacccggcccagccggtaccaggggcggccgatcagctggtgggacgggtgtga

SEQ ID NO: 2347 - protein, 136 aa, Mycobacterium smegmatis
MQRVLLASKIHRATVTQADLHYVGSITIDAELMAAADIVEGEQVHVVDITSGARLVTYAITGTPGSGVIGINGAAAHLISPGNLVIIMSFVHLDEAERADHRANVVHVDADNHIVTIGSDPAQPVPGAADQLVGRV

SEQ ID NO: 2348 - DNA, 408 bp, Mycobacterium sp
  CDS (1)..(408): transl_table=11
atgcttcgcacgatgctgaagtcgaagatccaccgagccaccgtcacgcagtccgatctgcactacgtcggctcggtcaccatcgacgccgatctgatggacgccgccgacctcatcgagggtgagcaggtcacgatcgtcgacatcgacaacggcaaccgcctggtgacctacgcgatcaccggcgcccgcggcagcggggtgatcgggatcaacggcgccgcagcacatctcgtgcatcccggcgatctggtcatcctgatcgcctacggcaccatggaagacgccgaggcgcgcgcatatcagccgcgggtggtcttcgtcgacgccgacaaccggcaggtccatctcggcgccgacccggcgatggtgccggacaccgccgtcgacctgatgtctccgcgttga

SEQ ID NO: 2349 - protein, 135 aa, Mycobacterium sp
MLRTMLKSKIHRATVTQSDLHYVGSVTIDADLMDAADLIEGEQVTIVDIDNGNRLVTYAITGARGSGVIGINGAAAHLVHPGDLVILIAYGTMEDAEARAYQPRVVFVDADNRQVHLGADPAMVPDTAVDLMSPR

SEQ ID NO: 2350 - DNA, 393 bp, Myxococcus xanthus
  CDS (1)..(393): transl_table=11
atgcgccgcatcctcttcaagtcgaaaatccaccgcgcgaccgtgacccaggctgacctggattacgaagggtccgtcaccatcgaccgcgacctgcttcgcgccgccgacatcgtggagaacgaaaaggtcgcggtctggaacatcacccagggcacgcgcctggagacctacgcgctggaaggtgaggccggcagcggcgtcatctgcatcaacggcgcggcggcgcacctgaacaagccgggcgacctggtcatcctggccaccttcgcggaagtggaggaagccgaggtggcgaactggaagcccaccgtggtgttcgtggacaaggacaaccgcgtggtgcccgggcagacgaaggagattccgggcccgcagcgccgctcggcctga

SEQ ID NO: 2351 - protein, 130 aa, Myxococcus xanthus
MRRILFKSKIHRATVTQADLDYEGSVTIDRDLLRAADIVENEKVAVWNITQGTRLETYALEGEAGSGVICINGAAAHLNKPGDLVILATFAEVEEAEVANWKPTVVFVDKDNRVVPGQTKEIPGPQRRSA

SEQ ID NO: 2352 - DNA, 384 bp, Neisseria gonorrhoeae
  CDS (1)..(384): transl_table=11
atgttccgtactatacttggcggaaaaatccaccgcgccaccgtaaccgaagccgatttaaactacgtcggcagcattaccgtcgatcaagacctgttagacgcggcaggcatctgccccaacgaaaaagtcgccatcgtcaacaacaacaacggcgaacgttttgaaacctataccattgcagggaaacgcggcagcggcgtgatttgcctgaacggtgctgcagccaggctggtacagaaaggcgacatcgtcatcattatgtcttatatccaactttccgaaccggaaatcgccgcacacgaacccaaagtcgtcttagtggacggaaacaataaaatccgcgacatcatctcctacgagccgccgcacaccgtactgtaa

SEQ ID NO: 2353 - protein, 127 aa, Neisseria gonorrhoeae
MFRTILGGKIHRATVTEADLNYVGSITVDQDLLDAAGICPNEKVAIVNNNNGERFETYTIAGKRGSGVICLNGAAARLVQKGDIVIIMSYIQLSEPEIAAHEPKVVLVDGNNKIRDIISYEPPHTVL

SEQ ID NO: 2354 - DNA, 384 bp, Neisseria meningitidis serogroup A
  CDS (1)..(384): transl_table=11
atgttccgtactatgcttggcggaaaaatccaccgcgccaccgtaaccgaagccgatttaaactatgtcggcagcattaccgtcgatcaagacctgttggacgcggcaggcatctaccccaacgaaaaagtcgccatcgtcaacaacaacaacggcgaacgttttgaaacctataccattgcagggaaacgcggcagcggcgtgatttgtctgaacggtgctgcggcaaggctggtgcagaaaagcgatatcgtcatcatcatgtcttacgtccaactctccgaacccgaaatcgccgcacacgaacccaaagtcgtcttggtagacggaaacaacaaaatccgcgacatcatctcctatgagccgccgcacaccgtgctgtaa

SEQ ID NO: 2355 - protein, 127 aa, Neisseria meningitidis serogroup A
MFRTMLGGKIHRATVTEADLNYVGSITVDQDLLDAAGIYPNEKVAIVNNNNGERFETYTIAGKRGSGVICLNGAAARLVQKSDIVIIMSYVQLSEPEIAAHEPKVVLVDGNNKIRDIISYEPPHTVL

SEQ ID NO: 2356 - DNA, 384 bp, Neisseria meningitidis serogroup B
  CDS (1)..(384): transl_table=11
atgttccgtaccatgcttggcggaaaaatccaccgcgccaccgttaccgaagccgatttgaactatgtcggcagtattaccgtcgatcaagacctgttagacgcggcaggcatctaccccaacgaaaaagtcgccattgtcaacaacaacaacggcgaacgttttgaaacctataccattgcagggaaacgcggcagcggcgtgatttgtctgaacggtgctgcagccaggctggtacagaaaggcgatatcgtcatcatcatgtcttacgtccaactctccgaacccgaaatcgccgcacacgaacccaaagtcgtcttggtagacggaaacaacaaaatccgcgacatcatctcctacgagccgccgcacaccgtgctgtaa

SEQ ID NO: 2357 - protein, 127 aa, Neisseria meningitidis serogroup B
MFRTMLGGKIHRATVTEADLNYVGSITVDQDLLDAAGIYPNEKVAIVNNNNGERFETYTIAGKRGSGVICLNGAAARLVQKGDIVIIMSYVQLSEPEIAAHEPKVVLVDGNNKIRDIISYEPPHTVL

SEQ ID NO: 2358 - DNA, 384 bp, Neisseria meningitidis serogroup C
  CDS (1)..(384): transl_table=11
atgttccgtactatgcttggcggaaaaatccaccgcgccaccgttaccgaagccgatttgaactacgtcggcagtattaccgtcgatcaagacctgttagacgcagcaggcatctaccccaacgaaaaagtcgccatcgtcaacaacaacaacggcgaacgttttgaaacctataccatttcaggcaaacgcggcagcggcgtggtctgcctgaacggggcggcggccaggctggtacagaaaggcgatatcgtcatcatcatgtcttacgtccaactctccgaacccgaaatcgccgcacacgaacccaaagtcgtcttggtagacggaaacaacaaaatccgcgacatcatctcctacgagccgccgcacaccgtgctgtaa

SEQ ID NO: 2359 - protein, 127 aa, Neisseria meningitidis serogroup C
MFRTMLGGKIHRATVTEADLNYVGSITVDQDLLDAAGIYPNEKVAIVNNNNGERFETYTISGKRGSGVVCLNGAAARLVQKGDIVIIMSYVQLSEPEIAAHEPKVVLVDGNNKIRDIISYEPPHTVL

SEQ ID NO: 2360 - DNA, 420 bp, Nocardia farcinica
  CDS (1)..(420): transl_table=11
atgttgcgcaccatgatgaagtccaagatccaccgggccaccgtgacccacgccgatctgcactacgtcggctcggtcaccgtggaccaggatctgctcgacgccgccgatctgctcgagggcgagcaggtctgcatcgtcgacatcgacaacggcgcccggctggagacgtacgtgatcgccggtgagcgcggctcgggcgtgatcggcatcaacggcgccgccgcccacctggtgcaccccggcgacctggtgatcctgatcgcctacgggatgatgaacgagcaggagatcgccgagtacgacccgaaggtcgtcttcgtcgacgagcgcaaccgcccggtcgaactcggctccgacccggcgcatgcgcccgagggttcggggctgacctcgccgcgttcgctcaccttcgcctga

SEQ ID NO: 2361 - protein, 139 aa, Nocardia farcinica
MLRTMMKSKIHRATVTHADLHYVGSVTVDQDLLDAADLLEGEQVCIVDIDNGARLETYVIAGERGSGVIGINGAAAHLVHPGDLVILIAYGMMNEQEIAEYDPKVVFVDERNRPVELGSDPAHAPEGSGLTSPRSLTFA

SEQ ID NO: 2362 - DNA, 384 bp, Oceanobacillus iheyensis
  CDS (1)..(384): transl_table=11
atgtatcgtacgatgatgaaaagtaaaattcatcgggcagtagtaacagaggcaaatttaaattacgtaggcagtattactatagatgaagctatcctaaatcaagttgatatcttacctaatgaaaaggtccaaattgtgaataataataatggagctcgattagagacctatgttatcgccggagaaagaaatagtggaacaatctgtttaaatggagcagctgcaagacttgtacaaccaggagatactgtaattatcattgcatatgcgcttttatcacaagaagaacttcagagttttcatccgaaggtagcaattatggacgaatccaaccgtgttaaacaaatgatagaacaagaacctccgatgacggttttgtaa

SEQ ID NO: 2363 - protein, 127 aa, Oceanobacillus iheyensis
MYRTMMKSKIHRAVVTEANLNYVGSITIDEAILNQVDILPNEKVQIVNNNNGARLETYVIAGERNSGTICLNGAAARLVQPGDTVIIIAYALLSQEELQSFHPKVAIMDESNRVKQMIEQEPPMTVL

SEQ ID NO: 2364 - DNA, 381 bp, Photorhabdus luminescens subsp
  CDS (1)..(381): transl_table=11
atgttgcgtacgatgctacaggggaaattgcaccgggtgaaagtcactcaggcagatttgcattatgaaggttcctgtgcaatggatcagaatttcatggatgcagccggtattctggaatatgaagctattgatatctataacgtggataacggtgagcgcttttccacttatgctattgccgctgaacgtggttctagaataatttcagttaacggagcagccgcacgccgtgctgcggtaggtgataagctaattatttgctcatatgtacaaatccctaacgaagatgcccgtcaccataagcctaatatcgcttacttcgatggtgataatattatgaggcggatcgccaaagccgtgccggttcaagtggcttaa

SEQ ID NO: 2365 - protein, 126 aa, Photorhabdus luminescens subsp
MLRTMLQGKLHRVKVTQADLHYEGSCAMDQNFMDAAGILEYEAIDIYNVDNGERFSTYAIAAERGSRIISVNGAAARRAAVGDKLIICSYVQIPNEDARHHKPNIAYFDGDNIMRRIAKAVPVQVA

SEQ ID NO: 2366 - DNA, 357 bp, Porphyromonas gingivalis
  CDS (1)..(357): transl_table=11
atgtacgtcgaagtattaaaatccaaaatacaccgcgtaaccattacggaggccaacctcaactatgtgggtagcatcaccatcgatgaagatctgatggatgctgccaacatcatcgccggagagaaagtccaaatcgtggacaacaacaacggagcacgcttggagacctataccataccgggcaaaagaggttcgggggtaatctgtctcaatggagcagctgcccgcatcgttcatccgggcgacatcatcatcatcatggcatatgcctggatgccgatggaggaagccaaggtgttcaagcctgctgtagtatttcccgatactgcaacgaacaagataatcctgaagtaa

SEQ ID NO: 2367 - protein, 118 aa, Porphyromonas gingivalis
MYVEVLKSKIHRVTITEANLNYVGSITIDEDLMDAANIIAGEKVQIVDNNNGARLETYTIPGKRGSGVICLNGAAARIVHPGDIIIIMAYAWMPMEEAKVFKPAVVFPDTATNKIILK

SEQ ID NO: 2368 - DNA, 381 bp, Pseudomonas aeruginosa
  CDS (1)..(381): transl_table=11
atgcacgccatcatgctcaaagccaagttgcatcgcgccgaagtcacccatgccgtcctcgactacgaaggctcctgcgccatcgacggcgattggctggacctctccggaatccgcgagtacgaacagatccagatctacaacgtcgacaacggcgagcgcttcaccacctatgcgatccgcgccgagaacggctcgaagatgatctcggtgaacggcgccgcggcacacaaggccaaggtcggcgaccgcgtgatcatctgcgcctacgcacactacagcgaagccgaactggccagccacaagccgcgcatgctgtacatggcgccgggcaaccagctcagccataccagcgaggcgattccgatacaggtcgcctga

SEQ ID NO: 2369 - protein, 126 aa, Pseudomonas aeruginosa
MHAIMLKAKLHRAEVTHAVLDYEGSCAIDGDWLDLSGIREYEQIQIYNVDNGERFTTYAIRAENGSKMISVNGAAAHKAKVGDRVIICAYAHYSEAELASHKPRMLYMAPGNQLSHTSEAIPIQVA

SEQ ID NO: 2370 - DNA, 381 bp, Pseudomonas aeruginosa
  CDS (1)..(381): transl_table=11
atgcacgccataatgctcaaagccaagttgcatcgcgccgaagtcacccatgccgtcctcgactacgaaggctcctgcgccatcgacggcgattggctggacctctccggaatccgcgagtacgaacagatccagatctacaacatcgacaacggcgagcgcttcaccacctatgcgatccgcgccgagaacggctcgaagatgatctcggtgaacggcgccgcggcacacaaggccaaggtcggcgaccgcgtgatcatctgcgcctacgcacactacagcgaagccgaactggccagccacaagccgcgcatgctgtacatggcgccgggcaaccagctcagccataccagcgaggcgattccgatacaggtcgcctga

SEQ ID NO: 2371 - protein, 126 aa, Pseudomonas aeruginosa
MHAIMLKAKLHRAEVTHAVLDYEGSCAIDGDWLDLSGIREYEQIQIYNIDNGERFTTYAIRAENGSKMISVNGAAAHKAKVGDRVIICAYAHYSEAELASHKPRMLYMAPGNQLSHTSEAIPIQVA

SEQ ID NO: 2372 - DNA, 381 bp, Pseudomonas fluorescens
  CDS (1)..(381): transl_table=11
atgcacgccatcatgctcaaggccaagctgcatcgcgccgaagtcactcacgcagtgctcgattacgaaggctcctgcgccatcgatggtgagtggctggacctgtcggggatccgtgaatacgaacagatccagatctacaacgtcgacaacggcgagcgcttcaccacctacgccatccgtggcgaggaaggttcgcggatgatctcggtgaacggcgccgcagcgcacaaggccaaggtcggtgatcgtgtcatcatctgcgcctatgcccactacagtgaagccgagctggtcaacttcaagccgcgcatgctgtacatggcaccaggcaatgaactgagccgcgccagcaatgcgattccggtacagctcgcctga

SEQ ID NO: 2373 - protein, 126 aa, Pseudomonas fluorescens
MHAIMLKAKLHRAEVTHAVLDYEGSCAIDGEWLDLSGIREYEQIQIYNVDNGERFTTYAIRGEEGSRMISVNGAAAHKAKVGDRVIICAYAHYSEAELVNFKPRMLYMAPGNELSRASNAIPVQLA

SEQ ID NO: 2374 - DNA, 363 bp, Ralstonia solanacearum
  CDS (1)..(363): transl_table=11
atgcaacgcaatatgctccgcgccaagctgcaccgcgcgacggtcacccaggccgatctggactacgaaggctcgtgcggcatcgacgaggacctgctcgacgccgccgacatgcgcgagtacgaaaagatcgagctctacaacgtcaacaacggcgagcgcttctcgacctacatcatcaagggcaagcgcggctcgggcgaaatctcgctcaacggcgccgccgcgcgccgcgcgcacgtgggcgacaaactgatcatctgcacctacgcgccgatgaacgaggaagaagtcgccaactacaagcccaagatcgtgctgctcggcgacggcaaccggatcaaggaaatcaaggcagtctga

SEQ ID NO: 2375 - protein, 120 aa, Ralstonia solanacearum
MQRNMLRAKLHRATVTQADLDYEGSCGIDEDLLDAADMREYEKIELYNVNNGERFSTYIIKGKRGSGEISLNGAAARRAHVGDKLIICTYAPMNEEEVANYKPKIVLLGDGNRIKEIKAV

SEQ ID NO: 2376 - DNA, 471 bp, Rhodopirellula baltica
  CDS (1)..(471): transl_table=11
ttggtggacacaccttatcgaaaaatgctggcggccaagattcaccgcgcgacggtgactggtgcagacgtgaactacgaaggcagcttgaccgttcccccggaactgttggttgctgcaaagattcacccttacgaatctttgcatgtttggaatgtgactcgaggcacgcgtttggaaacctacgcgatcgaaggacttccaaattccaatgacgtgtgtgccaacggtgccgccgctcacttgattcgtcctggcgaccatgtgattttggcggcgtacgccatggttcccgaagccgatgcggcgacacacaaacctcgtttgatctttgttgatgacaacaatcagttgtcccacgtcggccctgagatcgcgggtcccaacctgcgatccgattccgatgacacgcacctggttcgctccactgagatgacgcctgacggacaaccgctcgctgaaggttgctag

SEQ ID NO: 2377 - protein, 156 aa, Rhodopirellula baltica
MVDTPYRKMLAAKIHRATVTGADVNYEGSLTVPPELLVAAKIHPYESLHVWNVTRGTRLETYAIEGLPNSNDVCANGAAAHLIRPGDHVILAAYAMVPEADAATHKPRLIFVDDNNQLSHVGPEIAGPNLRSDSDDTHLVRSTEMTPDGQPLAEGC

SEQ ID NO: 2378 - DNA, 447 bp, Rhodococcus sp
  CDS (1)..(447): transl_table=11
atgtttcgcaccatgatgaagtcgaagatccatcgcgccaccgtcacgcacgccgacctgcactacgtgggctcggtgacggtcgaccaggatctgatggacgccgccgaccttctcgagggcgagcaggtgtgcatcgtcgacatcgacaacggcgcgcggctcgaaacgtatgtgatcgccggcgagcggggaagtggtgtcatcgggatcaacggtgcggcagcgcatctggtcaagcccggcgacctcgtcatcctcatcgcgtacggcgtcatgaacgagcaggaggtgcgcgactacgagccgcgtgtcgtgttcgtcgacgccgccaactcaccgatcgagctcggcgccgaccccgcgcacgcgccggagggctccggtctcatcaccccgcgcatgctgtcgacgctcgacgccgagcgcgaatccagtttggtgtaa

SEQ ID NO: 2379 - protein, 148 aa, Rhodococcus sp
MFRTMMKSKIHRATVTHADLHYVGSVTVDQDLMDAADLLEGEQVCIVDIDNGARLETYVIAGERGSGVIGINGAAAHLVKPGDLVILIAYGVMNEQEVRDYEPRVVFVDAANSPIELGADPAHAPEGSGLITPRMLSTLDAERESSLV

SEQ ID NO: 2380 - DNA, 381 bp, Saccharophagus degradans
  CDS (1)..(381): transl_table=11
atgcaaattacgctattaaagggtaagttgcacatggcgaaggtgactcaagccgagctgtggtacgacgggtcctgcgccattgatgaagagtttgttaagctggcagggttgcgagagtttgagcaaattgaaatttataatgtcgataacggcgagcgtttctctacctacgttattttggctgaagcgggtagtcgcaccatttctatgaacggtgctgctgcgcggaaagtgcaagttggcgaccgtgtaattattgccgcatacagtcaaatgagcgaagccgaagccgattcattcaagcctcgcttggtgtatttggataaagacaacgccgtagaacgcactactaacaccattccggttcaggccgcttag

SEQ ID NO: 2381 - protein, 126 aa, Saccharophagus degradans
MQITLLKGKLHMAKVTQAELWYDGSCAIDEEFVKLAGLREFEQIEIYNVDNGERFSTYVILAEAGSRTISMNGAAARKVQVGDRVIIAAYSQMSEAEADSFKPRLVYLDKDNAVERTTNTIPVQAA

SEQ ID NO: 2382 - DNA, 381 bp, Salmonella arizonae
  CDS (1)..(381): transl_table=11
atgattcgcacaatgttacaaggtaagctccatcgcgtcaaagtgacccaggctgacctgcattacgagggttcctgcgctattgaccaggattttctcgacgcggccggaattctggagaacgaagccattgatatctggaatgtgtccaatggtaagcgcttctcaacctatgcgattgcggcggagcgtggctctaaaattatctccgttaacggggcagcggcacattgcgcctccgtgggtgatattgtcattattgccagctttgtcaccatgagcgatgaagaagcgcgcacctggcacccgaacgttgcctacttcgaaggcgacaacgaaatgaaacgcaccgcaaaagccattccggtacaggttgcctga

SEQ ID NO: 2383 - protein, 126 aa, Salmonella arizonae
MIRTMLQGKLHRVKVTQADLHYEGSCAIDQDFLDAAGILENEAIDIWNVSNGKRFSTYAIAAERGSKIISVNGAAAHCASVGDIVIIASFVTMSDEEARTWHPNVAYFEGDNEMKRTAKAIPVQVA

SEQ ID NO: 2384 - DNA, 381 bp, Salmonella choleraesuis
  CDS (1)..(381): transl_table=11
atgattcgcaccatgctgcaaggcaagctccaccgcgtaaaagtcacgcaggcggacctgcactacgaaggttcttgtgccattgaccaggatttccttgatgcctccggtattctggaaaacgaagcgattgatatctggaacgtgaccaatgggaaacgtttctcaacctatgcgattgcggctgaacgcggctccagaatcatctcggtgaacggtgcggcggcgcactgcgctgaagttggcgacattgtgattatcgccagcttcgtcaccatgtctgatgaagaagcgcgtacatggcgtccgaaagtggcctattttgaaggcgacaacgaaatgaagcgcaccgcgaaagctattccggtacaggttgcctga

SEQ ID NO: 2385 - protein, 126 aa, Salmonella choleraesuis
MIRTMLQGKLHRVKVTQADLHYEGSCAIDQDFLDASGILENEAIDIWNVTNGKRFSTYAIAAERGSRIISVNGAAAHCAEVGDIVIIASFVTMSDEEARTWRPKVAYFEGDNEMKRTAKAIPVQVA

SEQ ID NO: 2386 - DNA, 384 bp, Staphylococcus aureus
  CDS (1)..(384): transl_table=11
gtgataagaacaatgatgaatgctaaaattcatagagcaagagtgactgagtcaaatttaaattatgtaggtagcattacgattgattcagatatattggaagcggtagacatcttgccaaatgaaaaagtagccatcgtgaataataataatggtgcacgttttgaaacatacgtaatagctggtgaaagaggtagtggtaaaatttgtttaaacggtgcagcatcaagacttgttgaagtaggcgatgtagtcataatcatgacttatgcacagttgaatgaagaagaaattcaaaaccatgcacctaaagtagcagtaatgaatgaagacaatgtcattattgaaatgattcatgaaaaagaaaatacgatagtgttataa

SEQ ID NO: 2387 - protein, 127 aa, Staphylococcus aureus
MIRTMMNAKIHRARVTESNLNYVGSITIDSDILEAVDILPNEKVAIVNNNNGARFETYVIAGERGSGKICLNGAASRLVEVGDVVIIMTYAQLNEEEIQNHAPKVAVMNEDNVIIEMIHEKENTIVL

SEQ ID NO: 2388 - DNA, 387 bp, Staphylococcus epidermidis
  CDS (1)..(387): transl_table=11
ttgattagaacatttatgaactcaaaaatccatagagctagagttacagaatctaatttaaattacgttggaagcataacaatagatgccaatatattagatgcggttgatattttacccaatgaaaaggttgctattgttaataataataatggtgctcgatttgaaacatatgtcattgctggagaacgtggtagtggaaagatgtgtttaaatggcgcggcttcaagactagttgaagttggagacgtcattattattatgacatatgcacaattaaatgaagatgaaatggtagatcactcaccaaaagtagctgtgttaaatgaaaataatgaaattatagaaatgataaatgagaaagaaaatacgatatcaaatgtataa

SEQ ID NO: 2389 - protein, 128 aa, Staphylococcus epidermidis
MIRTFMNSKIHRARVTESNLNYVGSITIDANILDAVDILPNEKVAIVNNNNGARFETYVIAGERGSGKMCLNGAASRLVEVGDVIIIMTYAQLNEDEMVDHSPKVAVLNENNEIIEMINEKENTISNV

SEQ ID NO: 2390 - DNA, 420 bp, Streptomyces avermitilis
  CDS (1)..(420): transl_table=11
atgctgcgtaccatgttcaagtccaagatccaccgagccaccgtcacccaggccgacctgcactacgtcggatccgtcaccatcgacgccgatcttctggacgccgccgatctgctgcccggcgagttggttcatatcgtcgacatcaccaacggtgcccgcctggagacgtacgtcatcgagggcgagcgtggctccggagtcgtcgggatcaacggggcggcggcccatctcgtccaccccggcgacctggtgatcatcatcagctacgctcaggtttccgacgccgaggcgagggcactgcggccgagggtcgtgcacgtggaccgcgacaaccgcgtcgtggccctgggcgcggacccggccgagccggtaccgggctcggaccaggcgcgcagcccgcaggccgtcaccgcctga

SEQ ID NO: 2391 - protein, 139 aa, Streptomyces avermitilis
MLRTMFKSKIHRATVTQADLHYVGSVTIDADLLDAADLLPGELVHIVDITNGARLETYVIEGERGSGVVGINGAAAHLVHPGDLVIIISYAQVSDAEARALRPRVVHVDRDNRVVALGADPAEPVPGSDQARSPQAVTA

SEQ ID NO: 2392 - DNA, 420 bp, Streptomyces coelicolor
  CDS (1)..(420): transl_table=11
gtgctgcgaactttgatcaagtccaagatccaccgcgccaccgtcacccaggccgacctgcactacgtcggctcggtgaccatcgacgccgatctcctggacgctgccgatctgctgcccggtgagctcgtgcacatcgtggacgtcaccaacggggcccggctggagacgtacgtcatcgagggggagcgcgggtccggggtgatcgggatcaacggggccgcggcccacctcgtgcaccccggtgacctggtgatcctcatcagctacgcccaggtcaccgacgccgaggcgcggtcgctgcggccccgggtcgtgcacgtggacggggacaaccgtatcgtcggcctcggcgccgacgcgtcggagccggtaccgggctcggaccaggagcgcagccctcaggccgtgtcggcctga

SEQ ID NO: 2393 - protein, 139 aa, Streptomyces coelicolor
MLRTLIKSKIHRATVTQADLHYVGSVTIDADLLDAADLLPGELVHIVDVTNGARLETYVIEGERGSGVIGINGAAAHLVHPGDLVILISYAQVTDAEARSLRPRVVHVDGDNRIVGLGADASEPVPGSDQERSPQAVSA

SEQ ID NO: 2394 - DNA, 351 bp, Syntrophus aciditrophicus
  CDS (1)..(351): transl_table=11
atgcaaaggttgatgcttaaatccaaaattcacagagcgaccgtaacggacgcagatcttcattatgagggcagtatttccattgatgaagcgttgatggaggctgcggatcttctgccctatgaaaaggttgctatctatgatgtcaacaatggcgagcgatttacaacttacgtaatcacgggcaagcggggctctggggttatctgccttaacggtgctgcggcgagaaaggtcgccaagggggatctggttatcatcgccagttacgtcatcgtggacggtgaggaggcaaaaggctggaagccgacctgtgtgtttgttgatccggaaaatcaaatcaaacactga

SEQ ID NO: 2395 - protein, 116 aa, Syntrophus aciditrophicus
MQRLMLKSKIHRATVTDADLHYEGSISIDEALMEAADLLPYEKVAIYDVNNGERFTTYVITGKRGSGVICLNGAAARKVAKGDLVIIASYVIVDGEEAKGWKPTCVFVDPENQIKH

SEQ ID NO: 2396 - DNA, 414 bp, Thermobifida fusca
  CDS (1)..(414): transl_table=11
gtgctgcgcaccatgctcaacggaaagatccaccgggccacggtcacccacgcggacctgcactacgtcggttccatcaccatcgacgccgatctgatggacgcggccaacctcgtcgacggcgaacaggtccacgtggtcaacatcacgaacgggcaccggttggtcacctacgtgctgaccggggagcgcggcagcggtgtcatcggaatcaacggggccgccgcccgcctcgtagcgccgggagacctggtgatcatcatttcgtatgtgcagctcaccgaggctgagcgtgccacccaccggccccacgtggtgcacgtggacgccaacaaccgcatcgtcgccctgggcgacgacctggctgagccggtccccggaagcgaccagaaatcgggggcgcttctcccctaa

SEQ ID NO: 2397 - protein, 137 aa, Thermobifida fusca
MLRTMLNGKIHRATVTHADLHYVGSITIDADLMDAANLVDGEQVHVVNITNGHRLVTYVLTGERGSGVIGINGAAARLVAPGDLVIIISYVQLTEAERATHRPHVVHVDANNRIVALGDDLAEPVPGSDQKSGALLP

SEQ ID NO: 2398 - DNA, 345 bp, Thermotoga maritima
  CDS (1)..(345): transl_table=11
atgctgaacatatatctgaagtccaaaattcacatggctacgatcacgagaaaagaagtttactacgaaggaagcatagaaatagacgaagagctgatgggaaaagcgggcatcagcgagggagaactcgtactggtggtgaacgtcaacaacgccgaaagattcgtaacgtatgtcataaagggaaagaggggaagccgtgagataaacctctacggtgcagccgcaagactcggtgaagaaggtgacagagtgatcatcatggctttcaccttcagtgacaaacctgtgaaagcgaaaacgatcgttctcaacgagaaaaacgaaatcgttcaggagaaataa

SEQ ID NO: 2399 - protein, 114 aa, Thermotoga maritima
MLNIYLKSKIHMATITRKEVYYEGSIEIDEELMGKAGISEGELVLVVNVNNAERFVTYVIKGKRGSREINLYGAAARLGEEGDRVIIMAFTFSDKPVKAKTIVLNEKNEIVQEK

SEQ ID NO: 2400 - DNA, 381 bp, Thiobacillus denitrificans
  CDS (1)..(381): transl_table=11
atgcaaagaacgatgctcaagtccaagctgcatcgcgcgaccgtcacgcattccgagctgcattacgaaggctcgtgcgccatcgacgagtcgctgctcgaagcggccaatatccacgagtacgagcagatccagatctacaacgtcagcaacggcgagcgcttcaccacctatgccatccgcgcggcgcgcgggtcgggcgtcatctcggtgaacggcgccgcggcgcacaaggcgaatcccggcgacctcgtcatcatcgccacctatgcgacgtacaacgaactcgagatggcgcgctacgcgcccgaactcgtctacgtcgacgccgccaacgccatcgtcgacacgcgccagacgatcccggtccaggctgcctag

SEQ ID NO: 2401 - protein, 126 aa, Thiobacillus denitrificans
MQRTMLKSKLHRATVTHSELHYEGSCAIDESLLEAANIHEYEQIQIYNVSNGERFTTYAIRAARGSGVISVNGAAAHKANPGDLVIIATYATYNELEMARYAPELVYVDAANAIVDTRQTIPVQAA

SEQ ID NO: 2402 - DNA, 477 bp, Trichodesmium erythraeum
  CDS (1)..(477): transl_table=11
atgactacaatcaaattaatgcatgctaaacttcatcgcgtacgagtaacagacgcaaagcctgactacgttggcagcgtgactatagactcggatttactcgaaaaagtaggaattttgcctttagaagaagtgcaaatagttaatcttaataatggccaacgttggttaacttatgttttacccggacaagcaggatcgggtatggtttgtccaaatgggggtgcggcacttctatgtaaaaaagatgatatattaattatctgggctaatgaacaatgcgatcgggctgaagtcctagaaaatggacataaagcaaaaatatttgtggcagatgaaaataaccactgccgagaatttctctatcaaattttaaatcccaatcaaggaagtgttgaatttcactccctgccagtaattccagaaggtaaaacatctgaatacctccaacaaatgatcgaaacaaataaaatttaa

SEQ ID NO: 2403 - protein, 158 aa, Trichodesmium erythraeum
MTTIKLMHAKLHRVRVTDAKPDYVGSVTIDSDLLEKVGILPLEEVQIVNLNNGQRWLTYVLPGQAGSGMVCPNGGAALLCKKDDILIIWANEQCDRAEVLENGHKAKIFVADENNHCREFLYQILNPNQGSVEFHSLPVIPEGKTSEYLQQMIETNKI

SEQ ID NO: 2404 - DNA, 366 bp, Wolinella succinogenes
  CDS (1)..(366): transl_table=11
atgaaattcgatatgctatggagcaagatccatcgagcgaccgtcaccgatgccaatctcaattatgtcggatccatcacgattgatgaagagttgatggaggcggcggagcttttggtggggcagaaggtcgagattcttgatgtcaataacggagagcgctttagcacctatgtcattaggggtgagcgcggaagtagagagatctgtctcaatggcgcagccgcgcgaaaagtcgccattggcgataagatcattattgttgcctacgcacagtatgatcgaagcgagctatctagctacaaacccaccgtggtattagtggatgagaagaacgatattgtccaaatcaagcatgaggtgtga

SEQ ID NO: 2405 - protein, 121 aa, Wolinella succinogenes
MKFDMLWSKIHRATVTDANLNYVGSITIDEELMEAAELLVGQKVEILDVNNGERFSTYVIRGERGSREICLNGAAARKVAIGDKIIIVAYAQYDRSELSSYKPTVVLVDEKNDIVQIKHEV

SEQ ID NO: 2406 - DNA, 381 bp, Xanthomonas axonopodis pv
  CDS (1)..(381): transl_table=11
atgcatctgtccctgctgaaagccaagatccaccgcgccaccgtcacccactccgagctcaactacgaaggctcgatcgccatcgacggcctgctgctggaagcgaccggcatccgcgagttcgaacaggtccatatctgggacgtcaccaacggtgcgcgtttcagcacctatgccatccgcgccgaagacggcagcggcatcatgtcgctcaacggtggcgcggcgcgtcacgtgcaggtgggcgatctgatcatcgtggcggcgttcgccagcatgagcgaagacgaagccaagaccttcaagcccaatctggtatatgtgaacgcgcacaacgcgatctcccacaccaaccacagcatccccacccaggccgcatga

SEQ ID NO: 2407 - protein, 126 aa, Xanthomonas axonopodis pv
MHLSLLKAKIHRATVTHSELNYEGSIAIDGLLLEATGIREFEQVHIWDVTNGARFSTYAIRAEDGSGIMSLNGGAARHVQVGDLIIVAAFASMSEDEAKTFKPNLVYVNAHNAISHTNHSIPTQAA

SEQ ID NO: 2408 - DNA, 429 bp, Xylella fastidiosa
  CDS (49)..(429): transl_table=11
gtgtctgtcattggctacaatcactttccttactttgctgcgtttcccatgcaactgtccttgcttaaagctaagatccaccgtgctaccgtcagccattctgaactcaactatgaagggtctattgcaatagacggactactgttggaggctgccggtctctatgagtttgagaaagtccacatctggaatgtgacgaatggtgcccgtttcactacttatgcaatacgtgccgagcatggcagtggcatcatttcagtgaatgggggtgctgcgcgttacgtgcaggttggagatttggtgatcgttgctgcgtttgcacaaatgagtgaggacgaggcagcagttttcagcccgaatttggtatacgtggacgctgccaatgcgatgactcataccaaccacagtattcctacacaggtcgcgtga

SEQ ID NO: 2409 - protein, 126 aa, Xylella fastidiosa
MQLSLLKAKIHRATVSHSELNYEGSIAIDGLLLEAAGLYEFEKVHIWNVTNGARFTTYAIRAEHGSGIISVNGGAARYVQVGDLVIVAAFAQMSEDEAAVFSPNLVYVDAANAMTHTNHSIPTQVA

SEQ ID NO: 2410 - DNA, 381 bp, Xylella fastidiosa
  CDS (1)..(381): transl_table=11
atgcaactgtccttgcttaaagctaagatccaccgtgctaccgtcagtcattctgaactcaactatgaagggtctatcgcaatagacggactactgttggaggctgccggtctctatgagtttgagaaagtccacatctggaatgtgacgaatggtgcccgtttcactacttatgcaatacgtgccgagcatggcagtggcatcatttcagtgaatgggggtgctgcgcgttacgtgcaggttggagatttggtgatcgttgctgcgtttgcacaaatgagtgaggacgaggcagcagttttcagaccgaatttggtatacgtcaatgctgccaatgcgatgactcataccaaccacagtattcctacacaggtcgcatga

SEQ ID NO: 2411 - protein, 126 aa, Xylella fastidiosa
MQLSLLKAKIHRATVSHSELNYEGSIAIDGLLLEAAGLYEFEKVHIWNVTNGARFTTYAIRAEHGSGIISVNGGAARYVQVGDLVIVAAFAQMSEDEAAVFRPNLVYVNAANAMTHTNHSIPTQVA

SEQ ID NO: 2412 - DNA, 21 bp, Artificial sequence
  primer
atggggagcattcgtttgatg

SEQ ID NO: 2413 - DNA, 20 bp, Artificial sequence
  primer
ttaatgggggatggcttccg

SEQ ID NO: 2414 - protein, 130 aa, Artificial sequence
  consensus sequence
  Variant (2)..(8): Xaa in position 2 to 8 is any amino acid
  Variant (10)..(10): Xaa in position 10 is any amino acid
  Variant (13)..(14): Xaa in position 13 to 14 is any amino acid
  Variant (17)..(19): Xaa in position 17 to 19 is any amino acid
  Variant (21)..(21): Xaa in position 21 is any amino acid
  Variant (23)..(23): Xaa in position 23 is any amino acid
  Variant (26)..(28): Xaa in position 26 to 28 is any amino acid
  Variant (30)..(41): Xaa in position 30 to 41 is any amino acid
  Variant (43)..(50): Xaa in position 43 to 50 is any amino acid
  Variant (53)..(53): Xaa in position 53 is any amino acid
  Variant (55)..(56): Xaa in position 55 to 56 is any amino acid
  Variant (59)..(59): Xaa in position 59 is any amino acid
  Variant (61)..(64): Xaa in position 61 to 64 is any amino acid
  Variant (67)..(69): Xaa in position 67 to 69 is any amino acid
  Variant (70)..(71): Xaa in position 70 to 71 is any or no amino acid
  Variant (77)..(81): Xaa in position 77 to 81 is any amino acid
  Variant (84)..(85): Xaa in position 84 to 85 is any amino acid
  Variant (87)..(98): Xaa in position 87 to 98 is any amino acid
  Variant (99)..(104): Xaa in position 99 to 104 is any or no amino acid
  Variant (106)..(109): Xaa in position 106 to 109 is any amino acid
  Variant (110)..(129): Xaa in position 110 to 129 is any or no amino acid
MXXXXXXXKXHRXXVTXXXLXYXGSXXXDXXXXXXXXXXXXEXXXXXXXXNGXRXXTYXIXXXXGSXXXXXNGAAAXXXXXGDXXIXXXXXXXXXXXXXXXXXXPXXXXXXXXXXXXXXXXXXXXXXXXN

SEQ ID NO: 2415 - protein, 56 aa, Artificial sequence
  protein pattern
  Variant (2)..(2): Xaa in position 2 is Ile or Leu
  Variant (4)..(9): Xaa in position 4 to 9 is any amino acid
  Variant (10)..(10): Xaa in position 10 is Ala, Cys, Gly, Ser or Thr
  Variant (11)..(11): Xaa in position 11 is any amino acid
  Variant (12)..(12): Xaa in position 12 is Ile, Leu, Pro or Val
  Variant (13)..(13): Xaa in position 13 is any amino acid
  Variant (15)..(15): Xaa in position 15 is any amino acid
  Variant (18)..(19): Xaa in position 18 to 19 is any or no amino acid
  Variant (21)..(22): Xaa in position 21 to 22 is any or no amino acid
  Variant (24)..(29): Xaa in position 24 to 29 is any amino acid
  Variant (30)..(30): Xaa in position 30 is Ala, Ser, Thr or Val
  Variant (31)..(31): Xaa in position 31 is any amino acid
  Variant (32)..(32): Xaa in position 32 is Ile, Leu or Met
  Variant (33)..(35): Xaa in position 33 to 35 is any amino acid
  Variant (37)..(37): Xaa in position 37 is any amino acid
  Variant (38)..(38): Xaa in position 38 is Ile or Val
  Variant (39)..(41): Xaa in position 39 to 41 is any amino acid
  Variant (42)..(42): Xaa in position 42 is Asp or Asn
  Variant (43)..(44): Xaa in position 43 to 44 is any amino acid
  Variant (45)..(45): Xaa in position 45 is Asn, Gln, Ser or Thr
  Variant (47)..(47): Xaa in position 47 is any amino acid
  Variant (49)..(50): Xaa in position 49 to 50 is any amino acid
  Variant (53)..(53): Xaa in position 53 is any amino acid
  Variant (54)..(54): Xaa in position 54 is Phe, Ile or Leu
  Variant (55)..(55): Xaa in position 55 is any amino acid
  Variant (56)..(56): Xaa in position 56 is Ala or Gly
KXHXXXXXXXXXXYXGSXXIXXDXXXXXXXXXXXXEXXXXXXXXXGXRXXTYXXXX

SEQ ID NO: 2416 - DNA, 2484 bp, Saccharomyces cerevisiae
  CDS (1)..(2484)
atgcctagcccatatgacggtaaaagaacagtaactcagcttgttaacgagttagaaaaggcagaaaaactatccggtagaggcagagcttatagaagggtttgtgacttatcacacagcaataagaaagtaatttcatggaaatttaacgaatgggattatggcaaaaatactatcactttgccatgtaatgcaagaggcttatttattagcgatgatacaacgaatccagttattgttgctagaggatacgataagtttttcaatgtaggcgaggtcaactttaccaagtggaattggattgaagagaactgtacagggccttacgatgtcactataaaagccaatggttgtatcatttttatatctggtttagaagatggtaccttggtagtttgttcgaagcattctactggacccagagcagacgtagacaggaaccatgcagaagcaggtgagaagcaacttttaagacaactggcggcaatgaacatcaatcgaagtgattttgctagaatgctatatacccataatgtcaccgctgtggcagaatattgcgatgattcatttgaagaacacatcttagagtatccccttgaaaaagctggcctatacttacatggtgtaaatgttaataaagcggaatttgaaacttgggatatgaaagatgtttcgcaaatggcgagtaaatacggattcaggtgcgtccaatgcattacatcgaacaccttggaggatttgaaaaagttcctagataactgctctgcaaccggatcttttgaagggcaagagattgaaggttttgttatcaggtgccacttgaagagtactgaaaagccattttttttcaagtataaatttgaagaaccgtatttgatgtaccgtcagtggagagaagttactaaagactatatttccaacaagtcaagagtgtttaaatttagaaagcataaatttataaccaacaagtatcttgatttcgcaatcccaatattggagtcatcacccaagatctgtgagaattacttgaaaggttttggtgtgattgaattgagaaataagtttctacaatcatatggcatgagtgggctggaaatcttaaaccacgaaaaagtggccgagttggaattaaaaaacgccattgattatgataaagtagacgaacgcactaaatttttaatctttccaatatcagttattggatgtggcaaaacaacaacttcccagacattagtgaatttgttccctgacagctggggtcatattcaaaatgatgatattacaggtaaagataaatctcaattaatgaaaaaatcattggaactattatccaaaaaagaaatcaaatgtgtcatagttgacagaaacaatcaccaattccgcgaaagaaagcaattatttgaatggttgaatgaactaaaagaagattatttggtgtatgatacgaacatcaaggtaatcggcgtgtcattcgcgccatatgacaaactatcggaaataagagacataacactgcaaagagtaatcaaaagaggtaacaatcaccaaagtattaaatgggacgaattaggagagaagaaagtggtaggcatcatgaatgggtttttgaaaagatatcaacctgttaatttagacaaatcaccagataatatgtttgatttaatgatagagttagattttggacaagcagactcttcattaaccaatgcgaaacaaatcctcaatgaaattcataaagcttatccaattttggtaccagagatcccgaaagatgatgaaattgagacagcgttcagaaggagcttagattacaaacctactgtgagaaaaatagttggtaaaggcaacaataatcaacaaaaaacgcctaagttaattaaacctacatatatctcagctaaaatagaaaactacgatgaaattattgaattggtcaagaggtgtattgctagcgatgcagagctgactgagaaattcaagcatttactagctagtggaaaagttcagaaggaacttcatataacattaggtcatgtcatgtcgtcccgtgaaaaagaggcaaaaaagttgtggaaatcatattgtaacagatacactgaccagataacggagtacaataacaaccgcatagaaaatgcacaaggctctggtaataaccaaaatacgcaggtaaaaacgaccgacaaactgaattttaggctcgaaaaactatgttgggatgaaaaaatcattgctattgtagtggaactgtctaaagataaagatggatgcataattgatgaaaacaatgagaaaattaaagggttgtgttgtcaaaacaaaattcctcatattacgctgtgcaaacttgaaagtggtgttaaggctgtttattccaatgttctatgtgagaaggttgaatctgctgaagttgatgaaaatataaaagtggtgaaattggacaactcgaaggaatttgttggcagtgtatatttaaatttttag

SEQ ID NO: 2417 - protein, 827 aa, Saccharomyces cerevisiae
MPSPYDGKRTVTQLVNELEKAEKLSGRGRAYRRVCDLSHSNKKVISWKFNEWDYGKNTITLPCNARGLFISDDTTNPVIVARGYDKFFNVGEVNFTKWNWIEENCTGPYDVTIKANGCIIFISGLEDGTLVVCSKHSTGPRADVDRNHAEAGEKQLLRQLAAMNINRSDFARMLYTHNVTAVAEYCDDSFEEHILEYPLEKAGLYLHGVNVNKAEFETWDMKDVSQMASKYGFRCVQCITSNTLEDLKKFLDNCSATGSFEGQEIEGFVIRCHLKSTEKPFFFKYKFEEPYLMYRQWREVTKDYISNKSRVFKFRKHKFITNKYLDFAIPILESSPKICENYLKGFGVIELRNKFLQSYGMSGLEILNHEKVAELELKNAIDYDKVDERTKFLIFPISVIGCGKTTTSQTLVNLFPDSWGHIQNDDITGKDKSQLMKKSLELLSKKEIKCVIVDRNNHQFRERKQLFEWLNELKEDYLVYDTNIKVIGVSFAPYDKLSEIRDITLQRVIKRGNNHQSIKWDELGEKKVVGIMNGFLKRYQPVNLDKSPDNMFDLMIELDFGQADSSLTNAKQILNEIHKAYPILVPEIPKDDEIETAFRRSLDYKPTVRKIVGKGNNNQQKTPKLIKPTYISAKIENYDEIIELVKRCIASDAELTEKFKHLLASGKVQKELHITLGHVMSSREKEAKKLWKSYCNRYTDQITEYNNNRIENAQGSGNNQNTQVKTTDKLNFRLEKLCWDEKIIAIVVELSKDKDGCIIDENNEKIKGLCCQNKIPHITLCKLESGVKAVYSNVLCEKVESAEVDENIKVVKLDNSKEFVGSVYLNF

SEQ ID NO: 2418 - DNA, 2661 bp, Magnaporthe grisea 70-15
  CDS (1)..(2661)
atgtccaaaccacacatcatccacggccccacccaaacccgcagccgcagcacttgttgcccctccactacgactagttttggtaaccgtaaagagctactatcactaccacgcaaacggaccaacacccctagttctgcgcgtcacttctcgtcaaagtcaagcatggccaccgatgcccaagggcctggctccctcgggaacaaggcagccgcctcagatggcatgccaaatatggtgatgccatatgaacctcaggaccccgctgtcatcgcagagatggtccgcgtgctcgatgagcatacaaagggtggcgccaagggtcgtttccgtatcaagaagaccaagtttgccgttactggttctccttccaaggtcactgtagattcctggaagctacaggactgggactacaagaaacctgggctgcctacatatgcccgtggcctcttcaccacgcgcctcccaaataatgtaccagaaattgccgtcagaggttatgacaagttcttcaacgtcggcgaggtgccggaaacgaactgggaaaatatcatcaagaacagcaagggtccttacgagctcagtctgaaggaaaacggctgcatcattttcatctcaggccttcacgatgacaccctgttggtatgctcaaagcattccactggtgcacgcggtgatattgaaatcagccacgccaacgccggtgaaaaggctctcgacaagcagctggccaagattggcaagactagggcggaccttgcgcgggagctgagggagcgcaatgccaccgctatcgccgaactttgcgacgacagctttgaggagcacatcttggcttatggccccgataaagccggcttgtatcttcacggcatcaacgtgaaccagccctacttcatgacatatccaggccccgcagtcaactcgtttgccgacgactggggcttcaaacagaccgggttgctcataatggacaacattaaagaggtcaaaacgttcttagaagacgtagcagaaactggagcctacggcggccgagacgtcgagggctttgttatccgctgcaagctgaaggaccggcctaataccgaccctggaacatactcggattggttcttcaagtacaagtttgaagagccttatcttatgtacaggcagtggcgagagtgtaccaaggctctcattgccggccacgcccccaagatcaggaaacacaagaaaatcacagaggagtacctgtactacgcaaagacacgcctggcagaggactccagcctcgcaaaggcctataaccaaaaccacggcatcattgcccttcgtgacgattttctgaaatacaagaacatgaagggttccgatgctgccaatctcgatcgggatgtcgccactaacgagccggagccagacaactcggtcgttggcaacgtgatcctcgttccgattgccaccattggatgtggaaagacaacaattgccgtcgccttgaggaccctcttccctgaagcgttcggccatttccaaaacgacagcataacacagaaaaagggaaggccggctatatttaccaggaatgtgctggaacaactaaagacaaagagggttgtcatcgcggaccgcaacaacgcatggcgtcgtgagaggacacaaatcctgggcgacgtcaagaatatgctgcccgcagcgaagctggtggcgcttcatttcgaccacgacaacagcatggaagtccgcaagctgacatacgagcgcgttttccagcgtggcgacaaccaccagaacatcaaggtgcaggagctcggcaaagcaaaggtcatggacatcatgaacggcttcctggatggattggagccatacagcgccttcagcaaacccgatgcagacttttctgctgccatcggtctaaaccctctcgccggcagtcggacgaatctggaggtagtgatttccaaattacaccagttttacccaaaccttctccctcgcgtccccacgggagaggagatggacaaagcgatcgatactgcactcgcatatgatcccaagttagagcagctggcagttctgcccgcagctgctaacaacaacaagggtggtattgagtacatgtcaattgatatcccgtcgcaggccgtcctggccgccctcgaggatgccttcaaggatgcctcccccgaggtaggccgcatgtatggatacctgaagcagcagcgccggatccagccggctttccatgtaacgctgatgcataaatccggagcaaagaccagcccagagaaccaagagctttggacaaggtatactcagaccttgaaggtggctcacgatgatgccaagtcaaagggcatcgtattcagggctgcggaaacccccagcctgggtgaatgcgacgtccaacttgagcgcgtggtctttgacgacaggctcatggcgattgtggtgcgcataatcgacaaagacgacaagtggaagtgtataaacagggttccgcacatcacgatcggtactctggacaacacggtgcctcccaaggagagcaacgatatgctggctctttggatcgacggacagcaggaggctcgccgcggtacaatccgcgagactggcattgagggccgtccaatcgtcaagggcatagtcaaggcggtcctgtcaaaattctga

SEQ ID NO: 2419 - protein, 886 aa, Magnaporthe grisea 70-15
MSKPHIIHGPTQTRSRSTCCPSTTTSFGNRKELLSLPRKRTNTPSSARHFSSKSSMATDAQGPGSLGNKAAASDGMPNMVMPYEPQDPAVIAEMVRVLDEHTKGGAKGRFRIKKTKFAVTGSPSKVTVDSWKLQDWDYKKPGLPTYARGLFTTRLPNNVPEIAVRGYDKFFNVGEVPETNWENIIKNSKGPYELSLKENGCIIFISGLHDDTLLVCSKHSTGARGDIEISHANAGEKALDKQLAKIGKTRADLARELRERNATAIAELCDDSFEEHILAYGPDKAGLYLHGINVNQPYFMTYPGPAVNSFADDWGFKQTGLLIMDNIKEVKTFLEDVAETGAYGGRDVEGFVIRCKLKDRPNTDPGTYSDWFFKYKFEEPYLMYRQWRECTKALIAGHAPKIRKHKKITEEYLYYAKTRLAEDSSLAKAYNQNHGIIALRDDFLKYKNMKGSDAANLDRDVATNEPEPDNSVVGNVILVPIATIGCGKTTIAVALRTLFPEAFGHFQNDSITQKKGRPAIFTRNVLEQLKTKRVVIADRNNAWRRERTQILGDVKNMLPAAKLVALHFDHDNSMEVRKLTYERVFQRGDNHQNIKVQELGKAKVMDIMNGFLDGLEPYSAFSKPDADFSAAIGLNPLAGSRTNLEVVISKLHQFYPNLLPRVPTGEEMDKAIDTALAYDPKLEQLAVLPAAANNNKGGIEYMSIDIPSQAVLAALEDAFKDASPEVGRMYGYLKQQRRIQPAFHVTLMHKSGAKTSPENQELWTRYTQTLKVAHDDAKSKGIVFRAAETPSLGECDVQLERVVFDDRLMAIVVRIIDKDDKWKCINRVPHITIGTLDNTVPPKESNDMLALWIDGQQEARRGTIRETGIEGRPIVKGIVKAVLSKF

SEQ ID NO: 2420 - DNA, 2394 bp, Gibberella zeae PH-1
  CDS (1)..(2394)
atgtctgcgccatacacgccccaggacgtgcaagccgtagcggctgtcgtgcgtgctttggataatgctcggaaagacaagagaaagaacgggttctcagtcaagaagaccagtttcgacgtaaagggatcggctgatggcattcaagtcgagtcgtggcgcatgcaggactgggactacaaacgacctaatctgccaacatacgcccgtggcctcttcaccacaaggacacgaagaaacgaaccagaaatcgctgtgagaggctatgacaagtttttcaacgtcgaggaggtccccgagactaaatgggaaaaaatattcgcacagacgcaaggcccttacgagcttaccctcaaggagaacggctgtatcatttttattgctgggctggaagacgataccctggttgtttgcagcaaacattcgacaggagaccgagaagacattcaggttagtcacgcaagtgctggagaacaacgtctggagcagcagctggctgctgttggaaagacaaaggcagatcttgcacgagaacttcgcaagagaaacgttactgctgttgcagagctctgtgacgacgagttcgaagagcacattttggagtatggccccgataaagccggcctatatcttcacggcatgaacctcaatttgccgcaatttgccacctacccaagtcggtatgtccaggagtttgctgacgagtgggccttccgaaagactgggcttatggtaatggacgatatccaccaggtcaaaagctttctcgaagaagtggctgaaactggggctcacgatggacgagatgtcgagggttttgtcatccgctgcaaaatgtcacaagatccagccacgcagcccttccaggattggttcttcaagtacaagttcgaggagccatacttgatgtaccgccaatggagagagtgcactaaagccctgattgctggcaagcagccaaagttcaagaaacacaccaaaattacggaggagtatcttctttatgcccgaagacgacttgttgcagacccgaagctcggaaaagagtacaatagcaaccacggcatcatcgctcttcgcaacgacttcttgacttttaagaatctaaagggagcagatgcggctaatctaggcgacctggactgtccagccatgacagaggttactcgggatgtgatcttgtgtcctatcgccaccatcggttgtggcaagacgacaatcgcgatggggctatcacacctatttggctggggtcatgttcagaatgacaatatctctggcaagggccgccctccacggtttactaagatggtattggatgagctgaaagaccatcctgccgtggttgcagaccgaaacaatgcacaaagacacgagcgaaagcagattattacggatgtcaagcttcagcactctactgctaaacttgtatgtctgaacttcaaacatgacgaagaagcgattgatgagatccgacgaattacacaagaacgaattgttacgcgtggggacaaccaccagacgattcatgcagcaagcgataaagataaatttattggtgtgatggagggtttcatcaaacgatttgagccttgcaaccctcatgggcgacctgacgacggcttcgatgcgttcatagaccttgaccccacagctggtagtcgacaaaatctcgaggttgttgtaacgcagttgcacaagctgttccccaatcttgtgggggagattccatcttcagggacgcttgatgctgccattgattgtgctctcggatacaagccagaattcaggcatgatatacctgatcggggcaagaagaacagccagcagcaaaaacaacaagtgaagacgccaaaaccaaggaagatggagtacatgtccgtcagcatcccgacccaagatgtcaacagcgctctcgataacgccttcagaaacgtcccggcatcaacctctcaattgtacacacaactcaagcaaacaagacgtgtacagccaaaattccatgtcaccctgcttcacaaggctgctagcgttaaccatcccgagctttgggagcagtataccgctctacataaggaggtagaagctgctggtaaccctgaaggaaaggtcggcgaatgtgatgtaatgcttgaaagggttgtgttcgacgatcggatcatggccattgttgttcgtctggcagatcaggatgaccggtggcagtgtgtgaaccgtgtcgcgcatatcacagtcggaactcgagacaatacggtgaagcctaaagagagcaatgatctcctagccaggtggctggaagtgggcagctcccccgaaaccaagattggcgaggttgtgtttgcggggaggccgactgtgaagggaacagtgatgcctgtgctgagccgattctga

SEQ ID NO: 2421 - protein, 797 aa, Gibberella zeae PH-1
MSAPYTPQDVQAVAAVVRALDNARKDKRKNGFSVKKTSFDVKGSADGIQVESWRMQDWDYKRPNLPTYARGLFTTRTRRNEPEIAVRGYDKFFNVEEVPETKWEKIFAQTQGPYELTLKENGCIIFIAGLEDDTLVVCSKHSTGDREDIQVSHASAGEQRLEQQLAAVGKTKADLARELRKRNVTAVAELCDDEFEEHILEYGPDKAGLYLHGMNLNLPQFATYPSRYVQEFADEWAFRKTGLMVMDDIHQVKSFLEEVAETGAHDGRDVEGFVIRCKMSQDPATQPFQDWFFKYKFEEPYLMYRQWRECTKALIAGKQPKFKKHTKITEEYLLYARRRLVADPKLGKEYNSNHGIIALRNDFLTFKNLKGADAANLGDLDCPAMTEVTRDVILCPIATIGCGKTTIAMGLSHLFGWGHVQNDNISGKGRPPRFTKMVLDELKDHPAVVADRNNAQRHERKQIITDVKLQHSTAKLVCLNFKHDEEAIDEIRRITQERIVTRGDNHQTIHAASDKDKFIGVMEGFIKRFEPCNPHGRPDDGFDAFIDLDPTAGSRQNLEVVVTQLHKLFPNLVGEIPSSGTLDAAIDCALGYKPEFRHDIPDRGKKNSQQQKQQVKTPKPRKMEYMSVSIPTQDVNSALDNAFRNVPASTSQLYTQLKQTRRVQPKFHVTLLHKAASVNHPELWEQYTALHKEVEAAGNPEGKVGECDVMLERVVFDDRIMAIVVRLADQDDRWQCVNRVAHITVGTRDNTVKPKESNDLLARWLEVGSSPETKIGEVVFAGRPTVKGTVMPVLSRF

SEQ ID NO: 2422 - DNA, 2493 bp, Candida glabrata CBS 138
  CDS (1)..(2493)
atgaatctatcccgtaacgttaaagatttggttgagaaattagaggctgcttcacaattgcctgggagaggaaaagccatcaaacgaatctgtaaactgtcaaactctgatggtcaagtggttagttggaagttcaatgagtgggactacggtaaaaataacatcaaactaccatgctgcgctcgtgggctgtttataactgacgatagcaagaatcctcaaatagttgctcgaggttatgacaaattctttaatattgatgaaactccatttactcgatgggacactttagaaagcgataccaaagggacatacaatgttacgttaaaggctaatgggtgtattatctttgtatctggtatggctgatgggacattagtagtttgttcaaaacactctactgggccaagagatgacgttgacagaaatcatgccgatgctggtgagcaattccttctatcacagttgaaatccattggtatcgagcctcaacaattagcattggaactctatcaaaataatgtaactgcagtggctgaatattgtgatgacacatttgaagagcacatattggagtatacaaatgacgatgttggtttatatttacatggtataaactataatgaaaccacatttaggacatgggatatggatagtgttagtgaatttgccagaaaatacaactttaagcaaattaaatatgaaaattttaatgatttcaccttattaaagaaattcttggaagaatgctccaatagtggaacgtatcatggccaggaggtagaaggttttgtaataagatgtaaaaccagagaaaatgggaatgatttcttctttaagtataaatttgaagaaccctatctaatgtacaggcagtggagagaagttactaaggattatatttcaactaaatccagagttttcaaattcaaaaaacataaatttattaccaataagtatttagattttgtgattccaatcttagattcgagcccggccttatgtgaagagtatatgaagggatttggtattattaaactaaggaatgagtttttgaaagattttggtatgtcgggcttagaaatattgaaccatgaaaaagtattggagttggaaaatgctaataaaattgattatgatactgtagatgaacatacaaaatttttgattattcctgtggctgtaattggttgtggtaaaaccacgacagctatgacaatcaataatatctaccctgaaagttggggacatgttcaaaatgataatattactggcaaagacaactcattactaatgaagcggtctctagagttattagccaagccaggaattaaatgtgtggttgttgacagaaataatcaccaagctagagaaaggaaagagttgtttgactggatagacgagtataaggaagactacttgccctacgatacaaatattaaagtaatttgtctctcgtttaccaaaagagatgacctggaaaatgtcagggagatcacaactaatagagtttttgcaagaggtgatgatcatcaaagtatcaaattgtctaaatatggtgaaaaaaaagttatgggaattatgagcggtttcattaaaagatttcagccagttaatgaagatcgtatgccagatattatgtttgatcatgtcattgatttgactgttacagaaaaggattcttccttgatcaatgctaagagaatcctaaataacttgcatgataagtaccctgttttggtaccaactgtcccgactgatgaagaaatcagagcagcatttgagaagagtttagaatataagccgaccactgtgaaaattatcaatgagaagggcagtagaagaaataaaaataaagacaaaaaacatacatcagccccaactatgaaaaaactgaaacctgtctacttctttgctgaattaagagatccgacgaagttattacggtgtattaaagcttttatagaagagaatcggtcctcaattgataatgatagttatatacatattgacagattgtttcaagataagaaataccaggaaaaactacatgtgacattgattcacttgatgcaaggcaaaaaagggactgagactcaacaacagctgtgggatgattatttacgcagttttgatgagtatctcactgtcaatcctgaaacctttgataagaattgtgatagaatcaaaactaaatattccatcaaagtaacagtccaaagtttatattgggattcaaaaattgccacattaactgttaaacctgaattagtggaagttgaacgtgatggtagcttaaacacattggcttgttgtaatgacatccctcatataactttaggtatcctagaagaaggaattaagccagtatattcaaatgaacttctcaaaatgatgaaccaaaatgacaaagaatcaagaccagctaacagtttctgtttggaattggcagggcttgaggtacaaattgctgatgtttatatacatttatag

SEQ ID NO: 2423 - protein, 830 aa, Candida glabrata CBS 138
MNLSRNVKDLVEKLEAASQLPGRGKAIKRICKLSNSDGQVVSWKFNEWDYGKNNIKLPCCARGLFITDDSKNPQIVARGYDKFFNIDETPFTRWDTLESDTKGTYNVTLKANGCIIFVSGMADGTLVVCSKHSTGPRDDVDRNHADAGEQFLLSQLKSIGIEPQQLALELYQNNVTAVAEYCDDTFEEHILEYTNDDVGLYLHGINYNETTFRTWDMDSVSEFARKYNFKQIKYENFNDFTLLKKFLEECSNSGTYHGQEVEGFVIRCKTRENGNDFFFKYKFEEPYLMYRQWREVTKDYISTKSRVFKFKKHKFITNKYLDFVIPILDSSPALCEEYMKGFGIIKLRNEFLKDFGMSGLEILNHEKVLELENANKIDYDTVDEHTKFLIIPVAVIGCGKTTTAMTINNIYPESWGHVQNDNITGKDNSLLMKRSLELLAKPGIKCVVVDRNNHQARERKELFDWIDEYKEDYLPYDTNIKVICLSFTKRDDLENVREITTNRVFARGDDHQSIKLSKYGEKKVMGIMSGFIKRFQPVNEDRMPDIMFDHVIDLTVTEKDSSLINAKRILNNLHDKYPVLVPTVPTDEEIRAAFEKSLEYKPTTVKIINEKGSRRNKNKDKKHTSAPTMKKLKPVYFFAELRDPTKLLRCIKAFIEENRSSIDNDSYIHIDRLFQDKKYQEKLHVTLIHLMQGKKGTETQQQLWDDYLRSFDEYLTVNPETFDKNCDRIKTKYSIKVTVQSLYWDSKIATLTVKPELVEVERDGSLNTLACCNDIPHITLGILEEGIKPVYSNELLKMMNQNDKESRPANSFCLELAGLEVQIADVYIHL

SEQ ID NO: 2424 - DNA, 2442 bp, Kluyveromyces lactis NRRL Y-1140
  CDS (1)..(2442)
atggcagaacaagatgtgacagagcttgtgaaaagactcgaagaagcttctcatttgaagaagcatggtaaagctactaagatcacatgttctatatttgatagacccgatgtgaagttggacagttggaaattcaatgaatgggactatggcaaatctaaaagagtgttaccttgtagtgccagaggtttatttatccaaaatgctgattcagagcccaggatagttactagaggatacgataagttctttaacatcgacgaagtgcaaagaactagctggaggtcaattcaagataacactgaggggccatatgagattactgtcaaagagaacggatgtataattttgattggaggattggaagatggtactgttgtagtatgttcgaaacatagcactgggcccagagatgacatcaacagaaaccattcacaagctggtcagcagttcttggaacaacaattgaaggagaaaaaccttggattgaaggatcttggacggtatttatatgaagccaattgtactgctattgcagaatattgcgatgatacctttgaagaacatattttggaatataacagagacaatgcaggtctatacctacatggtttaaactacaatactgtagggttcagcacttttccaatggcaaaagtagctgaatttgcaaacgcatggggatttaagcatattgattactttactacggaagatagttcatcattgaagacattccttactgagtgcgaaaaagctggtcattacaataatcaagagattgaagggtttgtgataagatgtaaggataaatcaactggtgggacattctttttcaagtacaagtttaaagaaccttatttgatgtatcgacaatggagggaggttacaagagagtacatatctaccaaacaacgtgtcttcagataccgctcgcataactatatcaccaacaaatatatggactttgtgattcccttgttggatcgtgacccaaaactagctgatgatttcatgaacgggaagggtataataaaattgagaaaactctttctagaagattacggtatgtcaggcctagagatcctcaatttggacaagattaaagaattagaagaggcagaaaatcatgtcgaaaatgtaatcgatgaaaatacaaaatttttactagtgacaattgctacaatcggatgtggtaaatctacagtttctctcacgcttaatgagttattccctgagtcatggggactagttgtgaacgacaatataacctctaataaaacagactacattaaatcagccttgcaattattcaaagacgggaaacaatttgtgcttgctgataaaaacaatcatcagttccgtgaaagggcagctgtttttgaatggatcaatcaatatagggattcgtatattccatacaactgtaatttacaagtcatagcattgtgttttgtagacgaggtatccccagaaatgagagcattaaccatcgacagggttatgaaaagaggtgacaatcatcaaagcatcaaatctgaaagtgacgatcagcagaaggttttgaaaattatgcaaggattcatgaacagattccaaccattccttccttccaaagatcctgataacaaatttgacttccatatacaattggaagttggcaagaactcgtcgttgaaaaacactattaccgttctcaaagagttacagcgtaattatggagacgttattccctcgatcccagatgattctatcgtacatcaggcttttgaaagggctctcaattacaaaccaaccataacgaaaatcattaaaggtgggaataaaattgacaaaaagcagcataaacctgtatatttctcagctaatgtaattgacacagaccttttattgcaacatgtcagaaaaaccattgaaacacatgcatcagagtacccttctttgcttaaaagtctggattcaactcctttcaaagacgctttgcatataaccctataccataagtctcaaatcaggtctgttggtataaaagctaaacaaatgtgggccaaatacttggatagatacaaagagtatctctcaaaagaaaataactcagaggctaccaaaaacattatcgctacggaggatagtgtctctttcaaattgagagatttaatctgggataagcacgtaattctagctaccgtttccctgctagatgatacccatccaattgttatgccagatggtactcatttggaccatttgacttgccttaacaaagttcctcacataacacttgcattgttttccaatgagaaaacagcgaagtattctggtgaattggctaaagaagtgtatgagttcggtatacaagaatcggatactgatacaggtatgatcagtctagggacaactgacaaccttcagtttagcgggaaagtctgtattaatttataa

SEQ ID NO: 2425 - protein, 813 aa, Kluyveromyces lactis NRRL Y-1140
MAEQDVTELVKRLEEASHLKKHGKATKITCSIFDRPDVKLDSWKFNEWDYGKSKRVLPCSARGLFIQNADSEPRIVTRGYDKFFNIDEVQRTSWRSIQDNTEGPYEITVKENGCIILIGGLEDGTVVVCSKHSTGPRDDINRNHSQAGQQFLEQQLKEKNLGLKDLGRYLYEANCTAIAEYCDDTFEEHILEYNRDNAGLYLHGLNYNTVGFSTFPMAKVAEFANAWGFKHIDYFTTEDSSSLKTFLTECEKAGHYNNQEIEGFVIRCKDKSTGGTFFFKYKFKEPYLMYRQWREVTREYISTKQRVFRYRSHNYITNKYMDFVIPLLDRDPKLADDFMNGKGIIKLRKLFLEDYGMSGLEILNLDKIKELEEAENHVENVIDENTKFLLVTIATIGCGKSTVSLTLNELFPESWGLVVNDNITSNKTDYIKSALQLFKDGKQFVLADKNNHQFRERAAVFEWINQYRDSYIPYNCNLQVIALCFVDEVSPEMRALTIDRVMKRGDNHQSIKSESDDQQKVLKIMQGFMNRFQPFLPSKDPDNKFDFHIQLEVGKNSSLKNTITVLKELQRNYGDVIPSIPDDSIVHQAFERALNYKPTITKIIKGGNKIDKKQHKPVYFSANVIDTDLLLQHVRKTIETHASEYPSLLKSLDSTPFKDALHITLYHKSQIRSVGIKAKQMWAKYLDRYKEYLSKENNSEATKNIIATEDSVSFKLRDLIWDKHVILATVSLLDDTHPIVMPDGTHLDHLTCLNKVPHITLALFSNEKTAKYSGELAKEVYEFGIQESDTDTGMISLGTTDNLQFSGKVCINL

SEQ ID NO: 2426 - DNA, 2490 bp, Debaryomyces hansenii CBS767
  CDS (1)..(2490)
atgtttgtacccctagacccagcccatgatacaacagacgatgttaaggatcttattaatgaattggaagaaagtacattgttaaaaaaatacggaagatgtaagaaatttaccaacatcatcaacaatactgatagtgaaataactagttggaaatttaacgaatgggattattatagcaaaaatgataagaaattaccatgtaatgctagaggtttattcacagttaataacgagatcgttgtcagaggttatgacaaatttttcaacgtcaatgaggtccctgaaaccaaattcgacttcttgaagaataatacaactggcccatatgatttaacactaaaagaaaatgggtgcattatattcatatcaggtttgctgaatggtgaccttgttgtctgttcgaaacattcgacaggtcaaagagatgacttaactaggaaccatgccattcaaggtgaaatcgagattgaaaaacaattaaataaaattcacaagtcaaaaagagacttggggcttttgttgtatagtttgaatattaccgcagtaacagaattatgtaatgatgagtttgaagagcacgtattgccatactcaaaggacgcttccggcttatatttgcatggattaaacttcaataccataaaattcaagacttatccaattcaaaaagtaaacgcatttgctactgaatggggattcaaaactgtcgactactttcaaaagaattcgttcgaagacctttggaagtgcttacaagaagcagcaaaaacgggcactttcgatagtcgtgaagttgaaggttttgttatcagatgtcacttgaatggcgatgattttttcttcaagtttaagtttgaagaaccttacttactatacagacaattcagagaagtcactaaaagtttaataagcaataaattacctattagtgcaattatggcgaaagttaaaaagcataaatacatcactttaaagtatctcgatttcattaaggtattatttgctaacgaaccatcttataaagacaactttttgaaaggatttggtattattaaaataagacaattgtttttgaaagaaaatgggttgaatgcaacaagtggaattgagttaatcgaatatgatagtttagataacaagctcaaagaattatcattaaatgatgaacccacttcatacaagtatgtgttaatacctatttccacaattgggtgtggtaagactacagtattccaaacaatacttaacttattcccaaattgggctcatgttcagaacgataatatagcaaataattctaccaaaaataaattagttgttcaatgtttaacagaattagcacgatctgaaacatctttagtattttgtgataggaataaccatcagaaaagagagcgtcaacaactatttgaccagtttctcagcttgaaagatatgtatttatcggcagatattggcttaaggttcattgccattaatttcgtggatgtttctttagataaacaagaattattcgatgtcacgtatgacagaattagtaaaagaggtgataaccatcaatcaatcaaattcaacacagatgcgaagttagcaaatcaagtaatgaacggattcattaaaagatttcaaagagtggatatcaaccaagaacctgataaccaatttgatttagttataaatatgaagatctccgaagattcttctttctttaattcgaagactattattgaagaattgaaacaattccctggattggttgatgctatgccgtcggacgctgatattaaaaacagtttcaagaaggcgctagattataaacctgatttcacgaagacttttgggaagcctgaaaagaataaaaaaaaggatgcgagttctccccaaccgaaaaagacaaagaagagcatagtatattacggtgttcgaattgatatgcagaaattcaaaagtattgttgattctaaattagggtccaatccagcttgggccgaattaaataatattggtagagttcaagatgagttccacgttacgttatctcatgctagcgctgcaaaaaaagatcaagtgcaaattgatatttgggaaaacttgaataaaaagttcgactcagaatttatcttgagcaaatatgaaggaaaggatgttatgacgttagacttttattgtgatattaaattaaataaattaatcatagcgaaggataccttgatatgtgttgattcttcaattgtaaaatcgtttgatgcaaaccatgaagttgttgaactcaagtgttcaaatacgtatcctcatatcactataggtacaatggaacctgaaattaaaccgtttcaatcgaacataatcctcacccaattatttgataagcatggttatgatttacagaatggaagctatgaaatcgaaggctctacaatagttgatgttattaattttgacgatagtgtaatatttgagaagatgatgtgctttgctcatttttaa

SEQ ID NO: 2427 - protein, 829 aa, Debaryomyces hansenii CBS767
MFVPLDPAHDTTDDVKDLINELEESTLLKKYGRCKKFTNIINNTDSEITSWKFNEWDYYSKNDKKLPCNARGLFTVNNEIVVRGYDKFFNVNEVPETKFDFLKNNTTGPYDLTLKENGCIIFISGLLNGDLVVCSKHSTGQRDDLTRNHAIQGEIEIEKQLNKIHKSKRDLGLLLYSLNITAVTELCNDEFEEHVLPYSKDASGLYLHGLNFNTIKFKTYPIQKVNAFATEWGFKTVDYFQKNSFEDLWKCLQEAAKTGTFDSREVEGFVIRCHLNGDDFFFKFKFEEPYLLYRQFREVTKSLISNKLPISAIMAKVKKHKYITLKYLDFIKVLFANEPSYKDNFLKGFGIIKIRQLFLKENGLNATSGIELIEYDSLDNKLKELSLNDEPTSYKYVLIPISTIGCGKTTVFQTILNLFPNWAHVQNDNIANNSTKNKLVVQCLTELARSETSLVFCDRNNHQKRERQQLFDQFLSLKDMYLSADIGLRFIAINFVDVSLDKQELFDVTYDRISKRGDNHQSIKFNTDAKLANQVMNGFIKRFQRVDINQEPDNQFDLVINMKISEDSSFFNSKTIIEELKQFPGLVDAMPSDADIKNSFKKALDYKPDFTKTFGKPEKNKKKDASSPQPKKTKKSIVYYGVRIDMQKFKSIVDSKLGSNPAWAELNNIGRVQDEFHVTLSHASAAKKDQVQIDIWENLNKKFDSEFILSKYEGKDVMTLDFYCDIKLNKLIIAKDTLICVDSSIVKSFDANHEVVELKCSNTYPHITIGTMEPEIKPFQSNIILTQLFDKHGYDLQNGSYEIEGSTIVDVINFDDSVIFEKMMCFAHF

SEQ ID NO: 2428 - DNA, 2433 bp, Aspergillus nidulans FGSC A4
  CDS (1)..(2433)
atggcgaaggccttggaaggcgctaggctggaaaacaaaggagccaagaagaagaccttcaactgcaggaagtccacttttaaggtgggtaaggccggtgatatctctgcggattcttggaagtttatggactgggattacaaacggcgcgatctcccgacctacgctcgagggctcttcactgcgaagaggaaggacggcaccacagagatagtcactcggggctacgacaagttctttaatgtcgacgaagtcagcgcaacacagtggaggaatattgaagcgtataccgaaggcccgtatgagctcagtgtgaaagagaacggatgcatcatatttatttctggactcgaggatgggtctctgctagtctgcagcaagcattcaaccggagctcgcgcggacaccgataggagccacgcgcaggttggtgaagagtggattgagcggcatgttgcgacggttggcaaatctactgcggaattggctaagcagttgcgtgagatgaatgctactgctgtcggggaactatgtgatgacagctttgaagagcatgttcttgcgtacgattccgctgctgcaggtatctaccttcatggaatcaactataatctgcctgagtttgctactctccctagttcagaggtacataggtttgcggatgcttggggattcaagaaagcgaattttgtggtttacgatgacctcagcactgtgaaaaaattcctggagaagtgcgccgagactggctcttgggatggccgggacaccgaaggtttcgttattcgatgcaaaatgagcgagaacggccatggtccgtaccgggattggttcttcaagtacaaatttgaggagccgtacctgatgtatcggcagtggcgtgaatgcaccaaggcaattctctcaggaaaagcaccgaagatcaagaagcataagaagatcacggaggagtatttggcctacgcccgtcaacaatttgccctacatccgaagttaagggaacagtaccagcacaatcacggcatcatctctatgcgcgacgggttcctcaaggagcgtggactcaacggagctcagatcatccaaatggaagctgaaaatgttacacgggatgtcgtactggtaccaattgcatccataggctgcgggaagacaacggtaggcctggctttgacgaagctgtttggctggggccaggtccaaaatgacaacattcccaagcagaagaacaagccgaagcaattcgttgcgaacattctaaatcttttaatggacaagccggccgttatcgctgaccgaaacaatcatcagaggcgcgaacgctctcagctgataaacgatattgttgcgggttctccaaatgcccggtttgtcgctctgcattatgtccacgagccgaaagatatgatgctccctctgatccgagaggttacccgcaagcgtgtgctcgaccgtggggataaccaccagaccattcgtgcggggacaaaggatacagacgaggttcttggcatcatggagggattcctgcgccgcttcgagactgttgatgtcgatcatgagccggaccagaacttcgacgaagtcatcgatcttgatgttacagcgtcctcgcgcgaaaacctcgaaaaggttgttaatgccctacactcggcttatcctcagcttgtgacaaaggtcccatccgcccaggaactcgacgacgccatcaactatgctaccagcgagtactccgtcgaggtcgatcacagcgcctcatatggccagtccaaaccttctaaacagagcaataaaagcaacagcaacaaaaatggcggctccgaaataaacattgaagccaaggttcgaaaaatcgaatacttcggcatctcccttcccacctcctccgttactgatctccttcactccctcttcgccaacccagccatcactcctgaaaaagcccgcctttaccatcatctcgtcaactcccgccgggtccagcccgccttccacgtaaccctgatccacaaagccctcaagacagctcatccagatgtctgggaggacctggtcaaccgatacgttgggcagatgaagaaaaacccaccgaaagaccacgcactcactcctcccttagggtctgcgcgcgtccgccttgagcgccttatctgggatgataagattatgacgtttgttgcgcggatcatgcctggtgagccagaaaacagtggtgacaatgctgagccccagccagactggatctgcgttaatccacttccccatgtcacggtaggcacggtttcgccagccgtcaagccaaaggagagtaatgatctgttgcagaggtggctgcaggagggatcgcagggtacgggcatctgggagatggagatcccgggggtgaaagtcgttaacgggactgtaaatgttactatgagtcggggcaaataa

SEQ ID NO: 2429 - protein, 810 aa, Aspergillus nidulans FGSC A4
MAKALEGARLENKGAKKKTFNCRKSTFKVGKAGDISADSWKFMDWDYKRRDLPTYARGLFTAKRKDGTTEIVTRGYDKFFNVDEVSATQWRNIEAYTEGPYELSVKENGCIIFISGLEDGSLLVCSKHSTGARADTDRSHAQVGEEWIERHVATVGKSTAELAKQLREMNATAVGELCDDSFEEHVLAYDSAAAGIYLHGINYNLPEFATLPSSEVHRFADAWGFKKANFVVYDDLSTVKKFLEKCAETGSWDGRDTEGFVIRCKMSENGHGPYRDWFFKYKFEEPYLMYRQWRECTKAILSGKAPKIKKHKKITEEYLAYARQQFALHPKLREQYQHNHGIISMRDGFLKERGLNGAQIIQMEAENVTRDVVLVPIASIGCGKTTVGLALTKLFGWGQVQNDNIPKQKNKPKQFVANILNLLMDKPAVIADRNNHQRRERSQLINDIVAGSPNARFVALHYVHEPKDMMLPLIREVTRKRVLDRGDNHQTIRAGTKDTDEVLGIMEGFLRRFETVDVDHEPDQNFDEVIDLDVTASSRENLEKVVNALHSAYPQLVTKVPSAQELDDAINYATSEYSVEVDHSASYGQSKPSKQSNKSNSNKNGGSEINIEAKVRKIEYFGISLPTSSVTDLLHSLFANPAITPEKARLYHHLVNSRRVQPAFHVTLIHKALKTAHPDVWEDLVNRYVGQMKKNPPKDHALTPPLGSARVRLERLIWDDKIMTFVARIMPGEPENSGDNAEPQPDWICVNPLPHVTVGTVSPAVKPKESNDLLQRWLQEGSQGTGIWEMEIPGVKVVNGTVNVTMSRGK

SEQ ID NO: 2430 - DNA, 2499 bp, Candida albicans SC5314
  CDS (1)..(2499): transl_table=12
atgaaagattcacaatctgatataattgagctttgcaataaattaaatgaagcaacaaaactaaaacgtaatgggaaatcaatcaagctcaccaattttgtcagtaacactcaaatcaaattagattcttggaaatttttggaatgggattatggcaaaccttcggttcaacttccaattcaagcgcgtggattgtttacattaaataatgatactattgccgtaagaggatacgataaatttttcaatgttgaagaaaaaccattcacaaaagaaactaatttgaaaacctctactcatggaccctatgaagtcacattaaaagaaaatggatgcattatatttatcagtggattaagtacaggagatattgtggtttgttccaagcactctacgggagacagaattgatgataatgaaagtgacaagacaacaacggcaacggcaacggcaacggcgccgaccagaaatcatgccaaacaaggggaatttgaattattacaacaatttgatggcgatcaacaaaaagttaaacaactagcacattatttatatgaaaacaatctaacagttgttgctgagttatgtgatgatgagtttgaagagcatgtattgccttaccctaaagataaatcagggttgtacgttcatggattaaactataataccataacgtttaaaactttgccaatggatcaagttttgcaatttgccaaagagtgggggttcaaatacgtttcatacttaacatatgataatgctgacgaattattcaagttcttacacaagtgcagtgagacggggacatataatggtcgagaaattgaagggtttgtgataagatgtcaccgccaactgcataccaatggtgacactgacggggattgcttttttttcaagtataaatttgaacagccatatttgttgtatcgacaattcagagaggtgaccaaacaacttttaaatggtacacctatcaactcaatcaaaatcaagaaaaataagccaattaccaaaaagtatttacaatttgttgagaagttattcgaacaggaaccagaaattgctagaaattttgagaacggatttgatatcattaaagtgcgtcagttatttttgcaatcattaaacgaaactaatggtatgaatttgttgagtattgatagtgaattaagtgaccaattgaaaaatctagcattagctaatggtaacgaggggttgagtaccactaccaaatacatatttgttcctatcgccactattggttgcgggaagactaccgttttcaacacactaaacaaccttttcccacaatggacgcatattcaaaatgataacatttcgaaaaaggcaaaattaaaaatctgtgatttgactttattggcattagaggatgacgaccaaagtgtggttttgtttgatagaaacaattcggcatctcgtgaacgtagacaaatcttcactactattgatcaaaaaagagatgaacatttggatgatacagtggatttgaaatatattgctatcaattttatccctgaagatttatctgaagaagaactttgggatatcacttataatagagttattcaaagaggagataatcaccaatcgatcaaatcacaactggatgagaatttggtggaaagtgtcatgaaaggttttattcaaagatatcagccaataaatacttcaagatcccctgatgatcagtttgatcatgtcatacatttaaaattgtcaaaagatgagaattcgctgaagtcgtctttggagaatgttagaatcataattgatgatttggtgcaaaatttccccgatttgattaaagaaaaaccagctgatgaattaatcaatgagtgcttccaaaaagctcttgattataaacccacgtttgttaaaaacatgactgctaatactattaagaaagaccccacatattatggtattgctatgcattattcttcaattctagagaatttagaaatcgtttcccataatgaacattttcaaaatataaaatcacacattcaaacggaatttcatgtaacattgggtcatatagcaagcagtaaacaagataaagccggtcgagtcaaatggaaaaaacttgtcaagactttaggcaaaggtgatcccaataagccaaaatcagcgttgaaattttttgctgatgttaaattgcttcaaatagtaatcaacaccgataaattggcatgtattaaagttgaaatattgaaaatttacgatactaatgacgttctacaaagtgaaattgaaccaattaataaacaactccatattaccattggttgtatcccgccagctactgctgttgagtcaaacataacattggaagaattgtatgacaatccagatgaacaagaactcaaaccagatggaacttacaaatgtggtgacgatactttgcatgtatttaattttgacaacccagatttgaagttgtttagccaacaattgtttgttgcttaccaataa

SEQ ID NO: 2431 - protein, 832 aa, Candida albicans SC5314
MKDSQSDIIELCNKLNEATKLKRNGKSIKLTNFVSNTQIKLDSWKFLEWDYGKPSVQLPIQARGLFTLNNDTIAVRGYDKFFNVEEKPFTKETNLKTSTHGPYEVTLKENGCIIFISGLSTGDIVVCSKHSTGDRIDDNESDKTTTATATATAPTRNHAKQGEFELLQQFDGDQQKVKQLAHYLYENNLTVVAELCDDEFEEHVLPYPKDKSGLYVHGLNYNTITFKTLPMDQVLQFAKEWGFKYVSYLTYDNADELFKFLHKCSETGTYNGREIEGFVIRCHRQSHTNGDTDGDCFFFKYKFEQPYLLYRQFREVTKQLLNGTPINSIKIKKNKPITKKYLQFVEKLFEQEPEIARNFENGFDIIKVRQLFLQSLNETNGMNLLSIDSELSDQLKNLALANGNEGLSTTTKYIFVPIATIGCGKTTVFNTLNNLFPQWTHIQNDNISKKAKLKICDLTLLALEDDDQSVVLFDRNNSASRERRQIFTTIDQKRDEHLDDTVDLKYIAINFIPEDLSEEELWDITYNRVIQRGDNHQSIKSQSDENLVESVMKGFIQRYQPINTSRSPDDQFDHVIHLKLSKDENSSKSSLENVRIIIDDLVQNFPDLIKEKPADELINECFQKALDYKPTFVKNMTANTIKKDPTYYGIAMHYSSILENLEIVSHNEHFQNIKSHIQTEFHVTLGHIASSKQDKAGRVKWKKLVKTLGKGDPNKPKSALKFFADVKLLQIVINTDKLACIKVEILKIYDTNDVLQSEIEPINKQLHITIGCIPPATAVESNITLEELYDNPDEQELKPDGTYKCGDDTLHVFNFDNPDLKLFSQQLFVAYQ

SEQ ID NO: 2432 - DNA, 2463 bp, Neurospora crassa
  CDS (1)..(2463)
atggacgaaccactcacggatctccgaggcccactagccgccaaatacactgcttctaccgattacagcaaaattgcagacaagtttgaggtcccccatgtcgcacaggatgttcacgaggttgcgaccttgatcaacgggctcgagaatggcgccaagaaaaagaccagcttcaaggtgaaaaaaacgacttacgaagttgcccagtcgcgtgaccacatccgtgtcgactcgtggcgcttccatgactgggactacaagaaacatgacctacccacatatgcccgcggtctcttcaccaccagacacaaggacggaacacctgagattaccacccgtggctacgacaagttcttcaacgtcgacgaggtcacggagaccaagtgggaaaacatcaggaacaggacgcgaggcccctacgaactgacgctgaaggaaaacggctgcatcatcttcgtcagtggtcttgccgacgacacactgctcgtctgcagcaaacactcgactggcgaccgtagtgatgtcgaaaccagtcatgccagcgctggtgagcgcaggttggaggagcagttggcacgcattggtaagacaaaggccgatcttgcacgggagttgaggagacggaatgtcacggctgtggcagaactctgcgacgacagcttcgaggagcacattctggcgtacggacccgacaaggccggcctgtatttgcatggcatgaacctcaaccttcccgagttcatgacttacccctcgcctgtcgttcagaaattcgcagaggaatgggggttcatcaaaactggcctgatcgtcattgacactatcgacgaggtcaaggctttcctcgaggaggtagctgaaagtggcgcccacgacggccgcgatgtagagggttttgtcattcgctgcaagatgtcttaccagcctgggcagcagcccttccaggattggttcttcaagtacaagttcgaagagccctatctaatgtatcgacagtggcgtgagtgcaccaaggccatcatcgcaggaaagccgccaaagttcaagaagcacgtcaagattaccgaggagtatcttctctacgctcgtcagcgtctagctggtgatcgggagctggccaagcgctacaaccaaaatcacgggattattgctctccgaaacgattttctcgctttcaaaaacctcaagggttccgacgctgccaacttcgaggccttgcatgggggaggagctgccgctgacgttgagagtgatatcatcctggtcccgatcgccaccatcggctgcggaaagacgacggttggtcttgctctcactcacttgtttggctggggtcacgtccaaaacgacaacatcaccggtaaagcccggccgcctcgctttaccaaggctcttctcgacatccttgacgaaggtgtccccgcagtctatgccgaccgcaacaatgcgcaaaagcatgagcgtaagcagctcatcaccgacgtcaagatacagcacgcccgcgcccggcttgtggcgctccacttcgttcacaatgatctcgaaaaagtccgcgaggtttgccgggatcgtgtctttgcacggggtgataatcatcaaaccatccaggccgcctcggatatgaacaaggttcgtggcatcatggagggattcatcaaccgcttcgagccttgcgacccagaacagaagcctgactcggaattcgacgatatcatcgaccttgatccttcggcaggaagcagacaaaacctggagactgtcatcaaggagctccatcgcatgtaccccaagttcatgcccaacatcccctctgcagcagaaatggacgaagccatccaatatgccctcgaaggctacaagcctgatttgcgtcacgtcatccccgaccgcagtaacaagaacaagaaccagcctaagcagaacggtcagcagcaacagcagaagcagaaaaagcgacccctggagtacatgtccgtcgacatgacgaccaaggatgtgcttaacactcttgagaaggcgtttgccgctgctggcccggagcaatcccgctttttcaagcagctccagggcactcgccgcctctgggatagatatctgcgcatcaacgagcttgaaggacccaactctccagacgggaagctcggagagatcgacgtccagcttgagcgtgtggtttatgacgaccgtatcatggctgtcgtggttcgcttgatccccagacccggggacgaacacgccaatcccgatagcagtgagcctgcagagccaaagtggcagtgcacaaaccgtgttgcacatatcacggttggaacgagagatgatagtgtcaagcctagggagagcaatgacttgcttgtcaagtggttggagcatggtacgggagcggagaccggaatctacgacctgttgatcgatggtaagcccacgttgcagggagttgtcaggggggtcctctcgagatag

SEQ ID NO: 2433 - protein, 820 aa, Neurospora crassa
MDEPLTDLRGPLAAKYTASTDYSKIADKFEVPHVAQDVHEVATLINGLENGAKKKTSFKVKKTTYEVAQSRDHIRVDSWRFHDWDYKKHDLPTYARGLFTTRHKDGTPEITTRGYDKFFNVDEVTETKWENIRNRTRGPYELTLKENGCIIFVSGLADDTLLVCSKHSTGDRSDVETSHASAGERRLEEQLARIGKTKADLARELRRRNVTAVAELCDDSFEEHILAYGPDKAGLYLHGMNLNLPEFMTYPSPVVQKFAEEWGFIKTGLIVIDTIDEVKAFLEEVAESGAHDGRDVEGFVIRCKMSYQPGQQPFQDWFFKYKFEEPYLMYRQWRECTKAIIAGKPPKFKKHVKITEEYLLYARQRLAGDRELAKRYNQNHGIIALRNDFLAFKNLKGSDAANFEALHGGGAAADVESDIILVPIATIGCGKTTVGLALTHLFGWGHVQNDNITGKARPPRFTKALLDILDEGVPAVYADRNNAQKHERKQLITDVKIQHARARLVALHFVHNDLEKVREVCRDRVFARGDNHQTIQAASDMNKVRGIMEGFINRFEPCDPEQKPDSEFDDIIDLDPSAGSRQNLETVIKELHRMYPKFMPNIPSAAEMDEAIQYALEGYKPDLRHVIPDRSNKNKNQPKQNGQQQQQKQKKRPLEYMSVDMTTKDVLNTLEKAFAAAGPEQSRFFKQLQGTRRLWDRYLRINELEGPNSPDGKLGEIDVQLERVVYDDRIMAVVVRLIPRPGDEHANPDSSEPAEPKWQCTNRVAHITVGTRDDSVKPRESNDLLVKWLEHGTGAETGIYDLLIDGKPTLQGVVRGVLSR

SEQ ID NO: 2434 - DNA, 2499 bp, Candida albicans
  CDS (1)..(2499): transl_table=12
atgaaagattcacaatctgatataattgagctttgcaataaattaaatgaagcaacaaaactaaaacgtaatgggaaatcaatcaagctcaccaattttgtcagtaacactcaaatcaaattagattcttggaaatttttggaatgggattatggcaaaccttcggttcaacttccaattcaagcgcgtggattgtttacattaaataatgatactattgccgtaagaggatacgataaatttttcaatgttgaagaaaaaccattcacaaaagaaactaatttgaaaacctctactcatggaccctatgaagtcacattaaaagaaaatggatgcattatatttatcagtggattaagtacaggagatattgtggtttgttccaagcactctacgggagacagaattgatgataatgaaagtgacaagacaacaacggcaacggcaacggcaacggcgccgaccagaaatcatgccaaacaaggggaatttgaattattacaacaatttgatggcgatcaacaaaaagttaaacaactagcacattatttatatgaaaacaatctaacagttgttgctgagttatgtgatgatgagtttgaagagcatgtattgccttaccctaaagataaatcagggttgtacgttcatggattaaactataataccataacgtttaaaactttgccaatggatcaagttttgcaatttgccaaagagtgggggttcaaatacgtttcatacttaacatatgataatgctgacgaattattcaagttcttacacaagtgcagtgagacggggacatataatggtcgagaaattgaagggtttgtgataagatgtcaccgccaactgcataccaatggtgacactgacggggattgcttttttttcaagtataaatttgaacagccatatttgttgtatcgacaattcagagaggtgaccaaacaacttttaaatggtacacctatcaactcaatcaaaatcaagaaaaataagccaattaccaaaaagtatttacaatttgttgagaagttattcgaacaggaaccagaaattgctagaaattttgagaacggatttgatatcattaaagtgcgtcagttatttttgcaatcattaaacgaaactaatggtatgaatttgttgagtattgatagtgaattaagtgaccaattgaaaaatctagcattagctaatggtaacgaggggttgagtaccactaccaaatacatatttgttcctatcgccactattggttgcgggaagactaccgttttcaacacactaaacaaccttttcccacaatggacgcatattcaaaatgataacatttcgaaaaaggcaaaattaaaaatctgtgatttgactttattggcattagaggatgacgaccaaagtgtggttttgtttgatagaaacaattcggcatctcgtgaacgtagacaaatcttcactactattgatcaaaaaagagatgaacatttggatgatacagtggatttgaaatatattgctatcaattttatccctgaagatttatctgaagaagaactttgggatatcacttataatagagttattcaaagaggagataatcaccaatcgatcaaatcaaaactggatgagaatttggtggaaagtgtcatgaaaggttttattcaaagatatcagccaataaatacttcaagatcccctgatgatcagtttgatcatgtcatacatttaaaattgtcaaaagatgagaattcgctgaagtcgtctttggagaatgttagaatcataattgatgatttggtgcaaaatttccccgatttgattaaagaaaaaccagctgatgaattaatcaatgagtgcttccaaaaagctcttgattataaacccacgtttgttaaaaacatgactgctaatactattaagaaagaccccacatattatggtattgctatgcattattcttcaattctagagaatttagaaatcgtttcccataatgaacattttcaaaatataaaatcacacattcaaacggaatttcatgtaacattgggtcatatagcaagcagtaaacaagataaagccggtcgagtcaaatggaaaaaacttgtcaagactttaggcaaaggtgatcccaataagccaaaatcagcgttgaaattttttgctgatgttaaattgcttcaaatagtaatcaacaccgataaattggcatgtattaaagttgaaatattgaaaatttacgatactaatgacgttctacaaagtgaaattgaaccaattaataaacaactccatattaccattggttgtattccgccagctactgctgttgagtcaaacatgacattggaagaattgtatgacaatccagatgaacaagaactcaaaccagatggaacttacaaatgcggtgacgatactttgcatgtatttaattttgacaacccagatttgaagttgtttagccaacaattgtttgttgcttaccaataa

SEQ ID NO: 2435 - protein, 832 aa, Candida albicans
MKDSQSDIIELCNKLNEATKLKRNGKSIKLTNFVSNTQIKLDSWKFLEWDYGKPSVQLPIQARGLFTLNNDTIAVRGYDKFFNVEEKPFTKETNLKTSTHGPYEVTLKENGCIIFISGLSTGDIVVCSKHSTGDRIDDNESDKTTTATATATAPTRNHAKQGEFELLQQFDGDQQKVKQLAHYLYENNLTVVAELCDDEFEEHVLPYPKDKSGLYVHGLNYNTITFKTLPMDQVLQFAKEWGFKYVSYLTYDNADELFKFLHKCSETGTYNGREIEGFVIRCHRQSHTNGDTDGDCFFFKYKFEQPYLLYRQFREVTKQLLNGTPINSIKIKKNKPITKKYLQFVEKLFEQEPEIARNFENGFDIIKVRQLFLQSLNETNGMNLLSIDSELSDQLKNLALANGNEGLSTTTKYIFVPIATIGCGKTTVFNTLNNLFPQWTHIQNDNISKKAKLKICDLTLLALEDDDQSVVLFDRNNSASRERRQIFTTIDQKRDEHLDDTVDLKYIAINFIPEDLSEEELWDITYNRVIQRGDNHQSIKSKSDENLVESVMKGFIQRYQPINTSRSPDDQFDHVIHLKLSKDENSSKSSLENVRIIIDDLVQNFPDLIKEKPADELINECFQKALDYKPTFVKNMTANTIKKDPTYYGIAMHYSSILENLEIVSHNEHFQNIKSHIQTEFHVTLGHIASSKQDKAGRVKWKKLVKTLGKGDPNKPKSALKFFADVKLLQIVINTDKLACIKVEILKIYDTNDVLQSEIEPINKQLHITIGCIPPATAVESNMTLEELYDNPDEQELKPDGTYKCGDDTLHVFNFDNPDLKLFSQQLFVAYQ

SEQ ID NO: 2436 - DNA, 24 bp, Artificial sequence
  primer
atgcctagcccatatgacggtaaa

SEQ ID NO: 2437 - DNA, 27 bp, Artificial sequence
  primer
ctaaaaatttaaatatacactgccaac

SEQ ID NO: 2438 - protein, 816 aa, Artificial sequence
  consensus sequence
  Variant (5)..(6): Xaa in position 5 to 6 is any amino acid
  Variant (10)..(13): Xaa in position 10 to 13 is any amino acid
  Variant (14)..(16): Xaa in position 14 to 16 is any or no amino acid
  Variant (19)..(20): Xaa in position 19 to 20 is any amino acid
  Variant (26)..(30): Xaa in position 26 to 30 is any amino acid
  Variant (31)..(35): Xaa in position 31 to 35 is any or no amino acid
  Variant (37)..(38): Xaa in position 37 to 38 is any amino acid
  Variant (48)..(48): Xaa in position 48 is any amino acid
  Variant (50)..(52): Xaa in position 50 to 52 is any amino acid
  Variant (54)..(61): Xaa in position 54 to 61 is any amino acid
  Variant (63)..(63): Xaa in position 63 is any amino acid
  Variant (67)..(68): Xaa in position 67 to 68 is any amino acid
  Variant (70)..(70): Xaa in position 70 is any amino acid
  Variant (83)..(88): Xaa in position 83 to 88 is any amino acid
  Variant (97)..(97): Xaa in position 97 is any amino acid
  Variant (99)..(99): Xaa in position 99 is any amino acid
  Variant (101)..(104): Xaa in position 101 to 104 is any amino acid
  Variant (105)..(120): Xaa in position 105 to 120 is any or no amino acid
  Variant (123)..(124): Xaa in position 123 to 124 is any amino acid
  Variant (127)..(128): Xaa in position 127 to 128 is any amino acid
  Variant (130)..(131): Xaa in position 130 to 131 is any amino acid
  Variant (133)..(142): Xaa in position 133 to 142 is any amino acid
  Variant (145)..(146): Xaa in position 145 to 146 is any amino acid
  Variant (148)..(150): Xaa in position 148 to 150 is any amino acid
  Variant (152)..(152): Xaa in position 152 is any amino acid
  Variant (158)..(158): Xaa in position 158 is any amino acid
  Variant (162)..(162): Xaa in position 162 is any amino acid
  Variant (167)..(167): Xaa in position 167 is any amino acid
  Variant (169)..(169): Xaa in position 169 is any amino acid
  Variant (171)..(172): Xaa in position 171 to 172 is any amino acid
  Variant (174)..(175): Xaa in position 174 to 175 is any amino acid
  Variant (182)..(182): Xaa in position 182 is any amino acid
  Variant (184)..(184): Xaa in position 184 is any amino acid
  Variant (186)..(188): Xaa in position 186 to 188 is any amino acid
  Variant (190)..(190): Xaa in position 190 is any amino acid
  Variant (192)..(192): Xaa in position 192 is any amino acid
  Variant (194)..(196): Xaa in position 194 to 196 is any amino acid
  Variant (198)..(199): Xaa in position 198 to 199 is any amino acid
  Variant (202)..(203): Xaa in position 202 to 203 is any amino acid
  Variant (207)..(222): Xaa in position 207 to 222 is any amino acid
  Variant (225)..(230): Xaa in position 225 to 230 is any amino acid
  Variant (232)..(234): Xaa in position 232 to 234 is any amino acid
  Variant (236)..(238): Xaa in position 236 to 238 is any amino acid
  Variant (246)..(252): Xaa in position 246 to 252 is any amino acid
  Variant (253)..(261): Xaa in position 253 to 261 is any or no amino acid
  Variant (273)..(273): Xaa in position 273 is any amino acid
  Variant (277)..(277): Xaa in position 277 is any amino acid
  Variant (280)..(280): Xaa in position 280 is any amino acid
  Variant (283)..(290): Xaa in position 283 to 290 is any amino acid
  Variant (291)..(296): Xaa in position 291 to 296 is any or no amino acid
  Variant (298)..(299): Xaa in position 298 to 299 is any amino acid
  Variant (302)..(303): Xaa in position 302 to 303 is any amino acid
  Variant (306)..(307): Xaa in position 306 to 307 is any amino acid
  Variant (310)..(319): Xaa in position 310 to 319 is any amino acid
  Variant (321)..(330): Xaa in position 321 to 330 is any amino acid
  Variant (334)..(335): Xaa in position 334 to 335 is any amino acid
  Variant (337)..(338): Xaa in position 337 to 338 is any amino acid
  Variant (341)..(346): Xaa in position 341 to 346 is any amino acid
  Variant (347)..(349): Xaa in position 347 to 349 is any or no amino acid
  Variant (351)..(368): Xaa in position 351 to 368 is any amino acid
  Variant (369)..(385): Xaa in position 369 to 385 is any or no amino acid
  Variant (389)..(389): Xaa in position 389 is any amino acid
  Variant (397)..(400): Xaa in position 397 to 400 is any amino acid
  Variant (402)..(403): Xaa in position 402 to 403 is any amino acid
  Variant (406)..(406): Xaa in position 406 is any amino acid
  Variant (407)..(408): Xaa in position 407 to 408 is any or no amino acid
  Variant (410)..(410): Xaa in position 410 is any amino acid
  Variant (412)..(412): Xaa in position 412 is any amino acid
  Variant (418)..(438): Xaa in position 418 to 438 is any amino acid
  Variant (439)..(441): Xaa in position 439 to 441 is any or no amino acid
  Variant (443)..(444): Xaa in position 443 to 444 is any amino acid
  Variant (449)..(451): Xaa in position 449 to 451 is any amino acid
  Variant (455)..(455): Xaa in position 455 is any amino acid
  Variant (457)..(486): Xaa in position 457 to 486 is any amino acid
  Variant (487)..(495): Xaa in position 487 to 495 is any or no amino acid
  Variant (497)..(498): Xaa in position 497 to 498 is any amino acid
  Variant (501)..(502): Xaa in position 501 to 502 is any amino acid
  Variant (509)..(509): Xaa in position 509 is any amino acid
  Variant (511)..(518): Xaa in position 511 to 518 is any amino acid
  Variant (519)..(519): Xaa in position 519 is any or no amino acid
  Variant (521)..(523): Xaa in position 521 to 523 is any amino acid
  Variant (525)..(525): Xaa in position 525 is any amino acid
  Variant (528)..(529): Xaa in position 528 to 529 is any amino acid
  Variant (531)..(532): Xaa in position 531 to 532 is any amino acid
  Variant (534)..(539): Xaa in position 534 to 539 is any amino acid
  Variant (542)..(543): Xaa in position 542 to 543 is any amino acid
  Variant (546)..(547): Xaa in position 546 to 547 is any amino acid
  Variant (549)..(549): Xaa in position 549 is any amino acid
  Variant (551)..(558): Xaa in position 551 to 558 is any amino acid
  Variant (559)..(564): Xaa in position 559 to 564 is any or no amino acid
  Variant (566)..(572): Xaa in position 566 to 572 is any amino acid
  Variant (574)..(576): Xaa in position 574 to 576 is any amino acid
  Variant (577)..(577): Xaa in position 577 is any or no amino acid
  Variant (579)..(579): Xaa in position 579 is any amino acid
  Variant (581)..(584): Xaa in position 581 to 584 is any amino acid
  Variant (586)..(596): Xaa in position 586 to 596 is any amino acid
  Variant (599)..(599): Xaa in position 599 is any amino acid
  Variant (600)..(600): Xaa in position 600 is any or no amino acid
  Variant (604)..(650): Xaa in position 604 to 650 is any amino acid
  Variant (651)..(684): Xaa in position 651 to 684 is any or no amino acid
  Variant (686)..(688): Xaa in position 686 to 688 is any amino acid
  Variant (690)..(690): Xaa in position 690 is any amino acid
  Variant (693)..(693): Xaa in position 693 is any amino acid
  Variant (695)..(695): Xaa in position 695 is any amino acid
  Variant (696)..(708): Xaa in position 696 to 708 is any or no amino acid
  Variant (710)..(734): Xaa in position 710 to 734 is any amino acid
  Variant (735)..(751): Xaa in position 735 to 751 is any or no amino acid
  Variant (753)..(776): Xaa in position 753 to 776 is any amino acid
  Variant (777)..(790): Xaa in position 777 to 790 is any or no amino acid
  Variant (792)..(792): Xaa in position 792 is any amino acid
  Variant (794)..(796): Xaa in position 794 to 796 is any amino acid
  Variant (800)..(800): Xaa in position 800 is any amino acid
  Variant (802)..(810): Xaa in position 802 to 810 is any amino acid
  Variant (811)..(811): Xaa in position 811 is any or no amino acid
  Variant (814)..(815): Xaa in position 814 to 815 is any amino acid
SWKFXXWDYXXXXXXXLPXXARGLFXXXXXXXXXXIXXRGYDKFFNVXEXXXTXXXXXXXXTXGPYXXTXKENGCIIFISGLXXXXXXVCSKHSTGXRXDXXXXXXXXXXXXXXXXXXXXHAXXGEXXLXXQXXXXXXXXXXLAXXLXXXNXTAVAEXCDDXFEEHXLXYXXDXXGLYLHGXNXNXXXFXTXPXXXVXXFAXXWGFXXXXXXXXXXXXXXXXFLXXXXXXGXXXGXXXEGFVIRCXXXXXXXXXXXXXXXXFFKYKFEEPYLXYRQXREXTKXXXXXXXXXXXXXXKXXKHXXITXXYLXXXXXXXXXXPXXXXXXXXXXGIIXXRXXFLXXXXXXXXXGXXXXXXXXXXXXXXXXXXXXXXXXXXXXXXXXXXXPIAXIGCGKTTXXXXLXXLFXXXWXHXQNDNIXXXXXXXXXXXXXXXXXXXXXXXXVXXDRNNXXXRERXQXXXXXXXXXXXXXXXXXXXXXXXXXXXXXXXXXXXXXXXTXXRVXXRGDNHQXIXXXXXXXXXVXXXMXGFXXRXXPXXXXXXPDXXFDXXIXLXXXXXXXXXXXXXXNXXXXXXXLXXXXPXLXXXXPXXXXXXXXXXXALXXYKPXXXXXXXXXXXXXXXXXXXXXXXXXXXXXXXXXXXXXXXXXXXXXXXXXXXXXXXXXXXXXXXXXXXXXXXXXXXXXXXXXQXXXHXTLXHXXXXXXXXXXXXXXWXXXXXXXXXXXXXXXXXXXXXXXXXXXXXXXXXXXXXXXXXXLXXXXXXXXXXXXXXXXXXXXXXXXXXXXXXXXXXXXXXCXNXXXHITXGXXXXXXXXXXSNXXL

SEQ ID NO: 2439 - protein, 60 aa, Artificial sequence
  protein pattern
  Variant (9)..(9): Xaa in position 9 is any or no amino acid
  Variant (11)..(13): Xaa in position 11 to 13 is any amino acid
  Variant (14)..(14): Xaa in position 14 is any or no amino acid
  Variant (16)..(19): Xaa in position 16 to 19 is any amino acid
  Variant (20)..(20): Xaa in position 20 is Ile or Leu
  Variant (21)..(23): Xaa in position 21 to 23 is any amino acid
  Variant (24)..(24): Xaa in position 24 is Cys, Ser or Thr
  Variant (25)..(25): Xaa in position 25 is any amino acid
  Variant (29)..(29): Xaa in position 29 is Asp or Glu
  Variant (30)..(30): Xaa in position 30 is Leu or Val
  Variant (31)..(31): Xaa in position 31 is Ser or Thr
  Variant (32)..(32): Xaa in position 32 is Ile, Leu or Val
  Variant (34)..(34): Xaa in position 34 is Ala or Glu
  Variant (41)..(41): Xaa in position 41 is Ile or Val
  Variant (42)..(42): Xaa in position 42 is Ala or Ser
  Variant (45)..(45): Xaa in position 45 is any amino acid
  Variant (46)..(46): Xaa in position 46 is Asp, Asn or Thr
  Variant (47)..(47): Xaa in position 47 is Asp or Gly
  Variant (48)..(48): Xaa in position 48 is Asp, Ser or Thr
  Variant (49)..(49): Xaa in position 49 is Ile or Leu
  Variant (50)..(50): Xaa in position 50 is Leu or Val
  Variant (59)..(59): Xaa in position 59 is any amino acid
GYDKFFNVXEXXXXTXXXXXXXXXXGPYXXXXKXNGCIIFXXGLXXXXXXVCSKHSTGXR

SEQ ID NO: 2440 - protein, 61 aa, Artificial sequence
  protein pattern
  Variant (2)..(4): Xaa in position 2 to 4 is any amino acid
  Variant (6)..(6): Xaa in position 6 is Ala, Ile, Leu or Val
  Variant (8)..(8): Xaa in position 8 is any or no amino acid
  Variant (10)..(10): Xaa in position 10 is any amino acid
  Variant (11)..(11): Xaa in position 11 is any or no amino acid
  Variant (13)..(13): Xaa in position 13 is any amino acid
  Variant (15)..(15): Xaa in position 15 is Asp or Asn
  Variant (17)..(17): Xaa in position 17 is Glu, Ser or Thr
  Variant (22)..(22): Xaa in position 22 is Ile or Val
  Variant (24)..(24): Xaa in position 24 is any amino acid
  Variant (26)..(26): Xaa in position 26 is Asp, Gly, Pro, Ser or Thr
  Variant (27)..(27): Xaa in position 27 is any amino acid
  Variant (28)..(28): Xaa in position 28 is Ala, Asp or Glu
  Variant (29)..(29): Xaa in position 29 is any amino acid
  Variant (30)..(30): Xaa in position 30 is Ala, Ser or Val
  Variant (32)..(32): Xaa in position 32 is Ile or Leu
  Variant (34)..(34): Xaa in position 34 is Leu or Val
  Variant (37)..(37): Xaa in position 37 is Ile, Leu, Met or Val
  Variant (39)..(39): Xaa in position 39 is any amino acid
  Variant (41)..(43): Xaa in position 41 to 43 is any amino acid
  Variant (45)..(45): Xaa in position 45 is any amino acid
  Variant (47)..(47): Xaa in position 47 is any amino acid
  Variant (48)..(48): Xaa in position 48 is Asp or Pro
  Variant (49)..(51): Xaa in position 49 to 51 is any amino acid
  Variant (53)..(54): Xaa in position 53 to 54 is any amino acid
  Variant (55)..(55): Xaa in position 55 is Phe or Met
  Variant (57)..(58): Xaa in position 57 to 58 is any amino acid
  Variant (59)..(59): Xaa in position 59 is Trp or Tyr
  Variant (60)..(60): Xaa in position 60 is Ala, Gly or Asn
LXXXNXTXVXXEXCXDXFEEHXLXYXXXXXGXYXHGXNXNXXXFXTXXXXXVXXXAXXXXF

SEQ ID NO: 2441 - protein, 26 aa, Artificial sequence
  protein pattern
  Variant (8)..(8): Xaa in position 8 is Glu or Gln
  Variant (12)..(12): Xaa in position 12 is Leu or Met
  Variant (16)..(16): Xaa in position 16 is Phe or Trp
  Variant (19)..(19): Xaa in position 19 is Cys or Val
  Variant (22)..(22): Xaa in position 22 is Ala, Asp or Gln
  Variant (23)..(23): Xaa in position 23 is any amino acid
  Variant (24)..(24): Xaa in position 24 is Ile or Leu
  Variant (25)..(25): Xaa in position 25 is Ala, Asn or Ser
  Variant (26)..(26): Xaa in position 26 is Gly, Asn or Thr
FFKYKFEXPYLXYRQXREXTKXXXXX

SEQ ID NO: 2442 - protein, 45 aa, Artificial sequence
  protein pattern
  Variant (2)..(3): Xaa in position 2 to 3 is any amino acid
  Variant (5)..(5): Xaa in position 5 is any amino acid
  Variant (6)..(6): Xaa in position 6 is any or no amino acid
  Variant (8)..(8): Xaa in position 8 is any or no amino acid
  Variant (11)..(11): Xaa in position 11 is any amino acid
  Variant (12)..(12): Xaa in position 12 is Glu or Lys
  Variant (15)..(15): Xaa in position 15 is any amino acid
  Variant (16)..(16): Xaa in position 16 is Phe or Tyr
  Variant (17)..(17): Xaa in position 17 is Ala or Val
  Variant (18)..(20): Xaa in position 18 to 20 is any amino acid
  Variant (21)..(21): Xaa in position 21 is Phe or Leu
  Variant (22)..(26): Xaa in position 22 to 26 is any amino acid
  Variant (27)..(27): Xaa in position 27 is Ile or Leu
  Variant (28)..(28): Xaa in position 28 is any amino acid
  Variant (29)..(29): Xaa in position 29 is Glu, Lys or Arg
  Variant (30)..(30): Xaa in position 30 is any amino acid
  Variant (31)..(31): Xaa in position 31 is Phe or Tyr
  Variant (32)..(33): Xaa in position 32 to 33 is any amino acid
  Variant (34)..(34): Xaa in position 34 is Gly or Asn
  Variant (35)..(35): Xaa in position 35 is Phe or His
  Variant (36)..(36): Xaa in position 36 is Asp or Gly
  Variant (37)..(37): Xaa in position 37 is Ile or Val
  Variant (39)..(39): Xaa in position 39 is any amino acid
  Variant (40)..(40): Xaa in position 40 is Leu, Met or Val
  Variant (42)..(42): Xaa in position 42 is Asp, Asn or Gln
  Variant (43)..(43): Xaa in position 43 is any amino acid
KXXKXXKXITXXYLXXXXXXXXXXXXXXXXXXXXXXXIXXRXXFL

SEQ ID NO: 2443 - protein, 24 aa, Artificial sequence
  protein pattern
  Variant (3)..(3): Xaa in position 3 is Asp, Glu or His
  Variant (4)..(4): Xaa in position 4 is any amino acid
  Variant (5)..(5): Xaa in position 5 is Cys or Val
  Variant (6)..(6): Xaa in position 6 is Ala or Ser
  Variant (7)..(7): Xaa in position 7 is Ala, Glu or Asn
  Variant (8)..(8): Xaa in position 8 is Ser or Thr
  Variant (10)..(10): Xaa in position 10 is Ala, Ser or Thr
  Variant (11)..(11): Xaa in position 11 is Phe, His, Trp or Tyr
  Variant (12)..(12): Xaa in position 12 is any amino acid
  Variant (14)..(14): Xaa in position 14 is Gln or Arg
  Variant (15)..(15): Xaa in position 15 is Asp or Glu
  Variant (16)..(16): Xaa in position 16 is any amino acid
  Variant (24)..(24): Xaa in position 24 is His or Lys
FLXXXXXXGXXXGXXXEGFVIRCX

SEQ ID NO: 2444 - protein, 24 aa, Artificial sequence
  protein pattern
  Variant (2)..(3): Xaa in position 2 to 3 is any or no amino acid
  Variant (5)..(5): Xaa in position 5 is Ile or Val
  Variant (6)..(6): Xaa in position 6 is Ala or Ser
  Variant (7)..(7): Xaa in position 7 is Thr or Val
  Variant (15)..(17): Xaa in position 15 to 17 is any amino acid
  Variant (18)..(18): Xaa in position 18 is Ala, Gly or Thr
  Variant (19)..(19): Xaa in position 19 is Ile or Leu
  Variant (20)..(21): Xaa in position 20 to 21 is any amino acid
  Variant (22)..(22): Xaa in position 22 is Ile or Leu
  Variant (23)..(23): Xaa in position 23 is Phe or Tyr
  Variant (24)..(24): Xaa in position 24 is Gly or Pro
IXXPXXXIGCGKTTXXXXXXXXXX

SEQ ID NO: 2445 - protein, 38 aa, Artificial sequence
  protein pattern
  Variant (2)..(4): Xaa in position 2 to 4 is any or no amino acid
  Variant (6)..(6): Xaa in position 6 is any or no amino acid
  Variant (9)..(9): Xaa in position 9 is Ile or Leu
  Variant (10)..(10): Xaa in position 10 is any amino acid
  Variant (12)..(12): Xaa in position 12 is Phe or Tyr
  Variant (13)..(13): Xaa in position 13 is Glu or Gln
  Variant (14)..(15): Xaa in position 14 to 15 is any amino acid
  Variant (16)..(16): Xaa in position 16 is Asp or Asn
  Variant (17)..(20): Xaa in position 17 to 20 is any amino acid
  Variant (23)..(24): Xaa in position 23 to 24 is any amino acid
  Variant (27)..(27): Xaa in position 27 is any amino acid
  Variant (28)..(28): Xaa in position 28 is Phe, Ile, Met or Val
  Variant (30)..(30): Xaa in position 30 is any amino acid
  Variant (31)..(31): Xaa in position 31 is Leu or Met
  Variant (32)..(33): Xaa in position 32 to 33 is any amino acid
  Variant (34)..(34): Xaa in position 34 is Gly, Ser or Thr
  Variant (35)..(36): Xaa in position 35 to 36 is any amino acid
  Variant (37)..(37): Xaa in position 37 is Asp, Glu or Ser
  Variant (38)..(38): Xaa in position 38 is Asn, Arg or Ser
VXXXMXGFXXRXXXXXXXXXPDXXFDXXIXXXXXXXXX

SEQ ID NO: 2446 - protein, 16 aa, Artificial sequence
  protein pattern
  Variant (2)..(3): Xaa in position 2 to 3 is any amino acid
  Variant (5)..(5): Xaa in position 5 is any or no amino acid
  Variant (7)..(7): Xaa in position 7 is any amino acid
  Variant (8)..(8): Xaa in position 8 is any or no amino acid
  Variant (11)..(12): Xaa in position 11 to 12 is Asp or Asn
  Variant (15)..(15): Xaa in position 15 is Asn, Ser or Thr
TXXRXVXXRGXXHQXI

SEQ ID NO: 2447 - protein, 12 aa, Artificial sequence
  protein pattern
  Variant (4)..(4): Xaa in position 4 is Phe or Leu
  Variant (5)..(5): Xaa in position 5 is any amino acid
  Variant (6)..(6): Xaa in position 6 is Asp or Glu
  Variant (10)..(11): Xaa in position 10 to 11 is any or no amino acid
SWKXXXWDYXXK

SEQ ID NO: 2448 - protein, 26 aa, Artificial sequence
  protein pattern
  Variant (2)..(2): Xaa in position 2 is any amino acid
  Variant (3)..(3): Xaa in position 3 is any or no amino acid
  Variant (8)..(9): Xaa in position 8 to 9 is any amino acid
  Variant (10)..(10): Xaa in position 10 is any or no amino acid
  Variant (12)..(12): Xaa in position 12 is any or no amino acid
  Variant (15)..(15): Xaa in position 15 is any amino acid
  Variant (16)..(16): Xaa in position 16 is Glu or Gln
  Variant (17)..(17): Xaa in position 17 is Ile or Leu
  Variant (18)..(18): Xaa in position 18 is Phe, Ile or Leu
  Variant (19)..(19): Xaa in position 19 is Asp, Glu, Gly, Asn or Thr
  Variant (20)..(20): Xaa in position 20 is any amino acid
  Variant (21)..(21): Xaa in position 21 is Phe, Ile, Leu or Val
  Variant (22)..(25): Xaa in position 22 to 25 is any amino acid
  Variant (26)..(26): Xaa in position 26 is Asp, Glu, Pro or Ser
VXXDRNNXXXRXERXXXXXXXXXXXX

SEQ ID NO: 2449 - protein, 10 aa, Artificial sequence
  protein pattern
  Variant (2)..(2): Xaa in position 2 is Ala, Gly or Thr
  Variant (3)..(3): Xaa in position 3 is any amino acid
  Variant (4)..(4): Xaa in position 4 is Ile or Val
  Variant (8)..(8): Xaa in position 8 is Asp or Asn
  Variant (10)..(10): Xaa in position 10 is Ala, Pro, Ser or Thr
WXXXQNDXIX

SEQ ID NO: 2450 - DNA, 1725 bp, Saccharomyces cerevisiae
  CDS (1)..(1725)
atgtcaattaggcctctcacgttaaacggtttagatgagccagaaacctcttttgaagaactgaatacaactctacctcgctttcaatcccatgaaacattaactttggaagaaaacgtgccaccattgagtacatcaacttatataccgcctccatcctcggtaggtacttctgacactggcacggtattttccaatagtaccagcgcgttttggtctaataagcaagcagacgatgatcaggacatggaggtagaccaggatgatgaatttctaaatgacttccaggaattccaaaataaaaaggatgattttgacgatgctattaaaacaaattttcatttgagaaatggatgtcgaactggccctttcaaaaacgacattttcgcagaagagtttgatagaaaactgagtttggaagataaaccaaggctaaagcaacctagatcaatgatggaattgaaaccaaaaagaaaactatcaaatagcgtcacttcaagaaacttaaggtctggtaattctgtaagatttaagaaatctatgcctaacttagctttagttaatccagctatcagagaagaagaagaggacgaagaacgagaaagagaagatcaacgagagtttaattacaagattgataacgatacgcaggacacaattttggcgaaattcagttcagatgatgaaggtgactttctgacaggatttgaagaattagagggtgaagcaattgatgaaacgatttcttcgaacgataaagaaagtgccgaccatccgcgtttcttaaagaagtcatcctcatctttgccattaaaaatatcacctgcacaatatgatatagtaaagcatgacgaattattaactccaggtcttcataggcgacaacgagattggaatacccagcaggaactggactcttttaaagaaaaacgatcagtaagacactgttctaatcaaaatgtacaactcaatggtccagctaaaatcaaaacaataaaacagcaaattgatcataatactccaatgaagaaaggttctatgatatataacccgaaaactatgaagtgggaaggaaatgaaaacgtcttaagcaaatttagtgatgtagacacggcaaacaggaaagctttattgataaaaaacaagctacaacgagatgcagattctaagaagcaaaaatattctgatctacagcatgcaagagccacttcgagaaatcaaaaggtcatcgggaacatgattttagatgaacaaaatttaagatgggttagtgtttcagaggaagaagcagacccttttgcaggcattcctgagataaacttaccaccagttggcaaaagtatgaaaaaacgtagctcctcaccatttttgcgttccaaaagccaagttaatacgccatttgtttcaaatgacaatgatggcgtttatcaaagtacggctgctcaagcaagactccgtaaataccattcaatgaggacacttaacggtacaacagaaactccagaaataagctctactttccatttgagttcaagagcattggaaaaattttaccacgaggagaacaggtggtgtaaaaagttagcctcatggtttataccccgagatgagaccattatcagtgttgatgaggaaacaatcatggatgaaagtacggtcaatagcaagagaaaatcctatatgtatgaaatcaggaacatggtaatcaattcgacaaaagattag

SEQ ID NO: 2451 - protein, 574 aa, Saccharomyces cerevisiae
MSIRPLTLNGLDEPETSFEELNTTLPRFQSHETLTLEENVPPLSTSTYIPPPSSVGTSDTGTVFSNSTSAFWSNKQADDDQDMEVDQDDEFLNDFQEFQNKKDDFDDAIKTNFHLRNGCRTGPFKNDIFAEEFDRKLSLEDKPRLKQPRSMMELKPKRKLSNSVTSRNLRSGNSVRFKKSMPNLALVNPAIREEEEDEEREREDQREFNYKIDNDTQDTILAKFSSDDEGDFLTGFEELEGEAIDETISSNDKESADHPRFLKKSSSSLPLKISPAQYDIVKHDELLTPGLHRRQRDWNTQQELDSFKEKRSVRHCSNQNVQLNGPAKIKTIKQQIDHNTPMKKGSMIYNPKTMKWEGNENVLSKFSDVDTANRKALLIKNKLQRDADSKKQKYSDLQHARATSRNQKVIGNMILDEQNLRWVSVSEEEADPFAGIPEINLPPVGKSMKKRSSSPFLRSKSQVNTPFVSNDNDGVYQSTAAQARLRKYHSMRTLNGTTETPEISSTFHLSSRALEKFYHEENRWCKKLASWFIPRDETIISVDEETIMDESTVNSKRKSYMYEIRNMVINSTKD

SEQ ID NO: 2452 - DNA, 1737 bp, Saccharomyces pastorianus
  CDS (1)..(1737)
atgtcaattagacctcttacgctaaatggcttggatgatccggagacttcttttgaggaattgaatacaacacttccgcgatttcaatcccacgaaacatcaacattgagagatagcgcgccaccattgagcacatcaacgtatttaccgactccatcatcaataggtacttccgacactggaacggttttttcaaacagcgctgatgcattctggtctgataaacaaggtgacaatgatcaagatatggaagtagaacaggatgacgaatttttgaatgatttccaagaatttcaaaacaagaaggatgattttgatgatgctataaagacaaattttcatttacgaaacaagtgtgggtctactcccttcaagaacgttgatttcgtaaacgaatttgataaaaaactgaattttgaactagacaaaccaagattaaagcagcccagatcgatgatggagctaaagtcaagaaggaaactgtcaaacagtgtatcttcaaaaaatttgaaaggcgggaattcagtgagattcaaaaaatccatgccaaacttagcgttatttagttcaacgatccgagaagaagaagaagaagaagaagaaggtaaaggggaggaacaacaagaacaggattatgaagatgatgatacacagggtacaattttggcgagattcagttctgatgacgagggtggatttttaacaggattcggagaattggaagacgaacctctcgatcaaacattttccctaagccgtggacaagaccttaaacggcccccattcttaaaaaggaagtctgcttcatcgttgccattaaagatatcgcctactcagtatgacatagtaaaacatgacgaactactaacgcccggtctccatagccggcaacgggaatggaatactcaacaggaactagattcttttagagaggaacgaccagttagacgttatcccagccacaatttacaacttcatggaccagctaaaatcaaaacaataaaacaacagattgatcacaacactccgatgaagaagggttcaatggtatataatcctcagactatgaagtgggaaggaaatgaaaatgtattaaacaaattcagcgatgtggatacagcgaacaggaaagctttactaataaagaataagctccagcgagatgctgatgatcatactgcaaaacaaaaaagatattccgatctacagaactcaagatccgcttcaaggaatcaaaaggttgtcggtaatatggtcctcgatgaacaaaatttgagatgggtaagtatatctgaggatgaagccgacccttttgcaggtattccggagataaatccaccaccagtgagaacaactatgaagaaacgcagctcttctccattcttacgttcccaaagccaactgagcccatcaccttcctcaaatggtaataatggtgggtatcaaagtacggcagctcaggtaagactacgaaaataccattccatgaggtcactaaatgctccacccgaagatttggcgctgaacacaactttccacttgagctcaaaaacactggaaaaattttatcacgaggagaatagatggaacagaaagttggcatcttggttcataccacaagacgagaccattaccggcgtcgacgaagaaactatggatgaaagcaccattggtggcaagagaaaatcttacatgtacgaaataaggaatatggtaataaactcgacaaaagattaa

SEQ ID NO: 2453 - protein, 578 aa, Saccharomyces pastorianus
MSIRPLTLNGLDDPETSFEELNTTLPRFQSHETSTLRDSAPPLSTSTYLPTPSSIGTSDTGTVFSNSADAFWSDKQGDNDQDMEVEQDDEFLNDFQEFQNKKDDFDDAIKTNFHLRNKCGSTPFKNVDFVNEFDKKLNFELDKPRLKQPRSMMELKSRRKLSNSVSSKNLKGGNSVRFKKSMPNLALFSSTIREEEEEEEEGKGEEQQEQDYEDDDTQGTILARFSSDDEGGFLTGFGELEDEPLDQTFSLSRGQDLKRPPFLKRKSASSLPLKISPTQYDIVKHDELLTPGLHSRQREWNTQQELDSFREERPVRRYPSHNLQLHGPAKIKTIKQQIDHNTPMKKGSMVYNPQTMKWEGNENVLNKFSDVDTANRKALLIKNKLQRDADDHTAKQKRYSDLQNSRSASRNQKVVGNMVLDEQNLRWVSISEDEADPFAGIPEINPPPVRTTMKKRSSSPFLRSQSQLSPSPSSNGNNGGYQSTAAQVRLRKYHSMRSLNAPPEDLALNTTFHLSSKTLEKFYHEENRWNRKLASWFIPQDETITGVDEETMDESTIGGKRKSYMYEIRNMVINSTKD

SEQ ID NO: 2454 - DNA, 1734 bp, Candida glabrata CBS 138
  CDS (1)..(1734)
atgtcgatcagaccggcaaatatgatggattatgatcttccagaaacgtcctttgaagatattgatgcaacgtttagtagagatgtcccaacatcaagtgtacggaatactttagatatgcaacaaagcatgccggtagaagatagaaaggtgttgcaagagatagtacagcccacgccatcatctataacaacatccgatactggaaccatattctcaggaagcaggaaacagagttggctcaataatctagcatctgatgaagacaaaagtgatgggtttgaagatggtgaagagttcttgagcgatttccaggaatttcagaacagaaaggatgactttgatgaggccattaaatctcatttcaacctacagaagagaagctgtcggggagactacgatttggctacagattttgaaagaaaggttaatatcaatccaaacagtcagagaagatcactacgacagccaagatcaatgatggacatgcatccactaagatctgaaaactcgttcaatcctcatagacttcaaaatagtatatcaacaaacaatctacaccgtcctaatagactagggtctttacattttaagaaatcaatgccatctctttcgtcttataatcctgtaatagaagaagaaccaaggtattggaaaaagtcttgggatatagaagaagctgaagaagatgacgactatttcgatgaggacttcgatgaagatggacaagagacatttgatcttgatgaaaagactctaaaaaatagagtgcagtcaaatatacctactagtaaaacaccatttaaaatatctccgactcaatttgatataatccaacaagatgatctactaactccacgcttgcacaagaaacagaaagagctgaggtataaacataatctagaagcgtttaaagaaactagcaaagctagaaggcgacgtcatactgccaagtcgaaaatacaaactatcaaacaacaaattgaccacaacacaccaatgaaaagtggccttatgtattataatccaaaaaaaatggcatgggaaggaaatgaaagagtactggataaatttcaggatattatatctattgacaagcgtccattattgatcaggaataaaagtaatatttcacctaatgaaactttaacatacactggaagtgacaacaacaacgtccaagataatggttccaacagtacgttctcttcaaccacaaatccgcgagtcgtaggcaaaatgatgttcgatgaaagaaatctaaggtgggtgagtgtcaataacgatgaaattgatccatttgcagagatagaagaaaatattcctgaacctatactaggtaaaccaaaacggtcttcaccatttcttcgatcaagaagtcaactaatatcatctaataacccagaagtgtcattcaccgaaagtgacgtcccaggaaatgataagtttgcaattggcgtcaagaagagggataggtatgcatccacatctgcagccataagcaaacgtgcaggcgatagagccgatatggagagagtctatcgcctttcttcaaaagaactggagagattatatcatgaagaaaaccgttggcaacgcaaagtcggtggatggtttgtgctaggagatggcgaccaacaagatcgaacaatggcacagtatgacccctcagataagggcaacaactttatgtatgaaataagaaagatggtaatcaactctacgaaaaattga

SEQ ID NO: 2455 - protein, 577 aa, Candida glabrata CBS 138
MSIRPANMMDYDLPETSFEDIDATFSRDVPTSSVRNTLDMQQSMPVEDRKVLQEIVQPTPSSITTSDTGTIFSGSRKQSWLNNLASDEDKSDGFEDGEEFLSDFQEFQNRKDDFDEAIKSHFNLQKRSCRGDYDLATDFERKVNINPNSQRRSLRQPRSMMDMHPLRSENSFNPHRLQNSISTNNLHRPNRLGSLHFKKSMPSLSSYNPVIEEEPRYWKKSWDIEEAEEDDDYFDEDFDEDGQETFDLDEKTLKNRVQSNIPTSKTPFKISPTQFDIIQQDDLLTPRLHKKQKELRYKHNLEAFKETSKARRRRHTAKSKIQTIKQQIDHNTPMKSGLMYYNPKKMAWEGNERVLDKFQDIISIDKRPLLIRNKSNISPNETLTYTGSDNNNVQDNGSNSTFSSTTNPRVVGKMMFDERNLRWVSVNNDEIDPFAEIEENIPEPILGKPKRSSPFLRSRSQLISSNNPEVSFTESDVPGNDKFAIGVKKRDRYASTSAAISKRAGDRADMERVYRLSSKELERLYHEENRWQRKVGGWFVLGDGDQQDRTMAQYDPSDKGNNFMYEIRKMVINSTKN

SEQ ID NO: 2456 - DNA, 1830 bp, Kluyveromyces lactis NRRL Y-1140
  CDS (1)..(1830)
atgtctatacgtccagttgtactggatgatgtcggagaaacatcatttgaagatgttgaaagcacatttacttataaagatgatatagaggtaccgagattggcacctaattcagctacatccacaactacggaaaataccacattctctaaggataagaggtattcatcacacacggaactggcgagcgatcttgatgatgatatgaactataacagtgattttgaagagtaccaaaatggtacagacctacctcttgctgtggatagacgatttagggaaagttcggatcaggacgagctagctgatttgcaagaacaactggagaagaagctatcattgaacctgagaaattctaagaccggtggtggtagtggtactagaaatgtggatcaatatataaaccatgcgggactagtgcggccatcgttgaaggattcggtacgacagcgtagatcgatggtcgatttggcaacccgtagtaaaggtaatattacaagcttgaattcacagcaatcgcgtcgagtaccgaacagcaggtcttatatgaaccttagacccagttctggtcgaactctcagttataagtcatctatgccatcgttaatgaggttcaaccgtcaagatgtgttacttgaggacgaagatgacgaagatgacgatgaagatgaagatgatgaaccctatccatatgtgcccagagttagaaggagttacagggatcttggaccaaggtttggtgaaagaactgatgacggtaacgttgtccaagacattgctgttgaggctacagaaatggctaataatggagacgacgatgacgataatttcggtaatgattttgaaggaattgacgataacttccagttcgctactaataacaacaataacttttcagcatttgatccaacattacgtttatcaccctcagagtatgatatcgaacatgatgacactttattaacaccacagctgcataagaagcattatgcgttcgacgctccgttggattcgtatagggaagctcgtcaacaacggggtacggcaaaacaggccgctgctgctgctgctgttaacagacgtaattctacaagagctcgtgctcgtttaaagacaataagacaagaaattgatctcaacacgccgttgaaaagaggtaagatgaaatacaacccaagggagaaacgatgggatggtaatgaggatattttaagcagtttcgataacattgaaaatgtcgatcggaaagcgtttatcatcaagaacaaaaggtcaaagtctccgttgaagacttcgtcctctactcaaatagcggcatcagggacgaatgcggcctcctcaaattctcagcatgggaaggtcgtgggaaaaatgagatttgatgaaaagaacctaagatggctacgagttgatggtactgaagaagatccgtttcatggtatcacagacttgatgccaagatctcaatcttcacctaccaagaacgtcaaattccaatcacaaggacattctggtaacattcttcgatcacagtctcaactgccgttcggaagagatgagcatggaaatagatttatctcttcagaatccacacgattccactctttgactacaaactcaaccacagatcctacgtaccaaattacaagcaaacaattagagaagttttaccatgaagagaataaatggagcaggaaggtaggtggatggttcattcttggtgataaatctagagacactggttccgcagaccagtcacataccagtttaaatgacaaatcatacatgtacgaaatcaggaatatggttatctcatcagcgcgtaactga

SEQ ID NO: 2457 - protein, 609 aa, Kluyveromyces lactis NRRL Y-1140
MSIRPVVLDDVGETSFEDVESTFTYKDDIEVPRLAPNSATSTTTENTTFSKDKRYSSHTELASDLDDDMNYNSDFEEYQNGTDLPLAVDRRFRESSDQDELADLQEQLEKKLSLNLRNSKTGGGSGTRNVDQYINHAGLVRPSLKDSVRQRRSMVDLATRSKGNITSLNSQQSRRVPNSRSYMNLRPSSGRTLSYKSSMPSLMRFNRQDVLLEDEDDEDDDEDEDDEPYPYVPRVRRSYRDLGPRFGERTDDGNVVQDIAVEATEMANNGDDDDDNFGNDFEGIDDNFQFATNNNNNFSAFDPTLRLSPSEYDIEHDDTLLTPQLHKKHYAFDAPLDSYREARQQRGTAKQAAAAAAVNRRNSTRARARLKTIRQEIDLNTPLKRGKMKYNPREKRWDGNEDILSSFDNIENVDRKAFIIKNKRSKSPLKTSSSTQIAASGTNAASSNSQHGKVVGKMRFDEKNLRWLRVDGTEEDPFHGITDLMPRSQSSPTKNVKFQSQGHSGNILRSQSQLPFGRDEHGNRFISSESTRFHSLTTNSTTDPTYQITSKQLEKFYHEENKWSRKVGGWFILGDKSRDTGSADQSHTSLNDKSYMYEIRNMVISSARN

SEQ ID NO: 2458 - DNA, 25 bp, Artificial sequence
  primer
atgtcaattaggcctctcacgttaa

SEQ ID NO: 2459 - DNA, 26 bp, Artificial sequence
  primer
ctaatcttttgtcgaattgattacca

SEQ ID NO: 2460 - protein, 639 aa, Artificial sequence
  consensus sequence
  Variant (6)..(12): Xaa in position 6 to 12 is any amino acid
  Variant (13)..(14): Xaa in position 13 to 14 is any or no amino acid
  Variant (20)..(23): Xaa in position 20 to 23 is any amino acid
  Variant (25)..(66): Xaa in position 25 to 66 is any amino acid
  Variant (67)..(74): Xaa in position 67 to 74 is any or no amino acid
  Variant (76)..(98): Xaa in position 76 to 98 is any amino acid
  Variant (99)..(102): Xaa in position 99 to 102 is any or no amino acid
  Variant (104)..(105): Xaa in position 104 to 105 is any amino acid
  Variant (107)..(155): Xaa in position 107 to 155 is any amino acid
  Variant (156)..(156): Xaa in position 156 is any or no amino acid
  Variant (158)..(158): Xaa in position 158 is any amino acid
  Variant (162)..(171): Xaa in position 162 to 171 is any amino acid
  Variant (172)..(184): Xaa in position 172 to 184 is any or no amino acid
  Variant (187)..(190): Xaa in position 187 to 190 is any amino acid
  Variant (193)..(200): Xaa in position 193 to 200 is any amino acid
  Variant (201)..(203): Xaa in position 201 to 203 is any or no amino acid
  Variant (205)..(205): Xaa in position 205 is any amino acid
  Variant (209)..(209): Xaa in position 209 is any amino acid
  Variant (211)..(219): Xaa in position 211 to 219 is any amino acid
  Variant (220)..(222): Xaa in position 220 to 222 is any or no amino acid
  Variant (224)..(246): Xaa in position 224 to 246 is any amino acid
  Variant (247)..(253): Xaa in position 247 to 253 is any or no amino acid
  Variant (255)..(286): Xaa in position 255 to 286 is any amino acid
  Variant (287)..(315): Xaa in position 287 to 315 is any or no amino acid
  Variant (318)..(320): Xaa in position 318 to 320 is any amino acid
  Variant (323)..(325): Xaa in position 323 to 325 is any amino acid
  Variant (327)..(327): Xaa in position 327 is any amino acid
  Variant (332)..(332): Xaa in position 332 is any amino acid
  Variant (335)..(343): Xaa in position 335 to 343 is any amino acid
  Variant (344)..(345): Xaa in position 344 to 345 is any or no amino acid
  Variant (347)..(350): Xaa in position 347 to 350 is any amino acid
  Variant (352)..(367): Xaa in position 352 to 367 is any amino acid
  Variant (368)..(381): Xaa in position 368 to 381 is any or no amino acid
  Variant (384)..(384): Xaa in position 384 is any amino acid
  Variant (386)..(386): Xaa in position 386 is any amino acid
  Variant (389)..(389): Xaa in position 389 is any amino acid
  Variant (393)..(393): Xaa in position 393 is any amino acid
  Variant (395)..(395): Xaa in position 395 is any amino acid
  Variant (397)..(397): Xaa in position 397 is any amino acid
  Variant (399)..(399): Xaa in position 399 is any amino acid
  Variant (403)..(406): Xaa in position 403 to 406 is any amino acid
  Variant (408)..(408): Xaa in position 408 is any amino acid
  Variant (412)..(413): Xaa in position 412 to 413 is any amino acid
  Variant (415)..(416): Xaa in position 415 to 416 is any amino acid
  Variant (418)..(429): Xaa in position 418 to 429 is any amino acid
  Variant (431)..(431): Xaa in position 431 is any amino acid
  Variant (434)..(459): Xaa in position 434 to 459 is any amino acid
  Variant (460)..(468): Xaa in position 460 to 468 is any or no amino acid
  Variant (470)..(470): Xaa in position 470 is any amino acid
  Variant (472)..(472): Xaa in position 472 is any amino acid
  Variant (474)..(475): Xaa in position 474 to 475 is any amino acid
  Variant (478)..(478): Xaa in position 478 is any amino acid
  Variant (483)..(488): Xaa in position 483 to 488 is any amino acid
  Variant (490)..(490): Xaa in position 490 is any amino acid
  Variant (494)..(495): Xaa in position 494 to 495 is any amino acid
  Variant (497)..(506): Xaa in position 497 to 506 is any amino acid
  Variant (507)..(508): Xaa in position 507 to 508 is any or no amino acid
  Variant (510)..(518): Xaa in position 510 to 518 is any amino acid
  Variant (520)..(541): Xaa in position 520 to 541 is any amino acid
  Variant (542)..(555): Xaa in position 542 to 555 is any or no amino acid
  Variant (557)..(576): Xaa in position 557 to 576 is any amino acid
  Variant (577)..(578): Xaa in position 577 to 578 is any or no amino acid
  Variant (580)..(581): Xaa in position 580 to 581 is any amino acid
  Variant (584)..(585): Xaa in position 584 to 585 is any amino acid
  Variant (591)..(591): Xaa in position 591 is any amino acid
  Variant (593)..(594): Xaa in position 593 to 594 is any amino acid
  Variant (596)..(598): Xaa in position 596 to 598 is any amino acid
  Variant (601)..(603): Xaa in position 601 to 603 is any amino acid
  Variant (605)..(624): Xaa in position 605 to 624 is any amino acid
  Variant (625)..(628): Xaa in position 625 to 628 is any or no amino acid
  Variant (634)..(634): Xaa in position 634 is any amino acid
  Variant (638)..(638): Xaa in position 638 is any amino acid
MSIRPXXXXXXXXXETSFEXXXXTXXXXXXXXXXXXXXXXXXXXXXXXXXXXXXXXXXXXXXXXXXXXXXXXXXSXXXXXXXXXXXXXXXXXXXXXXXXXXXDXXEXXXXXXXXXXXXXXXXXXXXXXXXXXXXXXXXXXXXXXXXXXXXXXXXXXQXRSMXXXXXXXXXXXXXXXXXXXXXXXNSXXXXNLXXXXXXXXXXXKXSMPXLXXXXXXXXXXXXEXXXXXXXXXXXXXXXXXXXXXXXXXXXXXXFXXXXXXXXXXXXXXXXXXXXXXXXXXXXXXXXXXXXXXXXXXXXXXXXXXXXXXXXXXXXXSPXXXDIXXXDXLLTPXLHXXXXXXXXXXXLXXXXEXXXXXXXXXXXXXXXXXXXXXXXXXXXXXXTIXQXIDXNTPXKXGXMXYNPXXXXWXGNEXXLXXFXXXXXXXXXXXXIXNKXXXXXXXXXXXXXXXXXXXXXXXXXXXXXXXXXXXVXGXMXXDEXNLRWXXXXXXEXDPFXXIXXXXXXXXXXXXKXXXXXXXXXSXXXXXXXXXXXXXXXXXXXXXXXXXXXXXXXXXXXXSXXXXXXXXXXXXXXXXXXXXXXSXXLEXXYHEENXWXXKXXXWFXXXDXXXXXXXXXXXXXXXXXXXXXXXXMYEIRXMVIXS

SEQ ID NO: 2461 - protein, 57 aa, Artificial sequence
  protein pattern
  Variant (2)..(5): Xaa in position 2 to 5 is any or no amino acid
  Variant (8)..(8): Xaa in position 8 is Lys or Arg
  Variant (10)..(10): Xaa in position 10 is Glu or Gln
  Variant (13)..(13): Xaa in position 13 is any amino acid
  Variant (17)..(17): Xaa in position 17 is Leu or Met
  Variant (19)..(19): Xaa in position 19 is any amino acid
  Variant (21)..(21): Xaa in position 21 is any amino acid
  Variant (23)..(23): Xaa in position 23 is any amino acid
  Variant (27)..(30): Xaa in position 27 to 30 is any amino acid
  Variant (32)..(32): Xaa in position 32 is Asp or Glu
  Variant (36)..(36): Xaa in position 36 is Asp, Asn or Arg
  Variant (37)..(37): Xaa in position 37 is Ile or Val
  Variant (39)..(39): Xaa in position 39 is Asp, Asn or Ser
  Variant (40)..(40): Xaa in position 40 is any amino acid
  Variant (42)..(42): Xaa in position 42 is Asp, Gln or Ser
  Variant (43)..(43): Xaa in position 43 is Asp or Asn
  Variant (44)..(44): Xaa in position 44 is Ile or Val
  Variant (45)..(45): Xaa in position 45 is any amino acid
  Variant (46)..(46): Xaa in position 46 is Asn, Ser or Thr
  Variant (47)..(47): Xaa in position 47 is Ala, Ile or Val
  Variant (48)..(48): Xaa in position 48 is Asp or Asn
  Variant (49)..(50): Xaa in position 49 to 50 is Lys or Arg
  Variant (51)..(51): Xaa in position 51 is Ala or Pro
  Variant (52)..(52): Xaa in position 52 is Phe or Leu
  Variant (53)..(53): Xaa in position 53 is Ile or Leu
  Variant (55)..(55): Xaa in position 55 is Lys or Arg
KXXXXTIXQXIDXNTPXKXGXMXYNPXXXXWXGNEXXLXXFXXXXXXXXXXXXIXNK

SEQ ID NO: 2462 - protein, 36 aa, Artificial sequence
  protein pattern
  Variant (2)..(2): Xaa in position 2 is any amino acid
  Variant (3)..(5): Xaa in position 3 to 5 is any or no amino acid
  Variant (7)..(7): Xaa in position 7 is any amino acid
  Variant (8)..(8): Xaa in position 8 is any or no amino acid
  Variant (11)..(11): Xaa in position 11 is any amino acid
  Variant (16)..(16): Xaa in position 16 is Leu or Val
  Variant (17)..(17): Xaa in position 17 is Arg or Ser
  Variant (18)..(18): Xaa in position 18 is Ile or Val
  Variant (19)..(19): Xaa in position 19 is Asp, Asn or Ser
  Variant (20)..(20): Xaa in position 20 is Glu, Gly or Asn
  Variant (21)..(21): Xaa in position 21 is Asp, Glu or Thr
  Variant (23)..(23): Xaa in position 23 is any amino acid
  Variant (27)..(27): Xaa in position 27 is any amino acid
  Variant (28)..(28): Xaa in position 28 is Glu or Gly
  Variant (30)..(30): Xaa in position 30 is Glu, Pro or Thr
  Variant (31)..(31): Xaa in position 31 is Asp or Glu
  Variant (32)..(33): Xaa in position 32 to 33 is any amino acid
  Variant (34)..(34): Xaa in position 34 is Leu or Pro
  Variant (35)..(35): Xaa in position 35 is any amino acid
  Variant (36)..(36): Xaa in position 36 is Pro or Ser
KXXXXMXXDEXNLRWXXXXXXEXDPFXXIXXXXXXX

SEQ ID NO: 2463 - protein, 28 aa, Artificial sequence
  protein pattern
  Variant (2)..(2): Xaa in position 2 is any amino acid
  Variant (3)..(3): Xaa in position 3 is any or no amino acid
  Variant (5)..(5): Xaa in position 5 is any amino acid
  Variant (6)..(9): Xaa in position 6 to 9 is any or no amino acid
  Variant (15)..(15): Xaa in position 15 is Lys or Arg
  Variant (17)..(17): Xaa in position 17 is any amino acid
  Variant (18)..(18): Xaa in position 18 is Lys or Arg
  Variant (20)..(20): Xaa in position 20 is Leu or Val
  Variant (21)..(21): Xaa in position 21 is Ala or Gly
  Variant (22)..(22): Xaa in position 22 is Gly or Ser
  Variant (25)..(25): Xaa in position 25 is Ile or Val
  Variant (26)..(26): Xaa in position 26 is Leu or Pro
  Variant (27)..(27): Xaa in position 27 is any amino acid
LXXKXXXXXYHEENXWXXKXXXWFXXXD

SEQ ID NO: 2464 - protein, 24 aa, Artificial sequence
  protein pattern
  Variant (3)..(3): Xaa in position 3 is Ala, Ser or Thr
  Variant (4)..(4): Xaa in position 4 is Glu or Gln
  Variant (5)..(5): Xaa in position 5 is Phe or Tyr
  Variant (8)..(10): Xaa in position 8 to 10 is any amino acid
  Variant (12)..(12): Xaa in position 12 is Asp, Glu or Thr
  Variant (17)..(17): Xaa in position 17 is any amino acid
  Variant (20)..(20): Xaa in position 20 is any amino acid
  Variant (21)..(21): Xaa in position 21 is Lys or Arg
  Variant (22)..(23): Xaa in position 22 to 23 is any amino acid
  Variant (24)..(24): Xaa in position 24 is Ala, Asp or Glu
SPXXXDIXXXDXLLTPXLHXXXXX

SEQ ID NO: 2465 - protein, 18 aa, Artificial sequence
  protein pattern
  Variant (2)..(3): Xaa in position 2 to 3 is any amino acid
  Variant (4)..(5): Xaa in position 4 to 5 is any or no amino acid
  Variant (11)..(11): Xaa in position 11 is any amino acid
  Variant (15)..(15): Xaa in position 15 is Asn or Ser
  Variant (17)..(17): Xaa in position 17 is Ala or Thr
  Variant (18)..(18): Xaa in position 18 is Lys or Arg
KXXXXMYEIRXMVIXSXX

SEQ ID NO: 2466 - protein, 18 aa, Artificial sequence
  protein pattern
  Variant (2)..(2): Xaa in position 2 is any amino acid
  Variant (3)..(3): Xaa in position 3 is Asp or Gln
  Variant (4)..(4): Xaa in position 4 is Glu or Asn
  Variant (6)..(6): Xaa in position 6 is Gly or Gln
  Variant (8)..(9): Xaa in position 8 to 9 is any or no amino acid
  Variant (11)..(11): Xaa in position 11 is any or no amino acid
  Variant (13)..(13): Xaa in position 13 is Asp or Glu
  Variant (14)..(14): Xaa in position 14 is Asp, Glu or Gly
  Variant (15)..(15): Xaa in position 15 is Ala or Ile
  Variant (16)..(16): Xaa in position 16 is any amino acid
  Variant (17)..(17): Xaa in position 17 is Asp or Lys
  Variant (18)..(18): Xaa in position 18 is Asn, Ser or Thr
DXXXFXNXXDXFXXXXXX

SEQ ID NO: 2467 - protein, 39 aa, Artificial sequence
  protein pattern
  Variant (2)..(2): Xaa in position 2 is any amino acid
  Variant (3)..(4): Xaa in position 3 to 4 is any or no amino acid
  Variant (6)..(6): Xaa in position 6 is any or no amino acid
  Variant (8)..(8): Xaa in position 8 is Ala or Ser
  Variant (9)..(9): Xaa in position 9 is any amino acid
  Variant (10)..(10): Xaa in position 10 is Gly, Ser or Thr
  Variant (12)..(12): Xaa in position 12 is Ser or Thr
  Variant (13)..(13): Xaa in position 13 is Asp or Thr
  Variant (14)..(14): Xaa in position 14 is Glu or Thr
  Variant (15)..(15): Xaa in position 15 is Gly or Asn
  Variant (17)..(17): Xaa in position 17 is any amino acid
  Variant (20)..(20): Xaa in position 20 is any amino acid
  Variant (21)..(21): Xaa in position 21 is Asp or Ser
  Variant (22)..(27): Xaa in position 22 to 27 is any amino acid
  Variant (28)..(28): Xaa in position 28 is Asp, Asn or Thr
  Variant (29)..(30): Xaa in position 29 to 30 is any amino acid
  Variant (31)..(31): Xaa in position 31 is Ala or Gly
  Variant (32)..(32): Xaa in position 32 is Asp or Ser
  Variant (33)..(33): Xaa in position 33 is Asp or Asn
  Variant (34)..(34): Xaa in position 34 is any amino acid
  Variant (35)..(35): Xaa in position 35 is Asp or Gln
  Variant (36)..(36): Xaa in position 36 is Asp or Lys
  Variant (37)..(38): Xaa in position 37 to 38 is any amino acid
  Variant (39)..(39): Xaa in position 39 is Gly, Asn or Val
PXXXPXSXXXTXXXXTXFSXXXXXXXXXXXXXXXXXXXX

SEQ ID NO: 2468 - protein, 17 aa, Artificial sequence
  protein pattern
  Variant (2)..(2): Xaa in position 2 is Asn, Arg or Ser
  Variant (3)..(6): Xaa in position 3 to 6 is any amino acid
  Variant (8)..(8): Xaa in position 8 is any or no amino acid
  Variant (12)..(12): Xaa in position 12 is Asn or Ser
  Variant (14)..(16): Xaa in position 14 to 16 is any amino acid
  Variant (17)..(17): Xaa in position 17 is Asn or Ser
GXXXXXKXSMPXLXXXX

SEQ ID NO: 2469 - DNA, 2670 bp, Saccharomyces cerevisiae
  CDS (1)..(2670)
atgatgcctgatgacaattcaaactcgtccactcaaaactcaagcgcattatacaaggacctgaggaaagaatatgaatctcttttcactttaaaggaagattctgggttagagatttcaccaatattcaatgtccttccacctaaaaaggattatcctgactactacgcagtgatcaagaaccctgtatctttcaatactttaaaaaagcgtattccacattatacagatgctcaacagtttatgaacgatgttgtccagattccatggaatgccaagacttacaatacaagagattcaggaatttataaatacgccttagtccttgagaaatatttaaaggacacaatctatccaaatttaaaagaaaaatatcctcaattagtgtatcctgatttgggtcctctacccgatgaaccaggttatgaagagtttcaacagaaattaagagaaaaagctgaggaagtagcgagagctaatgcagccagagccgagtcgagctcttcaatgaattcaacagaagcagccagaagattaagaaagactcgtacttccgtcaaaagagaatcagaaccaggaaccgatacaaataatgatgaggactatgaggcgacggatatggatatcgataaccctaaggatgctgattttcctgatttgataagaaagccactaataaatattaatccatatactcggaaaccattaagagacaacaggtccactactccatctcactcaggcacccctcagccgttaggcccaaggcatagacaggtatccagaactcaggtaaagcgtgggagacccccaatcatcgacttaccgtatattcaaagaatgaaaaatgttatgaaagtactaaaaaaagaggtgctagatagtggaattggtctaactgatctttttgaaagattgcccgatagacacagagatgcaaattactacatcatgattgctaatccaattagtcttcaagacataaataaaaaggtaaagactcgtcgttataaaacgttccaggagttccagaatgattttaatcttatgttaaccaactttagaatttcgcacagaggtgatcctgaaagcataaaaatttcaaatatcttagaaaagacctttactagtctggcaagattcgaactatccaaacctgatagaagtttcattccagaaggcgagctaagataccctctagatgaagtcattgtaaataatatatcataccacgtgggagattgggcacttcttcgaaatcaaaatgatcctcaaaaacctatagtgggccaaatattcaggctatggaagacaccagatgggaaacaatggttaaacgcttgttggtattacagacccgaacaaactgtgcatagagtggatagattgttttacaaaaacgaagttatgaaaacaggtcagtaccgtgatcatttagtgtcaaacttagttgggaaatgctatgtgattcactttactagatatcaacgtggtaatcccgatatgaaattggagggtcccttgttcgtttgcgaattccgttataatgaatccgataaaatttttaacaagattagaacctggaaggcttgcttaccagaggaaattcgtgatttggacgaagctaccattccggtaaatggtagaaagttcttcaaatatccttcccccataagacatctactaccagctaatgcaacgccgcatgatcgcgttcctgaaccaacgatgggatccccggacgcgccaccattggtcggtgccgtttatatgagacctaaaatgcagcgtgacgatttgggggaatatgcaacctctgatgactgtcccaggtatattatcagacccaacgattctcccgaagagggacaagtggatatagaaacaggtacgatcaccacaaacacgccaacagcaaatgctcttcctaaaacaggatactcaagtagtaaactatccagtttaagatataacaggtcatctatgtctttagaaaaccaaaatgctattggccagcaacaaataccactgtcaagagttggttcccctggcgcgggaggcccgcttactgtacaaggtttaaagcaacaccaattgcaaaggttacaacagcagcaacatcaataccaacaacagaaaagatcccaagcatcacgttataatatcccaacaataatcgatgatttaacatcgcaggcatcaagaggtaatttgggtaatataatgatcgatgcagcctcctcgtttgtcttacctatctctataaccaaaaacgtagatgttttgcagcgtactgatctgcacagccaaaccaagagatctggaagagaagagatgtttccatggaaaaaaacaaagggtgaaatattatggttcagaggacctagtgtgatagtaaatgaacgaataataaattcaggtgacccacacctaagcctgccactgaataggtggtttaccactaacaagaaaagaaaactagaatacgaagaagttgaagaaaccatggaagatgtgactggaaaggacaaagatgatgatggcttagaaccggatgttgaaaatgagaaagagtccttgccaggcccatttgtccttggattaagaccctcggctaagttcacggcgcacagactctctatgctgcggcctccttcgtcgtcttcatga

SEQ ID NO: 2470 - protein, 889 aa, Saccharomyces cerevisiae
MMPDDNSNSSTQNSSALYKDLRKEYESLFTLKEDSGLEISPIFNVLPPKKDYPDYYAVIKNPVSFNTLKKRIPHYTDAQQFMNDVVQIPWNAKTYNTRDSGIYKYALVLEKYLKDTIYPNLKEKYPQLVYPDLGPLPDEPGYEEFQQKLREKAEEVARANAARAESSSSMNSTEAARRLRKTRTSVKRESEPGTDTNNDEDYEATDMDIDNPKDADFPDLIRKPLININPYTRKPLRDNRSTTPSHSGTPQPLGPRHRQVSRTQVKRGRPPIIDLPYIQRMKNVMKVLKKEVLDSGIGLTDLFERLPDRHRDANYYIMIANPISLQDINKKVKTRRYKTFQEFQNDFNLMLTNFRISHRGDPESIKISNILEKTFTSLARFELSKPDRSFIPEGELRYPLDEVIVNNISYHVGDWALLRNQNDPQKPIVGQIFRLWKTPDGKQWLNACWYYRPEQTVHRVDRLFYKNEVMKTGQYRDHLVSNLVGKCYVIHFTRYQRGNPDMKLEGPLFVCEFRYNESDKIFNKIRTWKACLPEEIRDLDEATIPVNGRKFFKYPSPIRHLLPANATPHDRVPEPTMGSPDAPPLVGAVYMRPKMQRDDLGEYATSDDCPRYIIRPNDSPEEGQVDIETGTITTNTPTANALPKTGYSSSKLSSLRYNRSSMSLENQNAIGQQQIPLSRVGSPGAGGPLTVQGLKQHQLQRLQQQQHQYQQQKRSQASRYNIPTIIDDLTSQASRGNLGNIMIDAASSFVLPISITKNVDVLQRTDLHSQTKRSGREEMFPWKKTKGEILWFRGPSVIVNERIINSGDPHLSLPLNRWFTTNKKRKLEYEEVEETMEDVTGKDKDDDGLEPDVENEKESLPGPFVLGLRPSAKFTAHRLSMLRPPSSSS

SEQ ID NO: 2471 - DNA, 2550 bp, Eremothecium gossypii
  CDS (1)..(2550)
atgttgctacgggaccagctcaaagttttgttggatggcgtgtttgacttaaaggaggaaaatggtattgagattttgccgattttctacactttgccgctgaggaaggattatcccgactactaccggatcatcaagaagccgctcagcctcgcgacggtgaaaaagaagctcaaccactacaagcgggcccaggagttcgtgaacgacttggtgcggatcacgtggaacgcgcggatgtacaacacgaaggagtcggaaatctaccactatgcgcagatcatggaccggtacgtgcgggaggtggtgatcccgcggattgagcgggagatggggccggtgaagtacccgtacctcgggccgctcccggacgagcagccgcttccgggcgcactgctggagcgcgacgacgacgagacgggggcgaaggacgactcgctgctgccggagacggtggacgaggagaaggacgcgacggcggatgaggaggagccggaggcgtcgatggtgccggagtacgacgacgacgaggagtacacggaggagaagcggcgcttgccgaagctgcggatcccggtgatgatcacgccgacgccgtcggcggtcagcaagtcaacgacgccgcagccgtcgtttcagcggcatcaggcacagaagacacacatgaggcgggggcggccaccggtgattgacttgccgtacgagcagcggatcaagaacgtgttgaagaacttgaagcgggagacgctctcgggttcgcgcgagttcctcacgctgcactttgataggctcccggacgaggagcgcgagccgcagtactacacggtcatatcgaaccctttgtccttggacgacatcaggaaacgagtcaaacagagaaaatacaaagactttctcgcgttccagcaggatgtggggttgatgttgaacaactaccggatgtatcaccggtcgcagcctcaggagatgcggagggccgcggagtttgaggccaagtttaccgactttgccaagtatgagctttcgagaccagacgaggacttcatgactgacggagagctcaaatatcccctagaccatatcgagttgcacgataagacatacaagatcggcgactggatattgctacacaatcccaacgatgagaccaagcccacggttgctcagatattcaggctttggcacaccaatgatggcaggcgctggctcaactgttgctggtacttgaggccggaacagactgttcatagggtcgatcggcttttctataaaaacgaggtcgtgaagtccgggcagtatcgggaccacctggtcgaggagattatcggcaagtgctacgtttgccattttaccaggtaccaacgtggtgatcccgacctaatgttggagggccccttgttcgtctgtgaatacagatataacgaatcagaaaaggtcttcaacaagatcagaacttggaagggatgtttgccggaagaagttcgtgatatcgaggagcccactatacccgtcattggccggaagtttttcaagtacgaatctcctataaagcacttgctaccccccaacgccactataaacgaccccattcctcagccaactgagggagcggtcaatgctccaccattggttggcgccgtttatctacgcccaaaaattaaaaaggacgacttaggtgaatattccacctccgatgattgtcccaggtacattatcaggcctggtgacccgcctgaggttggtagaatcgacccagaaacgggaaccatcattaccaattcccagaccgccagtgtactaccgaaaatgaatatgtctacaccacgtctgtcgtctttgaaccgcaacggtagctactcgaatttgataggccgttccggtagcccaattaacatgaccaggtccacccaatactttccaccagttcctaacggcgatctgagaaatctgccaatcgtgcaacaaataccgaatagcactatcccatctgcgcagtcgtctgcaaaaggcggcatacaggggaccatgggcggttcaattaacggtactacccctgcataccaacccccttccattattaataacctagccgcccaggctaagacaaacaataccgttcttggaaatatcttggtcgatacgcccggtgcctacgttcttcctatatctattacgaagaatgtagaagttctccagcggacagactataataatcaggtaaggcgattgggcaaagaacaagtacccaaaaaacggaagaataaaggtgaagttctatggttcaagggcgctagcgtcgtatgctacgaaagattgctcaatacgggaggagatacggatgttccattgaatagatggttcaagaagaagcgcaagctagactacgaggaggtggacgaagaggttggcgacggaacccaggttgaaaacggcagtaatgatgaatacgattcccaagacgagcatacagagctaccaggaacttttcctatgggtctcagaccaagtgccaagtacatgtcgtataagatcgcatcaggtcggtgctag

SEQ ID NO: 2472 - protein, 849 aa, Eremothecium gossypii
MLLRDQLKVLLDGVFDLKEENGIEILPIFYTLPLRKDYPDYYRIIKKPLSLATVKKKLNHYKRAQEFVNDLVRITWNARMYNTKESEIYHYAQIMDRYVREVVIPRIEREMGPVKYPYLGPLPDEQPLPGALLERDDDETGAKDDSLLPETVDEEKDATADEEEPEASMVPEYDDDEEYTEEKRRLPKLRIPVMITPTPSAVSKSTTPQPSFQRHQAQKTHMRRGRPPVIDLPYEQRIKNVLKNLKRETLSGSREFLTLHFDRLPDEEREPQYYTVISNPLSLDDIRKRVKQRKYKDFLAFQQDVGLMLNNYRMYHRSQPQEMRRAAEFEAKFTDFAKYELSRPDEDFMTDGELKYPLDHIELHDKTYKIGDWILLHNPNDETKPTVAQIFRLWHTNDGRRWLNCCWYLRPEQTVHRVDRLFYKNEVVKSGQYRDHLVEEIIGKCYVCHFTRYQRGDPDLMLEGPLFVCEYRYNESEKVFNKIRTWKGCLPEEVRDIEEPTIPVIGRKFFKYESPIKHLLPPNATINDPIPQPTEGAVNAPPLVGAVYLRPKIKKDDLGEYSTSDDCPRYIIRPGDPPEVGRIDPETGTIITNSQTASVLPKMNMSTPRLSSLNRNGSYSNLIGRSGSPINMTRSTQYFPPVPNGDLRNLPIVQQIPNSTIPSAQSSAKGGIQGTMGGSINGTTPAYQPPSIINNLAAQAKTNNTVLGNILVDTPGAYVLPISITKNVEVLQRTDYNNQVRRLGKEQVPKKRKNKGEVLWFKGASVVCYERLLNTGGDTDVPLNRWFKKKRKLDYEEVDEEVGDGTQVENGSNDEYDSQDEHTELPGTFPMGLRPSAKYMSYKIASGRC

SEQ ID NO: 2473 - DNA, 2685 bp, Unknown
  Unidentified
  CDS (1)..(2685)
atggccaacacaaaagaactacaagagaatcttcgaccggaatatctgagattgtacaatgttatcaatgaggaaaatgtaaatatatctccagtgtttactgttttacctccacgaaaagattacccagattattacgacgtcatcaagaaacctatatctataaacactcttaagaagaggctgacaacctatactaatgctcaacagtttatggacgacctagtacatataccgtggaatgcgaaagtttacaacactaaggaatcagagatctataaatatgcgttgacgctagaaaaatttattaatgaaacggtctatcctaatttaaagaaaaaatatcctaagctagaattaccatatctggggcccacaccggatgagccaggctaccaagaattccaagaaaagctattaatcaaagaaaaagagaaacaggaagaacttgaacgcaaagaaaggctagaaaaggaagctaaatcgcacaaagtacttataaggactcgtaaaactagtaataaagaaggctacacgaccgattcgtatgacagtaacaatgaggtccatactgaaacaggtgatgatgaccattatacagattatggtaaaggcgatgatgatgatgaatacaccgattccggaagaaggtacaaacaaaggcgcgtgcatgctaagttctcgccatctccatccggtacacctcatcctttagggttacgccattccgagaagccagtcaaaaaatacgtgaaaagaggtagacctccaatcatagatttgccatacgttcaaagaatgaaaaatgtcttaaaggtaattcgaaaggaagttgatgaaagaaggcggtcattgttagattcttttgagaaaataccggatagaaattacaatccacagtattactcaataatatcgaatccaatatctctagatgaaataagaaagaaagtaaaaacaagaaaatacaaagactttgaggggtttcataatgatatcaaactaatgctttcaaattatagaacatacaacaaaaataatccaaatgagctgaagcgctctttcaaatttgaaaaatcttttaacgagctagcacaatttgagttgtctaggccagataccgattacatgcccgaaggagaatttcgatgtccattagatgaagtcattgtaaatggcataacatatcaagttggtgattgggttcttctcaaaaatagaaatgatgaatctaagccaatcgtaggacagatattcaagttttggagtgagggaacatcaggtactaaatggcttaatgcatgctggtattatagaccagaacaaactgttcacagagttgatagattattctataagaccgaagtagttaaatctggacagtatagagatcataaagtttctgatatacagggtaaatgctatgtcgtacatttcaccaggtaccaaagaggagacccagatatcaatattgatggtcctctgtttgtttgtgagtataggtataatgaatctgacaaggctttcaacaaaattaggacatggagagcgtgcttgccagaggaaatacgtgatgtggaggagcaaacaattcctgttacaggtaggaaattctttaaatttccgtcaccgataagacatcttctacctccaaactcaacaactagggacccagtaccagatcctacattaggtgttcctaatgctccaccaattgtgggaggtgtctatatgcgttcaaaactagatagagacgatttaggtgagtactctacttctgacgattgtcctaagcatattattagacctaacgatcctaaagatagacttgagggtaagattgacaatgatatgggaacgattattgtaagtggtggaatgggaaatcttgctcgtatgactccttcccatacaaaactaaacacaatgagagataatcacattgagaataactatcaatttaacaataatgaaagtgcatcgctgccgttttcactggcaaaggaaaatgtcccaatacccaatctaaacaaaacaaatcgacctctcaatatatccgatcttcactctagacatgtggcacagtttgttgcaaatcaacgacaacgtgaaatcacacataatttagaagcggccaaatacagccacgctacaattgcagacaaaatagccaatgaagctagtaagcatactcgccttgggcaacagatagtatccttgccacattcatacgtacttccgctgtcaatcactaaaaatactggtgtgttgcaaacatccgatatatctaaccaaagcagaagacagaaagaggatgccttaatgccgaggaaaaggacaaaggaagagatactttggtttactggtcctagtgttagcatcaatgagcgtctcatggattccggtattgtaagaacactatcgatgaacaccttaacaaattcatctaaagatgggttagattatgaggaatttgaggaagtaatacccgtgattcgaaaaagaagcaaaagaaatacgagaaacatcatcgaacaagtggaagaggaggaatttgataaagaagaagcacaaaccacaaaaaaggatgaagatgattcagtaacgcagttatttcatacatcattacactcattgaggccttcagcatcattcatgtctcatcgtttggcagaaagtacttaa

SEQ ID NO: 2474 - protein, 894 aa, Unknown
  Unidentified
MANTKELQENLRPEYLRLYNVINEENVNISPVFTVLPPRKDYPDYYDVIKKPISINTLKKRLTTYTNAQQFMDDLVHIPWNAKVYNTKESEIYKYALTLEKFINETVYPNLKKKYPKLELPYLGPTPDEPGYQEFQEKLLIKEKEKQEELERKERLEKEAKSHKVLIRTRKTSNKEGYTTDSYDSNNEVHTETGDDDHYTDYGKGDDDDEYTDSGRRYKQRRVHAKFSPSPSGTPHPLGLRHSEKPVKKYVKRGRPPIIDLPYVQRMKNVLKVIRKEVDERRRSLLDSFEKIPDRNYNPQYYSIISNPISLDEIRKKVKTRKYKDFEGFHNDIKLMLSNYRTYNKNNPNELKRSFKFEKSFNELAQFELSRPDTDYMPEGEFRCPLDEVIVNGITYQVGDWVLLKNRNDESKPIVGQIFKFWSEGTSGTKWLNACWYYRPEQTVHRVDRLFYKTEVVKSGQYRDHKVSDIQGKCYVVHFTRYQRGDPDINIDGPLFVCEYRYNESDKAFNKIRTWRACLPEEIRDVEEQTIPVTGRKFFKFPSPIRHLLPPNSTTRDPVPDPTLGVPNAPPIVGGVYMRSKLDRDDLGEYSTSDDCPKHIIRPNDPKDRLEGKIDNDMGTIIVSGGMGNLARMTPSHTKLNTMRDNHIENNYQFNNNESASLPFSLAKENVPIPNLNKTNRPLNISDLHSRHVAQFVANQRQREITHNLEAAKYSHATIADKIANEASKHTRLGQQIVSLPHSYVLPLSITKNTGVLQTSDISNQSRRQKEDALMPRKRTKEEILWFTGPSVSINERLMDSGIVRTLSMNTLTNSSKDGLDYEEFEEVIPVIRKRSKRNTRNIIEQVEEEEFDKEEAQTTKKDEDDSVTQLFHTSLHSLRPSASFMSHRLAEST

SEQ ID NO: 2475 - DNA, 2805 bp, Candida glabrata CBS 138
  CDS (1)..(2805)
atgtcagaagagggtgaatttggtgagttgcgtacagacttgcgaaagcaatatgaagcaatctttagtttaaaggaggaaagtggagccaatatcttccctattttcaatgttttgccaataaaaaaagattatcctgactattatgcaataataaaaaatccaatatctctcaatactttaaagaagagattacctcattacacatctccacaagactatgttaatgatgtctctcaaattccatggaatgcaaaaacatataactcaaagggctcgttaatatacatttatgctgacattctcgagaagtttctgagaaatgtctcggtaccacagttacaagcaaaatatacaaatgttaattacccaaatttgggaccactaccagatgaaattgaagagatgaagaagaaggaagctatgatgaaaataagaacagcatcagcttctccagttgctcttgggaatgcaaacgaagtgccagctagatccgggtccaattcacctctgcctcttacatctatgtccaataccccacagccagttacagaagtcaaacaaccaattccacagcagaacgggggcattaacggctataatacctctaggcaaaacatggcaatgcagggtaataactcaacggcgaatagaagaatggaacaaacggtgatttcaatgggtccaagtagggtacctatggctcagattagcagtcgagtgagtccacatcctattttacccaatagatccatgtcatcaacacctatctctcattctccgggtgctattctaaagccttcgattcaacagagattacaaaccagacgtggtcgtccaccaattatagatttaccgtatctactaaggattaaaaatataatgaagatgatcaagcgtgaagtagacgataataaccaaaccttgaccttgacatttgaaaagctgcctgatccggaaagacatccggcatatcgtcaaattatcagcaatcctgtttgtttagatgatataaggaggagggtaaagacaaggaagtacaaaaactttggatctttccaagatgatttcactttaatgatcgagaattataagaaatataatcaaaacaatccaatgcttctcaatactgcaaggcttatggaatatcatttcagaaaactagttgagattgaactttcaaaaccagatagcgacttcttgcccgaaggtgaacttcgatacccacttgaaaatattgaggtgaggggtaaaatatatgagataggtgactgggtcttattaaataatgctaatgatccaaacaagccggttgttgctcaaatttttaagctatggtatactagtgatggtacaaaatggctaaatgcctgttggtatttccgtcctgagcagacagttcacagagttgatagattgttttataaaaatgaggtggtaaagacgggtcaatatagagatcatttgattaacgacctaataggaaaatgttatgttgttcattttacaagatatcaaaggggcaatcctgctacaccatatgagggacctttgttcatttgtgagtttaggtataatgagagtgacaaagtcttcaacaaaattcgaacatggaaggcttgcttacctgaagagctgcgtgatcaagatgaagagacaattcctgtaaacggcagaaaatttttcaagtatccatcgcccattaggcatctattaagaccagatgctacacctcatgatagaatacctgaaccaacggaaggagatcctactgcacctcctctagtgggtgctgtctatttaagaccaaaagttgagagagatgatctaggtgaatattcaacttctgacgattgtccaagatatataatcaggcctggtgacccgccagaatccggtattattgatgaagttcatggtacaatcataaccagtatgcaaactgcaaatgcattgccaagaacaagtcaatctacttcacgtctgccggcattaaaacaaactaaatctgccgccagcaatgaaaacatggtacagccaaccaagggtatgtcatatcaaaagccaatacctccagtagcatcgaataggacgatgcagtctcataaagtgcctgtgtctacgttgccacaacggcccgaacaaactattcaacctcaaaaactgtctactgttgaagcattaagacaaggccctattccaacaaatatcagttcagtttctttaaatgaagctgtgaatgacatgagccagcaggcggctaagagtggaatgagatatgtgactatagatgtacctcattcctatgttttgcctatggcaggaatccctaaacataatgaagttatgacaactgatgatgcaaacagattaagggggtctagatatcaggcaaataattctcaaagtgaaattctttggtttagaggacctagcatttcaatcaaggaaagatatgtggacagtatgaattcattcaattcactggacctaaatcggttaactgtacataaaaaaaggaaactcgactatgaggaaattgaagaacagggagttgatacacacatgtcaattgatgataaaggcaacgtaactactgaggcatcgcctgaaggtttactaactcaaggtaatgatatgcacatggattctgctcatcaatccgatgatgacgatgataatgctgaagaagagggacatctaagtgaaaaactaataagcacatcaactattggcttgaggccttcggctaaattcattattcataagcacaaatattctactattgagaacatcataacgtag

SEQ ID NO: 2476 - protein, 934 aa, Candida glabrata CBS 138
MSEEGEFGELRTDLRKQYEAIFSLKEESGANIFPIFNVLPIKKDYPDYYAIIKNPISLNTLKKRLPHYTSPQDYVNDVSQIPWNAKTYNSKGSLIYIYADILEKFLRNVSVPQLQAKYTNVNYPNLGPLPDEIEEMKKKEAMMKIRTASASPVALGNANEVPARSGSNSPLPLTSMSNTPQPVTEVKQPIPQQNGGINGYNTSRQNMAMQGNNSTANRRMEQTVISMGPSRVPMAQISSRVSPHPILPNRSMSSTPISHSPGAILKPSIQQRLQTRRGRPPIIDLPYLLRIKNIMKMIKREVDDNNQTLTLTFEKLPDPERHPAYRQIISNPVCLDDIRRRVKTRKYKNFGSFQDDFTLMIENYKKYNQNNPMLLNTARLMEYHFRKLVEIELSKPDSDFLPEGELRYPLENIEVRGKIYEIGDWVLLNNANDPNKPVVAQIFKLWYTSDGTKWLNACWYFRPEQTVHRVDRLFYKNEVVKTGQYRDHLINDLIGKCYVVHFTRYQRGNPATPYEGPLFICEFRYNESDKVFNKIRTWKACLPEELRDQDEETIPVNGRKFFKYPSPIRHLLRPDATPHDRIPEPTEGDPTAPPLVGAVYLRPKVERDDLGEYSTSDDCPRYIIRPGDPPESGIIDEVHGTIITSMQTANALPRTSQSTSRLPALKQTKSAASNENMVQPTKGMSYQKPIPPVASNRTMQSHKVPVSTLPQRPEQTIQPQKLSTVEALRQGPIPTNISSVSLNEAVNDMSQQAAKSGMRYVTIDVPHSYVLPMAGIPKHNEVMTTDDANRLRGSRYQANNSQSEILWFRGPSISIKERYVDSMNSFNSLDLNRLTVHKKRKLDYEEIEEQGVDTHMSIDDKGNVTTEASPEGLLTQGNDMHMDSAHQSDDDDDNAEEEGHLSEKLISTSTIGLRPSAKFIIHKHKYSTIENIIT

SEQ ID NO: 2477 - DNA, 2748 bp, Kluyveromyces lactis NRRL Y-1140
  CDS (1)..(2748)
atgtcaagtaaagtgccgttaaaagaggttattaaacctttggtaaatattatctacgaattaaaggaagagaatggccttgagatccaccctatcttccatctcttgcctccaaaaagggactatccagattattaccaaatcattgagcatccaattagtttgagtactgtcaggaagcgcatgacgcagtataagaatcctcaggaatttgtgaacgatttggcgagggttacatggaatgcaaggacgtacaacacaaaggattccgatgtgtaccattacgctgtaattctagataaatgcgttaaagatacaatcatacctagtttgaagaaagatttccccaacattagatatccatatttgggaccattaccggatgaagctcctttagagggtgtggagatcgaggaacctgagaaacagcagaaggctcttcccaaacctaagatacctgccgagcaagacaatactatcagtcaaacacaatcaccatcatcttcctcacagcatgtatcgctacaaaagggcagtggaggagctactcctaataaggatttcaaggaaactggtagagcatctagatcaacaatgtcattcaattccattcctttaacgcggtcacctggtggcttccgtactactgaggatgaatacagactggcagcaaacaggaaggaaccaaaaagcagtagttctgacgatagtacctctagtgcgaaaaggcaaccaccattaccaaagatccgtatttctcacgtatcgcctcctatcattaacacttcaaaatcaatgactcctcagcctcttatagccaaaactccagttgaaaagaagacacacatgaagcgtggtagaccaccggtaattgatttaccgtatgaacagcgtatcaaaaacgtcttaaaagccatgaagaaggaaaccacgcctggcgggaaggatctgttggcagcaaagtttgaaaggttaccagacgaagatcgtgaacctcaatattacagtgtcatatcagacccaatttcactagatgatatcaagaagaaagtgaagcaacgtaagtacaaaaatttccacaagttccaagaagatgtgatgttaatgttaagcaactacagaatgtaccatagatcccaaccaggtgaggtgagaagagctgcggatttcgaaactctgttcaatgcacattgtcaacacgaattgtcaagacctgacatcgatttcatgactgatggtgaattaaaatatcctttggagaccgttgacgttaatgggaaaacatataaaattggtgactggatcttgctacgtaatgctaatgacgaaactaaaccaactgttgcacaaattttcagactttggtacacatctgacggtactcgttggttgaactgttgttggtacttgagacctgaacagacagtgcaccgtgtggacagattgttttacaagaatgaagttgtcaaatctggtcaatacagagatcatctagtagaagagatcgttggtaagtgttatgtgtgtcatttcactagattccaacgtggtgacccagatgtagccatcgaaggcccattatttgtttgtgagtaccgttacaacgaaacggaaaaggtatttaacaagatcagaacctggaaagggtgtttaccggaagaagtgcgtgaatctgaggatcctacgatccccgttgttggtagaaagttctataaatatgaatctccaatcaagcatttgttaccagccaatgcaacagttaacgacccattaccgcaaccaacagaaggtgcagtcaacgctcctccattagttggtgcggtatacttacgtcctaaactaagaagagacgaccttggtgaatactccacatctgacgactgtcctagatatatcatcaggccaggtgatccaccaccaccaggtaagtatgacgacgaaaccggcacagtattaacaaatctgcatagctcagccgctgtacccaagggacgtttgtcttcactttcaagaaactctgcacaaagcccaataagttcgctacaatctagaccaactcagtactacccgcctccaatgccaaagggccagcatccatctccacaattaccgctaccatctcatcaacagctgctgcaaaagcaacagcaacaacaacagcaacaacagctccaacaacagttgatgctgcaatctcaactcggtactggtcatggtaaaggttctatatctacctccgctggcgatggctcgaagcctatcccatatcgttccacagcaatcattaacgatctaataacacaaatgaagaatgcaggaggacctacgggacatatagtcgttgatgcaccatctgcttgcatactccctataccactcacaaagaacattgaacttttacaaagagctgactacagcagtcaaatcaggagattaggtaaggataacgtacccagaagaagaagagccaagggtgaacctctatggttcagaggaccaagcgttgttgtgtctgagagattactaaactcaggaactgacgttccattgaacaggtggttcaagaaacaaaaaacagagaaatctacagataccgatgtcactgctacagaaaatgacgaatccaaagaaaaagaagaagatgaagacgaagaggaaaccttcccaagctctttccccaaaggtttaagacctagtgtagagttcatggctttcaaattgcgtcagcaacaagctcaagagaactga

SEQ ID NO: 2478 - protein, 915 aa, Kluyveromyces lactis NRRL Y-1140
MSSKVPLKEVIKPLVNIIYELKEENGLEIHPIFHLLPPKRDYPDYYQIIEHPISLSTVRKRMTQYKNPQEFVNDLARVTWNARTYNTKDSDVYHYAVILDKCVKDTIIPSLKKDFPNIRYPYLGPLPDEAPLEGVEIEEPEKQQKALPKPKIPAEQDNTISQTQSPSSSSQHVSLQKGSGGATPNKDFKETGRASRSTMSFNSIPLTRSPGGFRTTEDEYRLAANRKEPKSSSSDDSTSSAKRQPPLPKIRISHVSPPIINTSKSMTPQPLIAKTPVEKKTHMKRGRPPVIDLPYEQRIKNVLKAMKKETTPGGKDLLAAKFERLPDEDREPQYYSVISDPISLDDIKKKVKQRKYKNFHKFQEDVMLMLSNYRMYHRSQPGEVRRAADFETLFNAHCQHELSRPDIDFMTDGELKYPLETVDVNGKTYKIGDWILLRNANDETKPTVAQIFRLWYTSDGTRWLNCCWYLRPEQTVHRVDRLFYKNEVVKSGQYRDHLVEEIVGKCYVCHFTRFQRGDPDVAIEGPLFVCEYRYNETEKVFNKIRTWKGCLPEEVRESEDPTIPVVGRKFYKYESPIKHLLPANATVNDPLPQPTEGAVNAPPLVGAVYLRPKLRRDDLGEYSTSDDCPRYIIRPGDPPPPGKYDDETGTVLTNLHSSAAVPKGRLSSLSRNSAQSPISSLQSRPTQYYPPPMPKGQHPSPQLPLPSHQQLLQKQQQQQQQQQLQQQLMLQSQLGTGHGKGSISTSAGDGSKPIPYRSTAIINDLITQMKNAGGPTGHIVVDAPSACILPIPLTKNIELLQRADYSSQIRRLGKDNVPRRRRAKGEPLWFRGPSVVVSERLLNSGTDVPLNRWFKKQKTEKSTDTDVTATENDESKEKEEDEDEEETFPSSFPKGLRPSVEFMAFKLRQQQAQEN

SEQ ID NO: 2479 - DNA, 2406 bp, Debaryomyces hansenii CBS767
  CDS (1)..(2406)
atgtcaagtgaaaaagaaaggaaaaagttggcgaataagctccaaccattatatgatgggatatattcgttgaaagattcccaaggaagggaaatttcagagacatttcaaagattacctttgcgtactggtaccgattattataaagtcattaaggttccagtgtcattacacggtgtcggaagatatattaagaaatatgtatatcgaacagcgcaagaatttgttacacagctagttcaaataacgtggaatgctaggttatataacgtgagaacttcgttaatatatgaccacgcattaatcttaaaccaatatatcttggataagattatcccaaggttatctaatgataaatctattagcgatcataatatgatttattatccggatttaggacctttgcctgaagatgatgggtctattccgaatatgggagcatcgtacaaacccaacactcaatatccagaagaggacgaagatggtgacgatgacgaggaagaagaagatgaagaatataccgaatatggttcgggtggtcaatcgtctttgaagagctcgatttatgctcagccaaacgatcaccattaccacgcgttattagctaacaatgcgttgaccaataaattgcagatgggagaccaatcaccatcaccatttcaatcacctcaagcttccagacctttggaatcggggatcaggagagggcgtccacctataatcgataagccttatgaaacgcgtattaagttgatcttaaagcactttaagaaattgcgccatcctaatgacccaaaccatccattatcgattcattttgacagattacctgatccaaagaccaactcaaactattaccaggttatcaaacagccaatcagtttgaatgaaattagaacaaaagttagaaccaggaaatatcataacgttgatgaatttattagcgatttaaatttaatgtttcaaaacactaaattttatttctccaatgaccagttatctccaacattccaagattgccttctttttgaatcggaagcaaataacgttataaattacgaattactgaggcctgagaaggatttgttgattgcaagcacacctgggggtgatggtatcattagaataccattagattcaattgatattaatgggtatagctataaaattggtgattgggttcttattgataatccgagcgatcctaataagccaacggttggtcagatcttccgtttatggtccaccgaggatggaacaaaatatactaacgtttgttggtattatcgtccagaacaaacttgtcatagatatgatagattattttttatgaacgaagtttgtaagactggacaataccgtgaccatttagcttctgagattgttgggccatgttatgtcattttcttaacacgttatcagaagggtgatttacctgaaggtgtgattccagaaggatgtccatggtttatttgtgaatttagatataatgaaaattctcatgtttttaaccgtattagaacttggaaggcatgtttacctgatgaaataagagataagcctgaacaaccattaattccattaaatgaaccacgtaaattaattaagtttgaatctccaattaaaaatttgctaccaaatggtgttgatactacaatggcgattcctgatgcgacacctggtccaaacccaaatacaccacctattgtcggtctggtttatttaagagaaccgattgaagatgatgaattaggtcaatattctaccagtcccaacgttatttctagtcctgaaaatgatgaacacatgtctaatcgtaaggcctatatttttacaccaatcctgcaaatgaaaatggctaattccttcccagcaagctacagtggcaataacagtggcataagcactccgatccaatataattctaatattattgctagcaatttacaagaatcagatctagataagtcttatacttccagcgtcaatagatacagacagcttcttcagcaacaacagcaacagctccagcaaaatcagcatgataaagctgtaaatagagttgagtctagaagagggtttacacccactgcttcgaccattcctcttacgactcaacacacaggaccatcttaccatacttccacttcaacatattcgaatttgataacaggaggtattgtttcatactctcttgtcgatgaagggaataaattatctagagttagtgatgcgttaaacatcaaaagaagaaagttggaagcaatggaagaagtagctggaaatgaaattgtgtggtatagagcacctccagtcgccgtttccaacagaattctcagtaacgatataaccgatttaggtcattcggcacagtatattgcttggaaattaaaacaagaacattag

SEQ ID NO: 2480 - protein, 801 aa, Debaryomyces hansenii CBS767
MSSEKERKKLANKLQPLYDGIYSLKDSQGREISETFQRLPLRTGTDYYKVIKVPVSLHGVGRYIKKYVYRTAQEFVTQLVQITWNARLYNVRTSLIYDHALILNQYILDKIIPRLSNDKSISDHNMIYYPDLGPLPEDDGSIPNMGASYKPNTQYPEEDEDGDDDEEEEDEEYTEYGSGGQSSLKSSIYAQPNDHHYHALLANNALTNKLQMGDQSPSPFQSPQASRPLESGIRRGRPPIIDKPYETRIKLILKHFKKLRHPNDPNHPLSIHFDRLPDPKTNSNYYQVIKQPISLNEIRTKVRTRKYHNVDEFISDLNLMFQNTKFYFSNDQLSPTFQDCLLFESEANNVINYELLRPEKDLLIASTPGGDGIIRIPLDSIDINGYSYKIGDWVLIDNPSDPNKPTVGQIFRLWSTEDGTKYTNVCWYYRPEQTCHRYDRLFFMNEVCKTGQYRDHLASEIVGPCYVIFLTRYQKGDLPEGVIPEGCPWFICEFRYNENSHVFNRIRTWKACLPDEIRDKPEQPLIPLNEPRKLIKFESPIKNLLPNGVDTTMAIPDATPGPNPNTPPIVGLVYLREPIEDDELGQYSTSPNVISSPENDEHMSNRKAYIFTPILQMKMANSFPASYSGNNSGISTPIQYNSNIIASNLQESDLDKSYTSSVNRYRQLLQQQQQQLQQNQHDKAVNRVESRRGFTPTASTIPLTTQHTGPSYHTSTSTYSNLITGGIVSYSLVDEGNKLSRVSDALNIKRRKLEAMEEVAGNEIVWYRAPPVAVSNRILSNDITDLGHSAQYIAWKLKQEH

SEQ ID NO: 2481 - DNA, 2787 bp, Saccharomyces cerevisiae
  CDS (1)..(2787)
atggtggagcaagataatgggtttttacagaagctactcaaaacacaatacgatgctgtcttccatttaaaggatgaaaatggtatagaaatatatccaatattcaatgtactgccacctaaaaaagaatatccagactattacattataataaggaatccgatatctttaaacactttaaagaaacgattgccccattatacatcgccacaagattttgttaacgattttgcgcaaattccttggaatgcaatgacatacaatgcaaaagattcagtaatttacaaatatgccattcttcttgagtcttttattaaaggaaagatcgtgcacaatataagaaaacattatcccgaggtgacatatccatctctaggtcgaattccggaaatattcgcagagagtatgcaaccctccgatttatcctcgaaccccattaatacacaggaaaatgatgaaaaggctggcttaaatccagagatgaaaatggctttcgcaaaactagatagttcgatcactgaaaggaaaccaaccaaccaagattacaggatgcaacaaaaaaactcaccagcgtttccaacccattctgcttctataacaccgcagccgctggcttcacctactccagttgttaactatgcaaatattacctcggcgcatcccaaaacccatgttagacgcggtagaccaccagtaattgatctaccctatgtactgaggattaagaatatcttgaagatgatgagaagagaggtcgaccaaaataataagacgcttaccctctgttttgaaaaactaccagatagaaacgaggagccaacctattactctgtcataacagatcccatttgtctaatggatattaggaaaaaggttaagtccagaaaatatagaaatttccatacttttgaggaagactttcaattaatgctaacaaattttaagctttattattctcaagatcagagcaatataatacgagctcaactattggagaaaaacttcaatagattagtgcgaattgaattatccaaacctgatgaagactatttacctgaaggtgaattaagatatcctctagatgatgtagaaatcaatgatgagaaataccagataggtgattgggttcttttacataatccaaacgacatcaataaacccattgttggccagatttttagattatggtctactacagatggaaacaaatggttgaatgcttgctggtattttaggccagaacaaaccgttcatcgggtggataggttattctacaagaatgaggtcatgaaaactggtcaatatagagatcatcctattcaggatattaagggaaagtgctacgttattcattttaccagattccagcgtggggatcctagcacgaaagtcaatggtcctcaatttgtttgcgaattccgttataatgaaagtgataaggttttcaacaaaatcaggacttggaaagcttgcctgccggaagaactccgtgaccaagatgagcctacgatacctgttaatggaagaaaattttttaaatacccttctccaatagcagatttgttaccagcaaacgcaactctaaatgacaaagttccagaacccacggagggagccccaactgccccacctttggtaggcgctgtatatttaggccccaaattagagagggatgatctgggagagtattcaacttctgatgactgccctcgatacataatcagaccaaatgatccaccagaagaaggtaaaatagattacgaaacaggaacaataattacagataccttaaccacaagcagtatgcccagagtgaacagttcctccacaatacgtttacccactttaaagcagactaaatcaattcccagctccaatttcaggtcctcatcaaatactccactattgcatcagaacttcaatcagacttccaattttttgaaattagaaaacatgaataatagttctcataatttactatcacatccttccgttcctaagtttcaatcgccctctttattagaacagagtagtcgctctaaataccatagtgcaaaaaaacagacacagctatcatcaacagctcccaaaaagcctgcatctaaaagttttacattatcctcaatgattaataccttaactgctcatacctcgaagtacaacttcaaccatattgttattgaagccccgggtgcatttgtggttcctgtaccaatggaaaaaaatataagaaccatccaatcgacagaacgtttcagtagatcaaatctaaaaaacgctcaaaatctcggtaatactgctattaatgacataaatactgcaaatgagcaaataatatggttcaaagggcccggtgtaaaaatcacagagagagttattgattccggaaatgatttagtacgggtacctttgaatagatggttctgtaaaaacaaaaggagaaaactggattacgaagacattgaagaagatgttatggaaccaccaaatgacttcagcgaagatatgattgctaatatttttaatcctccgccgagcttgaatttagatatggatttaaatctaagcccatcctcgaataactcttctaatttcatggatttaagcacaattgcaagcggtgataacgatgggaaagaatgcgatacggcggaggagagtgaagacgaaaacgaagatacagaagacgagcacgaaattgaagatatcccgaccacgtctgcttttggcttaaattcttccgctgaataccttgcattcagattacgagaatttaataaattatga

SEQ ID NO: 2482 - protein, 928 aa, Saccharomyces cerevisiae
MVEQDNGFLQKLLKTQYDAVFHLKDENGIEIYPIFNVLPPKKEYPDYYIIIRNPISLNTLKKRLPHYTSPQDFVNDFAQIPWNAMTYNAKDSVIYKYAILLESFIKGKIVHNIRKHYPEVTYPSLGRIPEIFAESMQPSDLSSNPINTQENDEKAGLNPEMKMAFAKLDSSITERKPTNQDYRMQQKNSPAFPTHSASITPQPLASPTPVVNYANITSAHPKTHVRRGRPPVIDLPYVLRIKNILKMMRREVDQNNKTLTLCFEKLPDRNEEPTYYSVITDPICLMDIRKKVKSRKYRNFHTFEEDFQLMLTNFKLYYSQDQSNIIRAQLLEKNFNRLVRIELSKPDEDYLPEGELRYPLDDVEINDEKYQIGDWVLLHNPNDINKPIVGQIFRLWSTTDGNKWLNACWYFRPEQTVHRVDRLFYKNEVMKTGQYRDHPIQDIKGKCYVIHFTRFQRGDPSTKVNGPQFVCEFRYNESDKVFNKIRTWKACLPEELRDQDEPTIPVNGRKFFKYPSPIADLLPANATLNDKVPEPTEGAPTAPPLVGAVYLGPKLERDDLGEYSTSDDCPRYIIRPNDPPEEGKIDYETGTIITDTLTTSSMPRVNSSSTIRLPTLKQTKSIPSSNFRSSSNTPLLHQNFNQTSNFLKLENMNNSSHNLLSHPSVPKFQSPSLLEQSSRSKYHSAKKQTQLSSTAPKKPASKSFTLSSMINTLTAHTSKYNFNHIVIEAPGAFVVPVPMEKNIRTIQSTERFSRSNLKNAQNLGNTAINDINTANEQIIWFKGPGVKITERVIDSGNDLVRVPLNRWFCKNKRRKLDYEDIEEDVMEPPNDFSEDMIANIFNPPPSLNLDMDLNLSPSSNNSSNFMDLSTIASGDNDGKECDTAEESEDENEDTEDEHEIEDIPTTSAFGLNSSAEYLAFRLREFNKL

SEQ ID NO: 2483 - DNA, 25 bp, Artificial sequence
  primer
atgatgcctgatgacaattcaaact

SEQ ID NO: 2484 - DNA, 22 bp, Artificial sequence
  primer
tcatgaagacgacgaaggaggc

SEQ ID NO: 2485 - protein, 998 aa, Artificial sequence
  consensus sequence
  Variant (2)..(4): Xaa in position 2 to 4 is any amino acid
  Variant (6)..(14): Xaa in position 6 to 14 is any amino acid
  Variant (17)..(19): Xaa in position 17 to 19 is any amino acid
  Variant (21)..(22): Xaa in position 21 to 22 is any amino acid
  Variant (24)..(24): Xaa in position 24 is any amino acid
  Variant (26)..(26): Xaa in position 26 is any amino acid
  Variant (28)..(29): Xaa in position 28 to 29 is any amino acid
  Variant (32)..(35): Xaa in position 32 to 35 is any amino acid
  Variant (41)..(42): Xaa in position 41 to 42 is any amino acid
  Variant (44)..(45): Xaa in position 44 to 45 is any amino acid
  Variant (47)..(47): Xaa in position 47 is any amino acid
  Variant (49)..(50): Xaa in position 49 to 50 is any amino acid
  Variant (52)..(53): Xaa in position 52 to 53 is any amino acid
  Variant (55)..(58): Xaa in position 55 to 58 is any amino acid
  Variant (60)..(62): Xaa in position 60 to 62 is any amino acid
  Variant (63)..(64): Xaa in position 63 to 64 is any or no amino acid
  Variant (66)..(66): Xaa in position 66 is any amino acid
  Variant (68)..(69): Xaa in position 68 to 69 is any amino acid
  Variant (71)..(73): Xaa in position 71 to 73 is any amino acid
  Variant (75)..(75): Xaa in position 75 is any amino acid
  Variant (79)..(80): Xaa in position 79 to 80 is any amino acid
  Variant (83)..(85): Xaa in position 83 to 85 is any amino acid
  Variant (87)..(87): Xaa in position 87 is any amino acid
  Variant (90)..(90): Xaa in position 90 is any amino acid
  Variant (93)..(94): Xaa in position 93 to 94 is any amino acid
  Variant (96)..(104): Xaa in position 96 to 104 is any amino acid
  Variant (106)..(115): Xaa in position 106 to 115 is any amino acid
  Variant (116)..(120): Xaa in position 116 to 120 is any or no amino acid
  Variant (123)..(123): Xaa in position 123 is any amino acid
  Variant (127)..(127): Xaa in position 127 is any amino acid
  Variant (129)..(204): Xaa in position 129 to 204 is any amino acid
  Variant (205)..(265): Xaa in position 205 to 265 is any or no amino acid
  Variant (267)..(282): Xaa in position 267 to 282 is any amino acid
  Variant (283)..(289): Xaa in position 283 to 289 is any or no amino acid
  Variant (295)..(295): Xaa in position 295 is any amino acid
  Variant (301)..(302): Xaa in position 301 to 302 is any amino acid
  Variant (304)..(304): Xaa in position 304 is any amino acid
  Variant (307)..(308): Xaa in position 307 to 308 is any amino acid
  Variant (310)..(313): Xaa in position 310 to 313 is any amino acid
  Variant (315)..(321): Xaa in position 315 to 321 is any amino acid
  Variant (322)..(323): Xaa in position 322 to 323 is any or no amino acid
  Variant (325)..(327): Xaa in position 325 to 327 is any amino acid
  Variant (329)..(330): Xaa in position 329 to 330 is any amino acid
  Variant (334)..(339): Xaa in position 334 to 339 is any amino acid
  Variant (342)..(343): Xaa in position 342 to 343 is any amino acid
  Variant (345)..(346): Xaa in position 345 to 346 is any amino acid
  Variant (348)..(349): Xaa in position 348 to 349 is any amino acid
  Variant (351)..(352): Xaa in position 351 to 352 is any amino acid
  Variant (354)..(356): Xaa in position 354 to 356 is any amino acid
  Variant (359)..(359): Xaa in position 359 is any amino acid
  Variant (363)..(364): Xaa in position 363 to 364 is any amino acid
  Variant (366)..(367): Xaa in position 366 to 367 is any amino acid
  Variant (369)..(370): Xaa in position 369 to 370 is any amino acid
  Variant (372)..(373): Xaa in position 372 to 373 is any amino acid
  Variant (376)..(377): Xaa in position 376 to 377 is any amino acid
  Variant (379)..(381): Xaa in position 379 to 381 is any amino acid
  Variant (383)..(396): Xaa in position 383 to 396 is any amino acid
  Variant (397)..(398): Xaa in position 397 to 398 is any or no amino acid
  Variant (400)..(401): Xaa in position 400 to 401 is any amino acid
  Variant (403)..(408): Xaa in position 403 to 408 is any amino acid
  Variant (412)..(412): Xaa in position 412 is any amino acid
  Variant (415)..(415): Xaa in position 415 is any amino acid
  Variant (417)..(420): Xaa in position 417 to 420 is any amino acid
  Variant (421)..(426): Xaa in position 421 to 426 is any or no amino acid
  Variant (429)..(431): Xaa in position 429 to 431 is any amino acid
  Variant (434)..(442): Xaa in position 434 to 442 is any amino acid
  Variant (444)..(445): Xaa in position 444 to 445 is any amino acid
  Variant (449)..(449): Xaa in position 449 is any amino acid
  Variant (452)..(452): Xaa in position 452 is any amino acid
  Variant (454)..(454): Xaa in position 454 is any amino acid
  Variant (457)..(458): Xaa in position 457 to 458 is any amino acid
  Variant (461)..(461): Xaa in position 461 is any amino acid
  Variant (463)..(463): Xaa in position 463 is any amino acid
  Variant (467)..(467): Xaa in position 467 is any amino acid
  Variant (470)..(470): Xaa in position 470 is any amino acid
  Variant (472)..(472): Xaa in position 472 is any amino acid
  Variant (473)..(473): Xaa in position 473 is any or no amino acid
  Variant (476)..(477): Xaa in position 476 to 477 is any amino acid
  Variant (481)..(481): Xaa in position 481 is any amino acid
  Variant (485)..(485): Xaa in position 485 is any amino acid
  Variant (504)..(504): Xaa in position 504 is any amino acid
  Variant (506)..(506): Xaa in position 506 is any amino acid
  Variant (513)..(518): Xaa in position 513 to 518 is any amino acid
  Variant (524)..(524): Xaa in position 524 is any amino acid
  Variant (529)..(529): Xaa in position 529 is any amino acid
  Variant (533)..(533): Xaa in position 533 is any amino acid
  Variant (535)..(539): Xaa in position 535 to 539 is any amino acid
  Variant (540)..(542): Xaa in position 540 to 542 is any or no amino acid
  Variant (545)..(545): Xaa in position 545 is any amino acid
  Variant (547)..(547): Xaa in position 547 is any amino acid
  Variant (550)..(550): Xaa in position 550 is any amino acid
  Variant (555)..(556): Xaa in position 555 to 556 is any amino acid
  Variant (558)..(558): Xaa in position 558 is any amino acid
  Variant (567)..(567): Xaa in position 567 is any amino acid
  Variant (573)..(573): Xaa in position 573 is any amino acid
  Variant (576)..(579): Xaa in position 576 to 579 is any amino acid
  Variant (580)..(580): Xaa in position 580 is any or no amino acid
  Variant (585)..(585): Xaa in position 585 is any amino acid
  Variant (587)..(587): Xaa in position 587 is any amino acid
  Variant (591)..(591): Xaa in position 591 is any amino acid
  Variant (593)..(594): Xaa in position 593 to 594 is any amino acid
  Variant (598)..(599): Xaa in position 598 to 599 is any amino acid
  Variant (603)..(605): Xaa in position 603 to 605 is any amino acid
  Variant (607)..(608): Xaa in position 607 to 608 is any amino acid
  Variant (610)..(611): Xaa in position 610 to 611 is any amino acid
  Variant (613)..(613): Xaa in position 613 is any amino acid
  Variant (616)..(616): Xaa in position 616 is any amino acid
  Variant (618)..(620): Xaa in position 618 to 620 is any amino acid
  Variant (621)..(621): Xaa in position 621 is any or no amino acid
  Variant (625)..(625): Xaa in position 625 is any amino acid
  Variant (628)..(628): Xaa in position 628 is any amino acid
  Variant (631)..(631): Xaa in position 631 is any amino acid
  Variant (633)..(633): Xaa in position 633 is any amino acid
  Variant (635)..(637): Xaa in position 635 to 637 is any amino acid
  Variant (651)..(652): Xaa in position 651 to 652 is any amino acid
  Variant (657)..(657): Xaa in position 657 is any amino acid
  Variant (659)..(662): Xaa in position 659 to 662 is any amino acid
  Variant (663)..(664): Xaa in position 663 to 664 is any or no amino acid
  Variant (666)..(667): Xaa in position 666 to 667 is any amino acid
  Variant (669)..(671): Xaa in position 669 to 671 is any amino acid
  Variant (674)..(683): Xaa in position 674 to 683 is any amino acid
  Variant (684)..(684): Xaa in position 684 is any or no amino acid
  Variant (686)..(688): Xaa in position 686 to 688 is any amino acid
  Variant (689)..(694): Xaa in position 689 to 694 is any or no amino acid
  Variant (696)..(789): Xaa in position 696 to 789 is any amino acid
  Variant (790)..(818): Xaa in position 790 to 818 is any or no amino acid
  Variant (820)..(850): Xaa in position 820 to 850 is any amino acid
  Variant (851)..(859): Xaa in position 851 to 859 is any or no amino acid
  Variant (861)..(862): Xaa in position 861 to 862 is any amino acid
  Variant (865)..(865): Xaa in position 865 is any amino acid
  Variant (868)..(868): Xaa in position 868 is any amino acid
  Variant (870)..(872): Xaa in position 870 to 872 is any amino acid
  Variant (875)..(879): Xaa in position 875 to 879 is any amino acid
  Variant (880)..(887): Xaa in position 880 to 887 is any or no amino acid
  Variant (889)..(891): Xaa in position 889 to 891 is any amino acid
  Variant (892)..(993): Xaa in position 892 to 993 is any or no amino acid
  Variant (995)..(996): Xaa in position 995 to 996 is any amino acid
LXXXLXXXXXXXXXLKXXXGXXIXPXFXXLPXXXXYPDYYXXIXXPXSXXTXXKXXXXYXXXXXQXFXXDXXXIXWNAXXYNXXXSXIYXYAXXLXXXXXXXXXPXXXXXXXXXXXXXXXYPXLGPXPXXXXXXXXXXXXXXXXXXXXXXXXXXXXXXXXXXXXXXXXXXXXXXXXXXXXXXXXXXXXXXXXXXXXXXXXXXXXXXXXXXXXXXXXXXXXXXXXXXXXXXXXXXXXXXXXXXXXXXXXXXXXXXXXXXXXXXXXXSXXXXXXXXXXXXXXXXXXXXXXXRGRPPXIDLPYXXRXKNXXKXXXXEXXXXXXXXXLXXXFXXLPDXXXXXXYYXXIXXPXXLXXIXXXVKXRKYXXFXXFXXDXXLMXXNXXXYXXXXXXXXXXXXXXXXEXXFXXXXXXELSXPDXDXXXXXXXXXXGEXXXPLXXXXXXXXXYXXGDWXLLXNXNDXXKPXVXQIFXLWXTXXDGXXWLNXCWYXRPEQTVHRVDRLFYKNEVXKXGQYRDHXXXXXXGKCYVXHFTRXQRGXPXXXXXXXXGPXFXCEXRYNEXXKXFNKIRTWKXCLPEEXRDXXXXXTIPVXGXRKFXKXXSPIXXLLPXXXTXXDXXPXPTXGXXXXAPPXVGXVYXRXKXXXDDLGEYSTSDDCPXXIIRPXDXXXXXXGXXDXXXGTXXXXXXXXXXXPXXXXXXXXXLXXXXXXXXXXXXXXXXXXXXXXXXXXXXXXXXXXXXXXXXXXXXXXXXXXXXXXXXXXXXXXXXXXXXXXXXXXXXXXXXXXXXXXXXXXXXXXXXXXXXXXXXXXXXXXXXXXXXXXXXXXXPXXXXXXXXXXXXXXXXXXXXXXXXXXXXXXXXXXXXXXXXEXXWFXGPXVXXXERXXXXXXXXXXXXXNXXXXXXXXXXXXXXXXXXXXXXXXXXXXXXXXXXXXXXXXXXXXXXXXXXXXXXXXXXXXXXXXXXXXXXXXXXXXXXXXXXXXXXXXXXXXXXXXXXXXXXXXXLXXSA

SEQ ID NO: 2486 - protein, 60 aa, Artificial sequence
  protein pattern
  Variant (2)..(3): Xaa in position 2 to 3 is any amino acid
  Variant (7)..(7): Xaa in position 7 is any or no amino acid
  Variant (9)..(9): Xaa in position 9 is any or no amino acid
  Variant (12)..(12): Xaa in position 12 is any amino acid
  Variant (28)..(28): Xaa in position 28 is Asn or Thr
  Variant (31)..(31): Xaa in position 31 is Met or Val
  Variant (33)..(33): Xaa in position 33 is Ser or Thr
  Variant (40)..(40): Xaa in position 40 is any amino acid
  Variant (41)..(41): Xaa in position 41 is Ile or Val
  Variant (42)..(42): Xaa in position 42 is Glu, Asn, Gln or Ser
  Variant (43)..(43): Xaa in position 43 is Asp, Glu or Asn
  Variant (44)..(44): Xaa in position 44 is Ile or Leu
  Variant (45)..(45): Xaa in position 45 is any amino acid
  Variant (51)..(51): Xaa in position 51 is any amino acid
  Variant (56)..(56): Xaa in position 56 is Phe or Tyr
  Variant (60)..(60): Xaa in position 60 is Asp or Asn
GXXWLNXCXWYXRPEQTVHRVDRLFYKXEVXKXGQYRDHXXXXXXGKCYVXHFTRXQRGX

SEQ ID NO: 2487 - protein, 33 aa, Artificial sequence
  protein pattern
  Variant (3)..(3): Xaa in position 3 is any amino acid
  Variant (5)..(5): Xaa in position 5 is Ile or Val
  Variant (8)..(8): Xaa in position 8 is Phe or Tyr
  Variant (13)..(13): Xaa in position 13 is Ser or Thr
  Variant (14)..(14): Xaa in position 14 is Asp or Glu
  Variant (16)..(16): Xaa in position 16 is Ala, Ile or Val
  Variant (24)..(24): Xaa in position 24 is Lys or Arg
  Variant (25)..(25): Xaa in position 25 is Ala or Gly
  Variant (31)..(31): Xaa in position 31 is Ile, Leu or Val
  Variant (33)..(33): Xaa in position 33 is Asp or Glu
GPXFXCEXRYNEXXKXFNKIRTWXXCLPEEXRX

SEQ ID NO: 2488 - protein, 29 aa, Artificial sequence
  protein pattern
  Variant (2)..(2): Xaa in position 2 is any amino acid
  Variant (3)..(3): Xaa in position 3 is Ile or Val
  Variant (7)..(7): Xaa in position 7 is Ala, Ile or Val
  Variant (9)..(9): Xaa in position 9 is Ile or Leu
  Variant (10)..(10): Xaa in position 10 is any amino acid
  Variant (12)..(12): Xaa in position 12 is any amino acid
  Variant (13)..(13): Xaa in position 13 is Asn or Ser
  Variant (15)..(15): Xaa in position 15 is any amino acid
  Variant (16)..(16): Xaa in position 16 is Asn, Gln or Thr
  Variant (19)..(19): Xaa in position 19 is any amino acid
  Variant (21)..(21): Xaa in position 21 is Ala or Gly
  Variant (25)..(25): Xaa in position 25 is Lys or Arg
  Variant (28)..(28): Xaa in position 28 is any amino acid
YXXGDWXLXXNXXDXXKPXVXQIFXLWXT

SEQ ID NO: 2489 - protein, 30 aa, Artificial sequence
  protein pattern
  Variant (2)..(4): Xaa in position 2 to 4 is any or no amino acid
  Variant (6)..(6): Xaa in position 6 is Ile or Leu
  Variant (9)..(9): Xaa in position 9 is Ala, Gly or Leu
  Variant (12)..(12): Xaa in position 12 is Leu or Met
  Variant (14)..(14): Xaa in position 14 is Glu, Pro or Ser
  Variant (15)..(15): Xaa in position 15 is any amino acid
  Variant (16)..(16): Xaa in position 16 is Ile, Leu, Met or Val
  Variant (17)..(17): Xaa in position 17 is any amino acid
  Variant (18)..(18): Xaa in position 18 is Asp, Lys or Arg
  Variant (20)..(20): Xaa in position 20 is Asp or Glu
  Variant (23)..(23): Xaa in position 23 is Glu or Gln
  Variant (25)..(25): Xaa in position 25 is Ala or Ser
  Variant (28)..(28): Xaa in position 28 is Asp or Pro
  Variant (29)..(29): Xaa in position 29 is Asp or Asn
  Variant (30)..(30): Xaa in position 30 is Cys or Val
PXXXPXVGXVYXRXXXXXDXLGXYXTSXXX

SEQ ID NO: 2490 - protein, 32 aa, Artificial sequence
  protein pattern
  Variant (2)..(4): Xaa in position 2 to 4 is any amino acid
  Variant (6)..(6): Xaa in position 6 is Asp, Glu or Gln
  Variant (8)..(8): Xaa in position 8 is Met or Val
  Variant (9)..(9): Xaa in position 9 is Asp, Asn or Thr
  Variant (10)..(10): Xaa in position 10 is Asp or Gln
  Variant (11)..(11): Xaa in position 11 is Phe, Leu or Val
  Variant (12)..(12): Xaa in position 12 is Ala or Val
  Variant (13)..(13): Xaa in position 13 is any amino acid
  Variant (14)..(14): Xaa in position 14 is Ile or Val
  Variant (15)..(15): Xaa in position 15 is Pro or Thr
  Variant (19)..(20): Xaa in position 19 to 20 is any amino acid
  Variant (23)..(23): Xaa in position 23 is Ala, Thr or Val
  Variant (24)..(24): Xaa in position 24 is Lys or Arg
  Variant (25)..(25): Xaa in position 25 is Asp, Glu or Thr
  Variant (27)..(27): Xaa in position 27 is any amino acid
  Variant (28)..(28): Xaa in position 28 is Ile or Val
  Variant (30)..(30): Xaa in position 30 is Asp, His or Lys
  Variant (31)..(31): Xaa in position 31 is His or Tyr
YXXXQXFXXXXXXXXWNAXXYNXXXSXXYXXA

SEQ ID NO: 2491 - protein, 59 aa, Artificial sequence
  protein pattern
  Variant (2)..(4): Xaa in position 2 to 4 is any amino acid
  Variant (6)..(6): Xaa in position 6 is Asp or Glu
  Variant (7)..(7): Xaa in position 7 is Lys or Arg
  Variant (8)..(8): Xaa in position 8 is Ile or Leu
  Variant (11)..(12): Xaa in position 11 to 12 is any or no amino acid
  Variant (14)..(16): Xaa in position 14 to 16 is any amino acid
  Variant (17)..(18): Xaa in position 17 to 18 is any or no amino acid
  Variant (20)..(21): Xaa in position 20 to 21 is any amino acid
  Variant (22)..(22): Xaa in position 22 is Ile, Met or Val
  Variant (24)..(24): Xaa in position 24 is Ala, Ser or Thr
  Variant (25)..(25): Xaa in position 25 is Asp or Asn
  Variant (27)..(27): Xaa in position 27 is Ile, Leu or Val
  Variant (28)..(28): Xaa in position 28 is Cys or Ser
  Variant (30)..(30): Xaa in position 30 is any amino acid
  Variant (31)..(31): Xaa in position 31 is Asp or Glu
  Variant (33)..(33): Xaa in position 33 is any amino acid
  Variant (34)..(35): Xaa in position 34 to 35 is Lys or Arg
  Variant (38)..(38): Xaa in position 38 is Gln, Ser or Thr
  Variant (40)..(40): Xaa in position 40 is Lys or Arg
  Variant (42)..(42): Xaa in position 42 is Lys or Arg
  Variant (43)..(43): Xaa in position 43 is Asp, Asn or Thr
  Variant (45)..(46): Xaa in position 45 to 46 is any amino acid
  Variant (48)..(48): Xaa in position 48 is any amino acid
  Variant (49)..(49): Xaa in position 49 is Asp, Glu, Asn or Gln
  Variant (51)..(51): Xaa in position 51 is Phe, Ile or Val
  Variant (52)..(52): Xaa in position 52 is any amino acid
  Variant (55)..(55): Xaa in position 55 is Ile or Leu
  Variant (56)..(56): Xaa in position 56 is Glu, Asn, Ser or Thr
  Variant (58)..(58): Xaa in position 58 is Phe or Tyr
  Variant (59)..(59): Xaa in position 59 is Lys or Arg
LXXXFXXXPDXXRXXXXXYXXXIXXPXXLXXIXXXVKXRXYXXFXXFXXDXXLMXXNXX

SEQ ID NO: 2492 - protein, 27 aa, Artificial sequence
  protein pattern
  Variant (2)..(2): Xaa in position 2 is any or no amino acid
  Variant (7)..(7): Xaa in position 7 is Ile or Val
  Variant (13)..(14): Xaa in position 13 to 14 is any amino acid
  Variant (16)..(16): Xaa in position 16 is Ile or Met
  Variant (19)..(19): Xaa in position 19 is Ile or Val
  Variant (20)..(20): Xaa in position 20 is Leu or Met
  Variant (22)..(22): Xaa in position 22 is any amino acid
  Variant (23)..(23): Xaa in position 23 is Ile, Leu or Met
  Variant (24)..(25): Xaa in position 24 to 25 is Lys or Arg
  Variant (27)..(27): Xaa in position 27 is Thr or Val
RXGRPPXIDLPYXXRXKNXXKXXXXEX

SEQ ID NO: 2493 - protein, 30 aa, Artificial sequence
  protein pattern
  Variant (5)..(5): Xaa in position 5 is Phe or Tyr
  Variant (7)..(7): Xaa in position 7 is Phe or Tyr
  Variant (8)..(8): Xaa in position 8 is Glu or Pro
  Variant (12)..(12): Xaa in position 12 is any amino acid
  Variant (13)..(13): Xaa in position 13 is Asp or His
  Variant (16)..(16): Xaa in position 16 is any or no amino acid
  Variant (18)..(19): Xaa in position 18 to 19 is any amino acid
  Variant (20)..(20): Xaa in position 20 is any or no amino acid
  Variant (22)..(23): Xaa in position 22 to 23 is any amino acid
  Variant (25)..(25): Xaa in position 25 is any amino acid
  Variant (26)..(26): Xaa in position 26 is Ile, Leu or Val
  Variant (28)..(28): Xaa in position 28 is Asp, Glu or Gln
GRKFXKXXSPIXXLLXPXXXTXXDXXPXPT

SEQ ID NO: 2494 - protein, 19 aa, Artificial sequence
  protein pattern
  Variant (6)..(6): Xaa in position 6 is any amino acid
  Variant (7)..(7): Xaa in position 7 is Ile or Val
  Variant (9)..(9): Xaa in position 9 is Glu, Lys or Arg
  Variant (10)..(10): Xaa in position 10 is any amino acid
  Variant (12)..(12): Xaa in position 12 is Ile, Leu or Val
  Variant (14)..(14): Xaa in position 14 is Phe, Ile or Leu
  Variant (15)..(15): Xaa in position 15 is Ala, Asn or Ser
  Variant (17)..(17): Xaa in position 17 is any amino acid
  Variant (18)..(18): Xaa in position 18 is any or no amino acid
YPDYYXXIXXPXSXXTXXK

SEQ ID NO: 2495 - protein, 17 aa, Artificial sequence
  protein pattern
  Variant (2)..(2): Xaa in position 2 is Phe or Tyr
  Variant (3)..(3): Xaa in position 3 is any amino acid
  Variant (4)..(4): Xaa in position 4 is Ala or Gly
  Variant (5)..(5): Xaa in position 5 is Ala or Pro
  Variant (6)..(6): Xaa in position 6 is Gly, Pro or Ser
  Variant (8)..(10): Xaa in position 8 to 10 is any amino acid
  Variant (11)..(11): Xaa in position 11 is Glu or Asn
  Variant (13)..(13): Xaa in position 13 is Ile, Leu or Val
  Variant (14)..(14): Xaa in position 14 is Ile, Leu or Met
  Variant (15)..(15): Xaa in position 15 is Asp, Asn or Ser
  Variant (16)..(16): Xaa in position 16 is Asn, Ser or Thr
  Variant (17)..(17): Xaa in position 17 is Asp or Gly
WXXXXXVXXXXRXXXXX

SEQ ID NO: 2496 - protein, 20 aa, Artificial sequence
  protein pattern
  Variant (2)..(3): Xaa in position 2 to 3 is any amino acid
  Variant (5)..(7): Xaa in position 5 to 7 is any amino acid
  Variant (8)..(8): Xaa in position 8 is Ala, Cys or Val
  Variant (9)..(10): Xaa in position 9 to 10 is any amino acid
  Variant (14)..(14): Xaa in position 14 is Lys or Arg
  Variant (17)..(17): Xaa in position 17 is any amino acid
  Variant (18)..(18): Xaa in position 18 is Asp or Ser
  Variant (19)..(19): Xaa in position 19 is Phe or Tyr
  Variant (20)..(20): Xaa in position 20 is Ile, Leu or Met
EXXFXXXXXXELSXPDXXXX

SEQ ID NO: 2497 - protein, 18 aa, Artificial sequence
  protein pattern
  Variant (3)..(3): Xaa in position 3 is Asp or Glu
  Variant (4)..(4): Xaa in position 4 is Asp, Glu or Ser
  Variant (5)..(5): Xaa in position 5 is Asn, Gln or Ser
  Variant (7)..(7): Xaa in position 7 is any amino acid
  Variant (8)..(8): Xaa in position 8 is Glu or Asn
  Variant (10)..(10): Xaa in position 10 is any amino acid
  Variant (11)..(11): Xaa in position 11 is Glu or Pro
  Variant (12)..(12): Xaa in position 12 is any amino acid
  Variant (14)..(15): Xaa in position 14 to 15 is any amino acid
  Variant (18)..(18): Xaa in position 18 is Ile, Leu or Pro
LKXXXGXXIXXXFXXLPX

SEQ ID NO: 2498 - protein, 20 aa, Artificial sequence
  protein pattern
  Variant (2)..(2): Xaa in position 2 is Lys or Arg
  Variant (3)..(3): Xaa in position 3 is His or Tyr
  Variant (8)..(8): Xaa in position 8 is Gly or Asn
  Variant (10)..(10): Xaa in position 10 is any or no amino acid
  Variant (12)..(13): Xaa in position 12 to 13 is any amino acid
  Variant (14)..(16): Xaa in position 14 to 16 is any or no amino acid
  Variant (18)..(19): Xaa in position 18 to 19 is any amino acid
PXXIIRPXDXPXXXXXGXXD

SEQ ID NO: 2499 - protein, 29 aa, Artificial sequence
  protein pattern
  Variant (2)..(2): Xaa in position 2 is Asp or Glu
  Variant (3)..(4): Xaa in position 3 to 4 is any amino acid
  Variant (5)..(5): Xaa in position 5 is Ile, Leu or Val
  Variant (6)..(15): Xaa in position 6 to 15 is any amino acid
  Variant (16)..(16): Xaa in position 16 is Asp, His or Lys
  Variant (17)..(17): Xaa in position 17 is Phe, His or Tyr
  Variant (18)..(18): Xaa in position 18 is Asn, Pro or Thr
  Variant (19)..(19): Xaa in position 19 is any amino acid
  Variant (20)..(20): Xaa in position 20 is Ile, Leu or Val
  Variant (21)..(22): Xaa in position 21 to 22 is any amino acid
  Variant (24)..(24): Xaa in position 24 is any amino acid
  Variant (27)..(28): Xaa in position 27 to 28 is any or no amino acid
LXXXXXXXXXXXXXXXXXXXXXPXLGXXP

SEQ ID NO: 2500 - protein, 14 aa, Artificial sequence
  protein pattern
  Variant (3)..(3): Xaa in position 3 is Phe or Leu
  Variant (4)..(4): Xaa in position 4 is Lys or Arg
  Variant (5)..(5): Xaa in position 5 is any amino acid
  Variant (8)..(10): Xaa in position 8 to 10 is any or no amino acid
  Variant (12)..(13): Xaa in position 12 to 13 is any amino acid
  Variant (14)..(14): Xaa in position 14 is Asp, Gly or Val
GEXXXPLXXXEXXX

SEQ ID NO: 2501 - DNA, 1737 bp, Saccharomyces cerevisiae
  CDS (1)..(1737)
atgatccggttaccgaggctgtatcaaaggtacctattatacttggtagtttttgtagtgattgccctattttacttcctacaggcgccaagagttgaagagcacattggtttcgaccttgcactcccgatatcacacgttgataatctatggttccaaaataaaggtctagagggattctcaaatgacgataagctagttgtaaatataggctatgacgaatgttttcatattggtcgtttttatgaaggatgttttaatcggcatgaacttaaatcaactttaactgatgggcaccaatacttacaaaggaaaagaattcataaagacttgagaggttcctttggacgcaggtggtttggaaagtcagaatacctttactatgatgtgttataccctgctttggtggactactttggatccaacctagaaaagctaaatgttgaggcagtaactggaatttccaaatatcctaaagacaaatcgctaccctttatggatgtatccatcacattcgagcctattagcatagaactattgcagaaaaggagctacataagcgatattaacattctctttggtgttgattgcatccagccgatagcaaattggactcttcaaaaagaatttcccttagtaaaataccgctacagcgaacctgcttatttgacttacaaattcgttggtactcgtcctgtagacacaggagctcaacggctgcaagaaactgatgaaggaaagttcaaaattgttcagttggcggatctccacttgggtgtgggggagtctgaatgtatcgatgagtatccaaagcatgaagcttgcaaggcagatccaaaaacggaaactttcgttcaacaagttcttgacattgaaaaaccgcagttggttgtttttactggtgaccaaatcatgggtgatagatctattcaagactctgaaaccgtattattaaaggcggtagcacccgtcattgcaagaaaaattccgtgggcaatggtatggggaaatcacgacgacgagggaagcttaacgcgctggcagttatccgaaatagcttcagtactaccatattcccttttcaagtttagtccccatgatacacacgataatacgtttggcgttggtaattatatttatcagattttttcgaacaatgatacagaagtcccagtaggtacactttattttctggactcacataaatattctacggttggtaaaatttatcctggatatgattggattaaggaatcacagtggaaatacattgaagattatcatgatgtgaacttgaagttcaaaacaggtctttcaatggcattttttcacatcccactgccagaatacttgaatattgaatccaagacacatcccggagagaaaaatcccctcattggaatgtacaaagaaggtgttactgcacctaagtataattctgaggggataacaactttggataggttaagtgtggatgtcgtcagttgcggacatgaccattgtaacgattactgtcttcgagatgactctacgccgaacaaaatctggctatgctatggcggtggaggtggagaaggtggttatgctggctatggaggtacagaaagacgtatccgtatttatgaaattaatgtaaatgagaacaatatacacacatggaaaagattaaatggcagtccaaaagagatttttgattttcagtctatgttggacggtaattctccagaatctgtttaa

SEQ ID NO: 2502 - protein, 578 aa, Saccharomyces cerevisiae
MIRLPRLYQRYLLYLVVFVVIALFYFLQAPRVEEHIGFDLALPISHVDNLWFQNKGLEGFSNDDKLVVNIGYDECFHIGRFYEGCFNRHELKSTLTDGHQYLQRKRIHKDLRGSFGRRWFGKSEYLYYDVLYPALVDYFGSNLEKLNVEAVTGISKYPKDKSLPFMDVSITFEPISIELLQKRSYISDINILFGVDCIQPIANWTLQKEFPLVKYRYSEPAYLTYKFVGTRPVDTGAQRLQETDEGKFKIVQLADLHLGVGESECIDEYPKHEACKADPKTETFVQQVLDIEKPQLVVFTGDQIMGDRSIQDSETVLLKAVAPVIARKIPWAMVWGNHDDEGSLTRWQLSEIASVLPYSLFKFSPHDTHDNTFGVGNYIYQIFSNNDTEVPVGTLYFLDSHKYSTVGKIYPGYDWIKESQWKYIEDYHDVNLKFKTGLSMAFFHIPLPEYLNIESKTHPGEKNPLIGMYKEGVTAPKYNSEGITTLDRLSVDVVSCGHDHCNDYCLRDDSTPNKIWLCYGGGGGEGGYAGYGGTERRIRIYEINVNENNIHTWKRLNGSPKEIFDFQSMLDGNSPESV

SEQ ID NO: 2503 - DNA, 1746 bp, Saccharomyces pastorianus
  CDS (1)..(1746)
atgattcgtttaccgaaattatatcaaagattcctggtatacttatcaatttttggcttaatcgtattcctgtattatgatcataaccaaacatcaagagtacaagattataggatttctgaaggtcttaaaaaagagtttgacgcagatgccgaagagtggctccaggataacggtttagaatatctttctcctagtgacaatttgcttataaatattggcaatgagcaatgtttccatataggtcgtttttatgaaagatgcttcagtttttatgaactaagaccacaaccaaagagcgtacatttattggttgcaagaagaaaaatacataaagatttaaaaggttcatttgggcggaagtggttggggagatcagagtacctttattacgatatcttacgccttagctccttacattctctcggatctgattttggagagctgaatgtagatgctatcactggaatatctagtggtagtaaggataattctgtgtcatttaaggatttttctgttacgtttgaacccatcagcatagaactactacaaaagcgtggtataataagtgaaatcaatattctctttggcactgattgtgtggatccgcgagaaacttggagtttacaaaaggatgtttctttcacacactatgcaggtagtgaacctgcttacttgacttacagatttgcgggtttttaccctgcgaattcaaaagcccaacgtctacaggaaacagacgaaggcagattcaagatcgttcaattagcagaccttcacttgggtgtaggagagtctgaatgtgtcgacgaattcccaaaacatgagacttgcaaagctgatccaaagacagaggccttcgtccaacaagttctagacatcgaagcacctcagttggttgttttcactggtgatcaaatcatgggcgacagatctatccaagactctgaaacggcattactaaaagcagtcgcgcctgtcatttcgcgagggattccatgggcaatggtatggggcaaccatgatgacgaaggaagcttgacgcgttggcagttgtccgaattagcttcaaccctgccatattcgctttttcaatttagtacttacgatacaaaagataacacatttggtgtcggtaattacgttcatcaggttttttcatataataatacagaagtaccggtgagtacgctttattttttggattctcataaatattctactgttggtaagatttatcctggttatgactggatcaaagaatctcaatgggaatatatgaacaaatactatgatgaaaccttggaactgaaaactgagctttcaatggcgtttttccacattccattaccagaatatttgaatattcaatcgagtacacaccccggggaggaaaacgccctcgtgggtacttataaagaaggcgtcactgcacctaaatataactctgaagggatggctactttgcacaagttgggtgtggatgtcgtcagttgtgggcatgatcactgtaatgattattgcctacaagacgattccacaccaagtcaaatttggttatgttatggtggtggaggtggggaaggcggttatgctggttatggaggtacagagagacgtatccgtatttatgagattaatataagtgagaacaatatttatacatggaaaagactaaatggtagccccaaagaaattttcgattaccagtctatgttgaacaataattctccaaaaactgtttaa

SEQ ID NO: 2504 - protein, 581 aa, Saccharomyces pastorianus
MIRLPKLYQRFLVYLSIFGLIVFLYYDHNQTSRVQDYRISEGLKKEFDADAEEWLQDNGLEYLSPSDNLLINIGNEQCFHIGRFYERCFSFYELRPQPKSVHLLVARRKIHKDLKGSFGRKWLGRSEYLYYDILRLSSLHSLGSDFGELNVDAITGISSGSKDNSVSFKDFSVTFEPISIELLQKRGIISEINILFGTDCVDPRETWSLQKDVSFTHYAGSEPAYLTYRFAGFYPANSKAQRLQETDEGRFKIVQLADLHLGVGESECVDEFPKHETCKADPKTEAFVQQVLDIEAPQLVVFTGDQIMGDRSIQDSETALLKAVAPVISRGIPWAMVWGNHDDEGSLTRWQLSELASTLPYSLFQFSTYDTKDNTFGVGNYVHQVFSYNNTEVPVSTLYFLDSHKYSTVGKIYPGYDWIKESQWEYMNKYYDETLELKTELSMAFFHIPLPEYLNIQSSTHPGEENALVGTYKEGVTAPKYNSEGMATLHKLGVDVVSCGHDHCNDYCLQDDSTPSQIWLCYGGGGGEGGYAGYGGTERRIRIYEINISENNIYTWKRLNGSPKEIFDYQSMLNNNSPKTV

SEQ ID NO: 2505 - DNA, 1737 bp, Candida glabrata CBS 138
  CDS (1)..(1737)
atgaggctcgggaggataatatcgagacgtaaggtgtttttccttttatttactgggttattggttttatggctcgagaaatttgtgttgaatatcagtaagtatcaccacaacgatgaactgaaagctggttatgaccttaaagttctggatactgccagacaatggatggagcaatcaaatttgaaaaatatcaagcatgatgatgttatggttgtgaattatggaacaattaaatgtttccacctaggtaccaaatacgaaagatgtttgaagcccaagcatttccacaataaacctagaatagtgacgaactctataactgtgagaaaggatttgagaggatcctatggatacaatttaataggtatatccgagtatttcttttttgaagttgttaggtttgatgaattcttgttatacggtaaacctttggatgtacttgtatttgatgcgacgccaaatttaaatctgggtgctcatcatataccctctgcaacttttaaagaaatatccttaggtgaaatactaagagataacttctttgatatcatatcagatgtgaacattttatttggtgaagatgctgtcgatcctagaccaaactggcacttggtcaaaagctctccttacttgtcttataagcatccttctttcatgtcttatatgaaactgggatcgcaagaacccgaatacacaaaatctaaagtgctagtcaaaaaggaacatgaagatgatggatttaagattgttcaactggctgatctgcatttaggagttggcaagaatagatgtctcgatgagtatccacaccatgataaatgtgaagcagattcaaaaacattaaagtttgtggaggaggttttagatatcgaaaagcccgggtttgttgtgttttctggcgatcaaattatgggtgataggtctctccaggatagtgaatctgttctttacaaggctgttgacccagttatcaggagacgtattccgtgggcaatggtttggggaaaccatgacgatgagggaagcctgtctcgttgggaactctctaagctggcgatgaagttaccttactctagatttcaaatttctccacatgatacaaaagataacacattcggtgtaggaaattatgcacatcagatattctacgagaatgatcctgaagttgctgctttgagtttatactttatggatagtcataaatattccaagactgggaaaatataccttggttatgactggctaaaagaggaacagttggaatatatacagtcgttatatgaaagaggtatgaaatcacacattaaagaaaatatacacagacatgcggctatgacattcattcatatcccactcccagaatacttaaatctggattctaaaaagcgtcctggggaatctaatgaattgattggcacttttaaggaaggagtaacagctccaaggtacaactccggtggactagttgctttagataaaatcggagttgatgttgtaggctgcgggcatgatcactgtaatgactattgtttgcatgatgactctacttcaaacaaaaatatttggttatgttatggcggtggagctggtgaaggtggctatgctggttacggaggtacagagagaagaatccgcacttacaagtttgatccacaaactggtaaaataacaacttggaaacgattaaatagcaaaccaagtgagatttttgattttcagatagtaaaggactga

SEQ ID NO: 2506 - protein, 578 aa, Candida glabrata CBS 138
MRLGRIISRRKVFFLLFTGLLVLWLEKFVLNISKYHHNDELKAGYDLKVLDTARQWMEQSNLKNIKHDDVMVVNYGTIKCFHLGTKYERCLKPKHFHNKPRIVTNSITVRKDLRGSYGYNLIGISEYFFFEVVRFDEFLLYGKPLDVLVFDATPNLNLGAHHIPSATFKEISLGEILRDNFFDIISDVNILFGEDAVDPRPNWHLVKSSPYLSYKHPSFMSYMKLGSQEPEYTKSKVLVKKEHEDDGFKIVQLADLHLGVGKNRCLDEYPHHDKCEADSKTLKFVEEVLDIEKPGFVVFSGDQIMGDRSLQDSESVLYKAVDPVIRRRIPWAMVWGNHDDEGSLSRWELSKLAMKLPYSRFQISPHDTKDNTFGVGNYAHQIFYENDPEVAALSLYFMDSHKYSKTGKIYLGYDWLKEEQLEYIQSLYERGMKSHIKENIHRHAAMTFIHIPLPEYLNLDSKKRPGESNELIGTFKEGVTAPRYNSGGLVALDKIGVDVVGCGHDHCNDYCLHDDSTSNKNIWLCYGGGAGEGGYAGYGGTERRIRTYKFDPQTGKITTWKRLNSKPSEIFDFQIVKD

SEQ ID NO: 2507 - DNA, 1698 bp, Kluyveromyces lactis NRRL Y-1140
  CDS (1)..(1698)
atggttgggctgtcgaagaggtatgctcgattgatcacatatttcgtcatattatgcttattattaggaattattgtacggctcaatttactcggatacaagttactaccctcggtgactttaggccacaaatcaccggaagcttattggtacggagttgtgattaattttggaactctgagctgtttccatgttggaacttggttcagaatttgtcctgtaacggaaagtagtcttaaagtggatctccatgatagctctttgacaagcaggaaagtgatcacaaaggacttatttaattctgaagggtatcattggtttggaaaatcccaatttttatggtacgatgtgttagaattgaaatcagttaccgatgtaagaaagcttccgtctggggactctgtttatggggttaccaggatatcaggcgatttgaaagattgtaaacatccatttaagaatatatgtattcatatcgatgaattgaatgaatcagcattggaaaacactagatttctctctggcttctcagtattgttcggtgaagacgttacagaaccgagaattgactgggatttggataaaagatttacggtaaccaacgtaaggtacccttcttacgtcacagcaacatattggaataacgatgtgtggaaacccgaagtccctttgctcttcgttaatgatcaacacaagtttaaaattgtacagttggcagacttacatttcagtgttggtaagggcgtttgtagagatgagttcccacaacacgagacgtgtgaagcagatcccaaaacattacaatttatagatcaagttttggatatcgaaaagcctcagatggtagtatttacaggcgatcaaattatgggagatgagtgtaagcaagattcagagactgcgctcttgaaagtgttggctcctgtcatctcaagaaaaattccatgggcaatggtatggggtaatcacgacgacgaagggtcactaaacaggtggcagttatccgaattcgcaagtaagcttccgtattcgttgtttgaaattgggcctcgcgactcaaaagacaatcagttcgggctcggaaactatgtacgggaagtcaagggtggtgatgggacgacaaatattgccttgtacttcttggattctcataagtattcaaagagcaaagcattcccaggatatgactgggttaaggaagaacaatgggagtatatggaggaatatctggaaagccacgattctattaaacaggcgaaacactccggtgatttaatttcgatggcattcttccatattcctttaccagaatataggaacttccctcaggaatcaggtagtaaccgagtagtaggaacttataaagaaggtatcacggcaccaagatataattctgaaggggtgaaaactctacataagttgggcgtgtcagttaccagtgtgggacatgatcactgcaatgattattgtttattagatgatttcaacgacggtgaggacaagatatggttatgctatggaggtgcagctggagaaggaggttatgctgggtacggaggtacagaaagacgtattagggtatatgagatagatgcgctaaagaaagatatatattcgtggaaacgacttaatggttctccggaaaacactttcgatcatcaaaaactaatcagcgatggtgttccatatactgcctga

SEQ ID NO: 2508 - protein, 565 aa, Kluyveromyces lactis NRRL Y-1140
MVGLSKRYARLITYFVILCLLLGIIVRLNLLGYKLLPSVTLGHKSPEAYWYGVVINFGTLSCFHVGTWFRICPVTESSLKVDLHDSSLTSRKVITKDLFNSEGYHWFGKSQFLWYDVLELKSVTDVRKLPSGDSVYGVTRISGDLKDCKHPFKNICIHIDELNESALENTRFLSGFSVLFGEDVTEPRIDWDLDKRFTVTNVRYPSYVTATYWNNDVWKPEVPLLFVNDQHKFKIVQLADLHFSVGKGVCRDEFPQHETCEADPKTLQFIDQVLDIEKPQMVVFTGDQIMGDECKQDSETALLKVLAPVISRKIPWAMVWGNHDDEGSLNRWQLSEFASKLPYSLFEIGPRDSKDNQFGLGNYVREVKGGDGTTNIALYFLDSHKYSKSKAFPGYDWVKEEQWEYMEEYLESHDSIKQAKHSGDLISMAFFHIPLPEYRNFPQESGSNRVVGTYKEGITAPRYNSEGVKTLHKLGVSVTSVGHDHCNDYCLLDDFNDGEDKIWLCYGGAAGEGGYAGYGGTERRIRVYEIDALKKDIYSWKRLNGSPENTFDHQKLISDGVPYTA

SEQ ID NO: 2509 - DNA, 23 bp, Artificial sequence
  primer
atgatccggttaccgaggctgta

SEQ ID NO: 2510 - DNA, 25 bp, Artificial sequence
  primer
ttaaacagattctggagaattaccg

SEQ ID NO: 2511 - protein, 581 aa, Artificial sequence
  consensus sequence
  Variant (2)..(6): Xaa in position 2 to 6 is any amino acid
  Variant (8)..(46): Xaa in position 8 to 46 is any amino acid
  Variant (47)..(53): Xaa in position 47 to 53 is any or no amino acid
  Variant (55)..(59): Xaa in position 55 to 59 is any amino acid
  Variant (60)..(71): Xaa in position 60 to 71 is any or no amino acid
  Variant (73)..(73): Xaa in position 73 is any amino acid
  Variant (75)..(77): Xaa in position 75 to 77 is any amino acid
  Variant (81)..(81): Xaa in position 81 is any amino acid
  Variant (83)..(87): Xaa in position 83 to 87 is any amino acid
  Variant (89)..(108): Xaa in position 89 to 108 is any amino acid
  Variant (109)..(111): Xaa in position 109 to 111 is any or no amino acid
  Variant (115)..(116): Xaa in position 115 to 116 is any amino acid
  Variant (118)..(118): Xaa in position 118 is any amino acid
  Variant (120)..(123): Xaa in position 120 to 123 is any amino acid
  Variant (125)..(125): Xaa in position 125 is any amino acid
  Variant (127)..(186): Xaa in position 127 to 186 is any amino acid
  Variant (187)..(189): Xaa in position 187 to 189 is any or no amino acid
  Variant (191)..(194): Xaa in position 191 to 194 is any amino acid
  Variant (198)..(198): Xaa in position 198 is any amino acid
  Variant (200)..(202): Xaa in position 200 to 202 is any amino acid
  Variant (204)..(206): Xaa in position 204 to 206 is any amino acid
  Variant (208)..(208): Xaa in position 208 is any amino acid
  Variant (210)..(210): Xaa in position 210 is any amino acid
  Variant (212)..(220): Xaa in position 212 to 220 is any amino acid
  Variant (221)..(222): Xaa in position 221 to 222 is any or no amino acid
  Variant (224)..(250): Xaa in position 224 to 250 is any amino acid
  Variant (251)..(253): Xaa in position 251 to 253 is any or no amino acid
  Variant (264)..(265): Xaa in position 264 to 265 is any amino acid
  Variant (268)..(270): Xaa in position 268 to 270 is any amino acid
  Variant (272)..(272): Xaa in position 272 is any amino acid
  Variant (275)..(275): Xaa in position 275 is any amino acid
  Variant (277)..(277): Xaa in position 277 is any amino acid
  Variant (279)..(280): Xaa in position 279 to 280 is any amino acid
  Variant (282)..(282): Xaa in position 282 is any amino acid
  Variant (285)..(285): Xaa in position 285 is any amino acid
  Variant (288)..(289): Xaa in position 288 to 289 is any amino acid
  Variant (291)..(293): Xaa in position 291 to 293 is any amino acid
  Variant (299)..(299): Xaa in position 299 is any amino acid
  Variant (301)..(302): Xaa in position 301 to 302 is any amino acid
  Variant (306)..(306): Xaa in position 306 is any amino acid
  Variant (314)..(316): Xaa in position 314 to 316 is any amino acid
  Variant (321)..(322): Xaa in position 321 to 322 is any amino acid
  Variant (324)..(324): Xaa in position 324 is any amino acid
  Variant (326)..(328): Xaa in position 326 to 328 is any amino acid
  Variant (332)..(332): Xaa in position 332 is any amino acid
  Variant (334)..(334): Xaa in position 334 is any amino acid
  Variant (351)..(351): Xaa in position 351 is any amino acid
  Variant (354)..(354): Xaa in position 354 is any amino acid
  Variant (357)..(358): Xaa in position 357 to 358 is any amino acid
  Variant (360)..(361): Xaa in position 360 to 361 is any amino acid
  Variant (366)..(366): Xaa in position 366 is any amino acid
  Variant (368)..(372): Xaa in position 368 to 372 is any amino acid
  Variant (374)..(375): Xaa in position 374 to 375 is any amino acid
  Variant (378)..(378): Xaa in position 378 is any amino acid
  Variant (381)..(381): Xaa in position 381 is any amino acid
  Variant (385)..(398): Xaa in position 385 to 398 is any amino acid
  Variant (399)..(400): Xaa in position 399 to 400 is any or no amino acid
  Variant (404)..(404): Xaa in position 404 is any amino acid
  Variant (411)..(412): Xaa in position 411 to 412 is any amino acid
  Variant (413)..(413): Xaa in position 413 is any or no amino acid
  Variant (415)..(417): Xaa in position 415 to 417 is any amino acid
  Variant (422)..(422): Xaa in position 422 is any amino acid
  Variant (425)..(425): Xaa in position 425 is any amino acid
  Variant (427)..(428): Xaa in position 427 to 428 is any amino acid
  Variant (430)..(445): Xaa in position 430 to 445 is any amino acid
  Variant (446)..(451): Xaa in position 446 to 451 is any or no amino acid
  Variant (453)..(453): Xaa in position 453 is any amino acid
  Variant (455)..(455): Xaa in position 455 is any amino acid
  Variant (463)..(463): Xaa in position 463 is any amino acid
  Variant (465)..(471): Xaa in position 465 to 471 is any amino acid
  Variant (472)..(474): Xaa in position 472 to 474 is any or no amino acid
  Variant (476)..(478): Xaa in position 476 to 478 is any amino acid
  Variant (480)..(481): Xaa in position 480 to 481 is any amino acid
  Variant (485)..(485): Xaa in position 485 is any amino acid
  Variant (489)..(489): Xaa in position 489 is any amino acid
  Variant (493)..(493): Xaa in position 493 is any amino acid
  Variant (495)..(497): Xaa in position 495 to 497 is any amino acid
  Variant (499)..(502): Xaa in position 499 to 502 is any amino acid
  Variant (504)..(504): Xaa in position 504 is any amino acid
  Variant (506)..(508): Xaa in position 506 to 508 is any amino acid
  Variant (519)..(519): Xaa in position 519 is any amino acid
  Variant (522)..(526): Xaa in position 522 to 526 is any amino acid
  Variant (527)..(528): Xaa in position 527 to 528 is any or no amino acid
  Variant (536)..(537): Xaa in position 536 to 537 is any amino acid
  Variant (554)..(554): Xaa in position 554 is any amino acid
  Variant (556)..(563): Xaa in position 556 to 563 is any amino acid
  Variant (565)..(566): Xaa in position 565 to 566 is any amino acid
  Variant (572)..(573): Xaa in position 572 to 573 is any amino acid
  Variant (575)..(577): Xaa in position 575 to 577 is any amino acid
  Variant (580)..(580): Xaa in position 580 is any amino acid
LXXXXXRXXXXXXXXXXXXXXXXXXXXXXXXXXXXXXXXXXXXXXXXXXXXXXWXXXXXXXXXXXXXXXXXNXGXXXCFHXGXXXXXCXXXXXXXXXXXXXXXXXXXXXXXKDLXXSXGXXXXGXSXXXXXXXXXXXXXXXXXXXXXXXXXXXXXXXXXXXXXXXXXXXXXXXXXXXXXXXXXXXXXXXSXXXXLFGXDXXXPXXXWXLXKXXXXXXXXXXXPXXXXXXXXXXXXXXXXXXXXXXXXXXXXXXFKIVQLADLHXXVGXXXCXDEXPXHXXCXADXKTXXFXXXVLDIEXPXXVVFXGDQIMGDXXXQDSEXXLXKXXXPVIXRXIPWAMVWGNHDDEGSLXRWXLSXXAXXLPYSXFXXXXXDXXDNXFGXGNYXXXXXXXXXXXXXXXXLYFXDSHKYSXXXKXXXGYDWXKEXQXXYXXXXXXXXXXXXXXXXXXXXXXMXFXHIPLPEYXNXXXXXXXXXXNXXXGXXKEGXTAPXYNSXGXXXLXXXXVXVXXXGHDHCNDYCLXDDXXXXXXXIWLCYGGXXGEGGYAGYGGTERRIRXYXXXXXXXXIXXWKRLNXXPXXXFDXQ

SEQ ID NO: 2512 - protein, 60 aa, Artificial sequence
  protein pattern
  Variant (6)..(6): Xaa in position 6 is any amino acid
  Variant (8)..(8): Xaa in position 8 is Gly or Gln
  Variant (9)..(9): Xaa in position 9 is Phe, Leu or Met
  Variant (13)..(13): Xaa in position 13 is Ser or Thr
  Variant (21)..(21): Xaa in position 21 is Glu or Arg
  Variant (22)..(22): Xaa in position 22 is Cys or Ser
  Variant (23)..(23): Xaa in position 23 is any amino acid
  Variant (28)..(28): Xaa in position 28 is Ser or Thr
  Variant (29)..(29): Xaa in position 29 is Ala or Val
  Variant (31)..(31): Xaa in position 31 is any amino acid
  Variant (33)..(33): Xaa in position 33 is Ala or Val
  Variant (34)..(34): Xaa in position 34 is Leu or Val
  Variant (35)..(35): Xaa in position 35 is Ala or Asp
  Variant (39)..(39): Xaa in position 39 is any amino acid
  Variant (41)..(41): Xaa in position 41 is any amino acid
  Variant (58)..(58): Xaa in position 58 is Asn, Ser or Thr
VLDIEXPXXVVFXGDQIMGDXXXQDSEXXLXKXXXPVIXRXIPWAMVWGNHDDEGSLXRW

SEQ ID NO: 2513 - protein, 55 aa, Artificial sequence
  protein pattern
  Variant (2)..(3): Xaa in position 2 to 3 is any amino acid
  Variant (8)..(9): Xaa in position 8 to 9 is Ala or Gly
  Variant (26)..(26): Xaa in position 26 is any amino acid
  Variant (28)..(28): Xaa in position 28 is Glu or Lys
  Variant (29)..(29): Xaa in position 29 is Phe or Ile
  Variant (30)..(30): Xaa in position 30 is Asp or Asn
  Variant (31)..(31): Xaa in position 31 is Ala, Ile, Pro or Val
  Variant (32)..(35): Xaa in position 32 to 35 is any amino acid
  Variant (37)..(37): Xaa in position 37 is any amino acid
  Variant (38)..(38): Xaa in position 38 is Ser or Thr
  Variant (44)..(44): Xaa in position 44 is Gly or Ser
  Variant (45)..(45): Xaa in position 45 is any amino acid
  Variant (47)..(47): Xaa in position 47 is any amino acid
  Variant (48)..(48): Xaa in position 48 is Glu or Asn
  Variant (49)..(49): Xaa in position 49 is any amino acid
  Variant (52)..(52): Xaa in position 52 is Phe, His or Tyr
  Variant (54)..(54): Xaa in position 54 is any amino acid
  Variant (55)..(55): Xaa in position 55 is Leu, Met or Val
IXXCYGGXXGEGGYAGYGGTERRIRXYXXXXXXXXIXXWKRLNXXPXXXFDXQXX

SEQ ID NO: 2514 - protein, 56 aa, Artificial sequence
  protein pattern
  Variant (2)..(4): Xaa in position 2 to 4 is any or no amino acid
  Variant (6)..(6): Xaa in position 6 is any amino acid
  Variant (7)..(7): Xaa in position 7 is any or no amino acid
  Variant (9)..(9): Xaa in position 9 is any amino acid
  Variant (10)..(10): Xaa in position 10 is Leu or Val
  Variant (11)..(11): Xaa in position 11 is Ile or Val
  Variant (13)..(13): Xaa in position 13 is any amino acid
  Variant (14)..(14): Xaa in position 14 is Phe or Tyr
  Variant (18)..(18): Xaa in position 18 is Ile or Val
  Variant (22)..(22): Xaa in position 22 is Lys or Arg
  Variant (26)..(26): Xaa in position 26 is Glu or Gly
  Variant (28)..(28): Xaa in position 28 is Ile, Leu, Met or Val
  Variant (29)..(29): Xaa in position 29 is any amino acid
  Variant (30)..(30): Xaa in position 30 is Ala or Thr
  Variant (32)..(32): Xaa in position 32 is Asp or His
  Variant (33)..(33): Xaa in position 33 is Lys or Arg
  Variant (34)..(34): Xaa in position 34 is Ile or Leu
  Variant (35)..(35): Xaa in position 35 is Gly or Ser
  Variant (37)..(37): Xaa in position 37 is Asp or Ser
  Variant (39)..(39): Xaa in position 39 is Thr or Val
  Variant (40)..(40): Xaa in position 40 is Gly or Ser
  Variant (41)..(41): Xaa in position 41 is Cys or Val
  Variant (52)..(52): Xaa in position 52 is any amino acid
  Variant (55)..(55): Xaa in position 55 is any amino acid
  Variant (56)..(56): Xaa in position 56 is Asn or Thr
PXXXGXXNXXXGXXKEGXTAPXYNSXGXXXLXXXXVXVXXXGHDHCNDYCLXDDXX

SEQ ID NO: 2515 - protein, 29 aa, Artificial sequence
  protein pattern
  Variant (2)..(5): Xaa in position 2 to 5 is any or no amino acid
  Variant (10)..(10): Xaa in position 10 is Phe or Leu
  Variant (11)..(11): Xaa in position 11 is Gly or Ser
  Variant (14)..(14): Xaa in position 14 is Glu or Lys
  Variant (15)..(15): Xaa in position 15 is Gly, Asn or Ser
  Variant (16)..(16): Xaa in position 16 is any amino acid
  Variant (18)..(18): Xaa in position 18 is any amino acid
  Variant (21)..(21): Xaa in position 21 is Phe or Tyr
  Variant (23)..(23): Xaa in position 23 is any amino acid
  Variant (25)..(25): Xaa in position 25 is Asp or Glu
  Variant (26)..(26): Xaa in position 26 is any amino acid
  Variant (28)..(28): Xaa in position 28 is Glu or Lys
KXXXXADLHXXVGXXXCXDEXPXHXXCXA

SEQ ID NO: 2516 - protein, 39 aa, Artificial sequence
  protein pattern
  Variant (2)..(3): Xaa in position 2 to 3 is any amino acid
  Variant (5)..(6): Xaa in position 5 to 6 is any amino acid
  Variant (11)..(11): Xaa in position 11 is any amino acid
  Variant (13)..(13): Xaa in position 13 is any amino acid
  Variant (14)..(14): Xaa in position 14 is Phe or Ile
  Variant (15)..(15): Xaa in position 15 is Gly or Ser
  Variant (16)..(16): Xaa in position 16 is Pro or Thr
  Variant (17)..(17): Xaa in position 17 is any amino acid
  Variant (19)..(19): Xaa in position 19 is Ser or Thr
  Variant (20)..(20): Xaa in position 20 is His or Lys
  Variant (23)..(23): Xaa in position 23 is Gln or Thr
  Variant (26)..(26): Xaa in position 26 is Leu or Val
  Variant (30)..(30): Xaa in position 30 is Ala, Ile or Val
  Variant (31)..(31): Xaa in position 31 is any amino acid
  Variant (32)..(32): Xaa in position 32 is Glu or Gln
  Variant (33)..(33): Xaa in position 33 is Ile or Val
  Variant (34)..(36): Xaa in position 34 to 36 is any amino acid
  Variant (37)..(37): Xaa in position 37 is Asp or Asn
  Variant (38)..(38): Xaa in position 38 is Asp, Gly or Asn
  Variant (39)..(39): Xaa in position 39 is Pro or Thr
SXXAXXLPYSXFXXXXXDXXDNXFGXGNYXXXXXXXXXX

SEQ ID NO: 2517 - protein, 17 aa, Artificial sequence
  protein pattern
  Variant (2)..(2): Xaa in position 2 is Ala or Ile
  Variant (3)..(3): Xaa in position 3 is Phe or Tyr
  Variant (4)..(4): Xaa in position 4 is Leu or Pro
  Variant (9)..(9): Xaa in position 9 is Ile, Leu or Val
  Variant (12)..(12): Xaa in position 12 is Glu or Ser
  Variant (14)..(14): Xaa in position 14 is any amino acid
  Variant (15)..(15): Xaa in position 15 is Glu or Lys
  Variant (17)..(17): Xaa in position 17 is Ile or Met
KXXXGYDWXKEXQXXYX

SEQ ID NO: 2518 - protein, 17 aa, Artificial sequence
  protein pattern
  Variant (2)..(3): Xaa in position 2 to 3 is any amino acid
  Variant (4)..(6): Xaa in position 4 to 6 is any or no amino acid
  Variant (10)..(10): Xaa in position 10 is Ile, Leu or Val
  Variant (12)..(13): Xaa in position 12 to 13 is any amino acid
  Variant (14)..(14): Xaa in position 14 is Phe or Tyr
  Variant (15)..(15): Xaa in position 15 is Glu or Arg
  Variant (16)..(16): Xaa in position 16 is any amino acid
NXXXXXCFHXGXXXXXC

SEQ ID NO: 2519 - protein, 22 aa, Artificial sequence
  protein pattern
  Variant (2)..(2): Xaa in position 2 is Asp, Glu or Gly
  Variant (3)..(3): Xaa in position 3 is Phe, Ile or Val
  Variant (4)..(4): Xaa in position 4 is Asn or Ser
  Variant (5)..(5): Xaa in position 5 is Ile or Val
  Variant (9)..(9): Xaa in position 9 is any amino acid
  Variant (11)..(11): Xaa in position 11 is Ala, Cys or Val
  Variant (12)..(12): Xaa in position 12 is any amino acid
  Variant (13)..(13): Xaa in position 13 is Asp, Glu or Gln
  Variant (15)..(16): Xaa in position 15 to 16 is any amino acid
  Variant (17)..(17): Xaa in position 17 is Asp, Asn or Thr
  Variant (19)..(19): Xaa in position 19 is any amino acid
  Variant (21)..(21): Xaa in position 21 is any amino acid
SXXXXLFGXDXXXPXXXWXLXK

SEQ ID NO: 2520 - protein, 8 aa, Artificial sequence
  protein pattern
  Variant (2)..(2): Xaa in position 2 is Ala or Thr
  Variant (4)..(4): Xaa in position 4 is Phe or Ile
MXFXHIPL

SEQ ID NO: 2521 - protein, 10 aa, Artificial sequence
  protein pattern
  Variant (4)..(4): Xaa in position 4 is Leu or Met
LYFXDSHKYS

SEQ ID NO: 2522 - protein, 27 aa, Artificial sequence
  protein pattern
  Variant (2)..(2): Xaa in position 2 is any amino acid
  Variant (3)..(4): Xaa in position 3 to 4 is any or no amino acid
  Variant (8)..(8): Xaa in position 8 is any amino acid
  Variant (9)..(9): Xaa in position 9 is Gly or Asn
  Variant (11)..(11): Xaa in position 11 is any amino acid
  Variant (13)..(15): Xaa in position 13 to 15 is any amino acid
  Variant (16)..(16): Xaa in position 16 is Phe, Ile or Leu
  Variant (18)..(18): Xaa in position 18 is any amino acid
  Variant (20)..(20): Xaa in position 20 is Glu or Gln
  Variant (21)..(21): Xaa in position 21 is Phe or Tyr
  Variant (22)..(22): Xaa in position 22 is Phe or Leu
  Variant (23)..(23): Xaa in position 23 is Phe, Trp or Tyr
  Variant (24)..(24): Xaa in position 24 is Phe or Tyr
  Variant (25)..(25): Xaa in position 25 is Asp or Glu
  Variant (26)..(26): Xaa in position 26 is Ile or Val
  Variant (27)..(27): Xaa in position 27 is Leu or Val
IXXXKDLXXSXGXXXXGXSXXXXXXXX

SEQ ID NO: 2523 - DNA, 1581 bp, Saccharomyces cerevisiae
  CDS (1)..(1581)
atgtctactatcccatttagaaagaactatgtgttcaaaaactgggccggaatttattctgcaaaaccagaacgttacttccaaccaagttcaattgatgaggttgtcgagttagtaaagagtgccaggctagctgaaaaaagcttagttactgttggttcgggccattctcctagtaacatgtgcgttactgatgaatggcttgttaacttagacagattggacaaagtacaaaagtttgttgaatatcctgagttacattatgccgatgtcacagttgatgccggtatgaggctttaccaattgaatgaatttttgggtgcgaaaggttactctatccaaaatttaggctctatctcagaacaaagtgttgctggcataatctctactggtagtcatggttcctcaccttatcacggtttgatttcttctcaatacgtaaacttgactattgttaatggtaagggcgaattgaagttcttggatgctgaaaacgatccagaagtctttaaagctgctttactttcagttggaaaaattggtatcattgtctctgctactatcagggttgttcccggcttcaatattaaatccactcaagaagtgattacttttgaaaaccttttgaagcaatgggataccctatggacttcatctgaatttatcagagtttggtggtacccttatactagaaaatgtgttctatggaggggtaacaaaactacagatgcccaaaatggtccagccaagtcatggtggggtaccaagctgggtagatttttctacgaaactctattatggatctctaccaaaatctatgcgccattaaccccatttgtggaaaagttcgttttcaacaggcaatacgggaaattggagaagagctctactggtgatgttaatgttaccgattctatcagcggatttaatatggactgtttgttttcacaatttgttgatgaatgggggtgccctatggataatggtttggaagtcttacgttcattggatcattctattgcgcaggctgccataaacaaagaattttatgtccacgtgcctatggaagtccgttgctcaaatactacattaccttctgaacccttggatactagcaagagaacaaacaccagtcccggtcccgtttatggcaatgtgtgccgcccattcctggataacacaccatcccattgcagatttgctccgttggaaaatgttaccaacagtcagttgacgttgtacataaatgctaccatttataggccgtttggctgtaatactccaattcataaatggtttaccctttttgaaaatactatgatggtagcgggaggtaagccacattgggccaagaacttcctaggctcaaccactctagctgctggaccagtgaaaaaggatactgattacgatgactttgaaatgagggggatggcattgaaggttgaagaatggtatggcgaggatttgaaaaagttccggaaaataagaaaggagcaagatcccgataatgtattcttggcaaacaaacagtgggctatcataaatggtattatagatcctagtgagttgtccgactag

SEQ ID NO: 2524 - protein, 526 aa, Saccharomyces cerevisiae
MSTIPFRKNYVFKNWAGIYSAKPERYFQPSSIDEVVELVKSARLAEKSLVTVGSGHSPSNMCVTDEWLVNLDRLDKVQKFVEYPELHYADVTVDAGMRLYQLNEFLGAKGYSIQNLGSISEQSVAGIISTGSHGSSPYHGLISSQYVNLTIVNGKGELKFLDAENDPEVFKAALLSVGKIGIIVSATIRVVPGFNIKSTQEVITFENLLKQWDTLWTSSEFIRVWWYPYTRKCVLWRGNKTTDAQNGPAKSWWGTKLGRFFYETLLWISTKIYAPLTPFVEKFVFNRQYGKLEKSSTGDVNVTDSISGFNMDCLFSQFVDEWGCPMDNGLEVLRSLDHSIAQAAINKEFYVHVPMEVRCSNTTLPSEPLDTSKRTNTSPGPVYGNVCRPFLDNTPSHCRFAPLENVTNSQLTLYINATIYRPFGCNTPIHKWFTLFENTMMVAGGKPHWAKNFLGSTTLAAGPVKKDTDYDDFEMRGMALKVEEWYGEDLKKFRKIRKEQDPDNVFLANKQWAIINGIIDPSELSD

SEQ ID NO: 2525 - DNA, 1591 bp, Saccharomyces cerevisiae
  CDS (2)..(1582)
catggctactatcccatttagaaagaactatgtgttcaaaaactgggccggaatttattctgcaaaaccagaacgttacttccaaccaagttcaattgatgaggttgtcgagttagtaaagagtgccaggctagctgaaaaaagcttagttactgttggttcgggccattctcctagtaacatgtgcgttactgatgaatggcttgttaacttagacagattggacaaagtacaaaagtttgttgaatatcctgagttacattatgccgatgtcacagttgatgccggtatgaggctttaccaattgaatgaatttttgggtgcgaaaggttactctatccaaaatttaggctctatctcagaacaaagtgttgctggcataatctctactggtagtcatggttcctcaccttatcacggtttgatttcttctcaatacgtaaacttgactattgttaatggtaagggcgaattgaagttcttggatgctgaaaacgatccagaagtctttaaagctgctttactttcagttggaaaaattggtatcattgtctctgctactatcagggttgttcccggcttcaatattaaatccactcaagaagtgattacttttgaaaaccttttgaagcaatgggataccctatggacttcatctgaatttatcagagtttggtggtacccttatactagaaaatgtgttctatggaggggtaacaaaactacagatgcccaaaatggtccagccaagtcatggtggggtaccaagctgggtagatttttctacgaaactctattatggatctctaccaaaatctatgcgccattaaccccatttgtggaaaagttcgttttcaacaggcaatacgggaaattggagaagagctctactggtgatgttaatgttaccgattctatcagcggatttaatatggactgtttgttttcacaatttgttgatgaatgggggtgccctatggataatggtttggaagtcttacgttcattggatcattctattgcgcaggctgccataaacaaagaattttatgtccacgtgcctatggaagtccgttgctcaaatactacattaccttctgaacccttggatactagcaagagaacaaacaccagtcccggtcccgtttatggcaatgtgtgccgcccattcctggataacacaccatcccattgcagatttgctccgttggaaaatgttaccaacagtcagttgacgttgtacataaatgctaccatttataggccgtttggctgtaatactccaattcataaatggtttaccctttttgaaaatactatgatggtagcgggaggtaagccacattgggccaagaacttcctaggctcaaccactctagctgctggaccagtgaaaaaggatactgattacgatgactttgaaatgagggggatggcattgaaggttgaagaatggtatggcgaggatttgaaaaagttccggaaaataagaaaggagcaagatcccgataatgtattcttggcaaacaaacagtgggctatcataaatggtattatagatcctagtgagttgtccgactagtaacgaatt

SEQ ID NO: 2526 - protein, 526 aa, Saccharomyces cerevisiae
MATIPFRKNYVFKNWAGIYSAKPERYFQPSSIDEVVELVKSARLAEKSLVTVGSGHSPSNMCVTDEWLVNLDRLDKVQKFVEYPELHYADVTVDAGMRLYQLNEFLGAKGYSIQNLGSISEQSVAGIISTGSHGSSPYHGLISSQYVNLTIVNGKGELKFLDAENDPEVFKAALLSVGKIGIIVSATIRVVPGFNIKSTQEVITFENLLKQWDTLWTSSEFIRVWWYPYTRKCVLWRGNKTTDAQNGPAKSWWGTKLGRFFYETLLWISTKIYAPLTPFVEKFVFNRQYGKLEKSSTGDVNVTDSISGFNMDCLFSQFVDEWGCPMDNGLEVLRSLDHSIAQAAINKEFYVHVPMEVRCSNTTLPSEPLDTSKRTNTSPGPVYGNVCRPFLDNTPSHCRFAPLENVTNSQLTLYINATIYRPFGCNTPIHKWFTLFENTMMVAGGKPHWAKNFLGSTTLAAGPVKKDTDYDDFEMRGMALKVEEWYGEDLKKFRKIRKEQDPDNVFLANKQWAIINGIIDPSELSD

SEQ ID NO: 2527 - DNA, 2138 bp, Saccharomyces cerevisiae
  CDS (4)..(1584)
cccatgtctactatcccatttagaaagaactatgtgttcaaaaactgggccggaatttattctgcaaaaccagaacgttacttccaaccaagttcaattgatgaggttgtcgagttagtaaagagtgccaggctagctgaaaaaagcttagttactgttggttcgggccattctcctagtaacatgtgcgttactgatgaatggcttgttaacttagacagattggacaaagtacaaaagtttgttgaatatcctgagttacattatgccgatgtcacagttgatgccggtatgaggctttaccaattgaatgaatttttgggtgcgaaaggttactctatccaaaatttaggctctatctcagaacaaagtgttgctggcataatctctactggtagtcatggttcctcaccttatcacggtttgatttcttctcaatacgtaaacttgactattgttaatggtaagggcgaattgaagttcttggatgccgaaaacgatccagaagtctttaaagctgctttactttcagttggaaaaatcggtatcattgtctctgctactatcagggttgttcccggcttcaatattaaatccactcaagaagtgattacttttgaaaaccttttgaagcaatgggataccctatggacttcatctgaatttatcagagtttggtggtacccttatactagaaaatgtgttctatggaggggtaacaaaactacagatgcccaaaatggtccagccaagtcatggtggggtaccaagctgggtagatttttctacgaaactctattatggatctctaccaaaatctatgcgccattaaccccatttgtggaaaagttcgttttcaacaggcaatacgggaaattggagaagagctctactggtgatgttaatgttaccgattctatcagcggatttaatatggactgtttgttttcacaatttgttgatgaatgggggtgccctatggataatggtttggaagtcttacgttcattggatcattctattgcgcaggctgccataaacaaagaattttatgtccacgtgcctatggaagtccgttgctcaaatactacattaccttctgaacccttggatactagcaagagaacaaacaccagtcccggtcccgtttatggcaatgtgtgccgcccattcctggataacacaccatcccattgcagatttgctccgttggaaaatgttaccaacagtcagttgacgttgtacataaatcctaccatttataggccgtttggctgtaatactccaattcataaatggtttaccctttttgaaaatactatgatggtagcgggaggtaagccacattgggccaagaacttcctaggctcaaccactctagctgctggaccagtgaaaaaggatactgattacgatgactttgaaatgagggggatggcattgaaggttgaagaatggtatggcgaggatttgaaaaagttccggaaaataagaaaggagcaagatcccgataatgtattcttggcaaacaaacagtgggctatcataaatggtattatagatcctagtgagttgtccgactagtctctttttgtctcaataatctctatattttactaaaaaagaatatatatatatatatttatatatagcagtgtgatgactgttcatgtacattctaataactattcctagctgcctatcaaagacttttttttgaattagagctttttagtaatcatgggacccttttttcttttcattatccttactatagtttttttttggaaaagccgaacgcggtaatgattggtcgtataagcaaaaacgaaacatcggcatggcataacgtagatcctatctacagggaagtttttagaaatcagatagaaatgtattttgagtgctgtatatattgcagtactttttttctctctaggatttaagtatgtttagtattaactcatatcacattttttctttgtaaaaagcaaccattcgcaacaatgtcgatagtagagacatgcatatcgtttgtttcgacaaatccgttttatccattttgtactggattgcttctgaattgtgtggttacaccgctttacttttggaaaacgcaaaatggtagaatcgtggtc

SEQ ID NO: 2528 - protein, 526 aa, Saccharomyces cerevisiae
MSTIPFRKNYVFKNWAGIYSAKPERYFQPSSIDEVVELVKSARLAEKSLVTVGSGHSPSNMCVTDEWLVNLDRLDKVQKFVEYPELHYADVTVDAGMRLYQLNEFLGAKGYSIQNLGSISEQSVAGIISTGSHGSSPYHGLISSQYVNLTIVNGKGELKFLDAENDPEVFKAALLSVGKIGIIVSATIRVVPGFNIKSTQEVITFENLLKQWDTLWTSSEFIRVWWYPYTRKCVLWRGNKTTDAQNGPAKSWWGTKLGRFFYETLLWISTKIYAPLTPFVEKFVFNRQYGKLEKSSTGDVNVTDSISGFNMDCLFSQFVDEWGCPMDNGLEVLRSLDHSIAQAAINKEFYVHVPMEVRCSNTTLPSEPLDTSKRTNTSPGPVYGNVCRPFLDNTPSHCRFAPLENVTNSQLTLYINPTIYRPFGCNTPIHKWFTLFENTMMVAGGKPHWAKNFLGSTTLAAGPVKKDTDYDDFEMRGMALKVEEWYGEDLKKFRKIRKEQDPDNVFLANKQWAIINGIIDPSELSD

SEQ ID NO: 2529 - DNA, 1647 bp, Magnaporthe grisea 70-15
  CDS (1)..(1647)
atgcgacgtaacaaatcaagcgatgatggccttggtgcactcagcccacgcgcagccggcatcatccgcgaggcaaatgtcgcggacggcattcccttccgggccaaggccggccacgtgcaccgcacatgggcgcggaccttcagttcgctgccggagctgtacctgcagcccgagtccgaggccgaaatcgagaagatcatcaacttagctcgacggtgtcggcgacgggtcactgtcgtggggtgcggccactcgccctcggacttgacgtgcacgtctggttggctggtcaacttggacaactacaacaaggtcctggacatagaccgcctgaccggcgtcgtccgcatgcagagcggcatcaggctttatgcgctggcagcagagctggagagggttggcctggcgatgccgagcttgggaagcatcaacgagcagagcatcgcgggggccatatcgacgggcacccatggaagcagcttgcaacacgggctgatttcagacgatgttgttgagctgaaggtgaccttggggaacgggacgacgcggacctgcagtgcaacggaggacccggatttgtttcgggccgctctgctctcgctcggtgccctgggaatcatcagcgaggtgagcttccgggccgtgccgaggttcagtctgtcctggtaccagaccatcgacacggacaagaagatgatggcgcaatgggacacgacgttatggacccaagaccactttgttcgtgtttggtggttcccgtacatgcgtaaagccgtggtctggcgggcatcggaacctggacccgtcctagggcaagattacgccgagccagaacccccgagactggacccacctgcgagctggtacggtggcaccctcggatacctcgtctatcacaacttgctttcgctcgcacaggtggtgcccagaatacttccatgggttgaatggttcgtgtttgggatgcagtacggcttcaggaacgggacgacgatccacggcgtccagcccagcagggaggctcttctcatggattgcttgtactctcagttcgtgaatgagtgggccattcccttatcgaagggaccggaggcgcttatgcggttggggtcatggctcaacaagctcaagccaggtgacgaaggctatgttgagcacggaatcccattttctgtcgaaggcctatgggtccattctcctgtagaagtcagagttgcagacacttctttgaatcgggagaagaggtgcaggccctggctggacccgacggtcgaggatgggccgacactgtacctgaacgccacgctataccgaccctatcaccgagacccgccgtcgtataagagatactacgaagccttcgagtggttgatgaaggatatgggcgggaggccacactgggccaagaacttcaggtgtcaaaccatcgaggagctatacggcgacaacctccagcagtggcgtgcagttcgtgatagggctgacccggagggtatgtttgctgggccatggcatcgtcgacttgttctcgaggctggagatgataaacactacctgttgcccctggaggaggcagaagtcgaaagacggcaggccgagggtgacggtcttcgtgtgaccggggactgcggaggcagaaaatag

SEQ ID NO: 2530 - protein, 548 aa, Magnaporthe grisea 70-15
MRRNKSSDDGLGALSPRAAGIIREANVADGIPFRAKAGHVHRTWARTFSSLPELYLQPESEAEIEKIINLARRCRRRVTVVGCGHSPSDLTCTSGWLVNLDNYNKVLDIDRLTGVVRMQSGIRLYALAAELERVGLAMPSLGSINEQSIAGAISTGTHGSSLQHGLISDDVVELKVTLGNGTTRTCSATEDPDLFRAALLSLGALGIISEVSFRAVPRFSLSWYQTIDTDKKMMAQWDTTLWTQDHFVRVWWFPYMRKAVVWRASEPGPVLGQDYAEPEPPRLDPPASWYGGTLGYLVYHNLLSLAQVVPRILPWVEWFVFGMQYGFRNGTTIHGVQPSREALLMDCLYSQFVNEWAIPLSKGPEALMRLGSWLNKLKPGDEGYVEHGIPFSVEGLWVHSPVEVRVADTSLNREKRCRPWLDPTVEDGPTLYLNATLYRPYHRDPPSYKRYYEAFEWLMKDMGGRPHWAKNFRCQTIEELYGDNLQQWRAVRDRADPEGMFAGPWHRRLVLEAGDDKHYLLPLEEAEVERRQAEGDGLRVTGDCGGRK

SEQ ID NO: 2531 - DNA, 1545 bp, Gibberella zeae PH-1
  CDS (1)..(1545)
atggatcctctcgtagcctcggagctggaaaagctcggcgatggagtaccattccgcgcccggccacaacatgttcaccacacttgggcgcgcacattttcgtccctcccagaactatttattcagcctgaatctctggtcgaagtcgaaaaggttgtgaatctggcgaggaaatgtcgccggcgtctagtgacgactggatgtggccactcgccttccaatatcacttgcacgtccagctggcttatcaatctggacaacttcaataagattctctcggtgaaccaagagactggcgtcgttgccatggagggaggaatcaggctatatgctctttgcgcagagcttgagaaacacggacttacgatgcccaaccttgggagcatcaacgagcagtccatcagtggcgccatctccacaggtacacatggcagcagtttgcgtcacggcctcatgtccgagaacattatctctctcaaggtgacactggcaaatggaacgactgtcttctgctccaaggatacaaagacagacctttttagggctgctctcctttctcttggcgctgtcggtattatcacagaagtcacttttcaagcagtcccgtctttcactctaaggtggcagcaaagcgtggacacagactacaagatgctcgagtcttggaatggcgatctttggacacagagcgaattcgttagggtttggtggttcccttacacaagacgtgcagtggtctggaacgccgaaaagaccgacgaggaactccgcgacccccctcaaagtggctatgatggctcaatcggttactatgtctaccacaacctactgtatctcgcccaacacgttccacgaatcttaccctgggttgagtggctcgtctttgggatgcagtacggtttccgaaatggtacgacctcatcagctgtccaacccagcggcaaagctctactcatgaactgcctatactctcagtttgtcaacgagtgggccattccccttcacaagggacccgaggctcttagacgcctcagctcatggatcaaccacttgacacccgaagaccctgactatgtccctcacaacatccctttctctgccgaaggactctacgtacacgcaccagtcgaggtccgtgtaagcgacactacgctcacatccaacgtacgaccataccttgacatcacagccgatgatggaccgaccctgtaccttaacgcaacactctaccgaccctacctgatggatcccccgtgccatgagcggtactacgagggtttcgagtggttgatgaaagatcttggaggtcgacctcattgggccaaaaatttcgaaacatcacgggtcgaaattgaagcattctatggcaagaacctggaatctttccgagcagtgcgcagtgacgctgacccccagggcatgtttgttggaccttggcatcgagagagaattatggaagagggcgaaggccttgaacttgaagaggtcgagattcgacgagagaagaacaacagcggaggcttaacaacattcggagtcatttga

SEQ ID NO: 2532 - protein, 514 aa, Gibberella zeae PH-1
MDPLVASELEKLGDGVPFRARPQHVHHTWARTFSSLPELFIQPESLVEVEKVVNLARKCRRRLVTTGCGHSPSNITCTSSWLINLDNFNKILSVNQETGVVAMEGGIRLYALCAELEKHGLTMPNLGSINEQSISGAISTGTHGSSLRHGLMSENIISLKVTLANGTTVFCSKDTKTDLFRAALLSLGAVGIITEVTFQAVPSFTLRWQQSVDTDYKMLESWNGDLWTQSEFVRVWWFPYTRRAVVWNAEKTDEELRDPPQSGYDGSIGYYVYHNLLYLAQHVPRILPWVEWLVFGMQYGFRNGTTSSAVQPSGKALLMNCLYSQFVNEWAIPLHKGPEALRRLSSWINHLTPEDPDYVPHNIPFSAEGLYVHAPVEVRVSDTTLTSNVRPYLDITADDGPTLYLNATLYRPYLMDPPCHERYYEGFEWLMKDLGGRPHWAKNFETSRVEIEAFYGKNLESFRAVRSDADPQGMFVGPWHRERIMEEGEGLELEEVEIRREKNNSGGLTTFGVI

SEQ ID NO: 2533 - DNA, 1725 bp, Aspergillus nidulans FGSC A4
  CDS (1)..(1725)
atggaccccgccgttgctcgcgagctctcccgcctcgaccccgcggtgccgttccgcgcctctagcgggcatcttcatcatacttgggctcggacgttctactcacggccacagctttatattcagccgcaatcactagcagagattcagaaagtcgtcaacttggctcgccgttgtcgtcgtcggctggttgttgttggtagcggccattcgccttccgatctcacatgttcttccgcgtggatggtaaacttagataaattcaatcggatattgaacgttgaccgtgagactggaattgttacggttgaggccgggatacggttgagggatctggggaaacaactggagcaagaatatgggctgaccctctcgaatctcgggagtatcgacagccagtccattgctggcgtcatcgcgactggcacacatggaagctctttggcgcatggactgatttcagaatgcattgtttctctgacgttgatgttggccaacgggcaattagtgcgatgcagtgcggacagcaaccaggcgctttttcgagcagctcttgtctcattgggggcactgggaatagttgtggaagtcagtttccgctcggagccgtcgttcaatattgcatggaagcagacaaggcgctcgctttcgagtgtgttggatgagtggtcttctggcttgtggacgtcgcatgaattcgtccgtgtatggtggatgccatacgggaagagcgtgattcactggtatgccgacaagacggaccttccgctgaagccaccaccaaggacattctatggagagtccattggctaccatgtataccataatctgctggccctgtcaaattactttcctcggattctgccatgggtggaatggttcgttttcggtatgcagtatgggttcagagctgagaagacggtgacagaggcagtcgaaaaaggacgtactggtctcttgatgaattgcctctactctcagtttgtgaatgaatgggcactgccgctggaaaagggtccggaggcaatcacaaggttgtcggcctggctgcatggcgataccgaaacagcccgcatcccttttcccgttgacggactctgggttcattgccctgtcgaagtcagggttgcagatactacactcaacaagtatcctcgtcctttcctcgacccgagcagtgctgatgggccgacattgtatctcaatgcgacactctaccgtccctaccacaaagaccccccttgtaaggatcgttattatgaagcatttgagtggctaatgagggatatgggcgcaaaaccgcattgggccaaaaattttaagtcaatgggccaagagctgcggcagatgtacggggagaacatgaatgagtggctcaaagtgcgtcaggatgttgatgcagacggcatgttccttggtgaatggcattgtcgtacccttgctttgtccgatgacagagctccggggtcaggatcctccgtgacaagcggccttccattgatggagcgcgagaaggctcgtcggcaggcgaaatttcgcggtgccggtgatggtcttgagtggattggagataaccagtggcacacagatgcaaaagagacgattggtgttttgtcgactatggaagagaagcacaactcaagttcaccaacaacagcaacaagtgaggagagcttcgatctcctcgcgtcgagcgaggctagtgttctcatccctgaaccgtga

SEQ ID NO: 2534 - protein, 574 aa, Aspergillus nidulans FGSC A4
MDPAVARELSRLDPAVPFRASSGHLHHTWARTFYSRPQLYIQPQSLAEIQKVVNLARRCRRRLVVVGSGHSPSDLTCSSAWMVNLDKFNRILNVDRETGIVTVEAGIRLRDLGKQLEQEYGLTLSNLGSIDSQSIAGVIATGTHGSSLAHGLISECIVSLTLMLANGQLVRCSADSNQALFRAALVSLGALGIVVEVSFRSEPSFNIAWKQTRRSLSSVLDEWSSGLWTSHEFVRVWWMPYGKSVIHWYADKTDLPLKPPPRTFYGESIGYHVYHNLLALSNYFPRILPWVEWFVFGMQYGFRAEKTVTEAVEKGRTGLLMNCLYSQFVNEWALPLEKGPEAITRLSAWLHGDTETARIPFPVDGLWVHCPVEVRVADTTLNKYPRPFLDPSSADGPTLYLNATLYRPYHKDPPCKDRYYEAFEWLMRDMGAKPHWAKNFKSMGQELRQMYGENMNEWLKVRQDVDADGMFLGEWHCRTLALSDDRAPGSGSSVTSGLPLMEREKARRQAKFRGAGDGLEWIGDNQWHTDAKETIGVLSTMEEKHNSSSPTTATSEESFDLLASSEASVLIPEP

SEQ ID NO: 2535 - DNA, 1437 bp, Cryptococcus neoformans var. neoformans B-3501A
  CDS (1)..(1437)
atgcaagacctcacggcggtagacaaccatgcgcttcaagcagctctccaccccatctccgtctcctccagctccccgctcgccactttctccaactgggccaaaacgttcaagtgtaaaccacaacgtgtctttgtgccgaccaccgccctccagtgtcgacagatcctagagctggcgaggagggagggtgcgagggtgcatcctgttggcgcaggccattcaccgtcggacttggcgtgtacgaacgggtggttggtgaggatggaggggctgagggggaccgtcaagattgacagcgagaaacacaccgccacctttctcgccggaacgaccctccacgaagtccacgcttcgctcgcttcctccgatcccccactcgctatccccaacgttggctccatctctgaccaaacgatcgctggtctcatctccaccgccacccacggatcgggcgtcactttccccgtcttatcagcccacgtcaaatccctcctcctcgcgctccctctccccggtaccccgcttgtcagagtctcacagagcgaagatgaagagctgttcaaagctagtttatgtggtttaggagcgaccggtttgattttggaagtagagatcgaggtggaggacgcgtttaggttgagggagacgaaagaggggaaacgggtggaagaggtgctggagagtttggatgagattaggaagagtgcagagcatgtgagggtttggtggtacccgtatgggaagggggcggttgttggacgggccagcaggacttatgagcctgctcaacctacgtccgatcttgtgggacatatcctcggctttcatgttacccagttcttcctctacgtagcacgcatcttcccttccttgacgtccttggtcggccgctgggcgtggtggctctcaaaagaagacagcgtcatggtcgatgatggttacaaagttctcaatttcgactgtctcttcccccagtacgccttggaatgggccatcgacgccaaagaggccaaagcatgcttgcaagaaatgaaaaagtggttggaccgcgaagccgccgatcccgccggtctccgtgtccacttccctatcgagatccgttggtcttgcgccgacgacatctggctcagtccgtcatacggcagggatacctgctggatcggtgtagtcacctaccgtccgtacggtctttctgtgccttaccgccagttccacgaaaagttttcttccctcttaaagtcctatggcggaagaccgcactgggcgaaacagcatatcttgggacccaagacgctagaggtgatatacccgaaattcaaggatttccagcaagtgctgaggagggtggatcccagtggtgtgcttttgagtgagaatgtgcgtagacatgtgcagggtgagagtatcccggagagtctgttcgaaagacgttga

SEQ ID NO: 2536 - protein, 478 aa, Cryptococcus neoformans var. neoformans B-3501A
MQDLTAVDNHALQAALHPISVSSSSPLATFSNWAKTFKCKPQRVFVPTTALQCRQILELARREGARVHPVGAGHSPSDLACTNGWLVRMEGLRGTVKIDSEKHTATFLAGTTLHEVHASLASSDPPLAIPNVGSISDQTIAGLISTATHGSGVTFPVLSAHVKSLLLALPLPGTPLVRVSQSEDEELFKASLCGLGATGLILEVEIEVEDAFRLRETKEGKRVEEVLESLDEIRKSAEHVRVWWYPYGKGAVVGRASRTYEPAQPTSDLVGHILGFHVTQFFLYVARIFPSLTSLVGRWAWWLSKEDSVMVDDGYKVLNFDCLFPQYALEWAIDAKEAKACLQEMKKWLDREAADPAGLRVHFPIEIRWSCADDIWLSPSYGRDTCWIGVVTYRPYGLSVPYRQFHEKFSSLLKSYGGRPHWAKQHILGPKTLEVIYPKFKDFQQVLRRVDPSGVLLSENVRRHVQGESIPESLFERR

SEQ ID NO: 2537 - DNA, 1599 bp, Ashbya gossypii
  CDS (1)..(1599)
atgtctgtgttagcaggtgtggaggccagcgggatagctaggaattatgtgttcaagaattgggcagggatttattcggcgcggccgcggctgtacttccaacccaggtcggaggatgaggtggtggcgatagtgcgggcggcgcgtgagcaggggcggacgattgtgacggtggggtcggggcactctccgagcgacatgtgcgcaacggacgactggatggtgaatctagaccggctgaatggggtgctggagctgcaggaggacgagcaggggcggtacgcggacgtgacggttgcagctgggatccgggtgtacgagctgcaccggtacctgagcgcacgggggtatgcgctgcagaacctggggtcaatttcggagcagagtgtgggggggatcatctcgacgggcacgcacgggtcatcgccgtaccacggcctggtgtcctcgcagtatgtcaatctgacgctggtgaacgggcgcggcgagcttgtgtttctggactcggagcacgagccggaggtgttccgcgcggcgatgttgtcgctgggcaagctgggtatcattgtccgtgcgacgatccgcgttgtacctgcgttcaacatccattccacgcaggaggtgatcaacttcgagacgctccttgacaattgggagacgatctggacgtccagcgaattcatccgctgctggtggtacccttatgtgcgcaagtgcgttctgtggcgcggcgtgaaaacatctgagccggcggagaagagccgcagttcatggtggggcacgaccttgggtcgcctggtgtacgaatctctcctgtggctcaccgtgaacgtctatccttccctgacgccgtttgttgagcggtttattttccgtcagcagtacggcaaagttgagacgtttggtaatggtgacgaggctgtccagacttcaatcgatgggctgaatatggactgtctgttctcgcagtttgttgacgaatgggcctgtccgctgaataatgggcccgaggtgttgcgctctctggaccattccatcgcacaggccgcccagaacaaggaattttttgttcacgtaccaatcgaagtccgctgctccaacacgactcttccacacgaatataaatgcccggaagaccggacggtgacggcccctggtccagtctacggtaacttgctccgtccgtatctggacaacacgccctctcacttgcgctatgctcccctctcggacgttaccaactcccagttgaccctctatattaacgctacgatatacaggccttttggaacgaataccccaattcacaagtggttcactctctttgaagacaccttgggggcagccggcggtaagccacactgggctaagaatttcttgggctctaccgcaaccgctgcgggccccgtcaagagttctgacgaatatcaagattacgaaatgagaggaatggccacaaaaataaaagaatggtatggcgacaatctgaagcaattccaaaaggttagaagagaacaagacccacataatgtcttcatagctaacaaggattgggccgttaagaacggcattatcgacatcgatgaactggattcttaa

SEQ ID NO: 2538 - protein, 532 aa, Ashbya gossypii
MSVLAGVEASGIARNYVFKNWAGIYSARPRLYFQPRSEDEVVAIVRAAREQGRTIVTVGSGHSPSDMCATDDWMVNLDRLNGVLELQEDEQGRYADVTVAAGIRVYELHRYLSARGYALQNLGSISEQSVGGIISTGTHGSSPYHGLVSSQYVNLTLVNGRGELVFLDSEHEPEVFRAAMLSLGKLGIIVRATIRVVPAFNIHSTQEVINFETLLDNWETIWTSSEFIRCWWYPYVRKCVLWRGVKTSEPAEKSRSSWWGTTLGRLVYESLLWLTVNVYPSLTPFVERFIFRQQYGKVETFGNGDEAVQTSIDGLNMDCLFSQFVDEWACPLNNGPEVLRSLDHSIAQAAQNKEFFVHVPIEVRCSNTTLPHEYKCPEDRTVTAPGPVYGNLLRPYLDNTPSHLRYAPLSDVTNSQLTLYINATIYRPFGTNTPIHKWFTLFEDTLGAAGGKPHWAKNFLGSTATAAGPVKSSDEYQDYEMRGMATKIKEWYGDNLKQFQKVRREQDPHNVFIANKDWAVKNGIIDIDELDS

SEQ ID NO: 2539 - DNA, 1674 bp, Candida albicans
  CDS (1)..(1674): transl_table=12
atgacagatattccagaatctttgaagccctttgtcactaaaaaagtcatccattcaacttgggcaggaacttttttatgtaaaccacaagcaattttccaaccaagaaatgttgaagagatccaagagttaatcaaacaagccagattgcatggaaagaccattatgacagttggatcgggtcattctccaagtgatttgactatgactacggaatggttatgtaatttagataaattcaatcatgtattattagaagagccatattatgccccaaaatcacccaccgatgacacccctgaaatcaaattcgttgacttaacagtggaagcaggaaccagaatttttgaattgaatgagtacttgaagagaaacaatttggcaatccaaaatttaggttctattagtgatcaatctattgctgggttgatttctactggtacccatggatcaactcaatatcatggtttagtttcacaacaagttgtgtcagtgaagtttttaaattctgctggggaattaatcacttgttctagtgttgacaaaccagagtatttccgtgctatattattgagtttagggaaaatagggatcattacccacgttactttgagaacttgtcctaaatacaccatcaaatctaagcaagaaatcattaattttgaaactttattgaataattgggataatctttggttggaatccgaatttataagaatatggtggttcccatataccaacaaatgtgttttgtggagagctaacaaatcaactgatcccttatctgacccaagaccttcatggtatggtaccaagttgggtagattcttttatgaatctttattgtgggtgagtgttcatttattccctagattaactccattcgttgaaaaatttgttttcggtcaacaatacggtgaagtagaaactttgggtaaaggtgatattgctgttcaaaattcagtagaagggttgaatatggattgtttgtttagtcaatttgttaacgaatggtcatcaccattgaattccggtccagaaatcttaacagaattgaaaaagattattactgacgcgtctcaaactggtgatttttttgttcacgctccaattgaagttagatgttcaaatgttacttattctgatgaaccatttactgatgataaaaaccagaaatcgttgtacccatcacaagagtggctttcaaatcgttctaagacgagtgctggcccaattccaggtaacaatttaagaccatatttggacaactctcctaaattaccatattctaaagacggcaagattaccaacgaccaattaactttgtttatcaatgctaccatgtatcgtccgtttggaactaatgttgaaacccataaatggttccaattgttcgaagatgttatgagtaaagctggaggtaaacctcattgggctaagaactttattggattgactcaagatgaaaaatatgacaaacagcaagatttgaaaacccaattagaatttggaggtaagccattctacacaatgttgggttttaaacctgttatgcaagattggtttggtaaagatttggttgccttcaacaaggtcagaaaagaaactgacccagatggtgtgttcctttctggtaaagtatgggccgaaagaaacggtattttattagactag

SEQ ID NO: 2540 - protein, 557 aa, Candida albicans
MTDIPESLKPFVTKKVIHSTWAGTFLCKPQAIFQPRNVEEIQELIKQARLHGKTIMTVGSGHSPSDLTMTTEWLCNLDKFNHVLLEEPYYAPKSPTDDTPEIKFVDLTVEAGTRIFELNEYLKRNNLAIQNLGSISDQSIAGLISTGTHGSTQYHGLVSQQVVSVKFLNSAGELITCSSVDKPEYFRAILLSLGKIGIITHVTLRTCPKYTIKSKQEIINFETLLNNWDNLWLESEFIRIWWFPYTNKCVLWRANKSTDPLSDPRPSWYGTKLGRFFYESLLWVSVHLFPRLTPFVEKFVFGQQYGEVETLGKGDIAVQNSVEGLNMDCLFSQFVNEWSSPLNSGPEILTELKKIITDASQTGDFFVHAPIEVRCSNVTYSDEPFTDDKNQKSLYPSQEWLSNRSKTSAGPIPGNNLRPYLDNSPKLPYSKDGKITNDQLTLFINATMYRPFGTNVETHKWFQLFEDVMSKAGGKPHWAKNFIGLTQDEKYDKQQDLKTQLEFGGKPFYTMLGFKPVMQDWFGKDLVAFNKVRKETDPDGVFLSGKVWAERNGILLD

SEQ ID NO: 2541 - DNA, 1578 bp, Candida glabrata
  CDS (1)..(1578)
atggatttgaaaacatttggtggtcggcggaactttgtgtttcgcaattgggctggtatctattcctcaagaccagaatggtactttcagccttcctcagtcgacgaagttgtcgaaattgtcaaagctgctaaactaaagaacaagactattgttacagttggctcaggccactcccctagtaacatgtgtgttaccgacgaatggatgatgaacttggacaagatgaacaagttactagattttgtggaaaacgaggataagacatacgcagacgttactattcaaggtggtactaggttgtataagatccacaaaatattaagggaaaagggatacgccatgcaaagtttggggtccatttctgaacaaagtattggtggtattatctctactggtactcatggttcgtctccattccatggtctggtatcttctactattgtcaacttgactgttgtcaatggtaaaggtgaagtattatttttagacgaaaagtctaaccctgaagttttcagggctgctactttgtcgcttggtaagattggtattattgtgggtgcaactgttcgtgttgttccagctttcaacattaaatcaacccaagaagttatcaaatttgaaactcttttggaaaaatgggactctctctggacttcttcagagtttatcagaatttggtggtacccatatacacgtaagtgtatcctttggagaggtgtaaagactaatgaaccacagactaagtcaagatattcgtggtggggttctactctaggtagatttttctaccagactttgttgttcatatctaccaagatttacccacctttgactccatatgttgaaagatttgtcttcagaagacaatatggtgaagttgaaaccctaggtaaaggtgatgtggcaattgaggattctgttactgggttcaacatggactgtttgttttctcagttcgttgatgaatggggttgtccaatggacaatggtttagaagtcttgcgttctcttgaccactcaattgctcaagccgctgctaacaaggatttctatgtacatgtcccagttgaggttcgttgtgcaaacacaactttgccaaaggaacaacctgaaacttctttccgttctaacactagtagaggtccagtttacggtaacctattacgtccttacttggataacaccccatctcaatgctcttatgctcctatccacagtgttactaatagtcagttgacgctatacattaacgcgacaatttacagaccattccacaccaatgccccaattcacaagtggttcaccttgtttgaagatacaatgtctgctgctggcggtaaaccacattgggctaagaacttcttgggctctacctcttttgctcaaggtcaagttaaggctgaaggtcaataccaagactatgagatgagaggtatggctacaagagtcaaggaatggtatggttcagacttggaaacctttaagaaggttagaagagaacaagacccagacaacattttcttggcaaacaaacagtgggccttgatcaacggtatcattgatgaaaacgaataa

SEQ ID NO: 2542 - protein, 525 aa, Candida glabrata
MDLKTFGGRRNFVFRNWAGIYSSRPEWYFQPSSVDEVVEIVKAAKLKNKTIVTVGSGHSPSNMCVTDEWMMNLDKMNKLLDFVENEDKTYADVTIQGGTRLYKIHKILREKGYAMQSLGSISEQSIGGIISTGTHGSSPFHGLVSSTIVNLTVVNGKGEVLFLDEKSNPEVFRAATLSLGKIGIIVGATVRVVPAFNIKSTQEVIKFETLLEKWDSLWTSSEFIRIWWYPYTRKCILWRGVKTNEPQTKSRYSWWGSTLGRFFYQTLLFISTKIYPPLTPYVERFVFRRQYGEVETLGKGDVAIEDSVTGFNMDCLFSQFVDEWGCPMDNGLEVLRSLDHSIAQAAANKDFYVHVPVEVRCANTTLPKEQPETSFRSNTSRGPVYGNLLRPYLDNTPSQCSYAPIHSVTNSQLTLYINATIYRPFHTNAPIHKWFTLFEDTMSAAGGKPHWAKNFLGSTSFAQGQVKAEGQYQDYEMRGMATRVKEWYGSDLETFKKVRREQDPDNIFLANKQWALINGIIDENE

SEQ ID NO: 2543 - DNA, 1674 bp, Debaryomyces hansenii
  CDS (1)..(1674)
atgaggagtgatattccagaaacattacagaattttgtgagtacgaaaaccgtgcaccagacatgggcaaagacatttttttgcaagccacaggctatttttcaaccacggacggtggatgaaatcagggaattagtggaccaggcaagaataaatgggaaaacgatcatgacagtgggatcaggccattctcccagtgatatgacgatgaccaaagagtggttgtgcaatttagataggttcaaccaggtgttgaagaaggaggagttcagtggtccgactagaaatggagaaggtgaagaggtgaagtttgtggacttaacggtgcaagcggggtgccgtatatacgagttgaaccggtacttgaaggaaaacgagttggcgatccagaatttgggatccatcagcgaccagtctatggcgggggtgatttcgacgggaacgcacggatcgactcagtaccatgggttggtgagtcagcaggtggtttcgattgagatcatgaattctgctgggaagttgataacatgttcgtcgatggagaacactcagttgtttaaggcggccatgctttcattgggtaagattgggattatcacgcatgttacgctcagaactattccaaagtacaccatcaagtcgaagcaagaaatcatcaagttcgatactcttttgaaaaattgggacaccgtgtggttagactcggagtttatcagggtgtggtggtttccatactcgggcaattgtgtttgttggagggcttcgaagtcgtccgagccattatcgaaaccaagagattcatggtatggcacctggtttggaaggaagttctacgagtcgttgttgtggatctcggtccacatatgtcctcatttgactccactcatcgagaaattcgtattcaagaatcaatacggcgatgtggaaactcttggtcatggtgatgttgcagtccaaaattctgttgaagggttaaatatggattgcttgttctcgcaatttgtcaatgagtggtctacgcctttgagtctgggccaagatgtcttgattaaattgaatgatgtgattcaaactgcccgtgagcaaaacagattctatgttcacgctccaatcgaagttagatgctctaatcttacgtactcagagaagccatttgtggatgagaacgatgagccttcattgtatccaaataaaaagtggttagctaaaagagacaggctcagtcctggacccattccaggtaataatttgcgtccttaccttgacaattcttcaaatttgagatatgatggcgatggcgcaaatgtgacaaatgatcaattgactttgttcattaacgctacaatgtacagacctttccacaccaatgttaattcccaagagtggtatcaattgttcgaagatataatgacaaatgctagtggtagaccacattgggcgaagaatttcatcggtgtaaatggtgcacatagaactgatcaggatttgcgaaaacagcttgaatttggtggtaaaacttcgtacagtatgaagggctttaatccaatattgaaaaagtggtttggtgaaaacttggttgaatataataaagttagagagtcaatggacccagataacgtctttttaagtggtaaagactgggctgtcagaaatggtattttaatagatgtttga

SEQ ID NO: 2544 - protein, 557 aa, Debaryomyces hansenii
MRSDIPETLQNFVSTKTVHQTWAKTFFCKPQAIFQPRTVDEIRELVDQARINGKTIMTVGSGHSPSDMTMTKEWLCNLDRFNQVLKKEEFSGPTRNGEGEEVKFVDLTVQAGCRIYELNRYLKENELAIQNLGSISDQSMAGVISTGTHGSTQYHGLVSQQVVSIEIMNSAGKLITCSSMENTQLFKAAMLSLGKIGIITHVTLRTIPKYTIKSKQEIIKFDTLLKNWDTVWLDSEFIRVWWFPYSGNCVCWRASKSSEPLSKPRDSWYGTWFGRKFYESLLWISVHICPHLTPLIEKFVFKNQYGDVETLGHGDVAVQNSVEGLNMDCLFSQFVNEWSTPLSLGQDVLIKLNDVIQTAREQNRFYVHAPIEVRCSNLTYSEKPFVDENDEPSLYPNKKWLAKRDRLSPGPIPGNNLRPYLDNSSNLRYDGDGANVTNDQLTLFINATMYRPFHTNVNSQEWYQLFEDIMTNASGRPHWAKNFIGVNGAHRTDQDLRKQLEFGGKTSYSMKGFNPILKKWFGENLVEYNKVRESMDPDNVFLSGKDWAVRNGILIDV

SEQ ID NO: 2545 - DNA, 1578 bp, Kluyveromyces lactis
  CDS (1)..(1578)
atgtcttttgatctagtagcaggcaatgcccgttccaattttgtattcaaaaattgggcaggtatttattcgtgtagaccgcaattatatttccaacctaattcgatcgatgaagtcgtgcagatcgttaaagctgccatagaacaaggcaagaccattgttaccgttggatctggtcattctcctagtgatatgtgtgttacagaccaatggttgatgaatttagacaatttgaactctgttgtagaattcaaggaaaataaagaggagttgtacgccgatgttaccgtcgaagcaggtcttagaatctaccagttgagtgaaatcttagctgagaagggatacgcaatccaaaatttgggatccatctccgaacaaagtgtcgcaggtatcatttctactggtactcatggatcttctccatatcacggattggtgtcgtcccaatatgtaaacctgaccatcgtgaacggtaagggagaggtcgtattcttggattctgaaaactctcctgaagtgtttagagccgctacattgtctttaggtaagatcggtattattgtcaaggctactattagagtgatcccagaatttaatatcaagtctactcaagaagtgatccactttgagactctattaaacaattgggaaactatctggacatctagtgaattcatcagatgttggtggtacccatacactagaaaagtggtcttgtggagaggatctaaaactgaggaacctttaacagctccaagaaaatcttggtggggaagcacttttggtcgtttcatttatgaatctttgatctggatcagtgtgaaaatttatccggcactaacgccatacgtcgaatcatttgtgttccaccaacaatatggccgtgtcgaaacttatggtagtggtgatgtttctgtgcaaacttcgatcgctggattgaacatggactgcctattttctcaatttgttgacgaatgggggtgtcctctaaacaatggaccagaggtcttacgttctttggactactcaatcactcaagcggcacaaaacaaggaattctttgttcacgttccagtagaagtccgttgctcaaatacaacactacctgctgaaattccagattactctaatagaacaaagacatctgctggtccagtattcggtaacactttacgtccatatctggatgctactccacgtcatttaagatacgctccattgtctgacgttacaaactcacagttgtcattatacatcaatgctacaatttatagaccattcggtagtaattctccaattcacaagtggttcactttgttcgaagacacaatgggtgctgctggtggtaaacctcactgggcaaagaatttcttgggtgcaacttctatggctgcaggtaaagtaaaggacgaaaaagactacgatgattatgaaatgagaggtatggctaccaagattaaagaatggtacggagaagatctactgaagttccgcgaaatcagatcccagcaagatccgaataacgtttttatggctaacaaagaatgggccattcgtaatggtatcattgaaccatag

SEQ ID NO: 2546 - protein, 525 aa, Kluyveromyces lactis
MSFDLVAGNARSNFVFKNWAGIYSCRPQLYFQPNSIDEVVQIVKAAIEQGKTIVTVGSGHSPSDMCVTDQWLMNLDNLNSVVEFKENKEELYADVTVEAGLRIYQLSEILAEKGYAIQNLGSISEQSVAGIISTGTHGSSPYHGLVSSQYVNLTIVNGKGEVVFLDSENSPEVFRAATLSLGKIGIIVKATIRVIPEFNIKSTQEVIHFETLLNNWETIWTSSEFIRCWWYPYTRKVVLWRGSKTEEPLTAPRKSWWGSTFGRFIYESLIWISVKIYPALTPYVESFVFHQQYGRVETYGSGDVSVQTSIAGLNMDCLFSQFVDEWGCPLNNGPEVLRSLDYSITQAAQNKEFFVHVPVEVRCSNTTLPAEIPDYSNRTKTSAGPVFGNTLRPYLDATPRHLRYAPLSDVTNSQLSLYINATIYRPFGSNSPIHKWFTLFEDTMGAAGGKPHWAKNFLGATSMAAGKVKDEKDYDDYEMRGMATKIKEWYGEDLLKFREIRSQQDPNNVFMANKEWAIRNGIIEP

SEQ ID NO: 2547 - DNA, 1671 bp, Neurospora crassa
  CDS (1)..(1671)
atggcgaccgagagcaacccggcgctcgcctccctcccgtccaacgtgcgcgagatcattgagctcgccagccagcgcgatggcggcattccattccgggcaaagaccgctcatgtccacagaacctgggctggcactttcacgagcttgcccgagctttatattcaacccgaatctgtctcagaaattcaaaaggttgtccgcttggcccgtcacgcccggcgccgtgtcactaccaccggctgcggtcactctccttcagacattacttgtacctcgtcctggctcgtcaacctggacaacttcaacaaggttatttccgttgaccatttaactggtcttgttgttgtgcaggcaggtatccgtctttaccagctcagtgacgagctggaccgccgcgggcttgctttgcctagtctcggcagcatcaatgagcagagcattgccggcgccatcagcacgggcacgcatggcagcggcatcaagcatggtcttgtcggtgaaagcattactgagctcaagattacgcttgccaatggcgagacattgtcgtgctccccagaggacaagcctgatctgttccgggccgccttgatctccctcggtgccttgggtatcatcactgaggtcactttcaaggctgttccagctttctcacttgcctggagccaggcaatcgactcggataagcgcatctttgagaaatgggaaaaggatctctggagccaggccgagtttgtgcgtatttggtggtttccttacatgcgccgcgccgctgtttggactgccaacgttgtcgatccggtcgacttgaagaccggcgccgtcaagcaccgtgagccgccaacaagctactacgatagctggctaggctactatgtctatcacaacctccttgctctctccagatggatcccgcgcatcacgccttggattgagtggttcgttttcggcatgcagtatggtttcaagaacggcgaggtcacgaggattggcgccgttcagcccagccagaaggccttcctgctgaactgcttatacagccaatccgtcaacgagtgggccatccccctccacaagggacccgaggctctacagcgtcttggtgcctggcttcagaacctgaagcctggtgaccccggctatgttgagcacggcatcccctacagcgccgagggtctctgggttcacagccccgtcgaagtgcgtgcgagcgactcgaccgtctacacctcgcgggaggccaacacgcgccccttccttgaccccacgcagtctgacggccccacgctctatctcaacgccatcatgtatcgcccctaccaccgtgagccgacctacaacgccacagagcgctactatctcggttttgagtggctcatgcgcgagctcggcggcaagccgcactgggccaagaccttcaccgcgacccaggccgacctggcaaggtggtacggcgatgacttccagcggtggggcgccgtccgcgagagcgtcgaccccgagggcatgtttgttgggccctggcacagacgctacctgttggagcccctccaaagggacaggctcctcccgctggaggagattcagcagacgactaagaaggtccccgcgaggcagggtggtggtatcgaagtgattggcatccagaacctcgtcgcgccgaactag

SEQ ID NO: 2548 - protein, 556 aa, Neurospora crassa
MATESNPALASLPSNVREIIELASQRDGGIPFRAKTAHVHRTWAGTFTSLPELYIQPESVSEIQKVVRLARHARRRVTTTGCGHSPSDITCTSSWLVNLDNFNKVISVDHLTGLVVVQAGIRLYQLSDELDRRGLALPSLGSINEQSIAGAISTGTHGSGIKHGLVGESITELKITLANGETLSCSPEDKPDLFRAALISLGALGIITEVTFKAVPAFSLAWSQAIDSDKRIFEKWEKDLWSQAEFVRIWWFPYMRRAAVWTANVVDPVDLKTGAVKHREPPTSYYDSWLGYYVYHNLLALSRWIPRITPWIEWFVFGMQYGFKNGEVTRIGAVQPSQKAFLLNCLYSQSVNEWAIPLHKGPEALQRLGAWLQNLKPGDPGYVEHGIPYSAEGLWVHSPVEVRASDSTVYTSREANTRPFLDPTQSDGPTLYLNAIMYRPYHREPTYNATERYYLGFEWLMRELGGKPHWAKTFTATQADLARWYGDDFQRWGAVRESVDPEGMFVGPWHRRYLLEPLQRDRLLPLEEIQQTTKKVPARQGGGIEVIGIQNLVAPN

SEQ ID NO: 2549 - DNA, 1386 bp, Schizosaccharomyces pombe
  CDS (1)..(1386)
atgtcaattcctcatattaataagctatcccaagatgggcgagttcgtttttcaaattgggctaaaactttctctgccatttcacttggtttacgatgccccaaaacagaagaacaattaagagagattctagtagatgcaaattcgaatggaaaaaaaattcgagttgtcggtgctggccactcgccatcagacattgtctgcacttctggctaccttttgtcattagataaaatgaataaggttgtctcatttgaccctgattcccttagtattaccgttcaagccggtatcagattttaccaagtacaagaaatccttcagaatttgggatattctcttcccatcgttggtagcatctctgaaacttctgtaagcggaatcatgtccacttgtacccatggttctagcttgcaacatcaagtgcttcctcattatatcaagtcaatgcgtattatgctcgccgatggatctattgtaacctgttctcgagagctacagaaagacatgtttgctgctgctcaagttagtttgggagcattgggtgtaattgttgatattactatctctgttgtaccagcttttgatttggtcgccacggaagatgttactactgtcactgatttatttcaagattggaaaaacaacctgatttgggaatctgctgaatttgtgcgtgttcatgtattcccatatgctaatcgagctgttgtttggagagccaacaaagtagaacccaatactgttcctcacacacctaagccatcactctttcgcttgaagctagattcctttgtctatcaatgtttactttttgtgggtaaatgtgtaaatagagttacgccgtatttggagcgtttttggttcaaatgtcattatggttctaagcttggcacggctttgcaggtggctggccctggttttgatgttttgcaaatgttctgctatttttcacaacatgttagtgaatggggtattcctcttgaatctgcccccgatgcccttgagaaactgataaattatactgttgatgatgctggaaagataggcgcatatactcattggcctattgaggttcgcgtttgtgctcccactccagaggatgaatgttggctttctactgattgtaaagtacccacctgttatatcgaagcaatcatgtaccgccctttctctacttcaattaactataaaccctacttcaaagccttagaggatatcgcaaatcagtataacggaaaacctcattgggctaaggaatacagtttaactaaagagcagttacttgaacgctatccaaacctttcaaaatggctttcccttcgtaaacttcttgatccaaaaggcgttttttggaacgattacctacaacgccatctcggttaa

SEQ ID NO: 2550 - protein, 461 aa, Schizosaccharomyces pombe
MSIPHINKLSQDGRVRFSNWAKTFSAISLGLRCPKTEEQLREILVDANSNGKKIRVVGAGHSPSDIVCTSGYLLSLDKMNKVVSFDPDSLSITVQAGIRFYQVQEILQNLGYSLPIVGSISETSVSGIMSTCTHGSSLQHQVLPHYIKSMRIMLADGSIVTCSRELQKDMFAAAQVSLGALGVIVDITISVVPAFDLVATEDVTTVTDLFQDWKNNLIWESAEFVRVHVFPYANRAVVWRANKVEPNTVPHTPKPSLFRLKLDSFVYQCLLFVGKCVNRVTPYLERFWFKCHYGSKLGTALQVAGPGFDVLQMFCYFSQHVSEWGIPLESAPDALEKLINYTVDDAGKIGAYTHWPIEVRVCAPTPEDECWLSTDCKVPTCYIEAIMYRPFSTSINYKPYFKALEDIANQYNGKPHWAKEYSLTKEQLLERYPNLSKWLSLRKLLDPKGVFWNDYLQRHLG

SEQ ID NO: 2551 - DNA, 1581 bp, Yarrowia lipolytica
  CDS (1)..(1581)
atgtcactgcgaaacagcacgactgctaagcggtttcattcgcataagacctgggcagggaccttctggtcccgtccatcgctgtacttccagcccgcaagcatagaagagctccaggccattgtgacacgagcacgagacctgggaaagacaatcatggtggtgggctcagctcactcaccctcggacctcaccatgacctcccaatggctcgtcaacctcgacaagcttagcaaggccgtgtccttcaagccccacacctcgggtctctacactgacgttactgtcgaggccggtattcgcatccatcagctcaacgaggtactcaagcgaaagggactggccatgcagaacctgggctccatttcagaccaatctgtggccggaatcatcagtacaggaacccacggttcgtcggcctaccacggtctggtttcccagcaaatcgtgtcactgaccatcatgatcgcctccggtgagctgctcacgtgctcacccgatgagaaccctactcttttccgagctgcactcctttctcttggaaagctaggaatcatcgtctacgccactctccgaaccgtgccggcatacaccatccactccacccagcatgtcatcacctttgagactctgatccgtgagtgggacaacctgtggactgcctcggagtatatccgggtgtggtggttcccgtacgcagagcgatgcattctgtggcgagcttccaagtcagagttgccgctgtccgcccctcgaccttcctggtacggcacctggctcggccggctcttttacgagactctgctgtgggtctcggtacgactgtggccctcgcttaccccttcggtcgagcggttcatcttctccaggcagtacggcatggaggacactctgggttccggaaccggctcggaggccgtgcagggctctgtcgagggtctcaacatggactgtctcttctcccaatttgttaacgagtggggcatgcctctggacaatggccccgatgtcctgcgagctctgcgagccaaaattgaagctgccgccaaggacaatatttattatgtgcattcccccgtggaggtgcgatgctccaacatgtctgtgcccgacagtggcgaccgaaacgtggagcccaacactcaggagttttctgcttcgcgacgaggagccatcaccggcaacactctgcgacctcttttggacatcaatcctcgagaccggccttatgcctctcctcatggccatgtgactaactccaacctcaccctctacatcaacgccaccatgtacagaccctttggagtcaactcccctgtgggcaagtggtaccgtgactttgagggcattgtggccgaggctggaggaaagcctcactgggccaaaaactttttgggtcccgagacggccgagctcaaggataacgagagcgaggacggcaagatgcttggtctcaagcccatcattgatgagtggtatggagatgatctcaagcagtggaagtcgttgcgagaaaagtacgatcccacaggagtgtttctttcaggaaaggtgtggatggatagaaatggtttgctttaa

SEQ ID NO: 2552 - protein, 526 aa, Yarrowia lipolytica
MSLRNSTTAKRFHSHKTWAGTFWSRPSLYFQPASIEELQAIVTRARDLGKTIMVVGSAHSPSDLTMTSQWLVNLDKLSKAVSFKPHTSGLYTDVTVEAGIRIHQLNEVLKRKGLAMQNLGSISDQSVAGIISTGTHGSSAYHGLVSQQIVSLTIMIASGELLTCSPDENPTLFRAALLSLGKLGIIVYATLRTVPAYTIHSTQHVITFETLIREWDNLWTASEYIRVWWFPYAERCILWRASKSELPLSAPRPSWYGTWLGRLFYETLLWVSVRLWPSLTPSVERFIFSRQYGMEDTLGSGTGSEAVQGSVEGLNMDCLFSQFVNEWGMPLDNGPDVLRALRAKIEAAAKDNIYYVHSPVEVRCSNMSVPDSGDRNVEPNTQEFSASRRGAITGNTLRPLLDINPRDRPYASPHGHVTNSNLTLYINATMYRPFGVNSPVGKWYRDFEGIVAEAGGKPHWAKNFLGPETAELKDNESEDGKMLGLKPIIDEWYGDDLKQWKSLREKYDPTGVFLSGKVWMDRNGLL

SEQ ID NO: 2553 - DNA, 26 bp, Artificial sequence
  primer
atgtctactatcccatttagaaagaa

SEQ ID NO: 2554 - DNA, 23 bp, Artificial sequence
  primer
ctagtcggacaactcactaggat

SEQ ID NO: 2555 - protein, 569 aa, Artificial sequence
  consensus sequence
  Variant (3)..(8): Xaa in position 3 to 8 is any amino acid
  Variant (10)..(13): Xaa in position 10 to 13 is any amino acid
  Variant (16)..(19): Xaa in position 16 to 19 is any amino acid
  Variant (21)..(27): Xaa in position 21 to 27 is any amino acid
  Variant (30)..(37): Xaa in position 30 to 37 is any amino acid
  Variant (40)..(40): Xaa in position 40 is any amino acid
  Variant (46)..(49): Xaa in position 46 to 49 is any amino acid
  Variant (51)..(52): Xaa in position 51 to 52 is any amino acid
  Variant (55)..(55): Xaa in position 55 is any amino acid
  Variant (59)..(73): Xaa in position 59 to 73 is any amino acid
  Variant (74)..(87): Xaa in position 74 to 87 is any or no amino acid
  Variant (89)..(90): Xaa in position 89 to 90 is any amino acid
  Variant (93)..(93): Xaa in position 93 is any amino acid
  Variant (95)..(97): Xaa in position 95 to 97 is any amino acid
  Variant (99)..(101): Xaa in position 99 to 101 is any amino acid
  Variant (103)..(105): Xaa in position 103 to 105 is any amino acid
  Variant (106)..(107): Xaa in position 106 to 107 is any or no amino acid
  Variant (109)..(113): Xaa in position 109 to 113 is any amino acid
  Variant (118)..(119): Xaa in position 118 to 119 is any amino acid
  Variant (122)..(123): Xaa in position 122 to 123 is any amino acid
  Variant (125)..(125): Xaa in position 125 is any amino acid
  Variant (134)..(136): Xaa in position 134 to 136 is any amino acid
  Variant (140)..(140): Xaa in position 140 is any amino acid
  Variant (142)..(146): Xaa in position 142 to 146 is any amino acid
  Variant (148)..(153): Xaa in position 148 to 153 is any amino acid
  Variant (154)..(155): Xaa in position 154 to 155 is any or no amino acid
  Variant (157)..(169): Xaa in position 157 to 169 is any amino acid
  Variant (171)..(171): Xaa in position 171 is any amino acid
  Variant (174)..(175): Xaa in position 174 to 175 is any amino acid
  Variant (179)..(180): Xaa in position 179 to 180 is any amino acid
  Variant (184)..(186): Xaa in position 184 to 186 is any amino acid
  Variant (188)..(191): Xaa in position 188 to 191 is any amino acid
  Variant (193)..(193): Xaa in position 193 is any amino acid
  Variant (195)..(199): Xaa in position 195 to 199 is any amino acid
  Variant (201)..(211): Xaa in position 201 to 211 is any amino acid
  Variant (213)..(215): Xaa in position 213 to 215 is any amino acid
  Variant (216)..(217): Xaa in position 216 to 217 is any or no amino acid
  Variant (219)..(221): Xaa in position 219 to 221 is any amino acid
  Variant (224)..(224): Xaa in position 224 is any amino acid
  Variant (226)..(226): Xaa in position 226 is any amino acid
  Variant (229)..(229): Xaa in position 229 is any amino acid
  Variant (232)..(237): Xaa in position 232 to 237 is any amino acid
  Variant (240)..(241): Xaa in position 240 to 241 is any amino acid
  Variant (243)..(248): Xaa in position 243 to 248 is any amino acid
  Variant (249)..(260): Xaa in position 249 to 260 is any or no amino acid
  Variant (262)..(263): Xaa in position 262 to 263 is any amino acid
  Variant (265)..(266): Xaa in position 265 to 266 is any amino acid
  Variant (268)..(270): Xaa in position 268 to 270 is any amino acid
  Variant (272)..(274): Xaa in position 272 to 274 is any amino acid
  Variant (276)..(277): Xaa in position 276 to 277 is any amino acid
  Variant (280)..(288): Xaa in position 280 to 288 is any amino acid
  Variant (289)..(289): Xaa in position 289 is any or no amino acid
  Variant (292)..(292): Xaa in position 292 is any amino acid
  Variant (295)..(295): Xaa in position 295 is any amino acid
  Variant (297)..(297): Xaa in position 297 is any amino acid
  Variant (299)..(300): Xaa in position 299 to 300 is any amino acid
  Variant (304)..(308): Xaa in position 304 to 308 is any amino acid
  Variant (309)..(316): Xaa in position 309 to 316 is any or no amino acid
  Variant (318)..(319): Xaa in position 318 to 319 is any amino acid
  Variant (321)..(325): Xaa in position 321 to 325 is any amino acid
  Variant (327)..(327): Xaa in position 327 is any amino acid
  Variant (330)..(330): Xaa in position 330 is any amino acid
  Variant (335)..(335): Xaa in position 335 is any amino acid
  Variant (338)..(339): Xaa in position 338 to 339 is any amino acid
  Variant (341)..(343): Xaa in position 341 to 343 is any amino acid
  Variant (345)..(347): Xaa in position 345 to 347 is any amino acid
  Variant (349)..(350): Xaa in position 349 to 350 is any amino acid
  Variant (352)..(363): Xaa in position 352 to 363 is any amino acid
  Variant (364)..(366): Xaa in position 364 to 366 is any or no amino acid
  Variant (368)..(384): Xaa in position 368 to 384 is any amino acid
  Variant (385)..(417): Xaa in position 385 to 417 is any or no amino acid
  Variant (420)..(420): Xaa in position 420 is any amino acid
  Variant (423)..(428): Xaa in position 423 to 428 is any amino acid
  Variant (429)..(442): Xaa in position 429 to 442 is any or no amino acid
  Variant (446)..(446): Xaa in position 446 is any amino acid
  Variant (450)..(450): Xaa in position 450 is any amino acid
  Variant (454)..(466): Xaa in position 454 to 466 is any amino acid
  Variant (467)..(469): Xaa in position 467 to 469 is any or no amino acid
  Variant (472)..(477): Xaa in position 472 to 477 is any amino acid
  Variant (480)..(480): Xaa in position 480 is any amino acid
  Variant (488)..(514): Xaa in position 488 to 514 is any amino acid
  Variant (515)..(525): Xaa in position 515 to 525 is any or no amino acid
  Variant (527)..(530): Xaa in position 527 to 530 is any amino acid
  Variant (532)..(553): Xaa in position 532 to 553 is any amino acid
  Variant (554)..(568): Xaa in position 554 to 568 is any or no amino acid
WAXXXXXXPXXXXQPXXXXEXXXXXXXARXXXXXXXXVGXGHSPSXXXXTXXWLXNLDXXXXXXXXXXXXXXXXXXXXXXXXXXXXXTXXAGXRXXXLXXXLXXXXXGXXXXXLGSIXXQSXXGXISTGTHGSXXXHGLXSXXXXXLXXXXXXXXGXXXXXXXXXXXXXFXAAXXSLGXXGIIXXXTXXXXPXFXXXXXQXXXXXXXXXXXWXXXXXWXXXEFXRXWWXPYXXXXXXWRXXKXXXXXXXXXXXXXXXXXXPXXSXXGXXXGXXXYXXLLXXXXXXXXXXTPXVEXFXFXXQYGXXXXXXXXXXXXXVXXSXXXXXMXCLXSQFVXEWXXPXXXGXXXLXXLXXXXXXXXXXXXXXXVXXXXXXXXXXXXXXXXXXXXXXXXXXXXXXXXXXXXXXXXXXXXXXXXXXRPXLDXXXXXXXXXXXXXXXXXXXXTLYXNATXYRPXXXXXXXXXXXXXXXXFEXXXXXXGGXPHWAKNFXXXXXXXXXXXXXXXXXXXXXXXXXXXXXXXXXXXXXXWXXXXLXXXXXXXXXXXXXXXXXXXXXXXXXXXXXXXXXXXXXG

SEQ ID NO: 2556 - protein, 34 aa, Artificial sequence
  protein pattern
  Variant (5)..(5): Xaa in position 5 is Asn or Ser
  Variant (6)..(6): Xaa in position 6 is Asp or Glu
  Variant (9)..(9): Xaa in position 9 is Ile, Met or Val
  Variant (10)..(10): Xaa in position 10 is Ala, Gly or Ser
  Variant (12)..(12): Xaa in position 12 is any or no amino acid
  Variant (17)..(17): Xaa in position 17 is Ser or Thr
  Variant (21)..(21): Xaa in position 21 is Gly, Ser or Thr
  Variant (22)..(23): Xaa in position 22 to 23 is any amino acid
  Variant (27)..(27): Xaa in position 27 is Ile, Met or Val
  Variant (28)..(28): Xaa in position 28 is Gly or Ser
  Variant (29)..(29): Xaa in position 29 is Asp, Glu, Gln or Ser
  Variant (30)..(30): Xaa in position 30 is Asp, Asn, Gln, Ser or Thr
  Variant (31)..(32): Xaa in position 31 to 32 is any amino acid
  Variant (33)..(33): Xaa in position 33 is Glu, Asn or Ser
  Variant (34)..(34): Xaa in position 34 is Ile, Leu or Val
LGSIXXQSXXGXISTGXHGSXXXHGLXXXXXXXX

SEQ ID NO: 2557 - protein, 45 aa, Artificial sequence
  protein pattern
  Variant (2)..(10): Xaa in position 2 to 10 is any amino acid
  Variant (11)..(11): Xaa in position 11 is any or no amino acid
  Variant (13)..(13): Xaa in position 13 is any amino acid
  Variant (14)..(14): Xaa in position 14 is any or no amino acid
  Variant (16)..(19): Xaa in position 16 to 19 is any amino acid
  Variant (20)..(20): Xaa in position 20 is Lys or Arg
  Variant (21)..(21): Xaa in position 21 is any amino acid
  Variant (22)..(22): Xaa in position 22 is Ile, Leu or Val
  Variant (23)..(23): Xaa in position 23 is any amino acid
  Variant (24)..(25): Xaa in position 24 to 25 is Thr or Val
  Variant (27)..(27): Xaa in position 27 is Ala, Cys or Ser
  Variant (28)..(28): Xaa in position 28 is Ala or Gly
  Variant (33)..(33): Xaa in position 33 is Asp or Asn
  Variant (34)..(34): Xaa in position 34 is Ile, Leu or Met
  Variant (35)..(35): Xaa in position 35 is Cys, Thr or Val
  Variant (36)..(36): Xaa in position 36 is any amino acid
  Variant (37)..(37): Xaa in position 37 is Ser or Thr
  Variant (38)..(38): Xaa in position 38 is any amino acid
  Variant (39)..(39): Xaa in position 39 is Ala, Asp, Glu, Gly, Gln or Ser
  Variant (40)..(40): Xaa in position 40 is Trp or Tyr
  Variant (41)..(41): Xaa in position 41 is Leu or Met
  Variant (42)..(42): Xaa in position 42 is any amino acid
  Variant (43)..(43): Xaa in position 43 is Asn or Ser
PXXXXXXXXXXVXXAXXXXXXXXXXGXXHSPSXXXXXXXXXXXLD

SEQ ID NO: 2558 - protein, 35 aa, Artificial sequence
  protein pattern
  Variant (2)..(2): Xaa in position 2 is Glu, Gln or Thr
  Variant (3)..(3): Xaa in position 3 is any amino acid
  Variant (4)..(4): Xaa in position 4 is Gly or Ser
  Variant (5)..(6): Xaa in position 5 to 6 is any amino acid
  Variant (7)..(7): Xaa in position 7 is Ala or Gly
  Variant (8)..(8): Xaa in position 8 is Phe or Leu
  Variant (9)..(9): Xaa in position 9 is any amino acid
  Variant (10)..(10): Xaa in position 10 is Leu or Met
  Variant (11)..(11): Xaa in position 11 is Asp or Asn
  Variant (14)..(14): Xaa in position 14 is Phe or Tyr
  Variant (17)..(17): Xaa in position 17 is any amino acid
  Variant (19)..(19): Xaa in position 19 is Asp or Asn
  Variant (22)..(22): Xaa in position 22 is Ala, Gly or Ser
  Variant (23)..(23): Xaa in position 23 is any amino acid
  Variant (25)..(28): Xaa in position 25 to 28 is any or no amino acid
  Variant (30)..(31): Xaa in position 30 to 31 is any amino acid
  Variant (32)..(32): Xaa in position 32 is Gly or Leu
  Variant (33)..(33): Xaa in position 33 is any amino acid
  Variant (34)..(34): Xaa in position 34 is Asp, Glu or Ser
  Variant (35)..(35): Xaa in position 35 is Ala, Ile, Leu or Val
VXXXXXXXXXXCLXSQXVXEWXXPXXXXLXXXXXX

SEQ ID NO: 2559 - protein, 45 aa, Artificial sequence
  protein pattern
  Variant (2)..(2): Xaa in position 2 is Lys or Arg
  Variant (5)..(5): Xaa in position 5 is any or no amino acid
  Variant (7)..(7): Xaa in position 7 is any or no amino acid
  Variant (9)..(9): Xaa in position 9 is Leu or Val
  Variant (11)..(11): Xaa in position 11 is any amino acid
  Variant (12)..(12): Xaa in position 12 is Ile, Leu or Val
  Variant (15)..(15): Xaa in position 15 is Ile or Val
  Variant (16)..(16): Xaa in position 16 is Ser, Thr or Val
  Variant (17)..(17): Xaa in position 17 is any amino acid
  Variant (18)..(18): Xaa in position 18 is Ala or Val
  Variant (19)..(19): Xaa in position 19 is Ser or Thr
  Variant (20)..(20): Xaa in position 20 is Phe, Ile, Leu or Val
  Variant (21)..(21): Xaa in position 21 is any amino acid
  Variant (22)..(22): Xaa in position 22 is Ala, Ser, Thr or Val
  Variant (23)..(23): Xaa in position 23 is any amino acid
  Variant (25)..(25): Xaa in position 25 is any amino acid
  Variant (26)..(26): Xaa in position 26 is Phe or Tyr
  Variant (27)..(27): Xaa in position 27 is Asn, Ser or Thr
  Variant (28)..(28): Xaa in position 28 is Ile or Leu
  Variant (29)..(31): Xaa in position 29 to 31 is any amino acid
  Variant (33)..(39): Xaa in position 33 to 39 is any amino acid
  Variant (40)..(40): Xaa in position 40 is Ile, Leu, Met or Val
  Variant (41)..(41): Xaa in position 41 is Phe, Ile, Leu or Met
  Variant (42)..(43): Xaa in position 42 to 43 is any amino acid
  Variant (45)..(45): Xaa in position 45 is Asp, Glu, Asn or Ser
FXAAXLXSXGXXGIXXXXXXXXXPXXXXXXXQXXXXXXXXXXXWX

SEQ ID NO: 2560 - protein, 28 aa, Artificial sequence
  protein pattern
  Variant (2)..(2): Xaa in position 2 is any amino acid
  Variant (3)..(3): Xaa in position 3 is any or no amino acid
  Variant (5)..(5): Xaa in position 5 is any or no amino acid
  Variant (7)..(7): Xaa in position 7 is Phe or Tyr
  Variant (8)..(8): Xaa in position 8 is Ile or Val
  Variant (10)..(10): Xaa in position 10 is any amino acid
  Variant (11)..(11): Xaa in position 11 is His or Trp
  Variant (12)..(13): Xaa in position 12 to 13 is any amino acid
  Variant (16)..(16): Xaa in position 16 is Ala, Gly, Ser, Thr or Val
  Variant (17)..(18): Xaa in position 17 to 18 is any amino acid
  Variant (19)..(19): Xaa in position 19 is Ala, Cys or Val
  Variant (20)..(20): Xaa in position 20 is Ile or Val
  Variant (21)..(21): Xaa in position 21 is any amino acid
  Variant (23)..(23): Xaa in position 23 is any amino acid
  Variant (24)..(24): Xaa in position 24 is Ala or Gly
  Variant (25)..(25): Xaa in position 25 is any amino acid
  Variant (27)..(27): Xaa in position 27 is Ser, Thr or Val
  Variant (28)..(28): Xaa in position 28 is Asp, Glu, Asn, Ser or Thr
WXXSXEXXRXXXXPYXXXXXXWXXXKXX

SEQ ID NO: 2561 - protein, 18 aa, Artificial sequence
  protein pattern
  Variant (3)..(4): Xaa in position 3 to 4 is any amino acid
  Variant (5)..(5): Xaa in position 5 is Leu, Met or Val
  Variant (6)..(8): Xaa in position 6 to 8 is any amino acid
  Variant (9)..(9): Xaa in position 9 is Gly or Ser
  Variant (10)..(10): Xaa in position 10 is Ala or Gly
  Variant (11)..(11): Xaa in position 11 is Lys or Arg
FEXXXXXXXXXPHWAKNF

SEQ ID NO: 2562 - protein, 12 aa, Artificial sequence
  protein pattern
  Variant (3)..(3): Xaa in position 3 is Phe or Tyr
  Variant (4)..(4): Xaa in position 4 is Ile or Leu
  Variant (6)..(6): Xaa in position 6 is Ala or Pro
  Variant (7)..(7): Xaa in position 7 is any amino acid
  Variant (8)..(8): Xaa in position 8 is Ile, Leu or Met
  Variant (12)..(12): Xaa in position 12 is Phe or Tyr
TLXXNXXXYRPX

SEQ ID NO: 2563 - protein, 21 aa, Artificial sequence
  protein pattern
  Variant (2)..(6): Xaa in position 2 to 6 is any amino acid
  Variant (7)..(9): Xaa in position 7 to 9 is any or no amino acid
  Variant (11)..(11): Xaa in position 11 is any amino acid
  Variant (13)..(13): Xaa in position 13 is Ile, Met or Val
  Variant (17)..(17): Xaa in position 17 is Ala, Cys or Val
  Variant (18)..(18): Xaa in position 18 is Ala, Cys or Ser
  Variant (19)..(19): Xaa in position 19 is Ala, Asp or Asn
  Variant (20)..(20): Xaa in position 20 is any amino acid
  Variant (21)..(21): Xaa in position 21 is Ser or Thr
AXXXXXXXXHXPXEVRXXXXX

SEQ ID NO: 2564 - protein, 18 aa, Artificial sequence
  protein pattern
  Variant (2)..(3): Xaa in position 2 to 3 is any or no amino acid
  Variant (5)..(5): Xaa in position 5 is any or no amino acid
  Variant (7)..(7): Xaa in position 7 is any amino acid
  Variant (8)..(8): Xaa in position 8 is Ile or Val
  Variant (10)..(10): Xaa in position 10 is any amino acid
  Variant (11)..(11): Xaa in position 11 is Phe or Leu
  Variant (12)..(12): Xaa in position 12 is Ile or Val
  Variant (14)..(15): Xaa in position 14 to 15 is any amino acid
PXXLXPXXEXXXFXXQYG

SEQ ID NO: 2565 - protein, 17 aa, Artificial sequence
  protein pattern
  Variant (2)..(3): Xaa in position 2 to 3 is any amino acid
  Variant (4)..(4): Xaa in position 4 is Phe, Trp or Tyr
  Variant (5)..(6): Xaa in position 5 to 6 is any amino acid
  Variant (7)..(7): Xaa in position 7 is Ile, Leu or Val
  Variant (9)..(11): Xaa in position 9 to 11 is any amino acid
  Variant (14)..(14): Xaa in position 14 is any amino acid
  Variant (15)..(15): Xaa in position 15 is Gly or Asn
  Variant (16)..(16): Xaa in position 16 is Ile, Met or Val
LXXXXXXRXXXDPXXXF

SEQ ID NO: 2566 - protein, 18 aa, Artificial sequence
  protein pattern
  Variant (2)..(2): Xaa in position 2 is any amino acid
  Variant (3)..(3): Xaa in position 3 is Trp or Tyr
  Variant (4)..(4): Xaa in position 4 is Asp or Gly
  Variant (5)..(5): Xaa in position 5 is Gly, Ser or Thr
  Variant (6)..(6): Xaa in position 6 is any amino acid
  Variant (7)..(7): Xaa in position 7 is Phe, Ile or Leu
  Variant (9)..(10): Xaa in position 9 to 10 is any amino acid
  Variant (11)..(11): Xaa in position 11 is Phe, Ile or Val
  Variant (13)..(13): Xaa in position 13 is any amino acid
  Variant (14)..(14): Xaa in position 14 is Asn, Ser or Thr
  Variant (16)..(16): Xaa in position 16 is Ile or Leu
  Variant (17)..(17): Xaa in position 17 is any amino acid
  Variant (18)..(18): Xaa in position 18 is Ile, Leu or Val
SXXXXXXGXXXYXXLXXX

SEQ ID NO: 2567 - DNA, 3609 bp, Saccharomyces cerevisiae
  CDS (1)..(3609)
atggctttcaaatcattcatatactctaaaggttatcatcgttccgccgctcaaaagaaaactgcaacatcttttttcgatagctcctaccagtatctaaggcaaaaccaaggtttggtaaattcggatcccgtacttcatgcatctcatctacatcctcatccggtcgtagtagcgaatgtaaactataacaacgtagatgatattttgcatccgcacgacctggattctagcataaacaacactaacaaccccctcacccacgaagaactactttataaccaaaacgtttcccttcgatcgctgaagcagcagcaaagtacaaactatgttaataacaacaacaacaatcaacataggtattattctaccggccccacattaccaacaaaccaatatgaccccttaaactttagtaataggaacttccaagatctatcattaaaaacatcacaaccatcagtacaacagccacaaaatgagtacagccttctaaaagacgaaaacgctccagtttggaaggaggacacagaaccatgcctgaataaatctacatacttgcaaactcatattgatgaaattaatcgttgttacgaacaaaaaaattataacaaaatcaactctttatatcaatcattgaaaagaaatgatatcgttccgccactggaaatatttacgaaggttttggactctctttgcaaaaggccgctagataacaatgatttagacaacaaaatgtacgaactcttgacgtgctaccaagatatgatcaacaatagattaaaacctcctgatgagatttataatattgtactattgtctcttttcaagggctcaattttggcctatcagttcgaaaatccaaacggtagtgatttttacaaaattgccattgaattattcaatacgaccaccaacgatccaaagcaaaaaagtgtggttaagtttcgcaatttttccaaagatgttctcgactataaccttttagcgatgaacatctatccgggccatatcaccctgtcaaaagcccaacaagttattaaatcttcacctgcctttatcaaagattctttttacttcatagcatgcttctcatacgctaaattaacaaatgataagtttgccattaaagaactttatgaagatttcagactatctttatcatctggcagtccagaccaaggcttatttgatgaccagtttgaaatttacagcgtgattctttctagttttattgaaactggcgaagttgaactggctaccaatcttttggacgatttagtttccaaaattcaaagctcaaatggtctcgcttccaatatttctttattgctatcgagtttcttaatttcgatgagtaaggtagatccttcaaaagcttatgaaatatggtttaaattccataatttaaattggatacctgagttctcttacgaattttatttggttttcatggcaaacagtttccaagattggaatttgactaagaaaatatatgactatatttttcctatggaaagaaatttgtctccattaaaaaaacaaaaattatcagattacttactgcatccaatcggtgttgactccattacgacctctttgttagattattctttacaattgaaagataatgaagttattatgaaaattctagaagagtccattgtcaaaaatttttcttttgatattggcatttatccatttgttttcaattatttaagagaaattcagtgcggcgaggactaccttatgagatttattgaatcacacgctgagtttatcaagaagagcaactcaattaacaaatttcaattcttaaatatgatagttgataatttccaatcacaatcattattaaacaaaatatcccacgcaaagtttttcaaaaacttcgtagaagatttcaatttagaaaactgtgaattggtcagctataatgggctaatatcatgcattaataacttcattaaaattccaaagacaataaaggatttcccatacattctggagattcatgcaattttggtaacaaaattatttgattttgacacttacccaattttgcaaaatggcaacaacgaggttcttttgaagtttagagatcaaattgaacatcagtttaaaatgttagctcaaaacttctgcagattaaacctagatcctaatttgttagcaggtgtcgtatctcaagctatgaaaatggttaacctagatgacaccgctaatggacaagatttattgaactttttcaatcatccaggtgattgggacaaatcttatcctttgtcactaggttctttcatcaggaactcacccagaggtggtataagagaatttacgaaattgagcaaagaaggttattgctttgattatgacacttataaagaattgataattaaacgagctattaacaaacaaattattgacaagtgcttagaggtatgccctgattcaattgaactaaaaaatatcgtaaatttgatgatttcaaagattcctggtaggaacctaacccaattgataatcaataatccaaaatttagcaaagtttttgtgccaaatttaagaaatgattctatgttaaaattaatcgaaaactgcgaatctttatcgaatttcataagaatctgtgatttcccagaaaagttcaaaagtattgctattcaagccgaaaacaaaaatgctattgagctgatttatgaaagactgtttgacggcggtaagtacgcagatattttgagatataataatattgttccggtgttaaatttggaacttttattaaaatcttgtatcaggtctggtgaattcaagaagtatgaaagtctctctaaaaagtttaatgacaaaataagcgaatcatcaaaaattgatattcagctagaatatttaattaataagaatgatttaaaaggggcattcacgctgtttgaaaagactccaagggagctgagaaccccccataagactatggacctttatacatttgccttatttttggatagtttcaataggaacatcacgtattatgaaagtccggaaaatacattacaattcgccaatattttatccagccaaacaagcttcataaatttactatcgacgtacaacttaattgcccattcagatcacctcatgaacttcaacgtcggtggaatggcagcaaaagttaaaaaagaaatcctgaatcaaatgctaaacaatttgtatgattccatcagactattgtctcccagcattgaaaatgacaaatcaatgaaggaaaaattgagagaaaaagtaaagaactactgcagattcaaagcttatttgaagtcacctgaattggacatggatgaactgaagaccttggtttcagtcgagtcttttttaaatcctttcactccttcaatgttgttcaataacttgatcgaaactatttatataaacgaacacgcttcctcgttagtccttcagaatgggttgatctattcactccaacagaaaggtctcaataagatactgagctatctagaagaaagcttcatcactagtggaaatgatgccaatattgaaaaggtcagggaattcaggtcccttttaaggaagagcaagcctcttcaagcatga

SEQ ID NO: 2568 - protein, 1202 aa, Saccharomyces cerevisiae
MAFKSFIYSKGYHRSAAQKKTATSFFDSSYQYLRQNQGLVNSDPVLHASHLHPHPVVVANVNYNNVDDILHPHDLDSSINNTNNPLTHEELLYNQNVSLRSLKQQQSTNYVNNNNNNQHRYYSTGPTLPTNQYDPLNFSNRNFQDLSLKTSQPSVQQPQNEYSLLKDENAPVWKEDTEPCLNKSTYLQTHIDEINRCYEQKNYNKINSLYQSLKRNDIVPPLEIFTKVLDSLCKRPLDNNDLDNKMYELLTCYQDMINNRLKPPDEIYNIVLLSLFKGSILAYQFENPNGSDFYKIAIELFNTTTNDPKQKSVVKFRNFSKDVLDYNLLAMNIYPGHITLSKAQQVIKSSPAFIKDSFYFIACFSYAKLTNDKFAIKELYEDFRLSLSSGSPDQGLFDDQFEIYSVILSSFIETGEVELATNLLDDLVSKIQSSNGLASNISLLLSSFLISMSKVDPSKAYEIWFKFHNLNWIPEFSYEFYLVFMANSFQDWNLTKKIYDYIFPMERNLSPLKKQKLSDYLLHPIGVDSITTSLLDYSLQLKDNEVIMKILEESIVKNFSFDIGIYPFVFNYLREIQCGEDYLMRFIESHAEFIKKSNSINKFQFLNMIVDNFQSQSLLNKISHAKFFKNFVEDFNLENCELVSYNGLISCINNFIKIPKTIKDFPYILEIHAILVTKLFDFDTYPILQNGNNEVLLKFRDQIEHQFKMLAQNFCRLNLDPNLLAGVVSQAMKMVNLDDTANGQDLLNFFNHPGDWDKSYPLSLGSFIRNSPRGGIREFTKLSKEGYCFDYDTYKELIIKRAINKQIIDKCLEVCPDSIELKNIVNLMISKIPGRNLTQLIINNPKFSKVFVPNLRNDSMLKLIENCESLSNFIRICDFPEKFKSIAIQAENKNAIELIYERLFDGGKYADILRYNNIVPVLNLELLLKSCIRSGEFKKYESLSKKFNDKISESSKIDIQLEYLINKNDLKGAFTLFEKTPRELRTPHKTMDLYTFALFLDSFNRNITYYESPENTLQFANILSSQTSFINLLSTYNLIAHSDHLMNFNVGGMAAKVKKEILNQMLNNLYDSIRLLSPSIENDKSMKEKLREKVKNYCRFKAYLKSPELDMDELKTLVSVESFLNPFTPSMLFNNLIETIYINEHASSLVLQNGLIYSLQQKGLNKILSYLEESFITSGNDANIEKVREFRSLLRKSKPLQA

SEQ ID NO: 2569 - DNA, 3591 bp, Candida glabrata CBS 138
  CDS (1)..(3591)
atggcgttcaagtcgttcaagtacaagttgtacgccaagggctaccaccactcgacggcgactgctgcgcagtcgtcgacgagtttcttcgacaacgggtactactactaccagcagatgcggaacaggcaggtgctgcaccatgtggtgccggaggaagtcggtgcgtccactgcgctgcaccccgcggtggtcgcgaacaacaacttcaacaacctcgagtgtgtgctggcgctgcaccacgaccacgacgactccaacgctgtgaacgctgcgagcgccgtgacggctaatgtggccaccggcgacggtacagacctcactctcggcgggcgcaagcacaagagcaagaacaagcgcatggtgggtctgtgcaagaggaacgacaacagcaagactcagttcgtgcagaagagattcattagcaatgccactaacatcgagagccgcgcctcagcggcccacttcacaccagcggaggcactgcaaaccgcagacctgctggagctggagaaggaatacaactgggagaaggacaccgacgatgacttgaacccacagacttacctgagcacacacatagaccagatcaacaaacacttcgtaaagggcaattacaacatcataaacgccctctataagtccctgaagcgcaacggcatcgccatccaggaccgcgaagtcctcacaaaagtgctgatctctttggcacgcagagaaatggacgatcttgatatagacaacaaggtcttcgagctcttgagttgctaccaggacatcatcactaatagaattaagccaaatttagagatttacaacatagtgctagagacgttattcaagagctctatagtggccttcaagaacaaaaatggaaacggtatcgacttctacaagatcggtagtgaactgctacagacaataatggctgcaaaggacatgaacctatctaacgacgtcataaactactgtttgctatcgacaaacttgtacccatccttcattcaattatccgctttgcaacagtacatcaatatattaccaaactacaagaaggactccttttattacatttcgtgtttatcttacgcacgcctgaataacgatttggactcgatcaagaaactatacgaagactacaggcagttgttgattgacgacccaactgacatgtcaatccgtgaagatcaatacaaagtatactcaatgtttgtttccggcttagtcgaatgtggtgaactgaacttggcttccaagttcttggaaacattcatttctaagattagagccgaaaatggttcagctgaaaatatctctactatgctgtccacctttataatttcagtcagtaagatcgactgcaacaaagcccacattttatggtcaaaattcaacagattgtcctgggtcccagaattttcttatgagttttatttgactctgctggctaattgctttcaggactggggtctaacaaagaaggtttacgaatatatgttcccaatgaggagagtgttcaaggaaaatagggaaaacttatcagaatacttattgtaccctatgggcctagaatccgtattaaactcattgatggattttgctctgcaattaaaagacacccaaattgtattaaaacttctggaagaggccattgttaagggatttacttttgaaacaggtatttacccattcatttttgcttacttgaaagaagtcaaatgtccagaagattatctattacgtttaatccaaaaccaaggtgagctactactaaaatcggagaaacctgaagatgtgttcatgttctttaatgcgattgcagataattttgcttctcaaagcttgaagagtgcgatcacagaaatggatctgttcacagaatcctgccgcaactttcacttggttgactctaataaaattaatttccaaggctttttatctatatttgaaaactcttggaattgtccaaaaactcactctaactatgccaagctaatacagttgcacgccattttagttacaagacttcttgacttcgaaactttccctttggtagagcataatgaacacttatcccaacttaagttgagagttatcgaaaagtttcaaactttatgtacaaactacatgaatttgaattttgatcccaaccatatcagcgaaacgacatgcgaagcactaagattaattgatgctcctgaaaacctaatcaactacttctctcatcctggtgattgggacaagtcctacccactatccttagggtcaatgattagagtatctccatcgacaggaatcaaagagtacaaaaagctattggacgatggctattgtttcgattatgatacttacaagactttattatcaaataacatgtctgatctacatatttgcagacagatcttaaagcaattaccaattgatgaagtagatgaatgcaaatacatctccaacatccttgcattccacgcaacctcaaccgaattaaccaacttattattgactgacgagaaatccatcaaatatatcctaccaaatatgagagactcatcaatggtgaacttcattaaaaattgtggtaatattgaagtagttgttaatagaatcaacttccctgaaaaattcagaggcattgcagttcaagcagaacgtaaagaaactatcaaatacatatatggtcaattgtttaaagaaaaatgttaccaagaaattattgagtataataaatcatgtcctgttttggatttgaacgttctcttaaagtcatttataaggactggcgattatggatcatttttggcacttttcgataaatacagagataccttgggatctaatggccttgatctacaagtcgaatatttgatcaacaatggtcaaattgatagtgcgatcgaagtggttcgctctagcaatttgcgcactccccataagacaatggacctcttcagttttgcaaatttcttaaagagttttgagtgcgatgtagctatgcataacgcacctgagaataccttacagttagctaatattttatctactcagaactcatttgctggaattctatctgtgtttgatatggttagaagttctggtaagctacaaagcagcgaaatcaatcttccaagtgtaaaaaatgagcttttgtctcaaatgttcaataatttggatgatgcagtttccttttttggaaatatagatggtagcattcaagaagtttttagaactaaactacaaagtttattgaggttcaaggcttatttaaaattgccgattttgtcaaatcgtcaaattcaccagttggttagcatttggagcgcaattgatccatttgccattgatgcactattcaacaacattgtcgaatccttttatctggatgataaggtaagaattttatatttaaacgaaggcattacttatcctttcaatatgaatgaattgaattcaataattgaccagatcgccttttcttttgcagacagaaatgatcaagaaaacgtccaaaaggcaagaacttttaagatattcctagaaacaaattatattccctccactatcaaattcaaagaaaatatcgcatattcatga

SEQ ID NO: 2570 - protein, 1196 aa, Candida glabrata CBS 138
MAFKSFKYKLYAKGYHHSTATAAQSSTSFFDNGYYYYQQMRNRQVLHHVVPEEVGASTALHPAVVANNNFNNLECVLALHHDHDDSNAVNAASAVTANVATGDGTDLTLGGRKHKSKNKRMVGLCKRNDNSKTQFVQKRFISNATNIESRASAAHFTPAEALQTADLLELEKEYNWEKDTDDDLNPQTYLSTHIDQINKHFVKGNYNIINALYKSLKRNGIAIQDREVLTKVLISLARREMDDLDIDNKVFELLSCYQDIITNRIKPNLEIYNIVLETLFKSSIVAFKNKNGNGIDFYKIGSELLQTIMAAKDMNLSNDVINYCLLSTNLYPSFIQLSALQQYINILPNYKKDSFYYISCLSYARLNNDLDSIKKLYEDYRQLLIDDPTDMSIREDQYKVYSMFVSGLVECGELNLASKFLETFISKIRAENGSAENISTMLSTFIISVSKIDCNKAHILWSKFNRLSWVPEFSYEFYLTLLANCFQDWGLTKKVYEYMFPMRRVFKENRENLSEYLLYPMGLESVLNSLMDFALQLKDTQIVLKLLEEAIVKGFTFETGIYPFIFAYLKEVKCPEDYLLRLIQNQGELLLKSEKPEDVFMFFNAIADNFASQSLKSAITEMDLFTESCRNFHLVDSNKINFQGFLSIFENSWNCPKTHSNYAKLIQLHAILVTRLLDFETFPLVEHNEHLSQLKLRVIEKFQTLCTNYMNLNFDPNHISETTCEALRLIDAPENLINYFSHPGDWDKSYPLSLGSMIRVSPSTGIKEYKKLLDDGYCFDYDTYKTLLSNNMSDLHICRQILKQLPIDEVDECKYISNILAFHATSTELTNLLLTDEKSIKYILPNMRDSSMVNFIKNCGNIEVVVNRINFPEKFRGIAVQAERKETIKYIYGQLFKEKCYQEIIEYNKSCPVLDLNVLLKSFIRTGDYGSFLALFDKYRDTLGSNGLDLQVEYLINNGQIDSAIEVVRSSNLRTPHKTMDLFSFANFLKSFECDVAMHNAPENTLQLANILSTQNSFAGILSVFDMVRSSGKLQSSEINLPSVKNELLSQMFNNLDDAVSFFGNIDGSIQEVFRTKLQSLLRFKAYLKLPILSNRQIHQLVSIWSAIDPFAIDALFNNIVESFYLDDKVRILYLNEGITYPFNMNELNSIIDQIAFSFADRNDQENVQKARTFKIFLETNYIPSTIKFKENIAYS

SEQ ID NO: 2571 - DNA, 3663 bp, Kluyveromyces lactis NRRL Y-1140
  CDS (1)..(3663)
atgcacttcaaatcattgaaatgtaagttctactgtaaggggtatcattcctctgcacataaatcggcaacgtccttttttgatagctcgtaccagtatttgaaacagaatcagggacttgtgaacttggatactgctattcctcaacataacattttgactgctgttccacatcccgtagtggtggccaacgttaattataataacgtggaaagggctttacagagtagagacgcagagctgtcgagattagaatcagaggagctaaatttattttatgaaaaggatggtgaaattttctattctggcgaacatgatgtaaattattcgaagaagagctcgtatggtgccaaccacaataagaagaagagatccaactcgtttacctatctatcgaatgaaaaatctgctctaattaacgagaagttgtctacccgttattattctaccaaggtacaaaattctcaaaataatgcaaataacaatctacgagcaactccgatcactcctccaacttcacctcctgtcgaaaagcatcatagtttagagaaatctggagcgaaagaacaaacggataaaggtgcagtgccggaagctctcttagatcgtttaaaagatgtaagattggatgactcaatcccggcatgggaaacagatttggaaccatgtttgaataaagaagcatttttagaaacacaatctaagctgatagaagattgcatgaagaacaaaaattataatcaggttaacgcaatttataaatcgttgataagaaatgaaattgttcctccgttgtcattatttgaacaagttttgacttctatttgcagaagggacttagatcaaaataatatcgataaccaaatgtttgaattacttaactgttaccaagatataattcagaataaattaaaaccaagcgcagaaatctatcaccttgttgtaggttcattgttgtctggatcaatcagagcgtttgagttacacaacaccaatggattagattttttcaaaattgccattgatctgttctttgcttctaatttgaataagaataagtccttcgaccatgagtttttagataatcttttgttggctatcaatttataccctggccacataaagtacggctatatcaagaatttcattgattcaaacgtgaagtattcaaagaatgaaatctattacatttctttaatctcgtacgccaagatgttgaacgaacatgaggcagtaaaagacctttatcaagattttagatcagaacttctgaaaaatatgcaattggttgaacaccaatatgaagtgtactctgtcgtcgtatcagcttttgctgaaactggatcgttaagtttagctacaaagctcttagataagcttcttgtggatctacaagcaaaagatgggcataacaagaacgtttctttggtcatttcgaactttttgatatctgtcggtaaaataaattcggaaaaggcatataagttgttgatggaattcagtaaattaaaatgggtaccagaattctcttatgaattctacttggtcatgatcgcaaactgcctcaatactaattggccattggtgaaaagaatatacaattatattttccctatgaaaacgtcattcaacaccacgaaaaacgataataaaatcaaaaattatttattgtatccaagtggattggaatcgatgcccagcactatattgacatacgccctaaggcaaaaagacgacgagctcattatgaaattggtcgaagaatcgaatgtgaaaaagactacattccaaagaggattgtacccttacatttttagctacttccaaagcataggttgcccggagccttacttacttcgttttgtgaatattcatggttctgcactttcaaccgatagcaagcctctagtattcgaatttttgaatgcattggtcgaaaactatcaatcgcaacctatcttgaagaaggtatcagaaatgcctttctttaagagtgcctgtgaagcgttcactcttgaaaacgcttctgcagttaattacgcaggtttcattgtttgtttccaaacgttgtggaaaactcctcaattgattcaggattattcttacaatcttgaattgcatggaatagctgtttcgagattatatgatctagatacctactatttggatattcaaaatgagatgttgttagatttcaaaaaacaaatggctgaaagattccaaaagctttgcgttaactacaaacgaattcatttggatgccaacaagatttcccctgtagcaattcaagctatgaaaatggtcgatctttccgaagatactgtggcttatttccaacaccctggtgactgggacaaatcttacccattaagcttgggtccggtattgcgtaactccaaaaggacagggttcaagcaatatgaaagactttccgaagatggctacaaatttgattatgatactttctccgaattgattcaccagaaatacataacctctgatgttataaccaagactatcaatttatgtccagacaaggaaaccctcaagtatatctctaattgtattgttgtgaaatgtccaaagaatcttttggaagaggaggtaattcaacatcagttattcagtaagattcttgagaacctaacagataaatcgctatcaaagcttgcgttaaattgtgaaaacatccggaattttattaatgctgttggtttccccgataggttcaaaagtattacttctcaagcggagtacaaaggcgctaccgcggttatatttgcagcgctatttagagcgaaggactataaatcagttatcatgttcaatgaaatctgtccatgcctagacatttcattgatcttgaaatctttcattcgcctaggtgactatgataattatctttctcaagaagcgaggtttaaagattctatgtcgcctgctgcccttggcgtaattcgatccgaatatctaataaatcaaaagaaatttgaagatgcaatgttactgcttaaatctttcccagatgttatcgatcatcaaacctatgacaagtactcttttgcattatttttatcatcattctccggaactcctgttgatgtagacttccaaatcgaaaacacgttgcagttagcgaacgtgctctcagcccaacattctttccacaatatgattcactgttacgaaagcatgaccaaaggaaaggaattttcacaagacttgaagttgaactttggcattaagatggaaattacccaacaaattctcaacaatattgaagattctatgcaatttcttgatttaaatgatacttctattatagagaactattactccaaactcgaaaactacatgagattcaggggttatcttaaaacaataactttcaccgaagaccaaatgttgcagttgctcaatatatggcaaaaaattaacccaattttggttgacaatttgttcaacaacatcgtcgaatcagtatgtttgaacaacgctgtaaaggttataaacttcaatgataatggttcttttaacgttagcaagacctcgctaatggtacttttagattccatttctgccatttacaaatctgaaggcttatctgatcatcattctaaagtggagagtttcaaagatattatagattcttccatgcactaa

SEQ ID NO: 2572 - protein, 1220 aa, Kluyveromyces lactis NRRL Y-1140
MHFKSLKCKFYCKGYHSSAHKSATSFFDSSYQYLKQNQGLVNLDTAIPQHNILTAVPHPVVVANVNYNNVERALQSRDAELSRLESEELNLFYEKDGEIFYSGEHDVNYSKKSSYGANHNKKKRSNSFTYLSNEKSALINEKLSTRYYSTKVQNSQNNANNNLRATPITPPTSPPVEKHHSLEKSGAKEQTDKGAVPEALLDRLKDVRLDDSIPAWETDLEPCLNKEAFLETQSKLIEDCMKNKNYNQVNAIYKSLIRNEIVPPLSLFEQVLTSICRRDLDQNNIDNQMFELLNCYQDIIQNKLKPSAEIYHLVVGSLLSGSIRAFELHNTNGLDFFKIAIDLFFASNLNKNKSFDHEFLDNLLLAINLYPGHIKYGYIKNFIDSNVKYSKNEIYYISLISYAKMLNEHEAVKDLYQDFRSELLKNMQLVEHQYEVYSVVVSAFAETGSLSLATKLLDKLLVDLQAKDGHNKNVSLVISNFLISVGKINSEKAYKLLMEFSKLKWVPEFSYEFYLVMIANCLNTNWPLVKRIYNYIFPMKTSFNTTKNDNKIKNYLLYPSGLESMPSTILTYALRQKDDELIMKLVEESNVKKTTFQRGLYPYIFSYFQSIGCPEPYLLRFVNIHGSALSTDSKPLVFEFLNALVENYQSQPILKKVSEMPFFKSACEAFTLENASAVNYAGFIVCFQTLWKTPQLIQDYSYNLELHGIAVSRLYDLDTYYLDIQNEMLLDFKKQMAERFQKLCVNYKRIHLDANKISPVAIQAMKMVDLSEDTVAYFQHPGDWDKSYPLSLGPVLRNSKRTGFKQYERLSEDGYKFDYDTFSELIHQKYITSDVITKTINLCPDKETLKYISNCIVVKCPKNLLEEEVIQHQLFSKILENLTDKSLSKLALNCENIRNFINAVGFPDRFKSITSQAEYKGATAVIFAALFRAKDYKSVIMFNEICPCLDISLILKSFIRLGDYDNYLSQEARFKDSMSPAALGVIRSEYLINQKKFEDAMLLLKSFPDVIDHQTYDKYSFALFLSSFSGTPVDVDFQIENTLQLANVLSAQHSFHNMIHCYESMTKGKEFSQDLKLNFGIKMEITQQILNNIEDSMQFLDLNDTSIIENYYSKLENYMRFRGYLKTITFTEDQMLQLLNIWQKINPILVDNLFNNIVESVCLNNAVKVINFNDNGSFNVSKTSLMVLLDSISAIYKSEGLSDHHSKVESFKDIIDSSMH

SEQ ID NO: 2573 - DNA, 3588 bp, Candida glabrata
  CDS (1)..(3588)
atggcgttcaagtcgttcaagtacaagttgtacgccaagggctaccaccactcgacggcgactgctgcgcagtcgtcgacgagtttcttcgacaacgggtactactactaccagcagatgcggaacaggcaggtgctgcaccatgtggtgccggaggaagtcggtgcgtccactgcgctgcaccccgcggtggtcgcgaacaacaacttcaacaacctcgagtgtgtgctggcgctgcaccacgaccacgacgactccaacgctgtgaacgctgcgagcgccgtgacggctaatgtggccaccggcgacggcacagacctcactctcggcgggcgcaagcacaagagcaagaacaagcgcatggtgggtctgtgcaagaggaacgacaacagcaagactcagttcgtgcagaagagattcattagcaatgccactaacatcgagagccgcgcctcagcggcccacttcacaccagcggaggcactgcaaaccgcagacctgctggagctggagaaggaatacaactgggagaaggacaccgacgatgacttgaacccacagacttacctgagcacacacatagaccagatcaacaaacacttcgtaaagggcaattacaacatcataaacgccctctataagtccctgaagcgcaacggcatcgccatccaggaccgcgaagtcctcacaaaagtgctgatctctttggcacgcagagaaatggacgatcttgatatcgacaacaaagtcttcgagctcttgagttgctaccaggacatcatcactaatagaattaagccaaatttggagatttacaacatagtgctagagacgttattcaagagctctatagtggccttcaagaacaaaaatggaaacggtatcgacttctacaagatcggtagtgaactgctacagacaataatggctgcaaaggacatgaacctatctaacgacgtcataaactactgtttgctatcgacaaacttgtacccatccttcattcaattatccgctttgcaacagtacatcaatatattaccaaactacaagaaggactccttttattacatttcgtgtttatcttacgcacgcctgaataacgatttggactcgatcaagagactatacgcagactacaggcagttgttgattgacgacccaactgacatgtcaatccgtgaagatcaatacaaagtatactcaatgtttgtttccggcttagtcgaatgtggtgaactgaacttggcttccaagttcttggaaacattcatttctaagattagagccgaaaatggttcagctgaaaatatctctactatgctgtccacctttataatttcagtcagtaagatcgactgcaacaaagcccagattttatggtcaaaattcaacagattgtcctgggtcccagaattttcttatgagttttatttgactctgctggctaattgctttcaggactggggtctaacaaagaaggtttacgaatatatgttcccaatgaggagagtgttcaaggaaaatagggaaaacttatcagaatacttattgtaccctatgggcctagaatccgtattaaactcattgatggattttgctctgcaattaaaagacacccaaattgtattaaaacttctggaagaggccattgttaagggatttacttttgaaacaggtatttacccattcatttttgcttacttgaaagaagtcaaatgtccagaagattatctattacgtttaatccaaaaccaaggtgagctactactaaaatcggagaaacctgaagatgtgttcatgttctttaatgcgattgcagataattttgcttctcaaagcttgaagagtgcgatcacagaaatggatctgttcacagaatcctgccgcaactttcacttggttgactctaataaaattaatttccaaggctttttatctatatttgaaaactcttggaattgtccaaagactcactctaactatgccaagctaatacagttgcacgccattttagttacaagacttcttgacttcgaaactttccctttggtagagcataatgaacacttatcccaacttaagttgagagttatcgaacagtttcaaactttatgtacaaactacatgaatttgaattttgatcccaaccatatcagcgaaacgacatgcgaagcactaagattaattgatgctcctgaaaacctaatcaactacttctctcatcctggtgattgggacaagtcctacccactatccttagggtcaatgattagagtatctccatcgacaggaatcaaagagtacaaaaagctattggacgatggctattgtttcgattatgatacttacaagactttattatcaaataacatgtctgatctacatatttgcagacagatcttaaagcaattaccaattgatgtagtagatgaatgcaaatacatctccaacatccttgcattccacgcaacctcaaccgaattaaccaacttattattgactgacgagaaatccatcaaatatatcctaccaaatatgagagactcatcaatggtgaacttcattaaaaattgtggtaatattgaagtagttgttaatagaatcaacttccctgaaaaattcagaggcattgcagttcaagcagaacgtaaagaaactatcaaatacatatatggtcaattgtttaaagaaaaatgttaccaagaaattattgagtataataaatcatgtcctgttttggatttgaacgttctcttaaagtcatttataaggactggcgattatggatcatttttggcacttttcgataaatacagagataccttgggatctaatggccttgatctacaagtcgaatatttgatcacaatggtcaaattgatagtgcgatcgagtgttcgctctagcaatttgcgcactccccataagacaatggacctcttcagttttgcaaatttcttaaagagttttgagtgcgatgtagctatgcataacgcacctgagaataccttacagttagctaatattttatctactcagaactcatttgctggaattctatctgtgtttgatatggttagaagttctggtaagctacaaagcagcgaaatcaatcttccaagtgtaaaaaatgagcttttgtctcaaatgttcaataatttggatgatgcagtttccttttttggaaatatagatggtagcattcaagaagtttttagaactaaactacaaagtttattgaggttcaaggcttatttaaaattgccgattttgtcaaatcgtcaaattcaccagttggttagcatttggagcgcaattgatccatttgccattgatgcactattcaacaacattgtcgaatccttttatctggatgataaggtaagaattttatatttaaacgaaggcattacttatcctttcaatatgaatgaattgaattcaataattgaccagatcgccttttcttttgcagacagaaatgatcaagaaaacgtccaaaaggcaagaacttttaagatattcctagaaacaaattatattccctccactatcaaattcaaagaaaatatcgcatattcatga

SEQ ID NO: 2574 - protein, 1195 aa, Candida glabrata
MAFKSFKYKLYAKGYHHSTATAAQSSTSFFDNGYYYYQQMRNRQVLHHVVPEEVGASTALHPAVVANNNFNNLECVLALHHDHDDSNAVNAASAVTANVATGDGTDLTLGGRKHKSKNKRMVGLCKRNDNSKTQFVQKRFISNATNIESRASAAHFTPAEALQTADLLELEKEYNWEKDTDDDLNPQTYLSTHIDQINKHFVKGNYNIINALYKSLKRNGIAIQDREVLTKVLISLARREMDDLDIDNKVFELLSCYQDIITNRIKPNLEIYNIVLETLFKSSIVAFKNKNGNGIDFYKIGSELLQTIMAAKDMNLSNDVINYCLLSTNLYPSFIQLSALQQYINILPNYKKDSFYYISCLSYARLNNDLDSIKRLYADYRQLLIDDPTDMSIREDQYKVYSMFVSGLVECGELNLASKFLETFISKIRAENGSAENISTMLSTFIISVSKIDCNKAQILWSKFNRLSWVPEFSYEFYLTLLANCFQDWGLTKKVYEYMFPMRRVFKENRENLSEYLLYPMGLESVLNSLMDFALQLKDTQIVLKLLEEAIVKGFTFETGIYPFIFAYLKEVKCPEDYLLRLIQNQGELLLKSEKPEDVFMFFNAIADNFASQSLKSAITEMDLFTESCRNFHLVDSNKINFQGFLSIFENSWNCPKTHSNYAKLIQLHAILVTRLLDFETFPLVEHNEHLSQLKLRVIEQFQTLCTNYMNLNFDPNHISETTCEALRLIDAPENLINYFSHPGDWDKSYPLSLGSMIRVSPSTGIKEYKKLLDDGYCFDYDTYKTLLSNNMSDLHICRQILKQLPIDVVDECKYISNILAFHATSTELTNLLLTDEKSIKYILPNMRDSSMVNFIKNCGNIEVVVNRINFPEKFRGIAVQAERKETIKYIYGQLFKEKCYQEIIEYNKSCPVLDLNVLLKSFIRTGDYGSFLALFDKYRDTLGSNGLDLQVEYLITMVKLIVRSSVRSSNLRTPHKTMDLFSFANFLKSFECDVAMHNAPENTLQLANILSTQNSFAGILSVFDMVRSSGKLQSSEINLPSVKNELLSQMFNNLDDAVSFFGNIDGSIQEVFRTKLQSLLRFKAYLKLPILSNRQIHQLVSIWSAIDPFAIDALFNNIVESFYLDDKVRILYLNEGITYPFNMNELNSIIDQIAFSFADRNDQENVQKARTFKIFLETNYIPSTIKFKENIAYS

SEQ ID NO: 2575 - DNA, 26 bp, Artificial sequence
  primer
atggctttcaaatcattcatatactc

SEQ ID NO: 2576 - DNA, 24 bp, Artificial sequence
  primer
tcatgcttgaagaggcttgctctt

SEQ ID NO: 2577 - protein, 1246 aa, Artificial sequence
  consensus sequence
  Variant (2)..(2): Xaa in position 2 is any amino acid
  Variant (6)..(7): Xaa in position 6 to 7 is any amino acid
  Variant (8)..(10): Xaa in position 8 to 10 is any or no amino acid
  Variant (12)..(12): Xaa in position 12 is any amino acid
  Variant (17)..(17): Xaa in position 17 is any amino acid
  Variant (19)..(23): Xaa in position 19 to 23 is any amino acid
  Variant (24)..(26): Xaa in position 24 to 26 is any or no amino acid
  Variant (32)..(33): Xaa in position 32 to 33 is any amino acid
  Variant (34)..(36): Xaa in position 34 to 36 is any or no amino acid
  Variant (39)..(43): Xaa in position 39 to 43 is any amino acid
  Variant (45)..(45): Xaa in position 45 is any amino acid
  Variant (47)..(50): Xaa in position 47 to 50 is any amino acid
  Variant (51)..(53): Xaa in position 51 to 53 is any or no amino acid
  Variant (55)..(63): Xaa in position 55 to 63 is any amino acid
  Variant (66)..(66): Xaa in position 66 is any amino acid
  Variant (71)..(71): Xaa in position 71 is any amino acid
  Variant (73)..(73): Xaa in position 73 is any amino acid
  Variant (76)..(79): Xaa in position 76 to 79 is any amino acid
  Variant (81)..(92): Xaa in position 81 to 92 is any amino acid
  Variant (93)..(95): Xaa in position 93 to 95 is any or no amino acid
  Variant (97)..(138): Xaa in position 97 to 138 is any amino acid
  Variant (139)..(150): Xaa in position 139 to 150 is any or no amino acid
  Variant (152)..(185): Xaa in position 152 to 185 is any amino acid
  Variant (186)..(187): Xaa in position 186 to 187 is any or no amino acid
  Variant (189)..(195): Xaa in position 189 to 195 is any amino acid
  Variant (196)..(221): Xaa in position 196 to 221 is any or no amino acid
  Variant (223)..(224): Xaa in position 223 to 224 is any amino acid
  Variant (226)..(229): Xaa in position 226 to 229 is any amino acid
  Variant (232)..(235): Xaa in position 232 to 235 is any amino acid
  Variant (237)..(237): Xaa in position 237 is any amino acid
  Variant (239)..(242): Xaa in position 239 to 242 is any amino acid
  Variant (244)..(250): Xaa in position 244 to 250 is any amino acid
  Variant (254)..(255): Xaa in position 254 to 255 is any amino acid
  Variant (257)..(258): Xaa in position 257 to 258 is any amino acid
  Variant (260)..(260): Xaa in position 260 is any amino acid
  Variant (263)..(263): Xaa in position 263 is any amino acid
  Variant (266)..(266): Xaa in position 266 is any amino acid
  Variant (268)..(276): Xaa in position 268 to 276 is any amino acid
  Variant (277)..(277): Xaa in position 277 is any or no amino acid
  Variant (280)..(280): Xaa in position 280 is any amino acid
  Variant (282)..(284): Xaa in position 282 to 284 is any amino acid
  Variant (286)..(287): Xaa in position 286 to 287 is any amino acid
  Variant (289)..(292): Xaa in position 289 to 292 is any amino acid
  Variant (295)..(297): Xaa in position 295 to 297 is any amino acid
  Variant (301)..(301): Xaa in position 301 is any amino acid
  Variant (306)..(306): Xaa in position 306 is any amino acid
  Variant (308)..(308): Xaa in position 308 is any amino acid
  Variant (310)..(311): Xaa in position 310 to 311 is any amino acid
  Variant (314)..(315): Xaa in position 314 to 315 is any amino acid
  Variant (319)..(320): Xaa in position 319 to 320 is any amino acid
  Variant (322)..(324): Xaa in position 322 to 324 is any amino acid
  Variant (326)..(328): Xaa in position 326 to 328 is any amino acid
  Variant (331)..(331): Xaa in position 331 is any amino acid
  Variant (333)..(336): Xaa in position 333 to 336 is any amino acid
  Variant (338)..(338): Xaa in position 338 is any amino acid
  Variant (341)..(341): Xaa in position 341 is any amino acid
  Variant (344)..(344): Xaa in position 344 is any amino acid
  Variant (347)..(349): Xaa in position 347 to 349 is any amino acid
  Variant (351)..(357): Xaa in position 351 to 357 is any amino acid
  Variant (358)..(364): Xaa in position 358 to 364 is any or no amino acid
  Variant (366)..(377): Xaa in position 366 to 377 is any amino acid
  Variant (380)..(381): Xaa in position 380 to 381 is any amino acid
  Variant (383)..(383): Xaa in position 383 is any amino acid
  Variant (386)..(387): Xaa in position 386 to 387 is any amino acid
  Variant (389)..(396): Xaa in position 389 to 396 is any amino acid
  Variant (398)..(404): Xaa in position 398 to 404 is any amino acid
  Variant (406)..(408): Xaa in position 406 to 408 is any amino acid
  Variant (410)..(410): Xaa in position 410 is any amino acid
  Variant (412)..(414): Xaa in position 412 to 414 is any amino acid
  Variant (418)..(420): Xaa in position 418 to 420 is any amino acid
  Variant (422)..(426): Xaa in position 422 to 426 is any amino acid
  Variant (428)..(428): Xaa in position 428 is any amino acid
  Variant (431)..(431): Xaa in position 431 is any amino acid
  Variant (433)..(433): Xaa in position 433 is any amino acid
  Variant (435)..(436): Xaa in position 435 to 436 is any amino acid
  Variant (438)..(446): Xaa in position 438 to 446 is any amino acid
  Variant (447)..(449): Xaa in position 447 to 449 is any or no amino acid
  Variant (451)..(453): Xaa in position 451 to 453 is any amino acid
  Variant (456)..(458): Xaa in position 456 to 458 is any amino acid
  Variant (460)..(462): Xaa in position 460 to 462 is any amino acid
  Variant (464)..(464): Xaa in position 464 is any amino acid
  Variant (466)..(468): Xaa in position 466 to 468 is any amino acid
  Variant (471)..(473): Xaa in position 471 to 473 is any amino acid
  Variant (475)..(485): Xaa in position 475 to 485 is any amino acid
  Variant (487)..(489): Xaa in position 487 to 489 is any amino acid
  Variant (491)..(491): Xaa in position 491 is any amino acid
  Variant (493)..(495): Xaa in position 493 to 495 is any amino acid
  Variant (497)..(497): Xaa in position 497 is any amino acid
  Variant (499)..(499): Xaa in position 499 is any amino acid
  Variant (502)..(503): Xaa in position 502 to 503 is any amino acid
  Variant (505)..(508): Xaa in position 505 to 508 is any amino acid
  Variant (511)..(516): Xaa in position 511 to 516 is any amino acid
  Variant (518)..(519): Xaa in position 518 to 519 is any amino acid
  Variant (521)..(521): Xaa in position 521 is any amino acid
  Variant (523)..(523): Xaa in position 523 is any amino acid
  Variant (533)..(535): Xaa in position 533 to 535 is any amino acid
  Variant (538)..(541): Xaa in position 538 to 541 is any amino acid
  Variant (542)..(542): Xaa in position 542 is any or no amino acid
  Variant (544)..(544): Xaa in position 544 is any amino acid
  Variant (546)..(546): Xaa in position 546 is any amino acid
  Variant (548)..(549): Xaa in position 548 to 549 is any amino acid
  Variant (551)..(551): Xaa in position 551 is any amino acid
  Variant (553)..(553): Xaa in position 553 is any amino acid
  Variant (557)..(569): Xaa in position 557 to 569 is any amino acid
  Variant (570)..(571): Xaa in position 570 to 571 is any or no amino acid
  Variant (575)..(575): Xaa in position 575 is any amino acid
  Variant (577)..(577): Xaa in position 577 is any amino acid
  Variant (579)..(580): Xaa in position 579 to 580 is any amino acid
  Variant (582)..(590): Xaa in position 582 to 590 is any amino acid
  Variant (592)..(593): Xaa in position 592 to 593 is any amino acid
  Variant (596)..(600): Xaa in position 596 to 600 is any amino acid
  Variant (602)..(603): Xaa in position 602 to 603 is any amino acid
  Variant (606)..(607): Xaa in position 606 to 607 is any amino acid
  Variant (610)..(612): Xaa in position 610 to 612 is any amino acid
  Variant (614)..(615): Xaa in position 614 to 615 is any amino acid
  Variant (617)..(617): Xaa in position 617 is any amino acid
  Variant (620)..(621): Xaa in position 620 to 621 is any amino acid
  Variant (623)..(623): Xaa in position 623 is any amino acid
  Variant (625)..(629): Xaa in position 625 to 629 is any amino acid
  Variant (631)..(631): Xaa in position 631 is any amino acid
  Variant (633)..(633): Xaa in position 633 is any amino acid
  Variant (636)..(636): Xaa in position 636 is any amino acid
  Variant (638)..(654): Xaa in position 638 to 654 is any amino acid
  Variant (655)..(655): Xaa in position 655 is any or no amino acid
  Variant (657)..(657): Xaa in position 657 is any amino acid
  Variant (659)..(659): Xaa in position 659 is any amino acid
  Variant (661)..(664): Xaa in position 661 to 664 is any amino acid
  Variant (666)..(667): Xaa in position 666 to 667 is any amino acid
  Variant (670)..(680): Xaa in position 670 to 680 is any amino acid
  Variant (682)..(687): Xaa in position 682 to 687 is any amino acid
  Variant (689)..(689): Xaa in position 689 is any amino acid
  Variant (691)..(699): Xaa in position 691 to 699 is any amino acid
  Variant (701)..(711): Xaa in position 701 to 711 is any amino acid
  Variant (713)..(724): Xaa in position 713 to 724 is any amino acid
  Variant (726)..(726): Xaa in position 726 is any amino acid
  Variant (728)..(728): Xaa in position 728 is any amino acid
  Variant (730)..(731): Xaa in position 730 to 731 is any amino acid
  Variant (733)..(733): Xaa in position 733 is any amino acid
  Variant (735)..(736): Xaa in position 735 to 736 is any amino acid
  Variant (738)..(743): Xaa in position 738 to 743 is any amino acid
  Variant (744)..(745): Xaa in position 744 to 745 is any or no amino acid
  Variant (748)..(748): Xaa in position 748 is any amino acid
  Variant (750)..(759): Xaa in position 750 to 759 is any amino acid
  Variant (761)..(762): Xaa in position 761 to 762 is any amino acid
  Variant (764)..(765): Xaa in position 764 to 765 is any amino acid
  Variant (767)..(772): Xaa in position 767 to 772 is any amino acid
  Variant (774)..(774): Xaa in position 774 is any amino acid
  Variant (776)..(783): Xaa in position 776 to 783 is any amino acid
  Variant (785)..(797): Xaa in position 785 to 797 is any amino acid
  Variant (798)..(802): Xaa in position 798 to 802 is any or no amino acid
  Variant (804)..(804): Xaa in position 804 is any amino acid
  Variant (819)..(821): Xaa in position 819 to 821 is any amino acid
  Variant (823)..(823): Xaa in position 823 is any amino acid
  Variant (825)..(827): Xaa in position 825 to 827 is any amino acid
  Variant (829)..(834): Xaa in position 829 to 834 is any amino acid
  Variant (836)..(838): Xaa in position 836 to 838 is any amino acid
  Variant (841)..(841): Xaa in position 841 is any amino acid
  Variant (847)..(849): Xaa in position 847 to 849 is any amino acid
  Variant (851)..(868): Xaa in position 851 to 868 is any amino acid
  Variant (870)..(874): Xaa in position 870 to 874 is any amino acid
  Variant (875)..(876): Xaa in position 875 to 876 is any or no amino acid
  Variant (878)..(878): Xaa in position 878 is any amino acid
  Variant (880)..(880): Xaa in position 880 is any amino acid
  Variant (882)..(891): Xaa in position 882 to 891 is any amino acid
  Variant (893)..(903): Xaa in position 893 to 903 is any amino acid
  Variant (905)..(907): Xaa in position 905 to 907 is any amino acid
  Variant (908)..(908): Xaa in position 908 is any or no amino acid
  Variant (910)..(913): Xaa in position 910 to 913 is any amino acid
  Variant (915)..(920): Xaa in position 915 to 920 is any amino acid
  Variant (923)..(933): Xaa in position 923 to 933 is any amino acid
  Variant (936)..(937): Xaa in position 936 to 937 is any amino acid
  Variant (939)..(940): Xaa in position 939 to 940 is any amino acid
  Variant (942)..(943): Xaa in position 942 to 943 is any amino acid
  Variant (947)..(947): Xaa in position 947 is any amino acid
  Variant (949)..(953): Xaa in position 949 to 953 is any amino acid
  Variant (955)..(957): Xaa in position 955 to 957 is any amino acid
  Variant (960)..(963): Xaa in position 960 to 963 is any amino acid
  Variant (965)..(970): Xaa in position 965 to 970 is any amino acid
  Variant (972)..(974): Xaa in position 972 to 974 is any amino acid
  Variant (976)..(976): Xaa in position 976 is any amino acid
  Variant (978)..(982): Xaa in position 978 to 982 is any amino acid
  Variant (986)..(986): Xaa in position 986 is any amino acid
  Variant (989)..(989): Xaa in position 989 is any amino acid
  Variant (991)..(1003): Xaa in position 991 to 1003 is any amino acid
  Variant (1005)..(1015): Xaa in position 1005 to 1015 is any amino acid
  Variant (1016)..(1016): Xaa in position 1016 is any or no amino acid
  Variant (1021)..(1039): Xaa in position 1021 to 1039 is any amino acid
  Variant (1040)..(1042): Xaa in position 1040 to 1042 is any or no amino acid
  Variant (1044)..(1044): Xaa in position 1044 is any amino acid
  Variant (1046)..(1046): Xaa in position 1046 is any amino acid
  Variant (1048)..(1050): Xaa in position 1048 to 1050 is any amino acid
  Variant (1053)..(1053): Xaa in position 1053 is any amino acid
  Variant (1056)..(1056): Xaa in position 1056 is any amino acid
  Variant (1059)..(1068): Xaa in position 1059 to 1068 is any amino acid
  Variant (1069)..(1069): Xaa in position 1069 is any or no amino acid
  Variant (1075)..(1075): Xaa in position 1075 is any amino acid
  Variant (1078)..(1078): Xaa in position 1078 is any amino acid
  Variant (1081)..(1081): Xaa in position 1081 is any amino acid
  Variant (1083)..(1083): Xaa in position 1083 is any amino acid
  Variant (1086)..(1111): Xaa in position 1086 to 1111 is any amino acid
  Variant (1112)..(1113): Xaa in position 1112 to 1113 is any or no amino acid
  Variant (1115)..(1115): Xaa in position 1115 is any amino acid
  Variant (1117)..(1119): Xaa in position 1117 to 1119 is any amino acid
  Variant (1121)..(1122): Xaa in position 1121 to 1122 is any amino acid
  Variant (1125)..(1126): Xaa in position 1125 to 1126 is any amino acid
  Variant (1128)..(1135): Xaa in position 1128 to 1135 is any amino acid
  Variant (1136)..(1138): Xaa in position 1136 to 1138 is any or no amino acid
  Variant (1140)..(1140): Xaa in position 1140 is any amino acid
  Variant (1142)..(1143): Xaa in position 1142 to 1143 is any amino acid
  Variant (1145)..(1148): Xaa in position 1145 to 1148 is any amino acid
  Variant (1150)..(1154): Xaa in position 1150 to 1154 is any amino acid
  Variant (1157)..(1158): Xaa in position 1157 to 1158 is any amino acid
  Variant (1162)..(1172): Xaa in position 1162 to 1172 is any amino acid
  Variant (1174)..(1181): Xaa in position 1174 to 1181 is any amino acid
  Variant (1183)..(1187): Xaa in position 1183 to 1187 is any amino acid
  Variant (1192)..(1193): Xaa in position 1192 to 1193 is any amino acid
  Variant (1195)..(1219): Xaa in position 1195 to 1219 is any amino acid
  Variant (1221)..(1241): Xaa in position 1221 to 1241 is any amino acid
  Variant (1243)..(1245): Xaa in position 1243 to 1245 is any amino acid
MXFKSXXXXXYXKGYHXSXXXXXXXXTSFFDXXXXXYQXXXXXQXLXXXXXXXPXXXXXXXXXHPXVVANXNXNNXXXXLXXXXXXXXXXXXXXXNXXXXXXXXXXXXXXXXXXXXXXXXXXXXXXXXXXXXXXXXXXXXXXXXXXXXXXTXXXXXXXXXXXXXXXXXXXXXXXXXXXXXXXXXXXXLXXXXXXXXXXXXXXXXXXXXXXXXXXXXXXXXXWXXDXXXXLNXXXXLXTXXXXIXXXXXXXNYNXXNXXYXSLXRNXIXXXXXXXXXXVLXSXXXRXXDXXXXDNXXXELLXCYQDXIXNXXKPXXEIYXXVXXXLXXXSIXAXXXXNXNGXDFXKIXXXLXXXXXXXXXXXXXXKXXXXXXXXXXXXLLXXNXYPXXIXXXXXXXXIXXXXXXXKXXXYXIXXXSYAXXXNXXXXXKXLYXDXRXXLXXXXXXXXXXXXQXXXYSXXXSXXXEXGXXXLAXXXLXXXXXXXXXXXGXXXNXSXXXSXFXISXXKXXXXKAXXXXXXFXXLXWXPEFSYEFYLXXXANXXXXXWXLXKXXYXYXFPMXXXXXXXXXXXXXXXYLLXPXGXXSXXXXXXXXXLXXKDXXXXXKXXEEXXVKXXXFXXGXYPXXFXYXXXXXCXEXYLXRXXXXXXXXXXXXXXXXXXFXFXNXXXXNXXSQXXXXXXXXXXXFXXXXXXFXLXXXXXXXXXGXXXXXXXXXXXPXXXXXXXXXXXXHXIXVXXLXDXXTXXXXXXXXNEXLXXXXXXXXXXFXXLXXNXXXXXXDXNXXXXXXXXAXXXXXXXXXXXXXXXXXXFXHPGDWDKSYPLSLGXXXRXSXXXGXXXXXXLXXXGYXFDYDTXXXLXXXXXXXXXXXXXXXXXXPXXXXXXXKXIXNXXXXXXXXXXLXXXXXXXXXXXKXXXXNXXXXSXXXXXXNCXXXXXXXXXXXFPXXFXXIXXQAEXKXXXXXIXXXLFXXXXYXXXXXXNXXXPXLXXXXXLKSXIRXGXXXXXXXXXXXXXDXXXXXXXXXXXXEYLIXXXXXXXXXXXXXXXXXXXXXXHXTXDXXXFAXFLXSFXXXXXXXXXXXENTLQXANXLSXQXSFXXXXXXXXXXXXXXXXXXXXXXXXXXXXKXEXXXQXXNNXXDXXXXXXXXXXXDXSXXEXXXXKXXXXXRFXXYLKXXXXXXXXXXXLXXXXXXXXPXXXXXLFNNXXEXXXXXXXXXXXXXXXXXXXXXXXXXLXXXXXXXXXXXXXXXXXXXXXKXXXF

SEQ ID NO: 2578 - protein, 55 aa, Artificial sequence
  protein pattern
  Variant (13)..(13): Xaa in position 13 is Pro or Ser
  Variant (14)..(14): Xaa in position 14 is Phe, Met or Val
  Variant (15)..(15): Xaa in position 15 is Ile or Leu
  Variant (17)..(17): Xaa in position 17 is Asn or Val
  Variant (19)..(19): Xaa in position 19 is any amino acid
  Variant (20)..(20): Xaa in position 20 is Arg or Ser
  Variant (21)..(21): Xaa in position 21 is Gly or Thr
  Variant (23)..(23): Xaa in position 23 is Phe or Ile
  Variant (24)..(24): Xaa in position 24 is Lys or Arg
  Variant (25)..(25): Xaa in position 25 is Glu or Gln
  Variant (26)..(26): Xaa in position 26 is Phe or Tyr
  Variant (27)..(27): Xaa in position 27 is any amino acid
  Variant (28)..(28): Xaa in position 28 is Lys or Arg
  Variant (30)..(30): Xaa in position 30 is any amino acid
  Variant (31)..(31): Xaa in position 31 is Asp, Glu or Lys
  Variant (32)..(32): Xaa in position 32 is Asp or Glu
  Variant (35)..(35): Xaa in position 35 is any amino acid
  Variant (41)..(41): Xaa in position 41 is Phe or Tyr
  Variant (42)..(42): Xaa in position 42 is any amino acid
  Variant (43)..(43): Xaa in position 43 is Glu or Thr
  Variant (45)..(53): Xaa in position 45 to 53 is any amino acid
  Variant (54)..(54): Xaa in position 54 is any or no amino acid
GDWDKSYPLSLGXXXRXSXXXGXXXXXXLXXXGYXFDYDTXXXLXXXXXXXXXXI

SEQ ID NO: 2579 - protein, 43 aa, Artificial sequence
  protein pattern
  Variant (2)..(2): Xaa in position 2 is any amino acid
  Variant (5)..(5): Xaa in position 5 is Met or Val
  Variant (6)..(6): Xaa in position 6 is Gly or Ser
  Variant (8)..(8): Xaa in position 8 is Ile or Val
  Variant (9)..(9): Xaa in position 9 is Asp or Asn
  Variant (10)..(10): Xaa in position 10 is any amino acid
  Variant (11)..(11): Xaa in position 11 is Glu, Asn or Ser
  Variant (14)..(15): Xaa in position 14 to 15 is any amino acid
  Variant (16)..(16): Xaa in position 16 is Ile or Leu
  Variant (17)..(18): Xaa in position 17 to 18 is any amino acid
  Variant (19)..(19): Xaa in position 19 is Glu or Lys
  Variant (21)..(22): Xaa in position 21 to 22 is any amino acid
  Variant (24)..(24): Xaa in position 24 is any amino acid
  Variant (26)..(26): Xaa in position 26 is Ile or Val
  Variant (36)..(36): Xaa in position 36 is Thr or Val
  Variant (37)..(37): Xaa in position 37 is Phe, Leu or Met
  Variant (38)..(38): Xaa in position 38 is Ile, Leu or Met
  Variant (41)..(41): Xaa in position 41 is Cys or Ser
  Variant (42)..(42): Xaa in position 42 is Phe or Leu
  Variant (43)..(43): Xaa in position 43 is Asn or Gln
FXISXXKXXXXKAXXXXXXFXXLXWXPEFSYEFYLXXXANXXX

SEQ ID NO: 2580 - protein, 56 aa, Artificial sequence
  protein pattern
  Variant (3)..(3): Xaa in position 3 is any amino acid
  Variant (4)..(6): Xaa in position 4 to 6 is any or no amino acid
  Variant (9)..(9): Xaa in position 9 is any amino acid
  Variant (10)..(10): Xaa in position 10 is Met or Val
  Variant (11)..(11): Xaa in position 11 is Phe or Tyr
  Variant (15)..(15): Xaa in position 15 is Asn, Ser or Thr
  Variant (20)..(20): Xaa in position 20 is Ile or Met
  Variant (22)..(22): Xaa in position 22 is Asn, Gln or Thr
  Variant (24)..(24): Xaa in position 24 is Lys or Arg
  Variant (25)..(25): Xaa in position 25 is Ile or Leu
  Variant (28)..(28): Xaa in position 28 is Asn, Pro or Ser
  Variant (29)..(29): Xaa in position 29 is any amino acid
  Variant (33)..(33): Xaa in position 33 is any amino acid
  Variant (34)..(34): Xaa in position 34 is Ile or Leu
  Variant (36)..(36): Xaa in position 36 is Leu or Val
  Variant (37)..(37): Xaa in position 37 is any amino acid
  Variant (38)..(38): Xaa in position 38 is Ser or Thr
  Variant (40)..(40): Xaa in position 40 is Phe or Leu
  Variant (41)..(41): Xaa in position 41 is any amino acid
  Variant (42)..(42): Xaa in position 42 is Gly or Ser
  Variant (45)..(45): Xaa in position 45 is any amino acid
  Variant (47)..(47): Xaa in position 47 is Phe or Tyr
  Variant (48)..(49): Xaa in position 48 to 49 is any amino acid
  Variant (50)..(50): Xaa in position 50 is Glu, His or Lys
  Variant (52)..(52): Xaa in position 52 is Gly, Pro or Thr
  Variant (55)..(55): Xaa in position 55 is any amino acid
LDXXXXDNXXXELLXCYQDXIXNXXKPXXEIYXXVXXXLXXXSIXAXXXXNXNGXD

SEQ ID NO: 2581 - protein, 60 aa, Artificial sequence
  protein pattern
  Variant (2)..(2): Xaa in position 2 is any amino acid
  Variant (4)..(4): Xaa in position 4 is Leu or Val
  Variant (5)..(5): Xaa in position 5 is Asp or Glu
  Variant (7)..(7): Xaa in position 7 is Ile, Met or Val
  Variant (8)..(8): Xaa in position 8 is any amino acid
  Variant (9)..(9): Xaa in position 9 is Asn, Ser or Thr
  Variant (10)..(10): Xaa in position 10 is Ser or Thr
  Variant (11)..(11): Xaa in position 11 is Ile or Leu
  Variant (12)..(12): Xaa in position 12 is Leu or Met
  Variant (13)..(13): Xaa in position 13 is Asp or Thr
  Variant (14)..(14): Xaa in position 14 is Phe or Tyr
  Variant (15)..(15): Xaa in position 15 is Ala or Ser
  Variant (17)..(17): Xaa in position 17 is Gln or Arg
  Variant (18)..(18): Xaa in position 18 is any amino acid
  Variant (21)..(21): Xaa in position 21 is Asp, Asn or Thr
  Variant (22)..(22): Xaa in position 22 is Glu or Gln
  Variant (23)..(23): Xaa in position 23 is Ile, Leu or Val
  Variant (24)..(24): Xaa in position 24 is Ile or Val
  Variant (25)..(25): Xaa in position 25 is Leu or Met
  Variant (27)..(27): Xaa in position 27 is any or no amino acid
  Variant (29)..(29): Xaa in position 29 is any amino acid
  Variant (31)..(32): Xaa in position 31 to 32 is any amino acid
  Variant (33)..(33): Xaa in position 33 is any or no amino acid
  Variant (36)..(37): Xaa in position 36 to 37 is any amino acid
  Variant (38)..(38): Xaa in position 38 is Ser or Thr
  Variant (40)..(40): Xaa in position 40 is Asp, Glu or Gln
  Variant (41)..(41): Xaa in position 41 is any amino acid
  Variant (43)..(43): Xaa in position 43 is Ile or Leu
  Variant (46)..(46): Xaa in position 46 is Phe or Tyr
  Variant (47)..(47): Xaa in position 47 is Ile or Val
  Variant (49)..(49): Xaa in position 49 is Ala, Asn or Ser
  Variant (51)..(51): Xaa in position 51 is Phe or Leu
  Variant (52)..(52): Xaa in position 52 is any amino acid
  Variant (53)..(53): Xaa in position 53 is Glu or Ser
  Variant (54)..(54): Xaa in position 54 is Ile or Val
  Variant (55)..(55): Xaa in position 55 is any amino acid
  Variant (57)..(57): Xaa in position 57 is Gly or Pro
  Variant (59)..(59): Xaa in position 59 is Asp or Pro
PXGXXSXXXXXXXXXLXXKDXXXXXKXLXEXXXVKXXXFXXGXYPXXFXYXXXXXCXEXY

SEQ ID NO: 2582 - protein, 61 aa, Artificial sequence
  protein pattern
  Variant (3)..(3): Xaa in position 3 is any amino acid
  Variant (4)..(5): Xaa in position 4 to 5 is any or no amino acid
  Variant (7)..(7): Xaa in position 7 is any amino acid
  Variant (8)..(9): Xaa in position 8 to 9 is any or no amino acid
  Variant (11)..(11): Xaa in position 11 is Ala or Thr
  Variant (12)..(12): Xaa in position 12 is any amino acid
  Variant (16)..(16): Xaa in position 16 is any amino acid
  Variant (18)..(18): Xaa in position 18 is Glu, Gly or Asn
  Variant (19)..(19): Xaa in position 19 is Ala or Thr
  Variant (20)..(22): Xaa in position 20 to 22 is any amino acid
  Variant (24)..(24): Xaa in position 24 is Phe or Tyr
  Variant (25)..(25): Xaa in position 25 is Ala, Glu or Gly
  Variant (26)..(26): Xaa in position 26 is any amino acid
  Variant (29)..(29): Xaa in position 29 is Asp, Lys or Arg
  Variant (30)..(30): Xaa in position 30 is Ala, Glu or Gly
  Variant (31)..(32): Xaa in position 31 to 32 is any amino acid
  Variant (34)..(34): Xaa in position 34 is any amino acid
  Variant (35)..(35): Xaa in position 35 is Asp, Glu or Ser
  Variant (36)..(36): Xaa in position 36 is Ile or Val
  Variant (37)..(37): Xaa in position 37 is Ile or Leu
  Variant (38)..(38): Xaa in position 38 is any amino acid
  Variant (39)..(39): Xaa in position 39 is Phe or Tyr
  Variant (41)..(42): Xaa in position 41 to 42 is any amino acid
  Variant (43)..(43): Xaa in position 43 is Cys or Val
  Variant (45)..(45): Xaa in position 45 is Cys or Val
  Variant (47)..(47): Xaa in position 47 is Asp or Asn
  Variant (48)..(48): Xaa in position 48 is Ile or Leu
  Variant (49)..(49): Xaa in position 49 is Glu, Asn or Ser
  Variant (50)..(50): Xaa in position 50 is Leu or Val
  Variant (51)..(51): Xaa in position 51 is Ile or Leu
  Variant (55)..(55): Xaa in position 55 is any amino acid
  Variant (58)..(58): Xaa in position 58 is any amino acid
  Variant (60)..(60): Xaa in position 60 is Asp or Glu
  Variant (61)..(61): Xaa in position 61 is Phe or Tyr
FPXXXKXXXIXXQAEXKXXXXXIXXXLFXXXXYXXXXXXNXXXPXLXXXXXLKSXIRXGXX

SEQ ID NO: 2583 - protein, 51 aa, Artificial sequence
  protein pattern
  Variant (2)..(2): Xaa in position 2 is any amino acid
  Variant (3)..(4): Xaa in position 3 to 4 is any or no amino acid
  Variant (6)..(8): Xaa in position 6 to 8 is any amino acid
  Variant (9)..(10): Xaa in position 9 to 10 is any or no amino acid
  Variant (13)..(13): Xaa in position 13 is any amino acid
  Variant (14)..(14): Xaa in position 14 is Glu, Gln or Ser
  Variant (15)..(15): Xaa in position 15 is Ala or Thr
  Variant (16)..(16): Xaa in position 16 is Phe or Tyr
  Variant (18)..(18): Xaa in position 18 is Glu, Gln or Ser
  Variant (20)..(21): Xaa in position 20 to 21 is any amino acid
  Variant (22)..(22): Xaa in position 22 is Asp or Lys
  Variant (23)..(23): Xaa in position 23 is any amino acid
  Variant (25)..(25): Xaa in position 25 is Glu or Asn
  Variant (26)..(26): Xaa in position 26 is Asp, Lys or Arg
  Variant (27)..(31): Xaa in position 27 to 31 is any amino acid
  Variant (35)..(35): Xaa in position 35 is any amino acid
  Variant (36)..(36): Xaa in position 36 is Ile or Val
  Variant (38)..(38): Xaa in position 38 is Ala or Ser
  Variant (39)..(39): Xaa in position 39 is Ile or Leu
  Variant (41)..(41): Xaa in position 41 is any amino acid
  Variant (44)..(44): Xaa in position 44 is any amino acid
  Variant (47)..(47): Xaa in position 47 is Asp, Glu or Gly
  Variant (49)..(49): Xaa in position 49 is Ala or Val
  Variant (50)..(50): Xaa in position 50 is Ile or Pro
  Variant (51)..(51): Xaa in position 51 is Pro or Gln
WXXXTXXXXXLNXXXXLXTXXXXIXXXXXXXNYNXXNXXYXSLXRNXIXXX

SEQ ID NO: 2584 - protein, 28 aa, Artificial sequence
  protein pattern
  Variant (2)..(4): Xaa in position 2 to 4 is any or no amino acid
  Variant (10)..(10): Xaa in position 10 is Asn or Ser
  Variant (11)..(11): Xaa in position 11 is Gly or Ser
  Variant (13)..(13): Xaa in position 13 is any or no amino acid
  Variant (15)..(16): Xaa in position 15 to 16 is any amino acid
  Variant (18)..(19): Xaa in position 18 to 19 is any amino acid
  Variant (20)..(20): Xaa in position 20 is Gly or Asn
  Variant (21)..(22): Xaa in position 21 to 22 is any amino acid
  Variant (23)..(23): Xaa in position 23 is Asn or Val
  Variant (24)..(24): Xaa in position 24 is any amino acid
  Variant (25)..(25): Xaa in position 25 is Asp or His
  Variant (26)..(26): Xaa in position 26 is any amino acid
  Variant (27)..(27): Xaa in position 27 is Ala or Val
  Variant (28)..(28): Xaa in position 28 is Ile, Leu or Val
AXXXTSFFDXXYXYXXQXXXXXXXXXXX

SEQ ID NO: 2585 - protein, 58 aa, Artificial sequence
  protein pattern
  Variant (2)..(5): Xaa in position 2 to 5 is any amino acid
  Variant (6)..(6): Xaa in position 6 is Ala, Ser or Val
  Variant (7)..(7): Xaa in position 7 is Glu, Asn or Ser
  Variant (8)..(8): Xaa in position 8 is any amino acid
  Variant (9)..(9): Xaa in position 9 is Phe, Ile or Val
  Variant (11)..(12): Xaa in position 11 to 12 is any amino acid
  Variant (13)..(20): Xaa in position 13 to 20 is any or no amino acid
  Variant (22)..(22): Xaa in position 22 is Phe or Leu
  Variant (23)..(23): Xaa in position 23 is Ile or Leu
  Variant (24)..(24): Xaa in position 24 is Ser or Val
  Variant (25)..(25): Xaa in position 25 is any amino acid
  Variant (26)..(26): Xaa in position 26 is Phe or Ile
  Variant (27)..(27): Xaa in position 27 is Glu, Asn or Gln
  Variant (28)..(28): Xaa in position 28 is Asn or Thr
  Variant (29)..(32): Xaa in position 29 to 32 is any amino acid
  Variant (34)..(37): Xaa in position 34 to 37 is any amino acid
  Variant (38)..(38): Xaa in position 38 is Asp or Asn
  Variant (39)..(39): Xaa in position 39 is Phe or Tyr
  Variant (40)..(40): Xaa in position 40 is Ala, Pro or Ser
  Variant (41)..(42): Xaa in position 41 to 42 is any amino acid
  Variant (43)..(43): Xaa in position 43 is Ile or Leu
  Variant (44)..(44): Xaa in position 44 is Glu or Gln
  Variant (45)..(45): Xaa in position 45 is Ile or Leu
  Variant (47)..(47): Xaa in position 47 is Ala or Gly
  Variant (49)..(49): Xaa in position 49 is Ala or Leu
  Variant (51)..(51): Xaa in position 51 is Ser or Thr
  Variant (52)..(52): Xaa in position 52 is Lys or Arg
  Variant (54)..(54): Xaa in position 54 is any amino acid
  Variant (56)..(56): Xaa in position 56 is Phe or Leu
  Variant (57)..(57): Xaa in position 57 is Asp or Glu
FXXXXXXXXNXXXXXXXXXXGXXXXXXXXXXXPXXXXXXXXXXXXHXIXVXXLXDXXT

SEQ ID NO: 2586 - protein, 60 aa, Artificial sequence
  protein pattern
  Variant (2)..(2): Xaa in position 2 is any amino acid
  Variant (3)..(4): Xaa in position 3 to 4 is any or no amino acid
  Variant (6)..(6): Xaa in position 6 is Ala or Ser
  Variant (7)..(7): Xaa in position 7 is any amino acid
  Variant (9)..(9): Xaa in position 9 is Ile or Leu
  Variant (12)..(12): Xaa in position 12 is Gly or Ser
  Variant (13)..(13): Xaa in position 13 is Phe or His
  Variant (15)..(16): Xaa in position 15 to 16 is any amino acid
  Variant (17)..(17): Xaa in position 17 is Gly or Ser
  Variant (18)..(18): Xaa in position 18 is any amino acid
  Variant (19)..(19): Xaa in position 19 is Ala, Ile or Leu
  Variant (20)..(20): Xaa in position 20 is any amino acid
  Variant (21)..(21): Xaa in position 21 is Asn or Gln
  Variant (22)..(22): Xaa in position 22 is any amino acid
  Variant (24)..(29): Xaa in position 24 to 29 is any amino acid
  Variant (30)..(30): Xaa in position 30 is any or no amino acid
  Variant (32)..(32): Xaa in position 32 is any amino acid
  Variant (33)..(33): Xaa in position 33 is Asp, Glu or Ser
  Variant (34)..(34): Xaa in position 34 is Phe or Ile
  Variant (36)..(36): Xaa in position 36 is Phe or Tyr
  Variant (38)..(38): Xaa in position 38 is Ala or Ser
  Variant (39)..(39): Xaa in position 39 is any amino acid
  Variant (40)..(40): Xaa in position 40 is Phe, Ile or Leu
  Variant (44)..(44): Xaa in position 44 is Lys or Arg
  Variant (45)..(45): Xaa in position 45 is Leu or Met
  Variant (46)..(46): Xaa in position 46 is any amino acid
  Variant (48)..(48): Xaa in position 48 is Asp or Glu
  Variant (49)..(50): Xaa in position 49 to 50 is any amino acid
  Variant (51)..(51): Xaa in position 51 is Ala or Ser
  Variant (52)..(52): Xaa in position 52 is Ile or Val
  Variant (54)..(54): Xaa in position 54 is Asp, Glu, Lys or Arg
  Variant (57)..(57): Xaa in position 57 is Ala, Glu or Gln
  Variant (59)..(59): Xaa in position 59 is Phe or Tyr
NXXXLXXNXYPXXIXXXXXXXXIXXXXXXXKXXXYXIXXXSYAXXXNXXXXXKXLYXDXR

SEQ ID NO: 2587 - protein, 58 aa, Artificial sequence
  protein pattern
  Variant (2)..(2): Xaa in position 2 is any amino acid
  Variant (4)..(4): Xaa in position 4 is Ile or Met
  Variant (5)..(5): Xaa in position 5 is any amino acid
  Variant (7)..(8): Xaa in position 7 to 8 is any amino acid
  Variant (9)..(16): Xaa in position 9 to 16 is any or no amino acid
  Variant (19)..(19): Xaa in position 19 is Lys or Arg
  Variant (20)..(20): Xaa in position 20 is Ala or Gly
  Variant (24)..(24): Xaa in position 24 is any amino acid
  Variant (25)..(25): Xaa in position 25 is Ile or Pro
  Variant (26)..(26): Xaa in position 26 is any amino acid
  Variant (27)..(27): Xaa in position 27 is Phe or Leu
  Variant (28)..(28): Xaa in position 28 is Asp, Ser or Thr
  Variant (29)..(29): Xaa in position 29 is any amino acid
  Variant (30)..(30): Xaa in position 30 is Asp or Arg
  Variant (31)..(31): Xaa in position 31 is Glu or Gln
  Variant (32)..(32): Xaa in position 32 is Ile, Leu or Met
  Variant (33)..(33): Xaa in position 33 is any amino acid
  Variant (34)..(34): Xaa in position 34 is Gln or Thr
  Variant (36)..(36): Xaa in position 36 is Leu or Val
  Variant (37)..(37): Xaa in position 37 is Asn or Ser
  Variant (38)..(38): Xaa in position 38 is Ile or Val
  Variant (39)..(39): Xaa in position 39 is any amino acid
  Variant (40)..(40): Xaa in position 40 is Gln or Ser
  Variant (41)..(41): Xaa in position 41 is any amino acid
  Variant (42)..(42): Xaa in position 42 is Ile or Leu
  Variant (43)..(43): Xaa in position 43 is Asp or Asn
  Variant (45)..(45): Xaa in position 45 is Phe or Ile
  Variant (46)..(46): Xaa in position 46 is any amino acid
  Variant (47)..(47): Xaa in position 47 is Ile, Pro or Val
  Variant (48)..(48): Xaa in position 48 is Asp or Ser
  Variant (49)..(49): Xaa in position 49 is any amino acid
  Variant (54)..(54): Xaa in position 54 is Ile or Leu
  Variant (55)..(55): Xaa in position 55 is Ile or Val
  Variant (57)..(57): Xaa in position 57 is Ser or Thr
  Variant (58)..(58): Xaa in position 58 is Phe, Ile or Val
DXSXXEXXXXXXXXXXRFXXYLKXXXXXXXXXXXLXXXXXXXXPXXXXXLFNNXXEXX

SEQ ID NO: 2588 - protein, 26 aa, Artificial sequence
  protein pattern
  Variant (2)..(2): Xaa in position 2 is any amino acid
  Variant (4)..(4): Xaa in position 4 is any amino acid
  Variant (6)..(6): Xaa in position 6 is any amino acid
  Variant (7)..(7): Xaa in position 7 is Phe or Tyr
  Variant (8)..(8): Xaa in position 8 is Ser or Thr
  Variant (11)..(11): Xaa in position 11 is any amino acid
  Variant (14)..(14): Xaa in position 14 is any amino acid
  Variant (17)..(19): Xaa in position 17 to 19 is any amino acid
  Variant (20)..(25): Xaa in position 20 to 25 is any or no amino acid
HXTXDXXXFAXFLXSFXXXXXXXXXP

SEQ ID NO: 2589 - protein, 39 aa, Artificial sequence
  protein pattern
  Variant (2)..(6): Xaa in position 2 to 6 is any amino acid
  Variant (7)..(9): Xaa in position 7 to 9 is any or no amino acid
  Variant (11)..(11): Xaa in position 11 is any amino acid
  Variant (12)..(12): Xaa in position 12 is any or no amino acid
  Variant (14)..(15): Xaa in position 14 to 15 is any amino acid
  Variant (17)..(17): Xaa in position 17 is Ala or Cys
  Variant (18)..(18): Xaa in position 18 is any amino acid
  Variant (20)..(20): Xaa in position 20 is Phe or Tyr
  Variant (21)..(21): Xaa in position 21 is any amino acid
  Variant (22)..(22): Xaa in position 22 is Asn or Arg
  Variant (23)..(23): Xaa in position 23 is Ile or Leu
  Variant (24)..(24): Xaa in position 24 is any amino acid
  Variant (25)..(25): Xaa in position 25 is Phe or Leu
  Variant (27)..(27): Xaa in position 27 is Ala or Pro
  Variant (29)..(29): Xaa in position 29 is any amino acid
  Variant (30)..(30): Xaa in position 30 is Ile or Leu
  Variant (31)..(31): Xaa in position 31 is Ala or Ser
  Variant (32)..(32): Xaa in position 32 is any amino acid
  Variant (33)..(33): Xaa in position 33 is Thr or Val
  Variant (34)..(34): Xaa in position 34 is Ala, Thr or Val
  Variant (35)..(35): Xaa in position 35 is any amino acid
  Variant (36)..(36): Xaa in position 36 is Glu or Gln
  Variant (38)..(38): Xaa in position 38 is Leu or Met
  Variant (39)..(39): Xaa in position 39 is Lys or Arg
LXXXXXXXXEXXFXXLXXNXXXXXXDXNXXXXXXXXAXX

SEQ ID NO: 2590 - protein, 41 aa, Artificial sequence
  protein pattern
  Variant (2)..(2): Xaa in position 2 is any amino acid
  Variant (3)..(6): Xaa in position 3 to 6 is any or no amino acid
  Variant (9)..(9): Xaa in position 9 is Met or Val
  Variant (10)..(10): Xaa in position 10 is Phe, Ile or Val
  Variant (11)..(11): Xaa in position 11 is Leu or Val
  Variant (13)..(13): Xaa in position 13 is Ala, Gly or Ser
  Variant (14)..(14): Xaa in position 14 is Phe or Leu
  Variant (15)..(15): Xaa in position 15 is Ala, Ile or Val
  Variant (17)..(17): Xaa in position 17 is Cys or Thr
  Variant (19)..(19): Xaa in position 19 is Glu or Ser
  Variant (20)..(20): Xaa in position 20 is Leu or Val
  Variant (21)..(21): Xaa in position 21 is Glu, Asn or Ser
  Variant (24)..(24): Xaa in position 24 is Ser or Thr
  Variant (25)..(25): Xaa in position 25 is any amino acid
  Variant (26)..(26): Xaa in position 26 is Phe or Leu
  Variant (28)..(28): Xaa in position 28 is Asp or Glu
  Variant (29)..(29): Xaa in position 29 is any amino acid
  Variant (30)..(30): Xaa in position 30 is Phe or Leu
  Variant (31)..(31): Xaa in position 31 is Ile, Leu or Val
  Variant (32)..(32): Xaa in position 32 is Ser or Val
  Variant (33)..(33): Xaa in position 33 is Asp or Lys
  Variant (34)..(34): Xaa in position 34 is Ile or Leu
  Variant (35)..(35): Xaa in position 35 is Gln or Arg
  Variant (36)..(36): Xaa in position 36 is Ala or Ser
  Variant (37)..(37): Xaa in position 37 is any amino acid
  Variant (38)..(38): Xaa in position 38 is Asp or Asn
  Variant (40)..(40): Xaa in position 40 is any amino acid
  Variant (41)..(41): Xaa in position 41 is Ala or Asn
EXXXXXYSXXXSXXXEXGXXXLAXXXLXXXXXXXXXXXGXX

SEQ ID NO: 2591 - protein, 11 aa, Artificial sequence
  protein pattern
  Variant (2)..(2): Xaa in position 2 is Lys or Arg
  Variant (3)..(3): Xaa in position 3 is Ile or Val
  Variant (5)..(5): Xaa in position 5 is Asp, Glu or Asn
  Variant (7)..(7): Xaa in position 7 is Ile or Met
  Variant (11)..(11): Xaa in position 11 is Glu, Lys or Arg
KXXYXYXFPMX

SEQ ID NO: 2592 - protein, 23 aa, Artificial sequence
  protein pattern
  Variant (3)..(3): Xaa in position 3 is Ala or Val
  Variant (8)..(8): Xaa in position 8 is any or no amino acid
  Variant (10)..(10): Xaa in position 10 is any or no amino acid
  Variant (13)..(13): Xaa in position 13 is Leu or Val
  Variant (14)..(14): Xaa in position 14 is Asp or Glu
  Variant (15)..(15): Xaa in position 15 is any amino acid
  Variant (16)..(16): Xaa in position 16 is Ala, Ile or Val
  Variant (18)..(19): Xaa in position 18 to 19 is any amino acid
  Variant (20)..(20): Xaa in position 20 is His or Arg
  Variant (21)..(21): Xaa in position 21 is Asp or His
  Variant (22)..(22): Xaa in position 22 is any amino acid
  Variant (23)..(23): Xaa in position 23 is Asp, Glu or His
HPXVVANXNXNNXXXXLXXXXXX

SEQ ID NO: 2593 - DNA, 1578 bp, Saccharomyces cerevisiae
  CDS (1)..(1578)
atgtgcgggattctattgcattattgtccaaacaataactacctgaatgatgagttaatcgaatttccagaaggaactgaatttggagatacaacatgtaccaatgaatcgtcgattttcaacaaaatcattccgtacatagccgcaagaggtccaaactactcctctcttcgagctgtcaaagcttatcgaataagttggttttcttctgttttatctttgaggcagcctttcacgaaacagagtattaacgtggatgacagatatttcctacaattcaatggtgagttatacaataaagagatatcgcagggtgataatgatagtctttatattgcttctatgttgcagaatttgaaagagggtatgggcgttattgatgttataaaatcactggaaggcgagtatgcttatactatatatgacgtgaactcatccaaactctatttcggcagagatccaattggcaggcgaagtttgtcttattcggtcactccagacaacgaattgtacgtcgctagtgtaacggggtctgctgggtcctttcaagattgtataggtggagttatttatgaatatgatacacgaactaagttgttaaattccaatcagaggtcacatcttccatacgaagtgacatcagagatagatctgaatttcacatcattgtcagaggtgtctaaaaatttatatgctgtgctacgtgattctgtaaaaaaaagggtagagtccatacatcccaggcatattgaaaactctcctattgcggtactattctcaggaggaattgattgttcagtaatagtagcgttgatctgcgaggtgttgcaagaaaatgattataaatgtggaaaaccagttatagagcttctaaatgtatccttcgaaaaccccaggactggtctttttcccagtgatacacctgatagaaaactgtccattaacagtgcaaagactttacaaaacttatatcctaatgttgatatcaaactggttgaagttgacgttccttatgatgagtatttaaaatggaagccatttgttatcaatttaatgtatcctaaacagactgaaatggacttgtctatagccattgcttttttttttgcgtcgagaggtagaggtttcttaacttctctgaatggggaaagaacgccatatcagcgccatgggatagtgttattcagcggactgggagcagacgaactctacggtggatatcacaagtttgccaacaaaccaccccatgaacttgtggaggaacttacaaggcaaataaacaacatttatgatcgcaacctgaatcgtgatgataaagtgatagctcataatggcgtggaggtgagatacccatttttagatgaatatgttataaagttatctacagcagaaattcccattaatttcaaggttaacaaattaatccttcgaaaagttgcctcgcagtatttgaagttggatggaatatcatcagaaccaaaaagggccattcaattcggtgctaaaagcgctaaaatgacaaaggatggtaataagcatggaacagatttattaaaagaaaataggaattgttcataa

SEQ ID NO: 2594 - protein, 525 aa, Saccharomyces cerevisiae
MCGILLHYCPNNNYLNDELIEFPEGTEFGDTTCTNESSIFNKIIPYIAARGPNYSSLRAVKAYRISWFSSVLSLRQPFTKQSINVDDRYFLQFNGELYNKEISQGDNDSLYIASMLQNLKEGMGVIDVIKSLEGEYAYTIYDVNSSKLYFGRDPIGRRSLSYSVTPDNELYVASVTGSAGSFQDCIGGVIYEYDTRTKLLNSNQRSHLPYEVTSEIDLNFTSLSEVSKNLYAVLRDSVKKRVESIHPRHIENSPIAVLFSGGIDCSVIVALICEVLQENDYKCGKPVIELLNVSFENPRTGLFPSDTPDRKLSINSAKTLQNLYPNVDIKLVEVDVPYDEYLKWKPFVINLMYPKQTEMDLSIAIAFFFASRGRGFLTSLNGERTPYQRHGIVLFSGLGADELYGGYHKFANKPPHELVEELTRQINNIYDRNLNRDDKVIAHNGVEVRYPFLDEYVIKLSTAEIPINFKVNKLILRKVASQYLKLDGISSEPKRAIQFGAKSAKMTKDGNKHGTDLLKENRNCS

SEQ ID NO: 2595 - DNA, 1443 bp, Pyrococcus horikoshii OT3
  CDS (1)..(1443): transl_table=11
atgtgcctaattgccggtggctttaagctttacacggatgagataattaggataatcgagcttggtaagcataggggcccagactcctttggcgtttggagtgagagggaggtaattaagtcaagtgatttttctgctcttgaggaggttaagggaggagataaggttttaattcagtgcagactcgcaatgaccggatctaaggagtatacccaaccgttctataacgagatagctctcgttcacaatggggaaatatataatcacgaaaagcttcgagcttatttagttgagagaggaatatcattcgagagtgatgttgatagtgaggtaatactcaggctacttgagtatttactctttgataggaacttatccccttggaacgcaattaaaaagttaatgtggatgcttaggggggattatgcagttgcttttcattacaatggaaagttctacctcttcagggatcccctagggataagacccctctactactcatcacagggtcacttcggatctgagaaaaaagttctctggggtttaggggaagaagctacgcccgtaatgccgggagaggccgttgaaatttctaaatttggaataaatagggtaaggttgtacgatgtgactgcgataaagagctttgggagcgagtactttgatggcttgaggaaccttttaattgactcagttaaaataagaagtagcaaaaaaataggaatattattctctggaggtcttgacagtacgttgatagcatttatagcttcgaggtattctaacgtaactttatacgtttctggtaccgaggacagtaaagacgttgaatgggctagaaaagtttcccaagaactaggattaaagcttaaggagtatatattttccaaggaggaagttgagaaagagctaaagaggattatgtttgcaatcgaggagccaaatccaatgaacctttcaatagcgattcccctttacttctctacaaaacttgcaagagaagatggagttaagattttattgagtggacagggggccgatgagctcttcgggggttatgcaaagtatcttgagaatccgaatctcatgattagcgacgtagcaaatctaggggaaaggaacttagcaagggacgataaggtttccatgattaacggagttgaggttaggtatccgtatcttgatttaccatttgcagtactagctcttaacacacccctgcaacataaaattaaagatgggaagagaaaaataatattaagggagatagccaaaagtctggggcttcccgagtggattgctgagagggaaaagaaagcagctcaatatggaagtaatgctcaaaagattctagagaaaattgcaaaatctcgtggtattaggcttaaagagcttgcttctctcctattctcggaagtttttaggggaatacataaccgataa

SEQ ID NO: 2596 - protein, 480 aa, Pyrococcus horikoshii OT3
MCLIAGGFKLYTDEIIRIIELGKHRGPDSFGVWSEREVIKSSDFSALEEVKGGDKVLIQCRLAMTGSKEYTQPFYNEIALVHNGEIYNHEKLRAYLVERGISFESDVDSEVILRLLEYLLFDRNLSPWNAIKKLMWMLRGDYAVAFHYNGKFYLFRDPLGIRPLYYSSQGHFGSEKKVLWGLGEEATPVMPGEAVEISKFGINRVRLYDVTAIKSFGSEYFDGLRNLLIDSVKIRSSKKIGILFSGGLDSTLIAFIASRYSNVTLYVSGTEDSKDVEWARKVSQELGLKLKEYIFSKEEVEKELKRIMFAIEEPNPMNLSIAIPLYFSTKLAREDGVKILLSGQGADELFGGYAKYLENPNLMISDVANLGERNLARDDKVSMINGVEVRYPYLDLPFAVLALNTPLQHKIKDGKRKIILREIAKSLGLPEWIAEREKKAAQYGSNAQKILEKIAKSRGIRLKELASLLFSEVFRGIHNR

SEQ ID NO: 2597 - DNA, 1728 bp, Anopheles gambiae str. PEST
  CDS (1)..(1728)
atgtgcggaatattttgctacctttgcacaaacaacaatacttcagacggggaactggcactggaaacgtgcagggaccgtctcaagaatcgtggccccaatcacgatgctaccctgtggtacgaatcaagagtgctcttttatggatccgtgctgtggcaccagggcgtatcgttatgtccccagcccattgaaacagatgaaacggtgctcatcttcaatggcgacattttccagaccagggaagatatgcaagagagtgacacgcgttggcttctccacagcattgaacgatgtgccgatgaaaacgccgtttttcatctgttggtcagcttgcgcggtccatttagtgtagtttttctaagaaagcgcgaaaaccgaatttactttgcgcgtgatgcgatcggtcgaaactcgttgcttcttggacttgttgcagatagtggaaatattttcatctcaagcgttggaggactttttgcttccagtgtcgtgcacgaattacctccaaatgggctttactttatcgatttgaagcaaataaatgagccgaactgtatcaccctgctgccatggacagacgattgtacacagacagagcagatgtttggtaatgcactaacaattcaattaaaaaatgagcttcaaaatttcaatttccaccaactgctgactgctgccgatgcatcaccatcggaagaaggccctttcgaaacactgttaaagtgcgctgctgttaacaatacgtgcaatcaactactttccacgctgcttaaatcaatccaggagcgtattacaaacaccacaccgttttgcaagctgtgcgtagcaagtcaatcgacatgtgcgcatccaaaggtgggaattttgttttcaggtggaatcgattgcacgatcctagcactgttagcggatgaatttgtacccgaacccgttccgatcgagctgttgaatgtggcctttgaaaaggtgaaccgcgcaaatgtacaacgctcacaaattgattggaacgtgccggatcgattgaccggactatctacgctagaggaactgcaacgcattaaacccaatcgaaaatggaattttgtagagataaacatctctcggcacgagttaaatgagcaaaggaaaacgatttctaatctcgtgttcccgttgcgaaatgtgttggacgaatcgttgggtgctgccctttggtttgcttcgaagggcgttggagtgaaaggcggagaaccgtacacgagcactagccgggtactattattaggctcaggtgccgatgaactattcggcggatacacaagacacaaaacagcgttcgatcgaacccttcggctgcatcaagagaaaggtacgaccgcacacatggacgacgctttcctgaaagcttacgaagcgttagaggaagagctgaatttagactggcggcgcttgccaagcagaaatttggcacgtgatgatagggtaatcagcgacaatggagtgacacccaggactccgtatctgcaggaagattttatcgcgttagtacgttccttgaaagcgtcccagcgctgttaccatcccttgggaccggggataggggacaagctcgtactacgcttgtgtgcctacaaactcggcctaaagcaagcaagcgtgttaagaaagcgtgctttacaattcggctccagaatagccgatcgaaagcagaatgcaacggaccggtctgcatacttggaagactaa

SEQ ID NO: 2598 - protein, 575 aa, Anopheles gambiae str. PEST
MCGIFCYLCTNNNTSDGELALETCRDRLKNRGPNHDATLWYESRVLFYGSVLWHQGVSLCPQPIETDETVLIFNGDIFQTREDMQESDTRWLLHSIERCADENAVFHLLVSLRGPFSVVFLRKRENRIYFARDAIGRNSLLLGLVADSGNIFISSVGGLFASSVVHELPPNGLYFIDLKQINEPNCITLLPWTDDCTQTEQMFGNALTIQLKNELQNFNFHQLLTAADASPSEEGPFETLLKCAAVNNTCNQLLSTLLKSIQERITNTTPFCKLCVASQSTCAHPKVGILFSGGIDCTILALLADEFVPEPVPIELLNVAFEKVNRANVQRSQIDWNVPDRLTGLSTLEELQRIKPNRKWNFVEINISRHELNEQRKTISNLVFPLRNVLDESLGAALWFASKGVGVKGGEPYTSTSRVLLLGSGADELFGGYTRHKTAFDRTLRLHQEKGTTAHMDDAFLKAYEALEEELNLDWRRLPSRNLARDDRVISDNGVTPRTPYLQEDFIALVRSLKASQRCYHPLGPGIGDKLVLRLCAYKLGLKQASVLRKRALQFGSRIADRKQNATDRSAYLED

SEQ ID NO: 2599 - DNA, 1554 bp, Candida glabrata CBS 138
  CDS (1)..(1554)
atgtgtggtatattactttgctatgggccaagtttcaaagctgaaaatgaccggttactggagttttatgaggatgaagttcccaggttaggttacgatgataatattgaatcaattgtgaaattggtaagatgtagaggaccaaactactgctctatgagacaaataaaagatgttaattccatttggatatcctctgtgctatcgctacgtcaaccgtttactaaacaaagcatagttattggaaataagtatgtgttacaatttaacggcgagttatataatgacgaaataattgaaagtgggaatgatacacaatttttatctggactattgaaaaaatgtatttctgaagatgatatcttcaacattttacatggcttagatggggaatttgcgttcacaatacaagatttagagaacaatctaatatactttggtagagacactataggtaaaaggagtttgtcatattcattaaactacaatattagtgagttgatagttactagtgtatctggaagtgataatggtagtagaatatttaacgattgtgtggcaggggtcatttataaatatgatattgatagaaacattcttgatacaacaagcactcttcgaaaaccttggtcaatcacaagagaacatgatgatgacatgacacatattgacacatgtaccaagaatttatatgacttactaagcggtgctacaagaaagcgagtagagtctatacaccctttacatatagagaattcacctatatcaatccttttttcaggagggcttgactgttcagttataactgcaatcgtatgtgagacattaatctctaggaatatgcatgatcatgcaaccattgaacttcttaatgttgcttttgaaaacttgaggacaggaatgatgccacaagatgcaccagataggcaacttgcagtaaaaagttactcggaactctgcgaaaagtatccaaatattaatatcaagcttatagaagttgatgtgtcctatgctgaatatatgaaacatagaccagaagtagtcgatttgatgtaccctaaaaataccgaaatggatttatcaatcgcaattgccttttattttgcatctagaggagacggctttattactgatgaaaatggtgtcagaaaagaatataaaaggaagggacttgttttatttagtggacttggtgctgatgagctatacggaggatattataaactgagcaataagcacgaagatgaattggctaacgaactgaccacacagatcaataatatttaccgcagaaacttgaatagagacgacaaggtgatagcctccaacggtgtggaggtacgctacccattcttagcagaagaagtggtagagttctctactgcgagtattcctttaaattacaagagggacaagatgatcttaagaaacattgcatcttccatcttgggtttacatggtttatcggcagaaaagaagagggctattcaattcggggcaaaatcagctaagatgacaaagaacggtaataaaaacggtactgatctgctctga

SEQ ID NO: 2600 - protein, 517 aa, Candida glabrata CBS 138
MCGILLCYGPSFKAENDRLLEFYEDEVPRLGYDDNIESIVKLVRCRGPNYCSMRQIKDVNSIWISSVLSLRQPFTKQSIVIGNKYVLQFNGELYNDEIIESGNDTQFLSGLLKKCISEDDIFNILHGLDGEFAFTIQDLENNLIYFGRDTIGKRSLSYSLNYNISELIVTSVSGSDNGSRIFNDCVAGVIYKYDIDRNILDTTSTLRKPWSITREHDDDMTHIDTCTKNLYDLLSGATRKRVESIHPLHIENSPISILFSGGLDCSVITAIVCETLISRNMHDHATIELLNVAFENLRTGMMPQDAPDRQLAVKSYSELCEKYPNINIKLIEVDVSYAEYMKHRPEVVDLMYPKNTEMDLSIAIAFYFASRGDGFITDENGVRKEYKRKGLVLFSGLGADELYGGYYKLSNKHEDELANELTTQINNIYRRNLNRDDKVIASNGVEVRYPFLAEEVVEFSTASIPLNYKRDKMILRNIASSILGLHGLSAEKKRAIQFGAKSAKMTKNGNKNGTDLL

SEQ ID NO: 2601 - DNA, 1548 bp, Kluyveromyces lactis NRRL Y-1140
  CDS (1)..(1548)
atgtgtggtattttggcatattttggtaaatcatttggatcaactcttactgatgaattccaagaactatacgagaaagacctaacaggaccaatacagtcatgtaatagtaatacgttatttaatgaactgataccgtatatcgtgagaagaggtccaaactatgcgtcattgagatcgttatctgaaattaatgctatgttgttctcatctgtattatctttaagaacaccattcacgaaacaaagcgtcatggtacaagatcgttaccttctacagtataacggggaactgtataatgatgatactgttgaaaattgtgaacacagtgatacggaatatatttcttcacttttggaaaagcattctgttgaagaggtagtaaggaaatgttatggagaatttgcgtacgcaattactgatcttcaagaacgaaaggtatattttgggagagatagcatcggtaagcgaagcttgagctacatattacttgatgatgagctatatattaccagtgtaagtggaagatgtgacggtttccagaactgtctagccggtgtcatttatatctttgatattaatactaaacaactcacaggttccgttaaaattcacgatgagccatacatagtctccgaccagattgataatgatttccaattattagaagagtataagattaaattgtacgagtgccttagacgatcggtataccaaagaatagttacaattcatcctatgcatttggaaaacggaaatattagcattttattttctggtggattagattgttccgtaatcacagcactactgtgtgaacaactcattaaaattaataggaattctgaaacgataattgagcttctgaatgttggttttgaaaatcctagaactggtaaaatgccatcagactcgcctgacagaatattagcaataaaatctgcacaacttttaagtgaactgtatccgcaggttaacataaaactaattgaagtagacgtaccatacacagattatctttcgcataaggatacagttatagatctcatgtatccgaagaatacagaaatggatctctcgatagcaattgcattttatttcgcctcaagaggccgcggtaaagtcacagaaaatggggagagtaaaccatataatagatctggtattgtaatgttcagtggattgggagctgatgagttatacgggggctaccataaattttcaaataagtcaaacgaagaacttgtgatagaacttcagaaacaaatagctcaaattcatgacagaaatttgaaccgagatgataaggttatttccaatcatggtattgaagtcagatatcctttcttggatgaaagagttgttcagttttcagtggatttaccactaaactacaaggttaacaagcatatattgcgtgtcatggcgaaggacattttacgcctcgatttcattagtgaagagccaaagagagcaatccaattcggagcaagaagtgccaaaatgacaaaagacagtaacaaaaggggtactgatttactgaagtaa

SEQ ID NO: 2602 - protein, 515 aa, Kluyveromyces lactis NRRL Y-1140
MCGILAYFGKSFGSTLTDEFQELYEKDLTGPIQSCNSNTLFNELIPYIVRRGPNYASLRSLSEINAMLFSSVLSLRTPFTKQSVMVQDRYLLQYNGELYNDDTVENCEHSDTEYISSLLEKHSVEEVVRKCYGEFAYAITDLQERKVYFGRDSIGKRSLSYILLDDELYITSVSGRCDGFQNCLAGVIYIFDINTKQLTGSVKIHDEPYIVSDQIDNDFQLLEEYKIKLYECLRRSVYQRIVTIHPMHLENGNISILFSGGLDCSVITALLCEQLIKINRNSETIIELLNVGFENPRTGKMPSDSPDRILAIKSAQLLSELYPQVNIKLIEVDVPYTDYLSHKDTVIDLMYPKNTEMDLSIAIAFYFASRGRGKVTENGESKPYNRSGIVMFSGLGADELYGGYHKFSNKSNEELVIELQKQIAQIHDRNLNRDDKVISNHGIEVRYPFLDERVVQFSVDLPLNYKVNKHILRVMAKDILRLDFISEEPKRAIQFGARSAKMTKDSNKRGTDLLK

SEQ ID NO: 2603 - DNA, 2037 bp, Debaryomyces hansenii CBS767
  CDS (1)..(2037)
atgtgtggaatactttgtcgcgtgaaacttggtagtgatataaaccatccagcgatactcacacctctttccactgaaaatatcttcaccaaatgggaaagtgacgatgtgcaatatattttgaaaaattttattgacattgatttgcaaagcgatttgaaactaaatgtctctgaccaaaacaaactagccaatcttgaggagttacgaaacctcaattcccagctcattaaattgaataatgtgataaagaaaaatgatcgagctgatgctgctaaaactgacatacaagcgaagatcgatgagatcataggaacagaattacaagacgaatataatgctgaaactccggacatcttcgagtcattgatgataaaaatagccagtagagggccagactatttgctgtatttgcaatttatagattcaagcaacagcttccagttcttctcgtcaatcttgtcattgagacaaccgttttattctcagcccattcataatcataatcataatctaatcctacaattcaacggtgaactttacaacctggaatgtttacaatcaaatgatacagagtttattatggaacgtcttgtctataatatctcgtcgtccaacagaaacgatggaatattgaaaactataaccgacctaaacggggaatttgcatttactatatacgatcttcttgaatcaaagctatattttggtagggactacattggtcggagatctttgctctataatattgataatcttgattcattagagagtggttctgaaattatcatcagttctttacccccaggtcattccaatagttttaaagagtgtaaaagcaatgaaatcaaagtatttaactttaaagatttaattttaaatactgtttattacgaatctctctgggataagtatggttcgtctaacaatttgaactttaatcccgtttctagtttgtttaactttgagaaacccttagacgataagttacttaaattgtttgagactttgaatgatgcatgctacataagacaatcgacgatacagccgctacacccagatataaaggaagcaaatattggtatcttattttcaggtggattggattgcacaattttagcagccttgataagcaaaaacttacaagaggttccaaattccaaaattgacttaattactgtaggtttcgataaccctagaacaaacttgaaagcgtctgagtctccagataggcagttaagtaagaagtcctggttccacttatgcaagttgttcaacaacgataatttttcaataaggctaattgaaataaacgtcgattataaggaatggttggttaataaaaaaagggtggaaaaattaatgtatccttgtaacactgaaatggacttgtcgatagcaattgcattctactttgcaagtaagtgtgataatggtttaaaattagatttgaacgacccgactgtaatgtgggaggaatttaaactagatgaatcaaaatacatgaatattcaaaagggttataagtcttatgcaaaggtattgttctctggtttgggtgcagatgaattgtttgctggttattcccggcacgaatcagttttcaattcgttaattaagccagatgacccaggctataatgagcaaagacttgacaaatacaatgacttatctgattctttaatttacgatataaaaattattcatgagcgaaatttaggaagagatgatcgggtgatctcatcctggggtaaggaattaagatatccataccttgatgaaaagtttattaattatgtcgttaatgaagttgaacccaatttgaagctttactttgattgggaattggtgaagacaaagaagaaaggtgaaaagttagtgatgaagcctattagaaaatggattttgcgagaattagccgaatacttagaattatattgggtaaaagatgaattgaaaagagccatccaatttggtgctaagagtgcaaagatggagattggccaaagcaaagtcaaaggtacagatagtttatag

SEQ ID NO: 2604 - protein, 678 aa, Debaryomyces hansenii CBS767
MCGILCRVKLGSDINHPAILTPLSTENIFTKWESDDVQYILKNFIDIDLQSDLKLNVSDQNKLANLEELRNLNSQLIKLNNVIKKNDRADAAKTDIQAKIDEIIGTELQDEYNAETPDIFESLMIKIASRGPDYLLYLQFIDSSNSFQFFSSILSLRQPFYSQPIHNHNHNLILQFNGELYNLECLQSNDTEFIMERLVYNISSSNRNDGILKTITDLNGEFAFTIYDLLESKLYFGRDYIGRRSLLYNIDNLDSLESGSEIIISSLPPGHSNSFKECKSNEIKVFNFKDLILNTVYYESLWDKYGSSNNLNFNPVSSLFNFEKPLDDKLLKLFETLNDACYIRQSTIQPLHPDIKEANIGILFSGGLDCTILAALISKNLQEVPNSKIDLITVGFDNPRTNLKASESPDRQLSKKSWFHLCKLFNNDNFSIRLIEINVDYKEWLVNKKRVEKLMYPCNTEMDLSIAIAFYFASKCDNGLKLDLNDPTVMWEEFKLDESKYMNIQKGYKSYAKVLFSGLGADELFAGYSRHESVFNSLIKPDDPGYNEQRLDKYNDLSDSLIYDIKIIHERNLGRDDRVISSWGKELRYPYLDEKFINYVVNEVEPNLKLYFDWELVKTKKKGEKLVMKPIRKWILRELAEYLELYWVKDELKRAIQFGAKSAKMEIGQSKVKGTDSL

SEQ ID NO: 2605 - DNA, 1452 bp, Thermococcus kodakarensis KOD1
  CDS (1)..(1452): transl_table=11
atgtgcctcatcgctggcggaatgggggggaatctcagagaaaagctcatcaaaatggcgatagcaggaaagcacaggggccctgaaagttttggggtctggaccgatgggggagtcctcaaatctgatgacttttcaaagctgaccgagattccagacgggagaatcggtctcctccagtgcaggctggccataactggttcaaagagctttactcaaccattcataaacgatctagcccttgttcacaacggtgagatatacaaccatgcggcgctgagagaatacctggagaggagaggcgtttcttttgagagcgacgttgacagcgaggttgtacttaggcttatcgagtttttgagggaagaacatctgagctatcccgagatagttaaaaaactcttctggatgcttgagggggactacgccgttgccttctcagatggagagcgcatctacctgtttagagatcctctggggatcaggccgctctacttctcacgtaacggcctgtttgcaagcgagaagaaagtcctctgggcggtgggcgagagggaagttgaacccgtccagccgggggagctcgtcgttcttgaaaagaacggggtgaggcgggccaggctgttctcccttgagaacctaaaatccaaagcaaaatgcgaaaggaaagacccggttggcggcgttggaaaactccttagatatgcagtgaagaacagggtcagcaaaaaaacgggagttctgttttccggcggcttggacagcactctggtcgcttacctggcttcgcagtactccgacgtgatactgtacacggctggaactgaggacagtcccgacatagagtgggccaggaaagtggccgaccactttggctgggcgctgagggagagaacttttgaagtcgaggatgtcagagatgccgtgaaaagagtaatgtacgccatcgaagagcccaacccgatgaacctcgcaattggactgccgctttactttgcctctggtctagcttcttcagacggtacgcgcgtcctcctcagcgggcagggggcggacgagctcttcggaggctacgcaaagtaccttgagagacccgaacttatggaagaggacatagccctcatctccgagaggaacctcgcgagggacgacaagataacaatgctgaacggagttgaaggaagatatcccttcctcgcccttcctgtggtgagctttgcccttaaactgccgctcgaagctaagatagtggatggaaccagaaaagtcatcctcaggaaactcgccctgcgtctcggaatccccgagtggatagcggagagggagaagagggccgcgcagtacggcagcagggcgcagaagctccttgagaagatagccagagaagagggcctaacgctcagagagttcgcggagaaactcttcagggagacgttcccaaacgctttttaa

SEQ ID NO: 2606 - protein, 483 aa, Thermococcus kodakarensis KOD1
MCLIAGGMGGNLREKLIKMAIAGKHRGPESFGVWTDGGVLKSDDFSKLTEIPDGRIGLLQCRLAITGSKSFTQPFINDLALVHNGEIYNHAALREYLERRGVSFESDVDSEVVLRLIEFLREEHLSYPEIVKKLFWMLEGDYAVAFSDGERIYLFRDPLGIRPLYFSRNGLFASEKKVLWAVGEREVEPVQPGELVVLEKNGVRRARLFSLENLKSKAKCERKDPVGGVGKLLRYAVKNRVSKKTGVLFSGGLDSTLVAYLASQYSDVILYTAGTEDSPDIEWARKVADHFGWALRERTFEVEDVRDAVKRVMYAIEEPNPMNLAIGLPLYFASGLASSDGTRVLLSGQGADELFGGYAKYLERPELMEEDIALISERNLARDDKITMLNGVEGRYPFLALPVVSFALKLPLEAKIVDGTRKVILRKLALRLGIPEWIAEREKRAAQYGSRAQKLLEKIAREEGLTLREFAEKLFRETFPNAF

SEQ ID NO: 2607 - DNA, 1647 bp, Schizosaccharomyces pombe
  CDS (1)..(1647)
atgtgcggaattcttttcgccttagcggaagacagagataatcttcttgaaagtccatctttttcagctttacgaaaaaggattcgggctagaggacctgatttttttggtaagcataaattgaatagcggaccttggaatttgcactttgagtcaagcgttttgcatttacgtggcccttctgatcatttaacgcctcaacctcatgttgacagttttggaaacgttttgtgttggaatggagaaatttggcaaataaaccatagcgatcatcacaaatttacgctcaatcgtaatgaaaacgacggtgcaaaactttttgaacttttaaacaataacccgggcgacattgaaaaaattttgggaagtattcaaggaccttttgcttttgtttactaccaagttcgtacaaacacattgtggtggggaagagatcgcttaggaagaagatcccttttgtatagtttacgagatagtaatttcgttctctcaagtgtaggaaattctagtgatttccgagaagttgagcctgggtttcatagtgtgcaggtggacttgatcccaaaaattaacttctctaaatcattaatgcaactggaaaaaacaaaccctcttcctcctgtggatgagtcctttctcatgggctcaatctcttcagacactgtggacacattgcatacatatcttatcaaagcgcttcaagatagagttttaacaatccccaaactgtgctcttcaaaccttgactgtagtcattatagccgagtttgcgttctttactctgggggagtggattgcggtgtattagcacggctaatgcacgacatagttcccaataacgagtccatcgatttaattaatgtggcttttgaaaacccaagatttacagagacataccgtgacagagagacgggacttcttcctgacaattttgatgcatacgacgtatgtcctgatagacaaactggattacaaggctggcaggagcttatttcagtttgccctgctcgaaaatggaattttgttgctataaacgttccttatacagaagtatgtgaagcacaggaaatagtcaaaacacttatctatccgaacgattcagttatggatctttctattggattagctttttattttgcttcacaagggcgtggtgtacttttacaaaacgtggatgatatcaaactgaaacatcaattaccttcctatactataaaagctaaagtcctcatcagtggcctgggggctgatgagcagctcggtggttatatgcggcacctacgagcgtttgaacggaaaggtatggccggtcttgaagaagaactgcaattggacattgatcgtattccacatcgtaacttgggcagagatgacagggtaatgtctaatcaagggaaagaggtgcgttatccttttctcgatgagcgtctgatggctttgtttagcaaaatgaaaactactgataaaatgcgtctagatttagttggaggtgacaaactaattttacgtgaattaggacgtcgattaggttgtcccttagctagtcaagaaaaaaagagggctattcagtttggttctaaagcagcaaagatgactcctggaaccggtagaacatcaggtcgtaaaaagttagaagtttgtatttaa

SEQ ID NO: 2608 - protein, 548 aa, Schizosaccharomyces pombe
MCGILFALAEDRDNLLESPSFSALRKRIRARGPDFFGKHKLNSGPWNLHFESSVLHLRGPSDHLTPQPHVDSFGNVLCWNGEIWQINHSDHHKFTLNRNENDGAKLFELLNNNPGDIEKILGSIQGPFAFVYYQVRTNTLWWGRDRLGRRSLLYSLRDSNFVLSSVGNSSDFREVEPGFHSVQVDLIPKINFSKSLMQLEKTNPLPPVDESFLMGSISSDTVDTLHTYLIKALQDRVLTIPKLCSSNLDCSHYSRVCVLYSGGVDCGVLARLMHDIVPNNESIDLINVAFENPRFTETYRDRETGLLPDNFDAYDVCPDRQTGLQGWQELISVCPARKWNFVAINVPYTEVCEAQEIVKTLIYPNDSVMDLSIGLAFYFASQGRGVLLQNVDDIKLKHQLPSYTIKAKVLISGLGADEQLGGYMRHLRAFERKGMAGLEEELQLDIDRIPHRNLGRDDRVMSNQGKEVRYPFLDERLMALFSKMKTTDKMRLDLVGGDKLILRELGRRLGCPLASQEKKRAIQFGSKAAKMTPGTGRTSGRKKLEVCI

SEQ ID NO: 2609 - DNA, 25 bp, Artificial sequence
  primer
atgtgcgggattctattgcattatt

SEQ ID NO: 2610 - DNA, 29 bp, Artificial sequence
  primer
ttatgaacaattcctattttcttttaata

SEQ ID NO: 2611 - protein, 748 aa, Artificial sequence
  consensus sequence
  Variant (3)..(3): Xaa in position 3 is any amino acid
  Variant (5)..(51): Xaa in position 5 to 51 is any amino acid
  Variant (52)..(153): Xaa in position 52 to 153 is any or no amino acid
  Variant (155)..(171): Xaa in position 155 to 171 is any amino acid
  Variant (172)..(175): Xaa in position 172 to 175 is any or no amino acid
  Variant (177)..(178): Xaa in position 177 to 178 is any amino acid
  Variant (182)..(191): Xaa in position 182 to 191 is any amino acid
  Variant (192)..(203): Xaa in position 192 to 203 is any or no amino acid
  Variant (205)..(225): Xaa in position 205 to 225 is any amino acid
  Variant (226)..(235): Xaa in position 226 to 235 is any or no amino acid
  Variant (237)..(238): Xaa in position 237 to 238 is any amino acid
  Variant (240)..(248): Xaa in position 240 to 248 is any amino acid
  Variant (249)..(250): Xaa in position 249 to 250 is any or no amino acid
  Variant (252)..(253): Xaa in position 252 to 253 is any amino acid
  Variant (256)..(257): Xaa in position 256 to 257 is any amino acid
  Variant (259)..(259): Xaa in position 259 is any amino acid
  Variant (261)..(261): Xaa in position 261 is any amino acid
  Variant (263)..(321): Xaa in position 263 to 321 is any amino acid
  Variant (322)..(374): Xaa in position 322 to 374 is any or no amino acid
  Variant (376)..(378): Xaa in position 376 to 378 is any amino acid
  Variant (380)..(385): Xaa in position 380 to 385 is any amino acid
  Variant (387)..(393): Xaa in position 387 to 393 is any amino acid
  Variant (394)..(411): Xaa in position 394 to 411 is any or no amino acid
  Variant (417)..(417): Xaa in position 417 is any amino acid
  Variant (419)..(433): Xaa in position 419 to 433 is any amino acid
  Variant (434)..(443): Xaa in position 434 to 443 is any or no amino acid
  Variant (445)..(449): Xaa in position 445 to 449 is any amino acid
  Variant (451)..(452): Xaa in position 451 to 452 is any amino acid
  Variant (453)..(476): Xaa in position 453 to 476 is any or no amino acid
  Variant (479)..(488): Xaa in position 479 to 488 is any amino acid
  Variant (490)..(519): Xaa in position 490 to 519 is any amino acid
  Variant (520)..(529): Xaa in position 520 to 529 is any or no amino acid
  Variant (531)..(531): Xaa in position 531 is any amino acid
  Variant (535)..(539): Xaa in position 535 to 539 is any amino acid
  Variant (543)..(551): Xaa in position 543 to 551 is any amino acid
  Variant (552)..(581): Xaa in position 552 to 581 is any or no amino acid
  Variant (584)..(584): Xaa in position 584 is any amino acid
  Variant (587)..(587): Xaa in position 587 is any amino acid
  Variant (593)..(593): Xaa in position 593 is any amino acid
  Variant (597)..(615): Xaa in position 597 to 615 is any amino acid
  Variant (616)..(643): Xaa in position 616 to 643 is any or no amino acid
  Variant (647)..(647): Xaa in position 647 is any amino acid
  Variant (651)..(651): Xaa in position 651 is any amino acid
  Variant (653)..(656): Xaa in position 653 to 656 is any amino acid
  Variant (658)..(658): Xaa in position 658 is any amino acid
  Variant (660)..(660): Xaa in position 660 is any amino acid
  Variant (664)..(664): Xaa in position 664 is any amino acid
  Variant (666)..(683): Xaa in position 666 to 683 is any amino acid
  Variant (684)..(705): Xaa in position 684 to 705 is any or no amino acid
  Variant (707)..(707): Xaa in position 707 is any amino acid
  Variant (711)..(725): Xaa in position 711 to 725 is any amino acid
  Variant (726)..(726): Xaa in position 726 is any or no amino acid
  Variant (730)..(730): Xaa in position 730 is any amino acid
  Variant (732)..(732): Xaa in position 732 is any amino acid
  Variant (734)..(737): Xaa in position 734 to 737 is any amino acid
  Variant (739)..(746): Xaa in position 739 to 746 is any amino acid
  Variant (747)..(747): Xaa in position 747 is any or no amino acid
MCXIXXXXXXXXXXXXXXXXXXXXXXXXXXXXXXXXXXXXXXXXXXXXXXXXXXXXXXXXXXXXXXXXXXXXXXXXXXXXXXXXXXXXXXXXXXXXXXXXXXXXXXXXXXXXXXXXXXXXXXXXXXXXXXXXXXXXXXXXXXXXXXXXXXXXXLXXXXXXXXXXXXXXXXXXXXXLXXNGEXXXXXXXXXXXXXXXXXXXXXXDXXXXXXXXXXXXXXXXXXXXXXXXXXXXXXXGXXAXXXXXXXXXXXYXXRDXXGXRXLXXXXXXXXXXXXXXXXXXXXXXXXXXXXXXXXXXXXXXXXXXXXXXXXXXXXXXXXXXXXXXXXXXXXXXXXXXXXXXXXXXXXXXXXXXXXXXXXXXXXXXXXXXXXXXXXLXXXLXXXXXXRXXXXXXXXXXXXXXXXXXXXXXXXXLFSGGXDXXXXXXXXXXXXXXXXXXXXXXXXXLXXXXXEXXXXXXXXXXXXXXXXXXXXXXXXXXPDXXXXXXXXXXLXXXXXXXXXXXXXXXXXXXXXXXXXXXXXXXXXXXXXXXXMXLSIXXXXXFASXXXXXXXXXXXXXXXXXXXXXXXXXXXXXXXXXXXXXXXVLXSGXGADELXGGYXXXXXXXXXXXXXXXXXXXXXXXXXXXXXXXXXXXXXXXXXXXXXXXRNLXRDDXVXXXXGXEXRYPXLXXXXXXXXXXXXXXXXXXXXXXXXXXXXXXXXXXXXXXXXKXILRXXXXXXXXXXXXXXXXKRAXQXGXXXXKXXXXXXXXXG

SEQ ID NO: 2612 - protein, 38 aa, Artificial sequence
  protein pattern
  Variant (2)..(9): Xaa in position 2 to 9 is any amino acid
  Variant (10)..(11): Xaa in position 10 to 11 is any or no amino acid
  Variant (13)..(13): Xaa in position 13 is any or no amino acid
  Variant (16)..(16): Xaa in position 16 is Ala, Gly or Asn
  Variant (20)..(20): Xaa in position 20 is Lys or Arg
  Variant (22)..(25): Xaa in position 22 to 25 is any amino acid
  Variant (27)..(27): Xaa in position 27 is any amino acid
  Variant (28)..(28): Xaa in position 28 is Glu or Thr
  Variant (29)..(29): Xaa in position 29 is Leu, Pro or Val
  Variant (31)..(31): Xaa in position 31 is any amino acid
  Variant (33)..(33): Xaa in position 33 is Phe or Tyr
  Variant (35)..(35): Xaa in position 35 is Ala, Asp or Gln
  Variant (36)..(37): Xaa in position 36 to 37 is any amino acid
  Variant (38)..(38): Xaa in position 38 is Phe, Leu or Val
LXXXXXXXXXXRXNLXRDDXVXXXXGXXXRXPXLXXXX

SEQ ID NO: 2613 - protein, 13 aa, Artificial sequence
  protein pattern
  Variant (2)..(2): Xaa in position 2 is Asp or Asn
  Variant (4)..(4): Xaa in position 4 is Ala or Ser
  Variant (6)..(6): Xaa in position 6 is Ala or Gly
  Variant (7)..(7): Xaa in position 7 is Ile or Leu
  Variant (8)..(8): Xaa in position 8 is Ala or Pro
  Variant (9)..(9): Xaa in position 9 is Phe or Leu
  Variant (10)..(10): Xaa in position 10 is Phe or Tyr
  Variant (12)..(12): Xaa in position 12 is any or no amino acid
MXLXIXXXXXFXS

SEQ ID NO: 2614 - protein, 17 aa, Artificial sequence
  protein pattern
  Variant (2)..(2): Xaa in position 2 is Leu or Met
  Variant (3)..(3): Xaa in position 3 is Phe, Ile or Leu
  Variant (4)..(4): Xaa in position 4 is any amino acid
  Variant (6)..(6): Xaa in position 6 is any amino acid
  Variant (11)..(11): Xaa in position 11 is any or no amino acid
  Variant (13)..(13): Xaa in position 13 is any amino acid
  Variant (14)..(14): Xaa in position 14 is any or no amino acid
  Variant (16)..(16): Xaa in position 16 is any or no amino acid
VXXXGXGADEXLXXGXY

SEQ ID NO: 2615 - protein, 11 aa, Artificial sequence
  protein pattern
  Variant (3)..(3): Xaa in position 3 is Ala, Ile or Leu
  Variant (5)..(5): Xaa in position 5 is Phe or Tyr
  Variant (7)..(7): Xaa in position 7 is Ala or Ser
  Variant (8)..(8): Xaa in position 8 is Lys or Arg
  Variant (9)..(9): Xaa in position 9 is any amino acid
  Variant (10)..(10): Xaa in position 10 is Ala or Gln
  Variant (11)..(11): Xaa in position 11 is Asp or Lys
RAXQXGXXXXX

SEQ ID NO: 2616 - protein, 16 aa, Artificial sequence
  protein pattern
  Variant (2)..(2): Xaa in position 2 is any amino acid
  Variant (6)..(6): Xaa in position 6 is Ile or Leu
  Variant (8)..(8): Xaa in position 8 is Cys or Ser
  Variant (9)..(9): Xaa in position 9 is Ser or Thr
  Variant (10)..(11): Xaa in position 10 to 11 is Ile, Leu or Val
  Variant (12)..(12): Xaa in position 12 is Ala, Thr or Val
  Variant (13)..(13): Xaa in position 13 is any amino acid
  Variant (14)..(14): Xaa in position 14 is Ile or Leu
  Variant (15)..(15): Xaa in position 15 is Ala, Ile, Leu or Val
  Variant (16)..(16): Xaa in position 16 is Cys, Asp or Ser
LXSGGXDXXXXXXXXX

SEQ ID NO: 2617 - protein, 11 aa, Artificial sequence
  protein pattern
  Variant (3)..(3): Xaa in position 3 is any amino acid
  Variant (4)..(4): Xaa in position 4 is Ile or Leu
  Variant (6)..(6): Xaa in position 6 is any amino acid
  Variant (8)..(8): Xaa in position 8 is Pro or Ser
  Variant (10)..(10): Xaa in position 10 is any or no amino acid
RDXXGXRXLXY

SEQ ID NO: 2618 - protein, 9 aa, Artificial sequence
  protein pattern
  Variant (2)..(2): Xaa in position 2 is any amino acid
  Variant (3)..(3): Xaa in position 3 is Phe, His, Trp or Tyr
  Variant (7)..(7): Xaa in position 7 is Ile or Leu
  Variant (8)..(8): Xaa in position 8 is Trp or Tyr
  Variant (9)..(9): Xaa in position 9 is Asn or Gln
LXXNGEXXX

SEQ ID NO: 2619 - DNA, 474 bp, Saccharomyces cerevisiae
  CDS (1)..(474)
atgaacggcggaggcaagaatgttttgaataaaaactcagtgggctcagtatcagaagttggtccggactcaacacaagaggaaacgccacgagatgtccgtcttttgcatctgctcctcgcatcacagtcgattcatcaatatgaggaccaagtaccgctacaattgatggattttgcacataggtacacacaaggagtccttaaggacgcgttggtttacaacgactacgctggcagtggaaattctgccggcagtggattaggagtagaagacatacggcttgccattgcagcgagaacacaataccaatttaagcctacggcacctaaggagctcatgttacagttagctgcggaaagaaacaagaaggcattacctcaagtgatgggtacgtggggtgtcaggcttcccccagaaaaatattgtctcacagcgaaggagtgggaccttgaggacccaaagtctatgtga

SEQ ID NO: 2620 - protein, 157 aa, Saccharomyces cerevisiae
MNGGGKNVLNKNSVGSVSEVGPDSTQEETPRDVRLLHLLLASQSIHQYEDQVPLQLMDFAHRYTQGVLKDALVYNDYAGSGNSAGSGLGVEDIRLAIAARTQYQFKPTAPKELMLQLAAERNKKALPQVMGTWGVRLPPEKYCLTAKEWDLEDPKSM

SEQ ID NO: 2621 - DNA, 534 bp, Glycine max
  CDS (1)..(534)
atgggtgacaaagaggaagagtcggcaatgccaagggacgcaaagattgtgaagtctttgctgaaatcaatgggcgtggaggactacgaacctcgcgtcattcacaagtttcttgagctttggtatcgctacgtcgtcgatgtcttaaccgacgcacaagtctattcagagcatgctggaaaacctgcaattgactgtgacgacgttaagcttgcgattcagtccaaggtcaacttcagcttctcgcaaccaccccctcgtgaggtgcttctggagttggctcaaaaccgcaacaagataccattgccaaagactatagcaggacctggtatcccacttccacctgatcaggacacattaatcagtccaaactaccagtttgcaattcctaacaaaaggcctgcccaacctttagaagaaacagaggatgaagaagctaccattcccaatccctctcaggaacagaaggtagacacgcagccgaatccccatcagagagtgtcatttcccctgcccaaacgccaaaaggattaa

SEQ ID NO: 2622 - protein, 177 aa, Glycine max
MGDKEEESAMPRDAKIVKSLLKSMGVEDYEPRVIHKFLELWYRYVVDVLTDAQVYSEHAGKPAIDCDDVKLAIQSKVNFSFSQPPPREVLLELAQNRNKIPLPKTIAGPGIPLPPDQDTLISPNYQFAIPNKRPAQPLEETEDEEATIPNPSQEQKVDTQPNPHQRVSFPLPKRQKD

SEQ ID NO: 2623 - DNA, 525 bp, Glycine max
  CDS (1)..(525)
atggctgacaaagaggaagagtcggcaatgccaagggacgcgaagattgtgaagtctttgctgaaatcaatgggcgtagaagactacgaacctcgcgtcattcacaagtttctagagctatggtatcgctacgttgtcgatgtgttaaccgatgcacaagtctattcagagcatgctggaaaatctgcaattgactgtgacgacgttaagcttgcgattcagtccaaggtcaacttcagcttctcgcaaccaccccctcgtgaggtgcttctggagttggctcaaaaccgcaacaagataccgttgccaaagactatagcaggacctggtatcccacttccacctgatcaggacacattaatcagtcctaactaccagtttgcaattcctaacaaaaggcctgccgaacctttagaagaaacagaggatgaagaagctaccattcccaatccctctcaggaagacgtgcagccgaatccccatcagagagtgtcatttcccctgcccaaacgccaaaaggattaa

SEQ ID NO: 2624 - protein, 174 aa, Glycine max
MADKEEESAMPRDAKIVKSLLKSMGVEDYEPRVIHKFLELWYRYVVDVLTDAQVYSEHAGKSAIDCDDVKLAIQSKVNFSFSQPPPREVLLELAQNRNKIPLPKTIAGPGIPLPPDQDTLISPNYQFAIPNKRPAEPLEETEDEEATIPNPSQEDVQPNPHQRVSFPLPKRQKD

SEQ ID NO: 2625 - DNA, 552 bp, Arabidopsis thaliana
  CDS (1)..(552)
atggcaggagaaggtgaagaagatgtacctagagatgctaagattgtgaaatctctgcttaagtcgatgggtgtagaagactacgagcctcgtgtgatacatcagtttctggagttatggtaccggtatgtggtcgaagtgttgacagatgctcaggtttactcagagcatgctagcaaacccaacattgactgtgatgatgtgaagctcgctattcaatccaaagttaatttcagcttctcacagcctcctccaagagaggttctgcttgagcttgctgcaagtaggaacaagatacctctgccaaaatcgatagcaggacccggtgttccactcccacctgaacaggacacattgctgagcccaaattatcagctcgtgataccgaagaagtcggtttcaacagaacctgaagaaaccgaggacgatgaagaaatgacagatcctggacagtcctctcaagaacaacaacagcagcaacaacaaacctcagaccttccaagccaaactcctcaaagggtctctttcccactctctagacgacccaaataa

SEQ ID NO: 2626 - protein, 183 aa, Arabidopsis thaliana
MAGEGEEDVPRDAKIVKSLLKSMGVEDYEPRVIHQFLELWYRYVVEVLTDAQVYSEHASKPNIDCDDVKLAIQSKVNFSFSQPPPREVLLELAASRNKIPLPKSIAGPGVPLPPEQDTLLSPNYQLVIPKKSVSTEPEETEDDEEMTDPGQSSQEQQQQQQQTSDLPSQTPQRVSFPLSRRPK

SEQ ID NO: 2627 - DNA, 429 bp, Chlamydomonas reinhardtii
  CDS (1)..(429)
atggatgccgctaggggcgctggcggagccgtgtctgatggagcacagccgcaggacgtcgcgacgatgcacgcgctgctgcgctccatgggtgtggaggagttcgagccgcgcgtggtgaaccagttgatggacttcatgtacaagtacacaacagatgtgttgttagatgctgaagtgttcagcgagcacgcggggcggcaaccggggcaggtggacgccagcggcgtgaccatggccatccagtcccggacggcgctctacgttcagccgccgccgcaggagcgtgtgacagagctggctcgccaggtcaacgacacggcactgcccgacctggtcaccaagcccggcctgccgctgccgcccgagggcaagcagatgacggcccccaactggcaatacgacccgcagcagcagtatcagcggtag

SEQ ID NO: 2628 - protein, 142 aa, Chlamydomonas reinhardtii
MDAARGAGGAVSDGAQPQDVATMHALLRSMGVEEFEPRVVNQLMDFMYKYTTDVLLDAEVFSEHAGRQPGQVDASGVTMAIQSRTALYVQPPPQERVTELARQVNDTALPDLVTKPGLPLPPEGKQMTAPNWQYDPQQQYQR

SEQ ID NO: 2629 - DNA, 837 bp, Magnaporthe grisea 70-15
  CDS (1)..(837)
atgtcaacagcagcccctcaaacaaacggcgtgccaccggcatccggcagccaacagactcaaaccacaaacgcattcagctcccagcagtcatcatcacaacaaccgccggcagccggccaaccaccacaacccgctggcgcgaccggcgcatcccaatcacagcagccgcaggccgacagcacgcctgccccgcggccgcgcgacgcccgcaccatcgagcttctgctgacggcgcagggcgtgacggcgtttgagccgcgggtgccccttctcctcctcgacttcgcctaccggcacacggcggcggtgctgtcagacgcgcttcacctggccggcgacccctacacgacgcacgcgggcgccaagccgtcggccgcgcaaaacgccactgccagcgccccgagcggcggcgacgccagcgtctcagcctcggccatccaggttgccatcgcgagcaggctcgccttccagttccgcgggggcggcagcacctccaaggagtttcttctcgagacggcccgcgagcgcaacaaggccgccctgccgcgcatactgccgcacgagtggggcgtcaggctgcccagtgagcggttcgtgctgagcggcaacgcttggggtttgacggatacatgggggccgggcgaggctgggattgatgacgatgacgatgacgattccgaggatgcggatgcggagatgagagatgcgatggagggcgtggagacccaagggggcgatcaggtcgatgaggaggttggcggtgagccggttgagggaggcactgtcgacgacgtgtttggggatgatgtggacgaggagatggctgaggagtga

SEQ ID NO: 2630 - protein, 278 aa, Magnaporthe grisea 70-15
MSTAAPQTNGVPPASGSQQTQTTNAFSSQQSSSQQPPAAGQPPQPAGATGASQSQQPQADSTPAPRPRDARTIELLLTAQGVTAFEPRVPLLLLDFAYRHTAAVLSDALHLAGDPYTTHAGAKPSAAQNATASAPSGGDASVSASAIQVAIASRLAFQFRGGGSTSKEFLLETARERNKAALPRILPHEWGVRLPSERFVLSGNAWGLTDTWGPGEAGIDDDDDDDSEDADAEMRDAMEGVETQGGDQVDEEVGGEPVEGGTVDDVFGDDVDEEMAEE

SEQ ID NO: 2631 - DNA, 771 bp, Gibberella zeae PH-1
  CDS (1)..(771)
atgtcatcaagccagccgcagaccaatggagttccagcctcatcggcaggaacttcacagacagtaccaaacacacaaactaccgctacctcgtctagccaacccgctgtcacggcctcgcagaatgcaccccctccctcagcgcaatcaacatcagctcctcgtccgcgcgactctcgtctcattgagcttctcctcacatcgcaaggagttaccgcttacgagccgcgcgtgcctcttctccttctcgatttcgcataccgccatacatcctccgtcctgagtgatgctctccacctctctggcgacccatatgttacgcaggcaggctccaaaccatcagcaaacgccggcgccatctcagcaccagcaggcgacgccgcggtgacggctaacgctgtcaaacttgccattgcagcccgacttagctatcaattgcgcggaggaaatgccggtggaggtatcagcaaagaatacatgcaggagcttgcgcgcgagcggaacaaggtggcactaccaaagattgtaccaagtgaatggggcgtacgactaccaagtgaacggttcgtgcttagtgggacgagctggggtcttaaggacgtgtgggatgaggatgatgaagaagatgatgagatggaccaagggggcgatgccatggagggtatcgaaggccctgaacctgaggatgttggtggagatggtgtggaaggtggtactgtcgaggacatgttcggtgaggatgtcgacgaagaaatggctgaagagggttag

SEQ ID NO: 2632 - protein, 256 aa, Gibberella zeae PH-1
MSSSQPQTNGVPASSAGTSQTVPNTQTTATSSSQPAVTASQNAPPPSAQSTSAPRPRDSRLIELLLTSQGVTAYEPRVPLLLLDFAYRHTSSVLSDALHLSGDPYVTQAGSKPSANAGAISAPAGDAAVTANAVKLAIAARLSYQLRGGNAGGGISKEYMQELARERNKVALPKIVPSEWGVRLPSERFVLSGTSWGLKDVWDEDDEEDDEMDQGGDAMEGIEGPEPEDVGGDGVEGGTVEDMFGEDVDEEMAEEG

SEQ ID NO: 2633 - DNA, 501 bp, Candida glabrata CBS 138
  CDS (1)..(501)
atggaggaagtagattcgcaaggagatttgcccagggatgtgcggttgttgcacttgcttcttgcgtcgcagtcgatacagcagtatgaggaccgtgtgcctctgcaactgatggattttgcacaccggtacactcgtggggtactgatggatgcgatggtgtacaatgactatgccagcgagaacgcgcctggtgggagcaacgctgctgccaatgcgacgaatgccaaaaacgcgcccaaggccaatactctggggagtggtatgacgagcaatggtgggaagaatattaatgttgaagacgtacggctggcgattgcagcacgtacacagtacatgttcaagcccactgcgcccaaggagctgttgctacaactggctgcggagaggaataagaaagcgctgccgcaagtcatgggttcttggggtgtgagactacctccagagaagtactgtctcactgcaaagagctgggacctggatgaaaaggaagaaaaatga

SEQ ID NO: 2634 - protein, 166 aa, Candida glabrata CBS 138
MEEVDSQGDLPRDVRLLHLLLASQSIQQYEDRVPLQLMDFAHRYTRGVLMDAMVYNDYASENAPGGSNAAANATNAKNAPKANTLGSGMTSNGGKNINVEDVRLAIAARTQYMFKPTAPKELLLQLAAERNKKALPQVMGSWGVRLPPEKYCLTAKSWDLDEKEEK

SEQ ID NO: 2635 - DNA, 399 bp, Kluyveromyces lactis NRRL Y-1140
  CDS (1)..(399)
atggaagacggtgataaggatacgttagatactcctagggatgtgagattacttcacttgcttcttgcttctcagtctgtgttgcaatacgaagacaaagtgccgttacagttgatggatttcgctcatagatataccaaaggtgttttgaaagatgctattgcttatagagagtacgtaggagggtctgcttcggatgtttcgatagaagatatacggttagcgatcggagctcgcacacagtaccaattcaagcctactgctccaaaggaactcatgttacagcttgcggcagagagaaacaagaaaccgttgcccaacgttgtgtcatcttggggtgtgcgtttgcctccagaaaagtactgtctcactgccaaagaatggtcgattgacgagtaa

SEQ ID NO: 2636 - protein, 132 aa, Kluyveromyces lactis NRRL Y-1140
MEDGDKDTLDTPRDVRLLHLLLASQSVLQYEDKVPLQLMDFAHRYTKGVLKDAIAYREYVGGSASDVSIEDIRLAIGARTQYQFKPTAPKELMLQLAAERNKKPLPNVVSSWGVRLPPEKYCLTAKEWSIDE

SEQ ID NO: 2637 - DNA, 549 bp, Debaryomyces hansenii CBS767
  CDS (1)..(549)
atgagctcaactaataaagagccagcagggtcagcaccagctaatccaacggactctattaatccagccaataatcaaaataatattgtcccaagagatgtcagattgttgcatttgatatttgccactcaaggaatccaaaactaccaggaccatgtacctttacagttgatggattttgctcatagatacactacttccgtcttgaaggatgctcttatatataacgatcacgccaagcctttgaattccaatacaaacatcaattcgagtgctaattctacggtaaacaccgatgacataaggttggccatagctgcaagaacaaactaccaattcaagcccacaccgcccaaggaattgttgttagaattggcccacgagagaaactcaaagcctttgccacctgttattccaaaatggggcttgaacttaccacctgaaaaatactgcttaacggcaagagactgggaaaacttagaagacgagttcaccgaaggtgaaaaggaaacccctgaagctgctaataagaagctgagattaagataa

SEQ ID NO: 2638 - protein, 182 aa, Debaryomyces hansenii CBS767
MSSTNKEPAGSAPANPTDSINPANNQNNIVPRDVRLLHLIFATQGIQNYQDHVPLQLMDFAHRYTTSVLKDALIYNDHAKPLNSNTNINSSANSTVNTDDIRLAIAARTNYQFKPTPPKELLLELAHERNSKPLPPVIPKWGLNLPPEKYCLTARDWENLEDEFTEGEKETPEAANKKLRLR

SEQ ID NO: 2639 - DNA, 561 bp, Yarrowia lipolytica CLIB122
  CDS (1)..(561)
atggaatcgggtgatcttccaaacgcagccacaccgcgagacgtgcgtctgctgcatctgattctggcctccatgggcgtcacctcgtaccaggaacgggtgcctcttcaactcatggactttgcctacagatatacacaaggcgtgttgcacgatgcactgctgtactcggaccatgctgcggccgccaacaactctcacaacgacaagacgggccctgtttccggcggatctggcggaaatgccaacgcagcagcagcagcagtttccacgtcggctctgtcagtggaagacgtgcgactggctattgctgctcgagtcaactaccagttcaagccagcaccacccaaagaactgcttctggagatggcacaggaacgtaaccgacgagctctgccacaggtacagcctggctacggcttgagactgcccccggagaagtactgtctcactgccaaggagtgggatttggacgaggaggaagaagagactgttgagggagctgaagagaccaataacaacagcagcaatgaggataaggaaatgaaggatgcggtctaa

SEQ ID NO: 2640 - protein, 186 aa, Yarrowia lipolytica CLIB122
MESGDLPNAATPRDVRLLHLILASMGVTSYQERVPLQLMDFAYRYTQGVLHDALLYSDHAAAANNSHNDKTGPVSGGSGGNANAAAAAVSTSALSVEDVRLAIAARVNYQFKPAPPKELLLEMAQERNRRALPQVQPGYGLRLPPEKYCLTAKEWDLDEEEEETVEGAEETNNNSSNEDKEMKDAV

SEQ ID NO: 2641 - DNA, 699 bp, Candida albicans SC5314
  CDS (1)..(699): transl_table=12
atgagtgtgctggcaccggaagatatacgtccatcaacgtcgaatggcgatcaatcaaatagagataccaatacaccaactacctctacttcagcatccactactgcaccaccaccaccaccaccaccaccacaacaacaacaacaacaacaaccatcatcctccattacaacaaccgacaataacaacaataatcaaacatctcaacaatcacaagaaaagaaggaaaaaatcattccaagagatgttagacttctccatttaatatttgctacacatgctgttcataattatcaagatcatgtaccattacaactaatggattttgctcatagatataccaaatcagttttaaaagatgctcttgtatataatgatcattcaaaacccattaatgctaatacaaatttaaattctaatactaatgccacggttaatactgatgatataagattagccattgctgctcgaagtaattatcaattcaaaccagtacctcccaaagaattattattggaattggctcaagaaagaaatagtcgaccattaccaccagttattccaagatggggattgaatttaccaccagaaaaatattgtttaactgctaaagattgggatagtatttatgatgagcctgatgaagataataataatcaactgctgcaacaaaagaataaaaaattgaaaactaaatag

SEQ ID NO: 2642 - protein, 232 aa, Candida albicans SC5314
MSVSAPEDIRPSTSNGDQSNRDTNTPTTSTSASTTAPPPPPPPPQQQQQQQPSSSITTTDNNNNNQTSQQSQEKKEKIIPRDVRLLHLIFATHAVHNYQDHVPLQLMDFAHRYTKSVLKDALVYNDHSKPINANTNLNSNTNATVNTDDIRLAIAARSNYQFKPVPPKELLLELAQERNSRPLPPVIPRWGLNLPPEKYCLTAKDWDSIYDEPDEDNNNQSSQQKNKKLKTK

SEQ ID NO: 2643 - DNA, 690 bp, Candida albicans SC5314
  CDS (1)..(690): transl_table=12
atgagtgtgctggcaccggaagatatacgtccatcaacgtcgaatggcgatcaatcaaatagagataccaatacaccagctacctctacttcagcatccactactgcactaccaccaccacaacaacaacaacaaccatcatcctccactacaacaaccgacaataacaacaacaacaacaacaataatcaaacatctcaacaaccacaagaaaagaaggaaaaaatcattccaagagatgttagacttctccatttaatatttgctacacatgctgttcataattatcaagatcatgtaccattacaactaatggattttgctcatagatataccaaatcagttttaaaagatgctcttgtatataatgatcattcaaaacccattaatgccaatacaaatttaaattctaatactaatgccacggttaatactgatgatataagattagccattgctgctcgaagtaattatcaattcaaaccagtacctcccaaagaattattattggaattggctcaagaaagaaatagtcgaccattaccaccagttattccaagatggggattgaatttaccaccagaaaaatattgtttaactgctaaagattgggatagtatttatgatgaacctgatgaagataataatcaactgctgcaacaaaagaataaaaaattgaaaactaaatag

SEQ ID NO: 2644 - protein, 229 aa, Candida albicans SC5314
MSVSAPEDIRPSTSNGDQSNRDTNTPATSTSASTTALPPPQQQQQPSSSTTTTDNNNNNNNNNQTSQQPQEKKEKIIPRDVRLLHLIFATHAVHNYQDHVPLQLMDFAHRYTKSVLKDALVYNDHSKPINANTNLNSNTNATVNTDDIRLAIAARSNYQFKPVPPKELLLELAQERNSRPLPPVIPRWGLNLPPEKYCLTAKDWDSIYDEPDEDNNQSSQQKNKKLKTK

SEQ ID NO: 2645 - DNA, 822 bp, Ustilago maydis 521
  CDS (1)..(822)
atggtgacttacgatgccacggcgtcttacggctcgtccggctcgtatgctgacacgggacttcgcggacctgtaccgcgcgatgctcgactgatcgcactcatcctctcgtccatgggggtgtcggatgttgaaccggcagtgcttcttcagctgctcgaatttgcacatcggtacacgtacgatgtgctctcggatgcacttgtctactcggaccatgcaaactctcggcaggcaggcagcaacctttcgctcgacgatgtcaacctggctattcagagtagggtgaattacagtttcaccaaaccgcctgagaaggatatgctactcgcactagctagcacagtcaacgcgataccgcttccacccatctcggatagacatggcgtaaggctgcctgcagcacaacactgtcttacgaatgtcaactttagcattgtgccgaacccgcttcctgcggactttgacgatttcgaacaagcaccaccgccgctcgaccctgcatgcccgacatccaacggttctggcggcggcggggtaagtcaatccacgctcgcagacacacaggcatccacgggctcaaacctgttcgattcaaatccagccagacccgctcgagacaaagacgactatgacaacgacgatgcagacatgtcggccgatgatgccagtgtaaccacccttcatccaagtcagtcgcaaacccacttggctccagataccgccgacccgtccagtcaatcccacacccaatccttacccaataccgactcgtcaagaggcgtcaagagatctctggatgaggacgacgagtacgattga

SEQ ID NO: 2646 - protein, 273 aa, Ustilago maydis 521
MVTYDATASYGSSGSYADTGLRGPVPRDARLIALILSSMGVSDVEPAVLLQLLEFAHRYTYDVLSDALVYSDHANSRQAGSNLSLDDVNLAIQSRVNYSFTKPPEKDMLLALASTVNAIPLPPISDRHGVRLPAAQHCLTNVNFSIVPNPLPADFDDFEQAPPPLDPACPTSNGSGGGGVSQSTLADTQASTGSNLFDSNPARPARDKDDYDNDDADMSADDASVTTLHPSQSQTHLAPDTADPSSQSHTQSLPNTDSSRGVKRSLDEDDEYD

SEQ ID NO: 2647 - DNA, 534 bp, Vitis vinifera
  CDS (1)..(534)
atggcagagggagatgaggacttgccaagggatgcaaagattgtgaaatcactgctgaaatcaatgggtgttgatgactatgagcctcgagttatacaccagtttctggagctgtggtatcggtatgttgtggatgttttgactgatgcccaggtatattcagagcatgccagtaagcctgcaattgactgtgatgatgtgaagcttgcaattcagtctaaagtcaacttcagcttctctcagcccccagcaagagaggtccttctagagttggctagaaacaggaacaagatcccactgccaaaatcaattgcagggcctggaatccctctcccacctgaacaggacacattgatcagcccgaactaccaactagctatcccaaagaagagaacagcccaagcagtggaagaaacagaagaagacgaagaaggtgctgatccctcccacgcttcccaggaagggaggacagatttgccccagcacactcctcaaagggtatcatttcccattggagctaaacgcccaaggtga

SEQ ID NO: 2648 - protein, 177 aa, Vitis vinifera
MAEGDEDLPRDAKIVKSLLKSMGVDDYEPRVIHQFLELWYRYVVDVLTDAQVYSEHASKPAIDCDDVKLAIQSKVNFSFSQPPAREVLLELARNRNKIPLPKSIAGPGIPLPPEQDTLISPNYQLAIPKKRTAQAVEETEEDEEGADPSHASQEGRTDLPQHTPQRVSFPIGAKRPR

SEQ ID NO: 2649 - DNA, 561 bp, Picea sitchensis
  CDS (1)..(561)
atgaacgaaagtttgaaaatgggggatgcagaagagctgcccatggatgccaagatagtgaaaacgatcctgaaatcaatgggagtgcagcagtacgagcccagagtcgtacaccagttcctagaactctgtcacagatatgtagtagacgtcctttctgacgcccaactctattctgaacacgccagcaaacccacgattgataccgatgatctcaagctcgccatccagtccaaagttaatttctccttctcgcagcctccacccagagagattttacttgaactggctagaaatcgaaatagacttccattgccaatgtcaattggtggccctggtatggcattgccacctgagcaggacacattgatcaatcctaattatcaacttgccattccgaaaaagccagccactcaagcagctgaagagatggaaattgatgaagaagagggtaataaaggtgatctgggtaacttccaatctttgcaagaacagaaggttgaccatgaagctgctgcccaaagagtgtcattttctctttctgcaaagcgtcctagataa

SEQ ID NO: 2650 - protein, 186 aa, Picea sitchensis
MNESLKMGDAEELPMDAKIVKTILKSMGVQQYEPRVVHQFLELCHRYVVDVLSDAQLYSEHASKPTIDTDDLKLAIQSKVNFSFSQPPPREILLELARNRNRLPLPMSIGGPGMALPPEQDTLINPNYQLAIPKKPATQAAEEMEIDEEEGNKGDLGNFQSLQEQKVDHEAAAQRVSFSLSAKRPR

SEQ ID NO: 2651 - DNA, 528 bp, Populus trichocarpa
  CDS (1)..(528)
atggcggagggagaagaagacatgccaagggatgccaagattgtgaaatcattgcttaaatcaatgggtgtcgaggattatgaacctcgtgttgtgcatcagtttttggagttgtggtatcgttatgttgttgatgtgttgacagatgcacaggtttattcagagcatgctaacaaaactgcaattgactgtgatgatgtcaagcttgctattcaatctaaagtcaatttcagcttctcgcaacccccacctagagaggttttactagagttggccagaaataggaacaaaatcccattgcctaagtcaatagctgggcctggtatccctcttccacccgagcaggacacgttgatcagtccaaactatcaacttgctatcccaaagaagcggacggcccaggcaatagaagagacagaggaggatgaagagagtgctgatcccaaccaatcacaagaacagaagacggatcctccacagcttactcctcaaagagtatcctttcctctcaccaaacgtcccaagtga

SEQ ID NO: 2652 - protein, 175 aa, Populus trichocarpa
MAEGEEDMPRDAKIVKSLLKSMGVEDYEPRVVHQFLELWYRYVVDVLTDAQVYSEHANKTAIDCDDVKLAIQSKVNFSFSQPPPREVLLELARNRNKIPLPKSIAGPGIPLPPEQDTLISPNYQLAIPKKRTAQAIEETEEDEESADPNQSQEQKTDPPQLTPQRVSFPLTKRPK

SEQ ID NO: 2653 - DNA, 492 bp, Schizosaccharomyces pombe
  CDS (1)..(492)
atgagttctccaggaataagtgatgaatctataaaaggacctaaggacgttcgtctgattcatctaatacttagctctctgggtgttccatcatactctcaaacagtgcctttgcagttgttaacatttgcacatagatatacacagcagttaatccaggattcacaggtttatgcggaacattcacgtgggcaaaatgctccaatttctgtagaagatgtacgtttagctgttgcttctcaaatcaatcactccttcactggacctccaccaaaagaatttttactagagcttgctatggagagaaatcgaaaacctttaccccaaattcagccgtcttatgggtttcgtcttccaccggagaagtactgtttaactcaacccaactggattgtcagtaatgaaacccaacagaatcaaccaaaggaagagaactcctcggattcacgaatggaggaggataaacttgacttctctgtgaagtctgaataa

SEQ ID NO: 2654 - protein, 163 aa, Schizosaccharomyces pombe
MSSPGISDESIKGPKDVRLIHLILSSLGVPSYSQTVPLQLLTFAHRYTQQLIQDSQVYAEHSRGQNAPISVEDVRLAVASQINHSFTGPPPKEFLLELAMERNRKPLPQIQPSYGFRLPPEKYCLTQPNWIVSNETQQNQPKEENSSDSRMEEDKLDFSVKSE

SEQ ID NO: 2655 - DNA, 675 bp, Oryza sativa
  CDS (1)..(675)
atggaccccggcggcctgcgcccagcgccccagtcggccgccgccgccgccgccgccgcggctgcgggggcgggggcgggggcgtccgcggcggacgagccccgcgacgcgcgcgtggtgcgggagctcctgcgctccatggggctgagcgagggggagtacgagccgcgggtggtgcaccagttcctcgacctggcctaccgctacgtcggcgacgtgctcggggacgcccaggtctacgccgaccacgcggggaagccccagcttgacgccgacgacgtccgcctcgccatccagtccaaggtcaacttctccttctcccagccgccgccccgcgaggttctccttgaggtggcacggaaccggaacaaaatcccgctacccaagtcgattgctccacctggctcaattcctctgccaccagagcaggacacgctgttgagccaaaattaccagctcctagctccgttgaagccaccgcctcagtttgaagaaacagaagatgacaatgcaggagccaaccctactccaacctcaaacccgagcaaccctagtccaaacaatctgcaggagcagcagcagcttccgcagcatggtcagagggtttctttccagctcaacgccgttgctgccgccaaacgccgagggaccatggatcagttgaacatgggctaa

SEQ ID NO: 2656 - protein, 224 aa, Oryza sativa
MDPGGLRPAPQSAAAAAAAAAAGAGAGASAADEPRDARVVRELLRSMGLSEGEYEPRVVHQFLDLAYRYVGDVLGDAQVYADHAGKPQLDADDVRLAIQSKVNFSFSQPPPREVLLEVARNRNKIPLPKSIAPPGSIPLPPEQDTLLSQNYQLLAPLKPPPQFEETEDDNAGANPTPTSNPSNPSPNNLQEQQQLPQHGQRVSFQLNAVAAAKRRGTMDQLNMG

SEQ ID NO: 2657 - DNA, 540 bp, Brassica napus
  CDS (1)..(540)
atggctggagaaggtgaagaagatgtgccaagagacgccaagattgtcaagtctctgcttaagtcgatgggcgtggaggactacgagcctcgcgtggtccaccagtttcttgaactatggtaccgttatgtggtcgaagtgttgaccgatgctcaggtttactcagagcatgccagcaaatccaccattgattgtgatgatgtgaagctagctattcaatccaaagttagtttcagcttctcgcagcctcctccaagagaggtactgctagagctagctgcgagcaggaacaagattcctttgccgaaatcgatagcaggaccaggcattccgctcccgcctgaacaggacacgttgcttagtccaaactaccagctcgtcattccgaagaagtcagcttcaacagaacctgaagaaacagaggacgacgaagaaatggcggatcctgcacaatcatcatctcaggaacaacaaacatcagagcttccgagccaaactcctcaaagggtgtctttccctctctctaggcgacctaaataa

SEQ ID NO: 2658 - protein, 179 aa, Brassica napus
MAGEGEEDVPRDAKIVKSLLKSMGVEDYEPRVVHQFLELWYRYVVEVLTDAQVYSEHASKSTIDCDDVKLAIQSKVSFSFSQPPPREVLLELAASRNKIPLPKSIAGPGIPLPPEQDTLLSPNYQLVIPKKSASTEPEETEDDEEMADPAQSSSQEQQTSELPSQTPQRVSFPLSRRPK

SEQ ID NO: 2659 - DNA, 540 bp, Brassica napus
  CDS (1)..(540)
atggctggagagggtgaagaagatgtgccaagagacgccaagattgtcaagtctctgctcaagtcgatgggcgtggaggactacgagcctcgcgtggtccaccagtttcttgaactatggtaccgttatgtggtcgaagtgttgaccgatgctcaggtttactcagagcatgccagcaaatccactattgattgtgatgatgtgaagctagctattcaatccaaagttagtttcagcttctcgcagcctcctccgagagaggtactactagagctagctgcgagcaggaacaagattcctttgcctaaatcgatagcaggaccaggcattccgctcccgcctgaacaggacacgttgcttagcccaaactaccagctcgtcattccgaagaagtcagcttcaacagaacctgaagaaacagaggacgacgaagagatggcggatcctgcacaatcatcatctcaggaacaacaaacatcagagcttccgacccagactcctcaaagggtgtctttccctctctctaggcgacctaaataa

SEQ ID NO: 2660 - protein, 179 aa, Brassica napus
MAGEGEEDVPRDAKIVKSLLKSMGVEDYEPRVVHQFLELWYRYVVEVLTDAQVYSEHASKSTIDCDDVKLAIQSKVSFSFSQPPPREVLLELAASRNKIPLPKSIAGPGIPLPPEQDTLLSPNYQLVIPKKSASTEPEETEDDEEMADPAQSSSQEQQTSELPTQTPQRVSFPLSRRPK

SEQ ID NO: 2661 - DNA, 525 bp, Glycine max
  CDS (1)..(525)
atgggtgacaaagaggaagagtcggcaatgccaagggacgcaaagattgtgaagtctttgctgaaatcaatgggcgtggaggactacgaacctcgcgtcattcacaagtttcttgagctttggtatcgctacgtcgtcgatgtcttaaccgacgcacaagtctattcagagcatgctggaaaacctgcaattgactgtgacgacgttaagcttgcgattcagtccaaggtcaacttcagcttctcgcaaccaccccctcgtgaggtgcttctggagttggctcaaaaccgcaacaagataccattgccaaagactatagcaggacctggtatcccacttccacctgatcaggacacattaatcagtcctaactaccagtttgcaattcctaacaaaaggcctgccgaacctttagaagaaacagaggatgaagaagctaccattcccaatccctctcaggaagacgtgcagccgaatccccatcagagagtgtcatttcccctgcccaaacgccaaaaggattaa

SEQ ID NO: 2662 - protein, 174 aa, Glycine max
MGDKEEESAMPRDAKIVKSLLKSMGVEDYEPRVIHKFLELWYRYVVDVLTDAQVYSEHAGKPAIDCDDVKLAIQSKVNFSFSQPPPREVLLELAQNRNKIPLPKTIAGPGIPLPPDQDTLISPNYQFAIPNKRPAEPLEETEDEEATIPNPSQEDVQPNPHQRVSFPLPKRQKD

SEQ ID NO: 2663 - DNA, 675 bp, Hordeum vulgare
  CDS (1)..(675)
atggacggcggcggcggcggcggcggcgtgcggccagcgcccatccagcccgcggcggccggaggaggggcggcgggaccggacgagccccgcgacgcgcgcgtggtgcgggagctcctccggtcgatggggctcggcgagggcgagtacgagccgcgcgtcgtgggccagttcctggacctggcataccggtacgtcggggacgtgctcggcgacgcccaggtctacgccgaccacgcagacaagccccagatcgacgccgacgacgtccgcctcgccatccaggccaatgtcaacttctccttctcccagccgccgccccgcgaggttctactcgagttggcacgcagccggaacaagatcccgctgcccaagtctattgctccacctggatcaattcctctgccacccgagcaggacactttgttgagtgaaaactaccagctcctacccacactgaagccgccaactcagactgaagaagcagaggatgacaatgagggagccgacgcaatccctgccaatcctagtccaagctattcacaggatcagaggggcagtgagcaacatcagcctcagagccagagccagagggtttctttccaactgaacgcggtggctgccgcggctgcaaagcgccctctggtgacaactgaccagttgaacatgggctaa

SEQ ID NO: 2664 - protein, 224 aa, Hordeum vulgare
MDGGGGGGGVRPAPIQPAAAGGGAAGPDEPRDARVVRELLRSMGLGEGEYEPRVVGQFLDLAYRYVGDVLGDAQVYADHADKPQIDADDVRLAIQANVNFSFSQPPPREVLLELARSRNKIPLPKSIAPPGSIPLPPEQDTLLSENYQLLPTLKPPTQTEEAEDDNEGADAIPANPSPSYSQDQRGSEQHQPQSQSQRVSFQLNAVAAAAAKRPLVTTDQLNMG

SEQ ID NO: 2665 - DNA, 678 bp, Zea mays
  CDS (1)..(678)
atggacgccgccgacgcgcgtccatcggcaccgtcggccgctgctgccgcagtcgccggggcctccgtcgcggacgagccccgggacgcgcgggtggtgcgggagctcctgcgctcgatgggtctcggtgagggcgagtacgaaccccgcgtcgtgcaccagttcctggacctggcctaccgatacgtcggagacgtgctaggggacgcccaagtctacgccgaccacgccgggaaggctcagatcgacgccgacgacgtccgcctcgccatccaggccaaggtcaatttctccttctcccagccgccgccgcgtgaggttctccttgagctggcccgcagccgaaacagaatgccgctgcccaaatcaattgctcctcctggctcaattcccctcccgcctgagcaggacacactgttggcccagaactaccaactcctgcctccgttgaagccgccacctcaatatgaggaaaacgaggatgagaatgaagaatccaacccaagtctgacaccgaacccggcaaattctaatccaaccttctcgcaggatcagcggagtaacgagcaacagcacactccccagcatggccagagggtttcattccaactcaatgctgtggcagctgctgctgcaaagcgacctcggatgaccgtcgaccagctgaacatcggctaa

SEQ ID NO: 2666 - protein, 225 aa, Zea mays
MDAADARPSAPSAAAAAVAGASVADEPRDARVVRELLRSMGLGEGEYEPRVVHQFLDLAYRYVGDVLGDAQVYADHAGKAQIDADDVRLAIQAKVNFSFSQPPPREVLLELARSRNRMPLPKSIAPPGSIPLPPEQDTLLAQNYQLLPPLKPPPQYEENEDENEESNPSLTPNPANSNPTFSQDQRSNEQQHTPQHGQRVSFQLNAVAAAAAKRPRMTVDQLNIG

SEQ ID NO: 2667 - DNA, 678 bp, Zea mays
  CDS (1)..(678)
atggacgccgccggcgcgcgtccatcggcaccgtcggccgctgctgccgcagtcgccggggcctccgtcgcggacgagccccgggacgcgcgggtggtgcgggagctcctgcgctcgatgggtctcggtgagggcgagtacgaaccccgcgtcgtgcaccagttcctggacctggcctaccgatacgtcggagacgtgctaggggacgcccaagtctacgccgaccacgccgggaaggctcagatcgacgccgacgacgtccgcctcgccatccaggccaaggtcaatttctccttctcccagccgccgccgcgtgaggttctccttgagctggcccgcagccgaaacagaatgccgctgcccaaatcaattgctcctcctggctcaattcccctcccgcctgagcaggacacactgttggcccagaactaccaactcctgcctccgttgaagccgccacctcaatatgaggaaaacgaggatgagaatgaagaatccaacccaagtctgacaccgaacccggcaaattctaatccaaccttctcgcaggatcagcggagtaacgagcaacagcacactccccagcatggccagagggtttcatttcaactcaatgctgtggcagctgctgctgcaaagcgacctcggatgaccgtcgaccagctgaacatcggctaa

SEQ ID NO: 2668 - protein, 225 aa, Zea mays
MDAAGARPSAPSAAAAAVAGASVADEPRDARVVRELLRSMGLGEGEYEPRVVHQFLDLAYRYVGDVLGDAQVYADHAGKAQIDADDVRLAIQAKVNFSFSQPPPREVLLELARSRNRMPLPKSIAPPGSIPLPPEQDTLLAQNYQLLPPLKPPPQYEENEDENEESNPSLTPNPANSNPTFSQDQRSNEQQHTPQHGQRVSFQLNAVAAAAAKRPRMTVDQLNIG

SEQ ID NO: 2669 - DNA, 675 bp, Zea mays
  CDS (1)..(675)
atggacgccggcgccgcgcgtccatcggcaccgtcgaccgccgcagtcgcgggggcctccgtcgcggacgagccccgggacgcgcgggtggtgcgggagctcctgcgctccatgggtctccgcgagggcgagtacgagccccgcgtcgtgcaccagttcctggacctggcctaccgatacgtcggagacgtgctcggggacgcccaggtctacgccgaccacgccgggaaggctcagatcgacgccgacgacgttcgcctcgccatccaggccaaggtcaatttctccttctcccagccgccgccgcgcgaggttctccttgagctggcccgtagccggaacagaatgccgctgcccaaatcaatcgctcctcctggctcgattcccctcccacctgagcaggacacactgttggcccagaactaccaactcctgcctccgttgaagccgccacctcaatatgaggaaatagaggatgagactgaagaaccaaacccaagtaacccggcgaattctaatccatcctattcgcaggatcagagtagtaaggagcagcaacagcagcacactcctcagcatggtcagagggtttccttccaacttaatgctgtggcagctgcagctgcagctgcaaagcgtcctcggatggccattgaccagctgaacatgggctaa

SEQ ID NO: 2670 - protein, 224 aa, Zea mays
MDAGAARPSAPSTAAVAGASVADEPRDARVVRELLRSMGLREGEYEPRVVHQFLDLAYRYVGDVLGDAQVYADHAGKAQIDADDVRLAIQAKVNFSFSQPPPREVLLELARSRNRMPLPKSIAPPGSIPLPPEQDTLLAQNYQLLPPLKPPPQYEEIEDETEEPNPSNPANSNPSYSQDQSSKEQQQQHTPQHGQRVSFQLNAVAAAAAAAKRPRMAIDQLNMG

SEQ ID NO: 2671 - DNA, 23 bp, Artificial sequence
  primer
atgaacggcggaggcaagaatgt

SEQ ID NO: 2672 - DNA, 24 bp, Artificial sequence
  primer
tcacatagactttgggtcctcaag

SEQ ID NO: 2673 - protein, 188 aa, Artificial sequence
  consensus sequence
  Variant (2)..(8): Xaa in position 2 to 8 is any amino acid
  Variant (9)..(37): Xaa in position 9 to 37 is any or no amino acid
  Variant (41)..(47): Xaa in position 41 to 47 is any amino acid
  Variant (49)..(49): Xaa in position 49 is any amino acid
  Variant (51)..(51): Xaa in position 51 is any amino acid
  Variant (53)..(55): Xaa in position 53 to 55 is any amino acid
  Variant (56)..(57): Xaa in position 56 to 57 is any or no amino acid
  Variant (60)..(61): Xaa in position 60 to 61 is any amino acid
  Variant (63)..(64): Xaa in position 63 to 64 is any amino acid
  Variant (66)..(71): Xaa in position 66 to 71 is any amino acid
  Variant (74)..(76): Xaa in position 74 to 76 is any amino acid
  Variant (79)..(79): Xaa in position 79 is any amino acid
  Variant (82)..(83): Xaa in position 82 to 83 is any amino acid
  Variant (85)..(86): Xaa in position 85 to 86 is any amino acid
  Variant (88)..(96): Xaa in position 88 to 96 is any amino acid
  Variant (97)..(129): Xaa in position 97 to 129 is any or no amino acid
  Variant (131)..(132): Xaa in position 131 to 132 is any amino acid
  Variant (136)..(141): Xaa in position 136 to 141 is any amino acid
  Variant (142)..(142): Xaa in position 142 is any or no amino acid
  Variant (144)..(146): Xaa in position 144 to 146 is any amino acid
  Variant (148)..(150): Xaa in position 148 to 150 is any amino acid
  Variant (151)..(152): Xaa in position 151 to 152 is any or no amino acid
  Variant (154)..(154): Xaa in position 154 is any amino acid
  Variant (156)..(156): Xaa in position 156 is any amino acid
  Variant (162)..(163): Xaa in position 162 to 163 is any amino acid
  Variant (166)..(168): Xaa in position 166 to 168 is any amino acid
  Variant (171)..(176): Xaa in position 171 to 176 is any amino acid
  Variant (178)..(179): Xaa in position 178 to 179 is any amino acid
  Variant (180)..(180): Xaa in position 180 is any or no amino acid
  Variant (185)..(187): Xaa in position 185 to 187 is any amino acid
MXXXXXXXXXXXXXXXXXXXXXXXXXXXXXXXXXXXXPRDXXXXXXXLXSXGXXXXXYEXXVXXQXXXXXXRYXXXVLXDAXXYXXHXXXXXXXXXXXXXXXXXXXXXXXXXXXXXXXXXXXXXXXXXXDXXLAIXXXXXXXFXXXPXXXXXPXEXLLELAXXRNXXXLPXXXXXXGXXXLPPEXXXL

SEQ ID NO: 2674 - protein, 39 aa, Artificial sequence
  protein pattern
  Variant (2)..(2): Xaa in position 2 is Glu or Gln
  Variant (3)..(3): Xaa in position 3 is Asp, Glu or Pro
  Variant (4)..(4): Xaa in position 4 is any amino acid
  Variant (6)..(6): Xaa in position 6 is Ile, Pro or Val
  Variant (7)..(8): Xaa in position 7 to 8 is any amino acid
  Variant (9)..(9): Xaa in position 9 is Phe or Leu
  Variant (10)..(10): Xaa in position 10 is Leu or Met
  Variant (11)..(11): Xaa in position 11 is Asp or Glu
  Variant (12)..(12): Xaa in position 12 is Phe or Leu
  Variant (13)..(13): Xaa in position 13 is any amino acid
  Variant (14)..(14): Xaa in position 14 is His or Tyr
  Variant (17)..(19): Xaa in position 17 to 19 is any or no amino acid
  Variant (22)..(22): Xaa in position 22 is any amino acid
  Variant (25)..(25): Xaa in position 25 is any amino acid
  Variant (26)..(26): Xaa in position 26 is Ala, Ile, Leu or Val
  Variant (28)..(28): Xaa in position 28 is any amino acid
  Variant (29)..(29): Xaa in position 29 is Asp or Glu
  Variant (30)..(30): Xaa in position 30 is His or Tyr
  Variant (31)..(31): Xaa in position 31 is Ala, Ser or Val
  Variant (32)..(34): Xaa in position 32 to 34 is any amino acid
  Variant (35)..(35): Xaa in position 35 is Ala, Asn, Gln or Thr
  Variant (36)..(36): Xaa in position 36 is any amino acid
  Variant (37)..(37): Xaa in position 37 is Ala, Asp, Gly, Asn or Ser
  Variant (38)..(38): Xaa in position 38 is any amino acid
  Variant (39)..(39): Xaa in position 39 is Asp, Asn or Ser
YXXXVXXXXXXXXXRYXXXVLXDAXXYXXXXXXXXXXXX

SEQ ID NO: 2675 - protein, 25 aa, Artificial sequence
  protein pattern
  Variant (2)..(3): Xaa in position 2 to 3 is any amino acid
  Variant (4)..(4): Xaa in position 4 is Ala, Pro, Thr or Val
  Variant (5)..(5): Xaa in position 5 is Ala or Pro
  Variant (7)..(7): Xaa in position 7 is Lys or Arg
  Variant (9)..(9): Xaa in position 9 is any amino acid
  Variant (10)..(10): Xaa in position 10 is any or no amino acid
  Variant (12)..(12): Xaa in position 12 is any or no amino acid
  Variant (14)..(14): Xaa in position 14 is any amino acid
  Variant (15)..(15): Xaa in position 15 is any or no amino acid
  Variant (17)..(17): Xaa in position 17 is any amino acid
  Variant (18)..(18): Xaa in position 18 is Glu, Asn, Arg or Ser
  Variant (19)..(19): Xaa in position 19 is Asn or Arg
  Variant (20)..(22): Xaa in position 20 to 22 is any amino acid
  Variant (23)..(23): Xaa in position 23 is Ala, Leu or Pro
  Variant (24)..(24): Xaa in position 24 is Leu or Pro
  Variant (25)..(25): Xaa in position 25 is Asn, Pro or Gln
FXXXXPXEXXLXLXXAXXXXXXXXX

SEQ ID NO: 2676 - protein, 20 aa, Artificial sequence
  protein pattern
  Variant (2)..(3): Xaa in position 2 to 3 is any amino acid
  Variant (4)..(6): Xaa in position 4 to 6 is any or no amino acid
  Variant (10)..(10): Xaa in position 10 is Asp or Glu
  Variant (11)..(12): Xaa in position 11 to 12 is any amino acid
  Variant (13)..(13): Xaa in position 13 is Cys or Thr
  Variant (15)..(15): Xaa in position 15 is any amino acid
  Variant (16)..(16): Xaa in position 16 is Ala, Asn or Ser
  Variant (17)..(17): Xaa in position 17 is any amino acid
  Variant (18)..(18): Xaa in position 18 is Asp, Glu, Asn or Ser
  Variant (19)..(19): Xaa in position 19 is Trp or Tyr
  Variant (20)..(20): Xaa in position 20 is Asp, Glu, Gln or Ser
GXXXXXLPPXXXXLXXXXXX

SEQ ID NO: 2677 - protein, 16 aa, Artificial sequence
  protein pattern
  Variant (2)..(2): Xaa in position 2 is Ala or Val
  Variant (3)..(4): Xaa in position 3 to 4 is any amino acid
  Variant (5)..(5): Xaa in position 5 is Ile, Leu, Met or Val
  Variant (6)..(7): Xaa in position 6 to 7 is any amino acid
  Variant (8)..(8): Xaa in position 8 is Ile or Leu
  Variant (10)..(10): Xaa in position 10 is any amino acid
  Variant (12)..(12): Xaa in position 12 is any amino acid
  Variant (13)..(13): Xaa in position 13 is Gly or Ser
  Variant (14)..(14): Xaa in position 14 is Ile, Leu or Val
  Variant (15)..(15): Xaa in position 15 is any amino acid
  Variant (16)..(16): Xaa in position 16 is Asp, Glu, Gln or Ser
DXXXXXXXLXSXXXXX

SEQ ID NO: 2678 - DNA, 1461 bp, Saccharomyces cerevisiae
  CDS (1)..(1461)
atgccaagaaaggctaatttgctaaaatctttggcaagaggacgagtacgcacttctttcaataagtataatttgtttaatttgtacaaaaagggtggtgtagacttgaagtctaaatctttgtatcaacagaagtggacggcaaagcaggaaacccgagcttatcatggtgaacatttgacagaaaagagatggcaaaccgttttcaaacccaaattggattcagtagcacaattggatgcttcactgcgtggaggtgaaatcaaggaaacaccatttttattacaaacttttgcagtattagaaaaaaggcttgattttgcccttttcagggctatgtttgcttcgtcagtaagacaagctcgtcagttcatcttgcatggaaatgttcgcgttaatggtgtaaaaattaagcatccaagctatactttaaagcctggagatatgttcagtgtcaaaccggacaaagtgctggaagctctcggtgccaagaaaccaagtttccaagaagcgctaaagatcgataagactcaaatagttttatggaacaagtatgttaaggaagcgaaaacggagccaaaggaagtttgggagaagaagttggaaaattttgaaaagatgtcggattctaacccaaagaaacttcagtttcaagaatttttgaggcaatataataagaatctggagtcacagcaatataacgcattaaagggatgcacacaggaaggtatcttgagaaagcttttaaatgtagagaaggaaataggtaagtcgaataatgagcccttgtcgatagatgaactcaaacagggtctccctgagatccaggactctcagttgttagaaagtctaaataacgcttatcaagagtttttcaaatccggtgaaattagaagagaaatcatttctaaatgtcagcctgacgagttgatttcactggctacagaaatgatgaatcctaacgaaaccacaaaaaaagaattatctgatggagccaaatccgctttaagatctggaaaaagaatcatagcggaaagcgtgaaactatggacgaaaaatataacagaccacttcaaaactaggatgagtgatatttctgatggttcactaacgttcgaccccaaatgggccaaaaatttaaaatatcatgatccgattaaattatctgaattggaaggtgatgaaccaaaagcacgtaaattgataaacttgccgtggcagaaaaattatgtttatggtaggcaagatcctaaaaaaccctttttcacaccatggaagccaagaccatttttatcgcctttcgccattttacctcatcatttggaaatatctttcaagacatgccacgctgtatacctaagggatcccgtcgctcgaccaggccaatccgaagtaatttcaccatttgatgttcctgttcatgaacgtgcatatatgtattacttgagaaatggtaaatga

SEQ ID NO: 2679 - protein, 486 aa, Saccharomyces cerevisiae
MPRKANLLKSLARGRVRTSFNKYNLFNLYKKGGVDLKSKSLYQQKWTAKQETRAYHGEHLTEKRWQTVFKPKLDSVAQLDASLRGGEIKETPFLLQTFAVLEKRLDFALFRAMFASSVRQARQFILHGNVRVNGVKIKHPSYTLKPGDMFSVKPDKVLEALGAKKPSFQEALKIDKTQIVLWNKYVKEAKTEPKEVWEKKLENFEKMSDSNPKKLQFQEFLRQYNKNLESQQYNALKGCTQEGILRKLLNVEKEIGKSNNEPLSIDELKQGLPEIQDSQLLESLNNAYQEFFKSGEIRREIISKCQPDELISLATEMMNPNETTKKELSDGAKSALRSGKRIIAESVKLWTKNITDHFKTRMSDISDGSLTFDPKWAKNLKYHDPIKLSELEGDEPKARKLINLPWQKNYVYGRQDPKKPFFTPWKPRPFLSPFAILPHHLEISFKTCHAVYLRDPVARPGQSEVISPFDVPVHERAYMYYLRNGK

SEQ ID NO: 2680 - DNA, 1545 bp, Gibberella zeae PH-1
  CDS (1)..(1545)
atgcgtcggcctacgaaatattacagtctcaccaggccgaaactcaggcaatcatggaacaagtataacttgtttaatattgcccgtgcggccggccgcgagccaccagtcaagggtcgagcgacattcttccagcagaagtgggcagccaagtccaaaacccgaggttaccacggcgagcatgtatccgagaagaagtgggtgcgtctgttttcacgacgacttctatccgctgtcgatcttccccccaagtatcttgccgccaatgatggttccgaacaagctgctggtcgtggttcaggcttgtcgacatccaatgtgaccgccgagtcctactcccaagtccccaagggcagtgatgcagtccgccctccctctcatccggctcagcgaagtcgtggtttcggcgatgtgaacgagatgctgtctgagcacttccaggatatgacaccctatatgcaaatgacttttgcgcccctggagcgaagattggacacggcagtgttccgcgccatgttcgccagcagtgtacgacaagctcgccagtttgtcatccacggtgctgtcaaggtcaacggcaaaaagatggttcatccttcatatgcattgaaccctggcgacatgttccaggttgatattgaaaaggtcttgtacggaaccggagagcaaaagaagcccaactcgatacaggaaagtcacgacaaggagttgcttgacaagcaagaagaggctgtcaggcaacaaggtctcaagaagcgttcaaagattctcgacgctgtggccgccaaggagggagaagcggcagaagccgccgaagccaagcttggaaagggctcgctcaaacgtgtcgagcgtgaggtgcaattgcatcgtatcaagaatctccgcgtaacagctcgagagattctaaagggtgacatgagacagctatcggctaagcagaagaaggacctgcgactattccgagacactgcccagcgtttgctgtctctccgcgaagaccgtgagcttgacgcatatgagctcattaaccagatccagtctcagatccagaagcttggtactgtggatgctttccgcaaggccgacccaacccctgccgagccatcaagtgagggagagtcttcagctgatgagaaggctgccaagaagaacgaggtccaggtcaaacggtcggaattcaagaaccaagtccttgagagaggcttggaaggtatcacaaatagggaagatcgggatcgggcaaggaacattctggccacccatgatctgaccaacgaggaaattcgcaaacttgtctacattctcaagaacgacgccgagaaccccatcgaccactcgaaaccttacgttactccctggcgccctcgcccattcatgtctgcctttgcgttcatccctcgctatctcgaagtcaacccctatatctgcgctgcagtttacctccgtcaccccgtggcacgaaagggtatggccgaggttcccacacctttcagttacttgaccaaccaattggcccataattggtacttgggacgaggttaa

SEQ ID NO: 2681 - protein, 514 aa, Gibberella zeae PH-1
MRRPTKYYSLTRPKLRQSWNKYNLFNIARAAGREPPVKGRATFFQQKWAAKSKTRGYHGEHVSEKKWVRLFSRRLLSAVDLPPKYLAANDGSEQAAGRGSGLSTSNVTAESYSQVPKGSDAVRPPSHPAQRSRGFGDVNEMLSEHFQDMTPYMQMTFAPLERRLDTAVFRAMFASSVRQARQFVIHGAVKVNGKKMVHPSYALNPGDMFQVDIEKVLYGTGEQKKPNSIQESHDKELLDKQEEAVRQQGLKKRSKILDAVAAKEGEAAEAAEAKLGKGSLKRVEREVQLHRIKNLRVTAREILKGDMRQLSAKQKKDLRLFRDTAQRLLSLREDRELDAYELINQIQSQIQKLGTVDAFRKADPTPAEPSSEGESSADEKAAKKNEVQVKRSEFKNQVLERGLEGITNREDRDRARNILATHDLTNEEIRKLVYILKNDAENPIDHSKPYVTPWRPRPFMSAFAFIPRYLEVNPYICAAVYLRHPVARKGMAEVPTPFSYLTNQLAHNWYLGRG

SEQ ID NO: 2682 - DNA, 1455 bp, Candida glabrata CBS 138
  CDS (1)..(1455)
atgcctcgtaaggcggtgttgttgaactcgttgactagagggcgtgtacgtacctcgttcaacaagtacaatttgttcaatctgtacaagaaaggtaacatagatttcaggtctaagtcgctataccagcagaaatggtccgctaaacaggaaacgagggcttatcacggtgagcatatcactgagagcagatggcagactatgttcagtcccaagctggactctgtggctcagctggatgcatcgctgagaggtggtgtaaccaaggagactccatttttgatgcaaacctttgctacgttggagaaaagactggactttgctgttttcagagcaatgtttgcgtcttctgtgagacaagccaggcaatttatcctgcatggtaatgtatatgtaaacggtgtaaagatcaaacacccaggatatactctcaaacctggtgacactttcaatgtgaaacctgaaaaggtcttacaagcattgggtagcaaaaagccaagctttgaagaggcattgaaagtcgacaagaaacaagttgttctttggaataaatatgttaaagaagccaaaaccaatccacaaaaagcatggtccgataaagtagctaaattcgagtccatgctagatacaaacgagaagaaacatgaattcttgaaaagattgaagaaagaagatacaaatctacaaaacgaagaatataaaatcttaaaggcattaaccccaaaggatatccttgcagaaattattagcattcacctaaaaaaagctaaagatgatactacaccagtaccaattgaggaattcaagacgttggccaaatatgatgaagcaattttgccaactatacacaaaatctatgagacttacctattctcgaagactattttgctagataagttgaaaggtaagaacaaagaagaaataaaagaatttgcatcttctttgatatctccaaaggatgatgctaaaaaagacctaattgccagttccaagacttctctaagagaggggaaaaaccagctttcagattttgtcaagaagtactcccaatcagtgataaatcatttcaagaacaaacagactgatggttctattgctaacagtagttttgacccaaaatgggcagagaacttaaaataccatccacgtttggatttggaggccattaaagaagacgaggtaaaagctagggaagcaatcaacttaccatggcaatcaaagcatttatatggtagaaaggattccaacaaaccttatttcacaccatggaagccaagaccatttttggcaccattcgctattttaccacatcatctagaaatttcattcaagacttgtcatgctgtctacttgagagatccagttgctcgtccaggtcattccgaagtgatatcaccatttgatattccagtacatgaacgtgcatacatgtactacatcagaagaggtaaatga

SEQ ID NO: 2683 - protein, 484 aa, Candida glabrata CBS 138
MPRKAVLLNSLTRGRVRTSFNKYNLFNLYKKGNIDFRSKSLYQQKWSAKQETRAYHGEHITESRWQTMFSPKLDSVAQLDASLRGGVTKETPFLMQTFATLEKRLDFAVFRAMFASSVRQARQFILHGNVYVNGVKIKHPGYTLKPGDTFNVKPEKVLQALGSKKPSFEEALKVDKKQVVLWNKYVKEAKTNPQKAWSDKVAKFESMLDTNEKKHEFLKRLKKEDTNLQNEEYKILKALTPKDILAEIISIHLKKAKDDTTPVPIEEFKTLAKYDEAILPTIHKIYETYLFSKTILLDKLKGKNKEEIKEFASSLISPKDDAKKDLIASSKTSLREGKNQLSDFVKKYSQSVINHFKNKQTDGSIANSSFDPKWAENLKYHPRLDLEAIKEDEVKAREAINLPWQSKHLYGRKDSNKPYFTPWKPRPFLAPFAILPHHLEISFKTCHAVYLRDPVARPGHSEVISPFDIPVHERAYMYYIRRGK

SEQ ID NO: 2684 - DNA, 1449 bp, Kluyveromyces lactis NRRL Y-1140
  CDS (1)..(1449)
atgcctaggaaagctgtacttctgaactctttgtccagagggaaggttcgtacctcttttaacaagtacaatttgttcaacttgtataagaaatctcaggtcagttttagatcgaaaacactataccaacagaaatggacttctaaacaggaaactcgtgcctaccatggcgaacatttaacagagagtaggtggcagtctgttttcgagcctcagctaaactctgtggctcaattagatgcttctctaaggggtggtgatatcgaaccgacgcccattctattacaaacatacgctgtactagagaaaaggctagactttgctttgtttagagctatgtttgcctcgtcagtgagacaagctcgtcagtttattttacatggcaacgtccatgtgaatggtgtaaagattacttctccgggatatgccttgaaagctggtgatgttttcaacgtcagacccgaaaaagtgctacaagctcttggtgccaagaaacctagcttgaaggaagctttgaaagtggataatacccaaattttcctatggaacaaatatattctagaggctagaaagaatcctagaaagttctgggatgaaaagatcgaaaaactaagaactatggatagtaacgatccaaagaaacaggaatttttatccttcctcgaaaactacaacaaaaccatgcacattcaaatgaggaaagaattagaccaaaccagtaacgagtatttgttagctaagatcttttctaccgttaaccgcgttaacgatgtagaaaaattggcagtaaaagatttcttgggcgaattttacaataacgaaaatttggcagctaaaggattcgaaatttatagagaagtcaagtctgccaaggctgtggaaacgatagcagggaagcctttggctgaaattcctaatgaacaaggtgaattgctaaaggtggctacaggaataactaaacctgttgataacacaaacgatgccttaaagaaaaaattcagagccatcaatcatactatagttgatttgagacatttctatgaaaccgtggtcagagaacattataatgacaagatggcatccgttgattctgttgatattccatacgatgctaagtgggctgaaaagttaccattgcatcaaaagatcaatgttcctgaactattggaaaacgaaccagctgctcaaaaagctatcaatttaccatggcaaaagggtgtgtttggtcgtaacgatccatctaaaccatatttcactccgtggaaaccaagacccttcttagcaccattcgccattctaccacaccatttggaaatatcattcaagacatgtcatgcggtctacttaagagaccctgttgcacgtccaggtcaatctgaagttattactccattcggcttacctgtacatgaacgttcatacatgtactatgtgagaaggggtaaataa

SEQ ID NO: 2685 - protein, 482 aa, Kluyveromyces lactis NRRL Y-1140
MPRKAVLLNSLSRGKVRTSFNKYNLFNLYKKSQVSFRSKTLYQQKWTSKQETRAYHGEHLTESRWQSVFEPQLNSVAQLDASLRGGDIEPTPILLQTYAVLEKRLDFALFRAMFASSVRQARQFILHGNVHVNGVKITSPGYALKAGDVFNVRPEKVLQALGAKKPSLKEALKVDNTQIFLWNKYILEARKNPRKFWDEKIEKLRTMDSNDPKKQEFLSFLENYNKTMHIQMRKELDQTSNEYLLAKIFSTVNRVNDVEKLAVKDFLGEFYNNENLAAKGFEIYREVKSAKAVETIAGKPLAEIPNEQGELLKVATGITKPVDNTNDALKKKFRAINHTIVDLRHFYETVVREHYNDKMASVDSVDIPYDAKWAEKLPLHQKINVPELLENEPAAQKAINLPWQKGVFGRNDPSKPYFTPWKPRPFLAPFAILPHHLEISFKTCHAVYLRDPVARPGQSEVITPFGLPVHERSYMYYVRRGK

SEQ ID NO: 2686 - DNA, 1404 bp, Debaryomyces hansenii CBS767
  CDS (1)..(1404)
atgcctagaaggacacagcagatgaactctatgagtagaggccgtgtacgtgcttctatgaataaatttaatttattcaatttgtacaagaagcctacgatcagctaccacggaaagactatataccaacaaaaatggacagccaaggcggaaacaagagcataccacggggaacatttgacagaaagtcggtggaagcaaatattcaagccaaatcttgaatcggttgcccagttagatgcatcattgaagggtgtggaagttgcaccaacgcctatgccattacaaacatacgcagcattagaaaagagattggaatttgctcttttcagagcaatgtttgcatcgtcggtgagacaagcgagacaatttattctcgggggccatgttaaagtgaatggagtggtagttaagcacccttcgttcccattgcagagtggagatgtgttcaacgttaagccagaaaaggttttgttggccatgggtagagtaaagccaggtttggaacaggctatcaaagttgataacaaccaaatttccgtatggaacaagtacgtaaagactgctcatgctaatccaagagaagtatgggaattgaaacaaaacaaacctaagtcattgaaccaaggtgatcaaagttctgcctctaataaggaaatgattagaaaattcaatcaagtaattgataaagaaatgatcaagcaacaaaagaacaccacaagagaatcaatgttgtcaaaaattttatctctcgccagtaagcacggggaagataccccagttacagccgatatttttaatgagttaggaaaaggtaacgctttcaagtgtaatgaaatctaccaaaaattagctgaaagtaagcacattttgcttaaacaattttctatcgaggatgccaaaagattcatttctaccaaatctaccgaattcgcaaccaaggaagaagccaagctcgcaacagtcgtgaagcagacgttatcagagttagttaagacccaacaagaatacattcgtgtttcttctcaaggaaaaaaattatctgagtcaacaaagactattccatattcttctgatttctccaaaaacttaaagattcataaaaaattagataaggatgcaattgtcgaagacgaatctaaagcaactgttaacttgccatggcaaaagggtttattcggccgtcaagatccttccaagccatttttcaccccttggaccccaaggccatttattggttgttttgccattttaccttcccatattgagatatcatttaatacttgtcatgctgtgtatttgagagatccagtcgcgagaccaggtcattctgaagttatctcaccattccctgaccatgctcatgaaagagcttatatgttctacgccagaaagggtttgtaa

SEQ ID NO: 2687 - protein, 467 aa, Debaryomyces hansenii CBS767
MPRRTQQMNSMSRGRVRASMNKFNLFNLYKKPTISYHGKTIYQQKWTAKAETRAYHGEHLTESRWKQIFKPNLESVAQLDASLKGVEVAPTPMPLQTYAALEKRLEFALFRAMFASSVRQARQFILGGHVKVNGVVVKHPSFPLQSGDVFNVKPEKVLLAMGRVKPGLEQAIKVDNNQISVWNKYVKTAHANPREVWELKQNKPKSLNQGDQSSASNKEMIRKFNQVIDKEMIKQQKNTTRESMLSKILSLASKHGEDTPVTADIFNELGKGNAFKCNEIYQKLAESKHILLKQFSIEDAKRFISTKSTEFATKEEAKLATVVKQTLSELVKTQQEYIRVSSQGKKLSESTKTIPYSSDFSKNLKIHKKLDKDAIVEDESKATVNLPWQKGLFGRQDPSKPFFTPWTPRPFIGCFAILPSHIEISFNTCHAVYLRDPVARPGHSEVISPFPDHAHERAYMFYARKGL

SEQ ID NO: 2688 - DNA, 1716 bp, Yarrowia lipolytica CLIB122
  CDS (1)..(1716)
atgccccataaagcgaaaaacctcttctctctggctcgaggtaaggtgcgagcctcatggaacccccgcaacctgtacaacttgtacaagaagacggactttctgcgggatgaaaagacgcttttccagaagaagtgggcctccaagcgagagctgcgagcctatcatggagaacacattcgagagggtaccttgaccactcagatccccaagaagctgcagggtgtggttctgcctctgggagacgacgtgacctccgaaggaatcatggctaaccgattcgacgatcagatgctggagtttgatgccgagggcaacaaaaagctcaagacgccgtttgccatgcagacgtttgtgcatctggagaagcgactggactttgccgtgttccggtccatgtttgccgcatccattcgacaggccggccagtttattcgacagggcaatgtgactgtcaatggagtcaagatcaagcatgcctcctacaccctcaagcccggagatctcatctcagtcaagcccgagaaggtcctctttgctgccggtaaggccaagccttccgttgaggaggctgtcaagatcgacaaccgacagatcaaaaagtacaaccagtacatcaaaaagtgcaacgatgatcctgagaagatgtggaacgtgcgtctcgacaagatcaagaagcgagaggctggaaagctgatggaccccaagacgcagatgcagcttcagaaggccaacgaggtggccttccaggccatgctggcccgtctccgagagctgtgctccgctgccatcttcgaggatctcatcactggccgagacgagtttcttaagacccagactgacgataccaaggttctgggtgagaagctactcaagctaattgaccagcagttccctgccaacggtgcggacccggtcgctcccactgctgagggtttcctaacccccgaggccgtcattgagcttctcaacgagcgatccaccaagctggcccaggaggctgagacaaaggctgaggccgcggtagagggctctgctgagcaaaagaaggccgagaccgtgcgctccaatgccaatcatcttattgagcagcgaaacaagaacatggcgggcatcggctccaagaagctggagtttgctatccatcccaaggacatcaaccacgtctcgtccatcgagagccctcatacgaagaacattgtgtccagctgtctaatttcgcgaaaagccgagtttgccggagtcgaggagcgaaaggtggtctacgccgcccgatgcctcatccaggaaatgaagaccaacgtggctgactctatccacgacagctacaatgagcatcagcaaaagctgctgaatccctctgtccaggacaccgaggtcaacccccgatggctgcagctgctaggacctctgcgagagaagattgatgctgccgaagccgctgaaaacgaggccgaggtcgcccaggagttcccctggcagaagaagcatctgtacggccgacaggatatctctaagccctactttacaccctggagattccgacccttcatttctccttcggttatctacccccaccacattgaggttgacttcactacctgctccgccgtctacctgcgagaccctgttgcccgacccggaatgtcggaggtcatttctcccttccctctgatcaaccacgagtttgccaacttatactacattaagaagtag

SEQ ID NO: 2689 - protein, 571 aa, Yarrowia lipolytica CLIB122
MPHKAKNLFSLARGKVRASWNPRNLYNLYKKTDFLRDEKTLFQKKWASKRELRAYHGEHIREGTLTTQIPKKLQGVVLPLGDDVTSEGIMANRFDDQMLEFDAEGNKKLKTPFAMQTFVHLEKRLDFAVFRSMFAASIRQAGQFIRQGNVTVNGVKIKHASYTLKPGDLISVKPEKVLFAAGKAKPSVEEAVKIDNRQIKKYNQYIKKCNDDPEKMWNVRLDKIKKREAGKLMDPKTQMQLQKANEVAFQAMLARLRELCSAAIFEDLITGRDEFLKTQTDDTKVLGEKLLKLIDQQFPANGADPVAPTAEGFLTPEAVIELLNERSTKLAQEAETKAEAAVEGSAEQKKAETVRSNANHLIEQRNKNMAGIGSKKLEFAIHPKDINHVSSIESPHTKNIVSSCLISRKAEFAGVEERKVVYAARCLIQEMKTNVADSIHDSYNEHQQKLLNPSVQDTEVNPRWLQLLGPLREKIDAAEAAENEAEVAQEFPWQKKHLYGRQDISKPYFTPWRFRPFISPSVIYPHHIEVDFTTCSAVYLRDPVARPGMSEVISPFPLINHEFANLYYIKK

SEQ ID NO: 2690 - DNA, 1374 bp, Aspergillus nidulans FGSC A4
  CDS (1)..(1374)
atgaggaacagggctaccacaccgctaagcaagccaaaaatccggcagtcatggagcaaatacaacttgtataacctcaaccgcatccgcaacccacccacagcaaacagaaccttcttccagcaaaaatggacagccaaggccatggcccgcgcttatcacggtgaacaggttcgcgagagtcaatggacgcgcatgttctcgcggcgcctccgcagcgtcgtgcccatgagtccctggaagatggcgcaggatgatggatccagcatggctgctgggcgtggttcgggcctggaaacagacatgcggtctcgtgctgcagacgtcaggacaaagacaccatacacgaatatgacgtttgccccattggagcggaggctggatgttgctattttccgggcgctgtttgcgagcagtgcaagacaggcgaggcaatttgtgctgcatggcgctgtaactgtcaatgggaagaagatgaggtaccctggttaccttctcaaccccggcgatatgttccaggtcgaccccgagcgtgtgatgtatgctaccggtgcgccgaaagacaaattcgaacgccgcgaggcccgtgttgagcgcaagaaggccgtggagaccgaaaagaaagaggagggcgagggcgaggaggccaaagagggcgaggaagcagaagctaaggaaaccgaggaagagaagcttgacacgcgcgagacgctgaagcgcctcctttcccaggccaaaaacatcatgggaagcaacaaggacgtgctacccgccaaacgcaagcaggaactgcgtggcttccaaaaagccgtccgtcgtgtcatgtccaagagtggtgcatccacatctacgctgaccgataacctcgagacccaattcgccgagcttctgaagctccttaaggccactaagatccagcccaaagaagagaaggagtccaagaaggaaaatgcagacgccgcagccaagtcagaaccagcagaaacagaagccactgccaacgcgtccaaccctgtggacaccaaacccacagaagcccttaccgaggccttccgccaggccacgcagaatccagaaggcgaagttgatacatcagagctgactgaggaggaactcgacgtgctcaagcgcgccctcgtccagatgcgcgacaaccccatcgatcactcaaagccctacgctaccccttggcggccacgcgattacatgagcgccttcgctttcatccctcgatatctggaggtcaaccagaacatctgcgcagcggtataccttcgacacccggtcgctcggcccggacactcagaagtgcccacgccgttcggcgaggcggtgtcgaccgctgcattttcctggtacttgagacggcggtag

SEQ ID NO: 2691 - protein, 457 aa, Aspergillus nidulans FGSC A4
MRNRATTPLSKPKIRQSWSKYNLYNLNRIRNPPTANRTFFQQKWTAKAMARAYHGEQVRESQWTRMFSRRLRSVVPMSPWKMAQDDGSSMAAGRGSGLETDMRSRAADVRTKTPYTNMTFAPLERRLDVAIFRALFASSARQARQFVLHGAVTVNGKKMRYPGYLLNPGDMFQVDPERVMYATGAPKDKFERREARVERKKAVETEKKEEGEGEEAKEGEEAEAKETEEEKLDTRETLKRLLSQAKNIMGSNKDVLPAKRKQELRGFQKAVRRVMSKSGASTSTLTDNLETQFAELLKLLKATKIQPKEEKESKKENADAAAKSEPAETEATANASNPVDTKPTEALTEAFRQATQNPEGEVDTSELTEEELDVLKRALVQMRDNPIDHSKPYATPWRPRDYMSAFAFIPRYLEVNQNICAAVYLRHPVARPGHSEVPTPFGEAVSTAAFSWYLRRR

SEQ ID NO: 2692 - DNA, 1386 bp, Candida albicans SC5314
  CDS (1)..(1386): transl_table=12
atgccaagacgtatagacaaagtcagtagtatgaccaaaggtcatattactatgtctatgaataaattgaatttgtttaatatttacagaaaggatccattacagtattttggaaaaacattgtaccaacaaaaatgggcagccaaaacagaaaccagaaactatcatggccaacaaattaaggaaaagaggttcaaaaatgtcttgtttgattcaaatttgaaaacatattctcaattagacgcttcattaaaaggtcacgatgttgcaccaacccctattactttacaaacatatggaactttggaaaagagattagaaattgctttgttcagaagtatgttcgccagttctgtcagacaagccagacaatttatacttggtggatacgtcaaagtcaatggtgttgttataaaacacccatccttccccttacaaagcggggatgtgtttagtgttgatccagaaaaagtattgtttgcccttggtaaaactaaaccaagtctagaaaaggccttaagcgttgataaaaaacagattaaaaaatggaacaattatgtttttgaagccaagaagaatccagagaaaatatgggatttaaagcaaaataaaccagatctgttggacactttaaagcaagttgaagatttcgaaaaacaaaagaagtcagttcaaaatgctcaaaaattaatgaaaatccaacaaaatcaagttacaagacagtcaattttgcaagaaattattcaacttggaaatgctgcctctgaacctgcttcattggaaacctttaataaatacggtgacgtagcacgtacaaagtgtttacaaatatatcagacattgacaaataagaaccacccaataacaaaagatccttccactaagaacattgagggtttcttggccaaggacgaaaataagtcaccagaagaaaaacacgaagtaagattaatcaattctacattgcgtgaattacaaagcagtgaatgggagagaattcgtatacaatttgaaaattttgaagaaggcactgacaccaaattttttcaaacttcatttgccaaggctttgagaggtgtacccaaattgaataaggaagagattttggaagatgaatctaaagcaaaagttcaattgccttggcaaaaacatctttttggaagaaaggacccatcaagatcatatttcactccatggacaccaagaccatttttgggagcatttgcaattttgccatctcacattgaaatatcttttgatacatgccatgcaatttacttgagagaccctgttgccagaccaggacattcagaagttatttcaccattccctgatcatgttcatgaaagagcatatatgtactacgtgagaaaaggtaaatcgtaa

SEQ ID NO: 2693 - protein, 461 aa, Candida albicans SC5314
MPRRIDKVSSMTKGHITMSMNKLNLFNIYRKDPLQYFGKTLYQQKWAAKTETRNYHGQQIKEKRFKNVLFDSNLKTYSQLDASLKGHDVAPTPITLQTYGTLEKRLEIALFRSMFASSVRQARQFILGGYVKVNGVVIKHPSFPLQSGDVFSVDPEKVLFALGKTKPSLEKALSVDKKQIKKWNNYVFEAKKNPEKIWDLKQNKPDSLDTLKQVEDFEKQKKSVQNAQKLMKIQQNQVTRQSILQEIIQLGNAASEPASLETFNKYGDVARTKCLQIYQTLTNKNHPITKDPSTKNIEGFLAKDENKSPEEKHEVRLINSTLRELQSSEWERIRIQFENFEEGTDTKFFQTSFAKALRGVPKLNKEEILEDESKAKVQLPWQKHLFGRKDPSRSYFTPWTPRPFLGAFAILPSHIEISFDTCHAIYLRDPVARPGHSEVISPFPDHVHERAYMYYVRKGKS

SEQ ID NO: 2694 - DNA, 25 bp, Artificial sequence
  primer
atgccaagaaaggctaatttgctaa

SEQ ID NO: 2695 - DNA, 27 bp, Artificial sequence
  primer
tcatttaccatttctcaagtaatacat

SEQ ID NO: 2696 - protein, 616 aa, Artificial sequence
  consensus sequence
  Variant (2)..(6): Xaa in position 2 to 6 is any amino acid
  Variant (7)..(7): Xaa in position 7 is any or no amino acid
  Variant (9)..(14): Xaa in position 9 to 14 is any amino acid
  Variant (16)..(16): Xaa in position 16 is any amino acid
  Variant (18)..(18): Xaa in position 18 is any amino acid
  Variant (21)..(21): Xaa in position 21 is any amino acid
  Variant (24)..(24): Xaa in position 24 is any amino acid
  Variant (26)..(40): Xaa in position 26 to 40 is any amino acid
  Variant (41)..(43): Xaa in position 41 to 43 is any or no amino acid
  Variant (48)..(49): Xaa in position 48 to 49 is any amino acid
  Variant (51)..(53): Xaa in position 51 to 53 is any amino acid
  Variant (55)..(55): Xaa in position 55 is any amino acid
  Variant (60)..(62): Xaa in position 60 to 62 is any amino acid
  Variant (64)..(81): Xaa in position 64 to 81 is any amino acid
  Variant (82)..(101): Xaa in position 82 to 101 is any or no amino acid
  Variant (103)..(105): Xaa in position 103 to 105 is any amino acid
  Variant (107)..(111): Xaa in position 107 to 111 is any amino acid
  Variant (112)..(156): Xaa in position 112 to 156 is any or no amino acid
  Variant (159)..(162): Xaa in position 159 to 162 is any amino acid
  Variant (164)..(166): Xaa in position 164 to 166 is any amino acid
  Variant (169)..(169): Xaa in position 169 is any amino acid
  Variant (172)..(173): Xaa in position 172 to 173 is any amino acid
  Variant (175)..(175): Xaa in position 175 is any amino acid
  Variant (178)..(178): Xaa in position 178 is any amino acid
  Variant (184)..(184): Xaa in position 184 is any amino acid
  Variant (191)..(193): Xaa in position 191 to 193 is any amino acid
  Variant (195)..(195): Xaa in position 195 is any amino acid
  Variant (197)..(197): Xaa in position 197 is any amino acid
  Variant (201)..(205): Xaa in position 201 to 205 is any amino acid
  Variant (207)..(209): Xaa in position 207 to 209 is any amino acid
  Variant (211)..(212): Xaa in position 211 to 212 is any amino acid
  Variant (215)..(215): Xaa in position 215 is any amino acid
  Variant (217)..(217): Xaa in position 217 is any amino acid
  Variant (219)..(219): Xaa in position 219 is any amino acid
  Variant (225)..(225): Xaa in position 225 is any amino acid
  Variant (227)..(227): Xaa in position 227 is any amino acid
  Variant (229)..(230): Xaa in position 229 to 230 is any amino acid
  Variant (232)..(240): Xaa in position 232 to 240 is any amino acid
  Variant (242)..(424): Xaa in position 242 to 424 is any amino acid
  Variant (425)..(529): Xaa in position 425 to 529 is any or no amino acid
  Variant (531)..(546): Xaa in position 531 to 546 is any amino acid
  Variant (547)..(550): Xaa in position 547 to 550 is any or no amino acid
  Variant (552)..(553): Xaa in position 552 to 553 is any amino acid
  Variant (556)..(557): Xaa in position 556 to 557 is any amino acid
  Variant (561)..(561): Xaa in position 561 is any amino acid
  Variant (566)..(568): Xaa in position 566 to 568 is any amino acid
  Variant (571)..(572): Xaa in position 571 to 572 is any amino acid
  Variant (574)..(576): Xaa in position 574 to 576 is any amino acid
  Variant (578)..(582): Xaa in position 578 to 582 is any amino acid
  Variant (584)..(584): Xaa in position 584 is any amino acid
  Variant (590)..(590): Xaa in position 590 is any amino acid
  Variant (597)..(597): Xaa in position 597 is any amino acid
  Variant (601)..(602): Xaa in position 601 to 602 is any amino acid
  Variant (605)..(611): Xaa in position 605 to 611 is any amino acid
  Variant (613)..(615): Xaa in position 613 to 615 is any amino acid
RXXXXXXSXXXXXXRXSXNKXNLXNXXXXXXXXXXXXXXXXXXQQKWXXKXXXRXYHGEXXXEXXXXXXXXXXXXXXXXXXXXXXXXXXXXXXXXXXXXXXAXXXGXXXXXXXXXXXXXXXXXXXXXXXXXXXXXXXXXXXXXXXXXXXXXXXXXXTPXXXXTXXXLEXRLXXAXFRXMFASSXRQARQFXXXGXVXVNGXXXXXPXXXLXXGDXFXVXPEKVLXAXGXXKXXXXXXXXXDXXXXXXXXXXXXXXXXXXXXXXXXXXXXXXXXXXXXXXXXXXXXXXXXXXXXXXXXXXXXXXXXXXXXXXXXXXXXXXXXXXXXXXXXXXXXXXXXXXXXXXXXXXXXXXXXXXXXXXXXXXXXXXXXXXXXXXXXXXXXXXXXXXXXXXXXXXXXXXXXXXXXXXXXXXXXXXXXXXXXXXXXXXXXXXXXXXXXXXXXXXXXXXXXXXXXXXXXXXXXXXXXXXXXXXXXXXXXXXXXXXXXXXXXXXXXXXXXXXXXXXXXXXXXXXXXXXXXXXXXXXXXXXXXEXXXXXXXXXXXXXXXXXXXXDXXKPXXTPWXPRPFXXXFAXXPXXXEXXXXXCXAVYLRXPVARPGXSEVXXPFXXXXXXXAXXXY

SEQ ID NO: 2697 - protein, 53 aa, Artificial sequence
  protein pattern
  Variant (2)..(3): Xaa in position 2 to 3 is any amino acid
  Variant (4)..(6): Xaa in position 4 to 6 is any or no amino acid
  Variant (10)..(10): Xaa in position 10 is any amino acid
  Variant (13)..(13): Xaa in position 13 is Asp or Pro
  Variant (14)..(14): Xaa in position 14 is Phe or Tyr
  Variant (15)..(15): Xaa in position 15 is Ile, Leu or Met
  Variant (16)..(16): Xaa in position 16 is Ala, Gly or Ser
  Variant (17)..(17): Xaa in position 17 is Ala, Cys or Pro
  Variant (20)..(20): Xaa in position 20 is Phe or Ile
  Variant (21)..(21): Xaa in position 21 is Ile or Leu
  Variant (23)..(23): Xaa in position 23 is any amino acid
  Variant (24)..(24): Xaa in position 24 is His or Tyr
  Variant (25)..(25): Xaa in position 25 is Ile or Leu
  Variant (27)..(27): Xaa in position 27 is Ile or Val
  Variant (28)..(28): Xaa in position 28 is Asn or Ser
  Variant (29)..(31): Xaa in position 29 to 31 is any amino acid
  Variant (33)..(33): Xaa in position 33 is any amino acid
  Variant (35)..(35): Xaa in position 35 is Ile or Val
  Variant (39)..(39): Xaa in position 39 is Asp or His
  Variant (44)..(44): Xaa in position 44 is any amino acid
  Variant (46)..(46): Xaa in position 46 is any amino acid
  Variant (47)..(47): Xaa in position 47 is Ala or Ser
  Variant (50)..(50): Xaa in position 50 is Ile or Pro
  Variant (51)..(51): Xaa in position 51 is Ser or Thr
PXXXXXTPWXPRXXXXXFAXXPXXXEXXXXXCXAXYLRXPVARXGXXEVXXPF

SEQ ID NO: 2698 - protein, 55 aa, Artificial sequence
  protein pattern
  Variant (3)..(3): Xaa in position 3 is Lys or Arg
  Variant (6)..(6): Xaa in position 6 is Asp or Glu
  Variant (7)..(7): Xaa in position 7 is any amino acid
  Variant (9)..(9): Xaa in position 9 is Leu or Val
  Variant (12)..(12): Xaa in position 12 is Ala or Ser
  Variant (16)..(16): Xaa in position 16 is Ala or Ser
  Variant (18)..(18): Xaa in position 18 is Ile or Val
  Variant (22)..(22): Xaa in position 22 is any amino acid
  Variant (25)..(25): Xaa in position 25 is Ile or Val
  Variant (26)..(27): Xaa in position 26 to 27 is any amino acid
  Variant (29)..(29): Xaa in position 29 is any amino acid
  Variant (31)..(31): Xaa in position 31 is any amino acid
  Variant (35)..(36): Xaa in position 35 to 36 is any amino acid
  Variant (37)..(37): Xaa in position 37 is Ile, Met or Val
  Variant (38)..(39): Xaa in position 38 to 39 is any amino acid
  Variant (40)..(40): Xaa in position 40 is Ala or Pro
  Variant (41)..(41): Xaa in position 41 is Gly or Ser
  Variant (42)..(42): Xaa in position 42 is Phe or Tyr
  Variant (43)..(43): Xaa in position 43 is Ala, Pro or Thr
  Variant (45)..(45): Xaa in position 45 is any amino acid
  Variant (46)..(46): Xaa in position 46 is Ala, Pro or Ser
  Variant (49)..(49): Xaa in position 49 is any amino acid
  Variant (50)..(50): Xaa in position 50 is Phe or Ile
  Variant (51)..(51): Xaa in position 51 is Asn, Gln or Ser
  Variant (53)..(53): Xaa in position 53 is Asp, Lys or Arg
  Variant (54)..(54): Xaa in position 54 is Ile or Pro
  Variant (55)..(55): Xaa in position 55 is Asp or Glu
LEXRLXXAXFRXMFAXSXRQAXQFXXXGXVXVNGXXXXXXXXXLXXGDXXXVXXX

SEQ ID NO: 2699 - protein, 26 aa, Artificial sequence
  protein pattern
  Variant (5)..(5): Xaa in position 5 is Ala, Ser or Thr
  Variant (6)..(6): Xaa in position 6 is Ala or Ser
  Variant (8)..(8): Xaa in position 8 is Ala, Gln, Ser or Thr
  Variant (9)..(9): Xaa in position 9 is any amino acid
  Variant (10)..(10): Xaa in position 10 is Ala or Thr
  Variant (12)..(12): Xaa in position 12 is Ala, Gly or Asn
  Variant (16)..(16): Xaa in position 16 is Glu or Gln
  Variant (17)..(17): Xaa in position 17 is any amino acid
  Variant (18)..(18): Xaa in position 18 is Ile, Leu or Val
  Variant (19)..(19): Xaa in position 19 is any amino acid
  Variant (21)..(22): Xaa in position 21 to 22 is any amino acid
  Variant (23)..(23): Xaa in position 23 is Phe or Trp
  Variant (24)..(25): Xaa in position 24 to 25 is any amino acid
  Variant (26)..(26): Xaa in position 26 is Ile, Leu, Met or Val
QQKWXXKXXXRXYHGXXXXEXXXXXX

SEQ ID NO: 2700 - protein, 21 aa, Artificial sequence
  protein pattern
  Variant (2)..(2): Xaa in position 2 is Leu or Met
  Variant (3)..(3): Xaa in position 3 is Ala, Ser or Thr
  Variant (4)..(4): Xaa in position 4 is Lys or Arg
  Variant (5)..(5): Xaa in position 5 is Gly or Pro
  Variant (6)..(6): Xaa in position 6 is His, Lys or Arg
  Variant (7)..(7): Xaa in position 7 is Ile, Leu or Val
  Variant (8)..(9): Xaa in position 8 to 9 is any amino acid
  Variant (11)..(11): Xaa in position 11 is any amino acid
  Variant (13)..(14): Xaa in position 13 to 14 is any amino acid
  Variant (17)..(17): Xaa in position 17 is Phe or Tyr
  Variant (19)..(19): Xaa in position 19 is Ile or Leu
  Variant (20)..(20): Xaa in position 20 is any amino acid
  Variant (21)..(21): Xaa in position 21 is Lys or Arg
SXXXXXXXXSXNXXNLXNXXX

SEQ ID NO: 2701 - DNA, 1245 bp, Saccharomyces cerevisiae
  CDS (1)..(1245)
atgtatagacgatctgttggagtactatttgttgggagaaatacaagatggatttcgtccactattaggtgtggaacgagcgcaactcggccaataagatccaatgcattgaatactgattcagataacgctagcgttagggtaccagttggaaattcaactgaggttgaaaatgcaaccagtcagttaacagggacttcgggaaaaagacgcaaggggaacagaaaaagaattacagagttcaaagatgctcttaatttgggtccatcttttgcagattttgtttcaggtaaagcttcgaaaatgatcttggaccctctggagaaggcaaggcaaaatacagaggaagctaaaaaactacctcgttggcttaaggttcctattcctaagggtaccaattaccataaattgaaaggcgacgtaaaagaattaggcctgagtactgtttgtgaggaggcaagatgtcccaatattggtgaatgttggggaggcaaagataaatctaaggcaacggcaacaattatgctgcttggtgatacttgcactcgtggatgtaggttttgttctgtgaagaccaatagaacgcctagtaagccggacccaatggagcccgaaaatactgccgaagctatcaaaagatgggggttgggttatgttgttttaactaccgttgatagggacgatttagtcgatggtggtgctaatcacctggccgagacggttcgcaaaatcaaacagaaggcaccaaatactcttgtagagactctttctggtgatttcagaggtgatttgaagatggtggacattatggcacaatgtgggcttgatgtttacgcacataatttggaaacagttgaatcactaacaccacatgtcagagacagaagagctacttatagacagtctttgagtgttttagaaagggcaaaagctacggttccgtcactgattactaaaacatcaataatgctgggtctaggagaaactgatgagcaaattactcaaactttgaaggatttgcgcaatattcaatgtgatgttgttacatttggtcaatatatgaggccaaccaagagacatatgaaagtcgtagaatatgtgaaacccgaaaagtttgactactggaaagagagagctttagagatgggattcttgtattgtgcatctggacccctagtaagatcgtcatataaggctggtgaagcatttattgagaacgttttgaagaaaagaaacatgaaataa

SEQ ID NO: 2702 - protein, 414 aa, Saccharomyces cerevisiae
MYRRSVGVLFVGRNTRWISSTIRCGTSATRPIRSNALNTDSDNASVRVPVGNSTEVENATSQLTGTSGKRRKGNRKRITEFKDALNLGPSFADFVSGKASKMILDPLEKARQNTEEAKKLPRWLKVPIPKGTNYHKLKGDVKELGLSTVCEEARCPNIGECWGGKDKSKATATIMLLGDTCTRGCRFCSVKTNRTPSKPDPMEPENTAEAIKRWGLGYVVLTTVDRDDLVDGGANHLAETVRKIKQKAPNTLVETLSGDFRGDLKMVDIMAQCGLDVYAHNLETVESLTPHVRDRRATYRQSLSVLERAKATVPSLITKTSIMLGLGETDEQITQTLKDLRNIQCDVVTFGQYMRPTKRHMKVVEYVKPEKFDYWKERALEMGFLYCASGPLVRSSYKAGEAFIENVLKKRNMK

SEQ ID NO: 2703 - DNA, 1095 bp, Glycine max
  CDS (1)..(1095)
atgattcgtcaatctctttacacccctccttccatcaccttctcaaccccatctccaaaacgtcaccgtttcgctcctcctagttggagaattcgatgcgacgcgtcgtcggtgtcggtggagcagaaggttgttgggccttaccctggtgggctgggcccacacacgggtagagacccaaacgcgaagaagccagagtggctgaggcagaaagctcctcagggcgaaaggttccaagagattaaggaatccttgtcccatttgaagctcaacactgtctgcgaggaggcacagtgccccaacataggagagtgttggaatggaggtggagatggcattgcaactgcgacaatcatgcttcttggggatacttgcacacgtgggtgtaggttttgtgctgtgaagaccagcagaaaccctccacctgctgatcctatggaaccggaaaatactgccaaggcaattgcaagttggggcgtggattatattgtcttaacaagtgtggatcgtgatgatctgcctgatggaggaagtggccattttgctcagactgtcaaagctatgaagaatctcaaacccgagatcatggttgagtgtttaacttctgattttcggggtgacctgaaggctgtagaaactctggttcactcaggtttagatgtctttgctcacaacattgagacagtcaaacgcctccaaagaattgttagagatcctagggcggggtatgagcaaagcttgtcagttctaaaacatgcaaaacatagcaaggagggtatgataacaaaaacttctataatgctgggccttggagaatctgatgatgaggtgaaggaagcaatggctgatttaagggccatcgacgttgatattctgacacttggtcaatatttgcagccaactcccttgcacttaactgtcaaagagtatgttactcctgagaagtttgatttctggaaagaatatggggaatctattggttttcgttacgtagctagtggtccactggtgagatcttcgtacagggctggggagctgtttgtcaagacaatggtacgggaaaagaccaagaatgttgctgactcgttgttatga

SEQ ID NO: 2704 - protein, 364 aa, Glycine max
MIRQSLYTPPSITFSTPSPKRHRFAPPSWRIRCDASSVSVEQKVVGPYPGGLGPHTGRDPNAKKPEWLRQKAPQGERFQEIKESLSHLKLNTVCEEAQCPNIGECWNGGGDGIATATIMLLGDTCTRGCRFCAVKTSRNPPPADPMEPENTAKAIASWGVDYIVLTSVDRDDLPDGGSGHFAQTVKAMKNLKPEIMVECLTSDFRGDLKAVETLVHSGLDVFAHNIETVKRLQRIVRDPRAGYEQSLSVLKHAKHSKEGMITKTSIMLGLGESDDEVKEAMADLRAIDVDILTLGQYLQPTPLHLTVKEYVTPEKFDFWKEYGESIGFRYVASGPLVRSSYRAGELFVKTMVREKTKNVADSLL

SEQ ID NO: 2705 - DNA, 1137 bp, Glycine max
  CDS (1)..(1137)
atgatgatgcattcacggatcagaagcgtcgccggaaacatcaaatgcgcggcgagactcttctgttcatcttcgacgatcacgccggcggcggcgccgtcgcagctcccgcagactctggcgggtctccgagcccggctggcggaggaatcgccgtcgctgtcggatttcgtcgcgcttaaatcggacagcgcgtactcagtggaggtcgggacgaagaagaagccgcttccgaagccgaagtggatgaaggaggccgttcccggcggcgagaagtacgtgcagatcaagaagaagctccgcgaattgaagctccacacggtttgcgaggaggcgaagtgccctaatttgggggagtgctggtccggcggcgagacaggcactgccaccgccactatcatgattctcggcgacacgtgtactcgaggttgcagattttgtaatgttaagacatccaggactcctccaccacctgaccctgatgagcccaccaatgtggctgaagcaattgcatcatggggcctggattatgtggttataacgagtgttgaccgtgatgatttacctgatcaagggagtggtcatttttctgaaacagtgcagaagctgaaggcactgaagccaaatatgctgatagaagccttagttccagattttcgaggagatgctgactgtgtagagaaggttgccaaatcaggattagatgtctttgcacataacattgagacagtcgaagagcttcagaattttgtacgggaccatcgcgctaattttaagcagtcattagatgttctaatgatggccaaggaatatgcgcctgctggaacacttactaagacttcaataatgttaggttgtggggaaacacctgatcaggttgtgaagacaatggagaaggtgagagcggctggtgttgatgtgatgacatttggtcagtatatgagaccttcaaagcgccatatgccggtatctgaatatgttaccccagaggcctttgataagtatcagaaacttggcatggaaatgggctttcgatatgtggcatctgggcccatggtgaggtcatcatacaaggcaggtgaattctatatcaaatccatgattgaatcagatcgggccgctttccctcaaagctga

SEQ ID NO: 2706 - protein, 378 aa, Glycine max
MMMHSRIRSVAGNIKCAARLFCSSSTITPAAAPSQLPQTLAGLRARLAEESPSLSDFVALKSDSAYSVEVGTKKKPLPKPKWMKEAVPGGEKYVQIKKKLRELKLHTVCEEAKCPNLGECWSGGETGTATATIMILGDTCTRGCRFCNVKTSRTPPPPDPDEPTNVAEAIASWGLDYVVITSVDRDDLPDQGSGHFSETVQKLKALKPNMLIEALVPDFRGDADCVEKVAKSGLDVFAHNIETVEELQNFVRDHRANFKQSLDVLMMAKEYAPAGTLTKTSIMLGCGETPDQVVKTMEKVRAAGVDVMTFGQYMRPSKRHMPVSEYVTPEAFDKYQKLGMEMGFRYVASGPMVRSSYKAGEFYIKSMIESDRAAFPQS

SEQ ID NO: 2707 - DNA, 1479 bp, Glycine max
  CDS (38)..(1186)
ctgtgattgtccgtaagagagagagagagagagagagatggtgatgcattcacgggtcagaagcgtcgccggaaacatcaaatgcgcagcgagactcttctgttcatcttcgacgaccacgccgccggctgcgccgttgcagttcccgcagactctggcggggctccgggcgcggctggcggaggagtcgccgtcgctgtcggacttcctcgcgttaaaatcggagagcgcgtactcggtggaggtcgggactaagaagaagccgcttccgaagccgaagtggatgaaggaggccgttcccggcggcgagaagtacgtgcagatcaagaagaagctccgtgaattgaagcttcacacggtttgcgaggaggctcggtgccctaatttgggggagtgctggtccggaggcgagaccggcactgccaccgccactatcatgattctcggcgacacttgtactcgaggttgcagattttgtaatgttaagacgtcaaggactcctccaccacctgaccctgatgagcccaccaatgtggctgaagcaattgcatcttggggtctggattatgtggttataacgagtgttgaccgtgatgatttgcctgatcaagggagtggtcattttaccgaaacagtgcagaagctgaaggcactgaagcctaatatgctgatagaagccttagttccagattttcgaggagatgctgactgtgtagagaaggttgccaaatcaggattagatgtctttgcacacaacattgagacagttgaagagcttcagagtgttgtacgggatcatcgtgctaattttaagcagtcattagatgttctaatgatggccaaggaaaatgctcctgctggaacacttactaagacttcaataatgttaggttgtggggaaacacctgatcaggttgtgaagacaatggagaaggtgagagcagctggtgttgacgtgatgacatttggtcagtatatgagaccttcaaagcgccatatgccggtatctgaatatgttacaccagaggcctttgataagtatcagaaacttggcatggaaatgggctttcgatatgtggcatctgggcccatggtgaggtcatcatacaaggcaggtgaattctatattaaatccatgattgaatcagatcgggctgcttctccctcaaagctgacctcttcttgatccaccatcttttttgttattcacacacttcattgtgcattatatgtaaggagtgcagacttactacattgctgttgatgctcatgccacgtgtaatatcagtaaaaagctataaacgggcatatgctgctgtctgcaatttttttcactgcctcctccccaacctatgagtgaataggttgatttatttagaaaatgcaaatttcaaaggttgattgtatatgttctcatttacatgaactcatttttctctattaaactggtgctaacttactccagttactgtagttatt

SEQ ID NO: 2708 - protein, 382 aa, Glycine max
MVMHSRVRSVAGNIKCAARLFCSSSTTTPPAAPLQFPQTLAGLRARLAEESPSLSDFLALKSESAYSVEVGTKKKPLPKPKWMKEAVPGGEKYVQIKKKLRELKLHTVCEEARCPNLGECWSGGETGTATATIMILGDTCTRGCRFCNVKTSRTPPPPDPDEPTNVAEAIASWGLDYVVITSVDRDDLPDQGSGHFTETVQKLKALKPNMLIEALVPDFRGDADCVEKVAKSGLDVFAHNIETVEELQSVVRDHRANFKQSLDVLMMAKENAPAGTLTKTSIMLGCGETPDQVVKTMEKVRAAGVDVMTFGQYMRPSKRHMPVSEYVTPEAFDKYQKLGMEMGFRYVASGPMVRSSYKAGEFYIKSMIESDRAASPSKLTSS

SEQ ID NO: 2709 - DNA, 1005 bp, Cupriavidus taiwanensis
  CDS (1)..(1005): transl_table=11
atgagcgacgcactgatcgccccgaacgcctcttccagcgaagccccgcagtcccccgcggagcactacgatccgacccgcaagcagaagtcggccgacaagaccgcgcgcatccccatcaagatcgtgccggccgagaagctgaagaagccggactggatccgcgtgaaggccgccaccggcaattcgcgtttctatgagatcaaggacatcctgcgcgccaacaacctggtgacggtgtgcgaggaagccagctgccccaatatcggcgaatgcttcggcaagggcacggccaccttcatgatcatgggcgacaagtgcacgcgccgctgcccgttctgcgacgtcggccacggccgccccgatccgctcgatgtgaacgagcccggcaacctggcccgcactatcgcccagctcaagctgaactacgtggtgatcaccagcgtcgaccgcgacgacctgcgcgacggcggcgcccagcactatgtcgactgcatctcgcagacgcgcgagctgtcgcccgctacccgcatcgaagtgctggtgcccgacttccgcggccgcctggacaaggcgctggacatcctgcaggcgtgcccgcccgacgtgatgaaccacaacatggaaaccgtgccgcgcctgtacaagcaggcgcgcccgggcgccgactacgcgcactcgctcaagctgctgcaggagttcaagcgccgcaaccccaacgtgccgaccaagtccggcctgatggtcggcctgggcgagaccgacgaggaaatcctggaagtcatgcgcgacatgcgcgcgcacgacatcgacatgctcaccatcggccagtacctggcgccgtcgaaccaccatctgccggtgctgcgctacgtgcatcccgacaccttcaagatgttcgaggaagaggcctacaagatgggcttcacccacgccgccgtgggcgcgatggtgcgcagctcctaccatgccgaccagcaggcgcatcaggcggggtttgcctga

SEQ ID NO: 2710 - protein, 334 aa, Cupriavidus taiwanensis
MSDALIAPNASSSEAPQSPAEHYDPTRKQKSADKTARIPIKIVPAEKLKKPDWIRVKAATGNSRFYEIKDILRANNLVTVCEEASCPNIGECFGKGTATFMIMGDKCTRRCPFCDVGHGRPDPLDVNEPGNLARTIAQLKLNYVVITSVDRDDLRDGGAQHYVDCISQTRELSPATRIEVLVPDFRGRLDKALDILQACPPDVMNHNMETVPRLYKQARPGADYAHSLKLLQEFKRRNPNVPTKSGLMVGLGETDEEILEVMRDMRAHDIDMLTIGQYLAPSNHHLPVLRYVHPDTFKMFEEEAYKMGFTHAAVGAMVRSSYHADQQAHQAGFA

SEQ ID NO: 2711 - DNA, 1014 bp, Xanthomonas campestris pv. campestris
  CDS (1)..(1014): transl_table=11
atgacccagcctatcgcccgttccattcccttgcaggtcgtctccggcgacaccgccgcacctgcgtcgctgcagaccggcgtcaagcagatcggtggcgacaagatcaaccgctcgccggtgcagttcgtcgacgcgccggtgctgcgcaagccgtcgtggatccgggtaaggatcccgtccggcaatgcggtgcagaacctcaaggccaagttgcgcgaaaaccgcttggtcacggtctgcgaagaagccagctgcccgaacatccacgagtgcttcagccacggcaccgccactttcatgatcctgggtgaggtgtgcacgcggcgctgctcgttctgcgacgtggcgcatggccggcccaagccgccggatgcgagcgagccgaccagtctggctaccaccgtggccgacatgggcctgaagtatgtggtggtgaccagcgtggaccgcgacgacctgcgcgacggcggtgcccagcacttcgtcgactgcatctcggcgatccgcgccagcgcgcccaagacccggatcgagatcctgaccccggacttccgtggcaagggccgcatggaccgcgcgctggagatcctggccaccagcccgccggatgtgttcaaccacaacatcgaaaccgtgccggacctgtacccgaacgtgcgccccggtgccgattaccagtggtcgctgacgctgctgcagcgcttcaaggcgcagcacccgaccatcgccaccaagtccggcatcatgctcggcctgggcgaaacgatggagcaggtgcaggccaccttgcgcgacctgcgcgcgcacgatgtggacatgatcacgatcggccagtacctgcagcccacgccgcaccaccacccggtgatgcgctactggacgccggaggaatacaaggcgctggaggactacggcaatgcgctgggcttcagccatgtggcgtccggcccgatggtgcgttcctcgtaccacgccgaccgtcaggctgccggtgccggcgtcgccgcctga

SEQ ID NO: 2712 - protein, 337 aa, Xanthomonas campestris pv. campestris
MTQPIARSIPLQVVSGDTAAPASLQTGVKQIGGDKINRSPVQFVDAPVLRKPSWIRVRIPSGNAVQNLKAKLRENRLVTVCEEASCPNIHECFSHGTATFMILGEVCTRRCSFCDVAHGRPKPPDASEPTSLATTVADMGLKYVVVTSVDRDDLRDGGAQHFVDCISAIRASAPKTRIEILTPDFRGKGRMDRALEILATSPPDVFNHNIETVPDLYPNVRPGADYQWSLTLLQRFKAQHPTIATKSGIMLGLGETMEQVQATLRDLRAHDVDMITIGQYLQPTPHHHPVMRYWTPEEYKALEDYGNALGFSHVASGPMVRSSYHADRQAAGAGVAA

SEQ ID NO: 2713 - DNA, 1125 bp, Arabidopsis thaliana
  CDS (1)..(1125)
atgcattcgcgctccgccttgctctatagattcctccgtccggcgtcgagatgcttctcctcttcctcggctgtaactccggtcaccgtaacgcaatctcccaagagtctcgaggctcttcgagctcggctggcgaatgagtcgccttccctaaccgatttcatccacggcgatacctattcggtggaagttggaaccaaaaagaaacctctcccgaaacctaaatggatgaaggaatcaattcccggcggcgagagatatgtccagatcaagaagaaattgagagaccttaagcttcacaccgtctgcgaggaagcgaaatgtcccaatctcggtgagtgctggtctggtggtgaaactggaaccgccaccgctacgattatgatccttggggatacatgtacacgcggctgcaggttttgtaatgtgaagacatcgcgtacacctccaccgcctgatccaaatgaacctaacaatgtggctgaagcaattgcttcctggggggttgattatgttgtgatcaccagtgtagatcgagatgatttacctgatcaagggagtggtcattttgctgaaactgttcagagattgaaattcttgaagccggagatgttgattgaagcactagttcctgatttccgcggagatggtggatgtgttgagaaggtttccaagtcagggcttgatgtcttagctcacaacattgagacagttgaagagcttcagagttttgtgcgggaccatcgtgctaactttaagcagtcattggatgtgcttaggatggctaaggagtatgcacctgcaggcaccttaacaaagacttctgtaatgctgggatgtggagagacccctgatcaagtggttaagacaatggagaaggtgagagcagcaggggttgacgttatgacatttggccaatatatgcgaccatctaaacgccacatgccagtagctgagtacgtgacaccagatgccttcgagaggtatcgccttcttggcatggaaatgggattcagatacgtagcatcaggaccaatggtgaggtcgtcgtacaaagcgggagagtactacataaagtcgatgatagaagccgatcgagtggcttctccttctacatccccgtag

SEQ ID NO: 2714 - protein, 374 aa, Arabidopsis thaliana
MHSRSALLYRFLRPASRCFSSSSAVTPVTVTQSPKSLEALRARLANESPSLTDFIHGDTYSVEVGTKKKPLPKPKWMKESIPGGERYVQIKKKLRDLKLHTVCEEAKCPNLGECWSGGETGTATATIMILGDTCTRGCRFCNVKTSRTPPPPDPNEPNNVAEAIASWGVDYVVITSVDRDDLPDQGSGHFAETVQRLKFLKPEMLIEALVPDFRGDGGCVEKVSKSGLDVLAHNIETVEELQSFVRDHRANFKQSLDVLRMAKEYAPAGTLTKTSVMLGCGETPDQVVKTMEKVRAAGVDVMTFGQYMRPSKRHMPVAEYVTPDAFERYRLLGMEMGFRYVASGPMVRSSYKAGEYYIKSMIEADRVASPSTSP

SEQ ID NO: 2715 - DNA, 966 bp, Escherichia coli O157:H7 EDL933
  CDS (1)..(966): transl_table=11
  misc_feature (628)..(628): r is g or a
  misc_feature (730)..(730): r is g or a
atgagtaaacccattgtgatggaacgcggtgttaaataccgcgatgccgataagatggcccttatcccggttaaaaacgtggcaacagagcgcgaagccctgctgcgcaagccggaatggatgaaaatcaagcttccagcggactctacacgtatccagggcatcaaagccgcaatgcgcaaaaatggcctgcattctgtctgcgaggaagcctcctgccctaacctggcggaatgcttcaaccacggcacagcaacgtttatgatcctgggcgctatttgtacccgccgttgtccgttctgtgacgttgcccacggtcgcccggtagctcctgatgccaatgagccagtgaaactggcgcagaccattgccgatatggcgctgcgttatgtggttatcacctccgttgaccgtgatgacctgcgcgatggcggtgcccaacactttgcggattgtattactgccattcgggaaaaaagcccgcaaatcaaaattgaaactctggtgccggatttccgcggtcgtatggatcgtgctctggatattctgactgcaacgcccccagatgtgttcaaccataacctggaaaacgtaccgcgtatttaccggcaggtacggcctggcgcarattacaactggtcgctgaagctgctggaacgctttaaagaagcgcatccggaaatcccgaccaagtctggtctgatggtgggtctgggtgaaaccaatgaaraaattattgaggtaatgcgcgacctgcgccgtcatggtgtgacgatgttaacgctggggcaatatttgcagccaagccgccatcacctgccggttcaacgttacgttagcccggatgagttcgacgaaatgaaagccgaagcgctggcgatgggctttacccatgctgcatgcggtccgtttgtccgctcttcttaccacgccgatttgcaggcgaaagggatggaagttaagtaa

SEQ ID NO: 2716 - protein, 321 aa, Escherichia coli O157:H7 EDL933
  misc_feature (244)..(244): The Xaa at location 244 stands for Glu, or Lys.
MSKPIVMERGVKYRDADKMALIPVKNVATEREALLRKPEWMKIKLPADSTRIQGIKAAMRKNGLHSVCEEASCPNLAECFNHGTATFMILGAICTRRCPFCDVAHGRPVAPDANEPVKLAQTIADMALRYVVITSVDRDDLRDGGAQHFADCITAIREKSPQIKIETLVPDFRGRMDRALDILTATPPDVFNHNLENVPRIYRQVRPGABYNWSLKLLERFKEAHPEIPTKSGLMVGLGETNEXIIEVMRDLRRHGVTMLTLGQYLQPSRHHLPVQRYVSPDEFDEMKAEALAMGFTHAACGPFVRSSYHADLQAKGMEVK

SEQ ID NO: 2717 - DNA, 909 bp, Rickettsia conorii str. Malish 7
  CDS (1)..(909): transl_table=11
ttgaattatttccgttttatggctaatttaaataaacgacctgattggataaaagtaaaagctcctaattctacagagtactataatacaaaagatttaataaagaatctgagattaaatactgtgtgcgaggaagctgcttgtcctaatattggtgagtgctggtcaaaaaaacatacaactgtgatgattttaggttcggtttgtactagagcttgtaggttttgtaacgttaaaacgggtagaccggatttacttgatccgtatgaaccgcaaaggttagcggaggcggtacaaaagctaaatcttaagcatgtagtaattacttccgtcgatcgtgatgatcttgaggatggcggagcgtcacattttgcggagtgtattagcgaaatccgaaaatcatcgccaaatactactattgagattctaacacccgattttttaagaaaagaaggagcagctgaaataatagcaaacgcaaaacctgacgtttttaaccataatgtcgaaacagtaccgtctttatacaaaacgattagaccgggggctagatattataattctttaagtttactgcataatattaaaaaattatctcctgaaatttttacaaaatccggtatgatggtaggacttggggaagaaataaatgaagtagtacaggttatagatgatttaagagaagcaaaggttgatttcctaactatcgggcagtatctgcagcctaccaaaaatcatgctgaggtcgcaaaatatgttacgccggaagagtttaaatatctagagcgagtagcaaaaacaaaaggattcttgatggtttcggcaagcccgctgacccgttcttcataccatgctgatgaggattttcaaaaattaaaagagaattaccaacaaaaactggtgtcttaa

SEQ ID NO: 2718 - protein, 302 aa, Rickettsia conorii str. Malish 7
MNYFRFMANLNKRPDWIKVKAPNSTEYYNTKDLIKNLRLNTVCEEAACPNIGECWSKKHTTVMILGSVCTRACRFCNVKTGRPDLLDPYEPQRLAEAVQKLNLKHVVITSVDRDDLEDGGASHFAECISEIRKSSPNTTIEILTPDFLRKEGAAEIIANAKPDVFNHNVETVPSLYKTIRPGARYYNSLSLLHNIKKLSPEIFTKSGMMVGLGEEINEVVQVIDDLREAKVDFLTIGQYLQPTKNHAEVAKYVTPEEFKYLERVAKTKGFLMVSASPLTRSSYHADEDFQKLKENYQQKLVS

SEQ ID NO: 2719 - DNA, 1143 bp, Drosophila melanogaster
  CDS (1)..(1143)
atgtatgtcatgttgcgagctttaaaaactcacgcggaggcccccattgtagttgccacccgtgcggcatcaacgaatgcggagaagcttgaggagattcgtgaacgtctggcaaagggtccgaatttccatgactttgtgcagaatccggacaacaccagaaacgagtgggaacagtacgatggaaagctacgccgcgaaaagggcgaggagcagcgactgcgattgccgccttggttaaagaccaccattcccgtgggcaaaaactacgccaaaatcaaggcccagatgcgcgagctcaagctgtccaccgtctgcgaggaggcccggtgtcccaacatcggcgagtgctggggcggcggcgagcatggcacccagacagccacgattatgcttatgggcgacacttgcaccagaggctgtagattttgttcggtgaaaacggcacgcaaaccaccaccgctggatgtaaacgaacccgtgaacacagccacggcaattgcctcctggggattggattacattgttctgacctcagttgatcgagatgatttgccagacggtggctcggagcacattgccgaaactgttcgcgaaattaaggcgcgcaactcaaacatctttgtggagtgcctagtacctgatttccgaggaaatctggagtgtgtgaagacgatcgccaacagcgggctggatgtttatgcgcacaacatagagacggttgagaagctcactccctatgtgcgcgaccggcgcgcccactaccgccagaccctgcaagtgctaaccgaagcgaagagattcaaccccaatctcatcaccaagagttcaattatgctgggacttggcgagaccgacgaggagatcgagaacaccttgaaggatctgcgggaggccggcgtagattgcgtgaccctgggtcagtacatgcagcccacgaataagcacctcaaggtcatcgaatacgtcacgcccgagaagttcaagcactgggaagagcgcggcaacgaactgggtttcctgtacacagccagtggaccgctggtgcgcagctcctacaaagccggcgagttcttcatcacaagtatattggagaatcgcaagaagaggcaaaacgacactgaagttcccaagaagcagtaa

SEQ ID NO: 2720 - protein, 380 aa, Drosophila melanogaster
MYVMLRALKTHAEAPIVVATRAASTNAEKLEEIRERLAKGPNFHDFVQNPDNTRNEWEQYDGKLRREKGEEQRLRLPPWLKTTIPVGKNYAKIKAQMRELKLSTVCEEARCPNIGECWGGGEHGTQTATIMLMGDTCTRGCRFCSVKTARKPPPLDVNEPVNTATAIASWGLDYIVLTSVDRDDLPDGGSEHIAETVREIKARNSNIFVECLVPDFRGNLECVKTIANSGLDVYAHNIETVEKLTPYVRDRRAHYRQTLQVLTEAKRFNPNLITKSSIMLGLGETDEEIENTLKDLREAGVDCVTLGQYMQPTNKHLKVIEYVTPEKFKHWEERGNELGFLYTASGPLVRSSYKAGEFFITSILENRKKRQNDTEVPKKQ

SEQ ID NO: 2721 - DNA, 1185 bp, Arabidopsis thaliana
  CDS (1)..(1185)
atgatgcatcattgctcaattacgaaacccactttctcaatttcgatctcgacccagaagcttcatcatcattccagtaaattcttgaatttgggtttcagaatccgatgcgaatccggggatgtttcgtcgccattgcggaccaaggcggtgtctttgtcgtcggagatggaggattcgtcgtccttgaagaagagtttgatggagttagaagggaagaagagtgagccttacccaggaggaatgccgaagatgggtccattcacagggagagatccgaatgtgaagaaacctgcttggttgagacagaaggcaccacaaggcgaaaggtttcaggaggtgaaagagtccctttctcgtctcaatctcaatactgtttgtgaagaagctcagtgtcctaatatcggcgagtgttggaatggaggtggtgatggtgtagcaactgcaaccatcatggttcttggtgatacttgtactcgtggctgtagattctgtgctgttaaaacaagtagaaatcctcctcctcctgacccaatggaaccagagaacactgccaaggccatagccagttggggtgtagactacatagttattaccagcgtagaccgtgacgatatacctgatggtggaagtggacattttgcgcagactgtcaaagctatgaagagacataagccggatataatgatagaatgcttaacttctgattttcgtggggatttggaggctgtcgacactcttgtgcactcgggattggatgtttttgctcacaatgtcgagactgtgaaaaggctccagcgacttgtgagggatcctagggctggatatgagcagagcatgtcagttttgaaacatgcaaagatcagcaaacctggaatgatcacaaagacatccataatgcttggtcttggagaaacagacgaagagttgaaggaagcaatggctgatctaagagctatagatgttgatattctaacacttggccagtatctacagccaactccattgcatctgactgtgaaagagtatgtcacacctgagaagtttgatttctggaaaacatacggagaatcaataggatttcgttatgttgcaagtggtccactggtaagatcttcatatagagcaggagagctttttgttaagacaatggtgaaagaaagctactctaaatccttgtcttaa

SEQ ID NO: 2722 - protein, 394 aa, Arabidopsis thaliana
MMHHCSITKPTFSISISTQKLHHHSSKFLNLGFRIRCESGDVSSPLRTKAVSLSSEMEDSSSLKKSLMELEGKKSEPYPGGMPKMGPFTGRDPNVKKPAWLRQKAPQGERFQEVKESLSRLNLNTVCEEAQCPNIGECWNGGGDGVATATIMVLGDTCTRGCRFCAVKTSRNPPPPDPMEPENTAKAIASWGVDYIVITSVDRDDIPDGGSGHFAQTVKAMKRHKPDIMIECLTSDFRGDLEAVDTLVHSGLDVFAHNVETVKRLQRLVRDPRAGYEQSMSVLKHAKISKPGMITKTSIMLGLGETDEELKEAMADLRAIDVDILTLGQYLQPTPLHLTVKEYVTPEKFDFWKTYGESIGFRYVASGPLVRSSYRAGELFVKTMVKESYSKSLS

SEQ ID NO: 2723 - DNA, 909 bp, Thermosynechococcus elongatus BP-1
  CDS (1)..(909): transl_table=11
atggagttagccgtggttgttaagccagagtggttacgggtcaaagcaccccagtggcagcgggtgggttccgtcaaggaactgttgcgggacttaaacctcaatactgtttgcgaagaggcctcttgccccaatattggtgaatgtttctatcagggaacggccacatttttaatgatgggtccagcttgcacccgggcttgcccctactgcgatattgattttgagaaaaagccattgcctctggatcccactgaaccccagcgactagctgaagcagtggtgcggatgcgtctcaatcacgttgtcattacctcggtgaatcgggatgatttggccgacgggggtgcctctcagtttgtcgccacgattgaggctgtgcggcagcgatcgccccaaacaacaattgaagtcctgattcccgatctctgcggcaactggcaggccttggatcaaattcttgctgccggtccggaagtactcaaccacaacaccgagaccgtgccccgtctctatcggcgggtgcgtccccaaggcaactatcagcgcagtctggaactgctgcagcgggtgcgcgatcgcgccccttggatttactcaaaatcgggcattatggtgggtctaggggaaaccagcgaggaagtggtggccctcatgcaggatttgcgccaagtgggttgtgacattctcaccattggtcagtatctgcaacccagtcccaaacatctagcggtacaggcctttattccaccagagcaatttgaggaatggcgccgcctgggggaatcgatgggctttttgcaggtggtttcctctcccctcacccgtagttcctaccatgctgagcaggtgcgggctctgatgcaacagtacccacgtcagcgtcctgccccaagtcctcttggatag

SEQ ID NO: 2724 - protein, 302 aa, Thermosynechococcus elongatus BP-1
MELAVVVKPEWLRVKAPQWQRVGSVKELLRDLNLNTVCEEASCPNIGECFYQGTATFLMMGPACTRACPYCDIDFEKKPLPLDPTEPQRLAEAVVRMRLNHVVITSVNRDDLADGGASQFVATIEAVRQRSPQTTIEVLIPDLCGNWQALDQILAAGPEVLNHNTETVPRLYRRVRPQGNYQRSLELLQRVRDRAPWIYSKSGIMVGLGETSEEVVALMQDLRQVGCDILTIGQYLQPSPKHLAVQAFIPPEQFEEWRRLGESMGFLQVVSSPLTRSSYHAEQVRALMQQYPRQRPAPSPLG

SEQ ID NO: 2725 - DNA, 1089 bp, Corynebacterium diphtheriae NCTC 13129
  CDS (1)..(1089): transl_table=11
gtgtcgacgaccacagcaatcacgagtactctgcaaagggtgactaaagcacccgaaggacgcagaatgctcagagttgaggcgcgcaactcgcagacccccatcgagagcaaaccacgttggatccgcaccgctgttaaaaccggccctgaatatcaggacatgaaaaagaaagtgtcgggtgcaagcctgcacaccgtatgccaagaagccggctgccctaatatccacgaatgctgggagtcgcgtgaggctaccttcttgattggtggcgctaactgctcgcgccgttgcgatttctgccagattaattctgctaagcccgaaccactcgatcgcgacgagccacgtcgcgttgcagaatcagtacgcgaaatgcagctgaattactcgaccatcactggtgtgacccgtgacgatcttgaagatgaaggcgcttggctatatgcagaagttgttcgcaagattcatgagctcaatccccacaccggcgtagaaaacctcacccctgatttctccggcaagcctgacttgttgcaagaggttttcgaggctcgccccgaagtttttgctcacaacctcgaaacggttcctcgcatcttcaagcggatccgccccgctttccgttacgagcgctccttagacgtgatccgccaagcccgcgattttggattggttaccaaatccaacctgatcttgggcatgggagaaaccgtcgacgaaatccgtgatgccttggttgacctgcactcggcaggttgtgacatcatcacgattacccaatatcttcgtcccggcccgatgtaccatcccatcgatcgttgggtaaaacctgaggaatttatcgatcacgctgattttgcgcgtgaacttggatttggtgctgttatgtcggggccattggtacgttcttcttatcgtgccggaaagctttatgccgaggctctcgcggctcgcggtgagtccttgccagaaaacttggctcatttggccacgactgccgatggcagtactgcgcaagaagcaaataccttgttggaaaagtacggtccttcccaagacacccctgtagtgtcgtcgaaggcttaa

SEQ ID NO: 2726 - protein, 362 aa, Corynebacterium diphtheriae NCTC 13129
MSTTTAITSTLQRVTKAPEGRRMLRVEARNSQTPIESKPRWIRTAVKTGPEYQDMKKKVSGASLHTVCQEAGCPNIHECWESREATFLIGGANCSRRCDFCQINSAKPEPLDRDEPRRVAESVREMQLNYSTITGVTRDDLEDEGAWLYAEVVRKIHELNPHTGVENLTPDFSGKPDLLQEVFEARPEVFAHNLETVPRIFKRIRPAFRYERSLDVIRQARDFGLVTKSNLILGMGETVDEIRDALVDLHSAGCDIITITQYLRPGPMYHPIDRWVKPEEFIDHADFARELGFGAVMSGPLVRSSYRAGKLYAEALAARGESLPENLAHLATTADGSTAQEANTLLEKYGPSQDTPVVSSKA

SEQ ID NO: 2727 - DNA, 948 bp, Yersinia pestis biovar Microtus str. 91001
  CDS (1)..(948): transl_table=11
atggaacgcggcgtaaaataccgtgatgcagacaaaatggcgttaatcccggtaaaaaacgtggtgaccgaacgtcaggagctgttgcgtaaacccgagtggctaaaaatcaagcttccgactgattccagccgcattcagggtatcaaagctgcaatgcgtaagaatggtctgcattcggtttgtgaagaggcctcctgccctaacctgtctgagtgctttaaccacggtacggcaacatttatgatccttggtgcaatttgtacccgccgttgcccattctgtgacgttgcccatggtcgcccagtcacaccggatgctaatgagccagagaagctggcacagacgatccaagacatgggtctgcgctatgttgttatcacgtccgttgaccgtgatgacctacgtgatggtggtgctcagcattttgccgattgtatttcagcgatccgcgccaagaatccaaccatcaaaattgaaacgttagtccctgatttccgtggtcgtatggatcgcgcactcgatattctgaccgcaaccccaccagatgtatttaaccataatttggaaaacgtaccacgtgtttatcggcaggttcgtccaggggcgaactacgattggtcactgaaattacttgagcgcttcaaagaagcacatccagatatcccaactaaatccggcttaatggtcggcttgggcgaaaccaatgccgagattgtcgaggtcatgcatgatttacgccgccacggggtcacgatgttgacgctggggcaatacttgcaaccaagccgccatcatttacccgtacaacgttatgtcagcccggccgagtttgacgaaatgaaagcagaagccatggctatgggctttacccatgcagcctgtggcccatttgttcgctcttcttaccatgcagacctgcaagcgaaaggtatggaagtgaagtaa

SEQ ID NO: 2728 - protein, 315 aa, Yersinia pestis biovar Microtus str. 91001
MERGVKYRDADKMALIPVKNVVTERQELLRKPEWLKIKLPTDSSRIQGIKAAMRKNGLHSVCEEASCPNLSECFNHGTATFMILGAICTRRCPFCDVAHGRPVTPDANEPEKLAQTIQDMGLRYVVITSVDRDDLRDGGAQHFADCISAIRAKNPTIKIETLVPDFRGRMDRALDILTATPPDVFNHNLENVPRVYRQVRPGANYDWSLKLLERFKEAHPDIPTKSGLMVGLGETNAEIVEVMHDLRRHGVTMLTLGQYLQPSRHHLPVQRYVSPAEFDEMKAEAMAMGFTHAACGPFVRSSYHADLQAKGMEVK

SEQ ID NO: 2729 - DNA, 1338 bp, Magnaporthe grisea 70-15
  CDS (1)..(1338)
atgtcatgctcactgccttcgtccctccggcgggcggccgctccgctccgtagaacattcgccaccgtcacagcaacatcgacgacaagcgcaaagaattgcagggcatatgcaacaataccctcaaaggacagcgatcctaccccaagtgcaagcagcgccgattcatcagcggggtcggtcacatcacagcaacaaacaccaaaatcttcccgtccaacatacttcaaagacacttctgtcgcctccttctccgactttctcgccacgtcctccccagcagctcccttgtctccatctgaggcttacacccttcgcaccgccgaggtcggccctgccggtcgcaagaagaccatcacacgcctgccggaatggctgaagacaccgatacccaacccggggtccaacgaaaacttccgtagcatcaaggccgaccttcgcggcctgggactgcacaccgtctgcgaggaggctcgttgtccaaatatctcagactgctggggtggtagctccaaggccgccgccaccgcaactatcatgctcatgggcgacacgtgcacgcgcggatgccgcttctgcagcgtcaagaccagccgcgccccggcacccctcgacccgcacgagcccgagaacaccgccgaggccctggcccgctggggactgggttatgtcgttctgacctcggtagatcgtgacgatcttgcggatggtggggccaggcactttgctgagaccatacggaaaattaaggccaagaagccgacgctgctggtcgaggccttgacgggtgattttcagggtgacctggagatggtcaggttggtggccgatagtggtctggacgtgtatgcgcacaacgttgagacggtcgagggtttgactccgtacgtgcgtgatcgccgtgctacctttaggcagagcttgaaggtgctggccgaggtcaagaggcacaagggcgatgatatcatcaccaagacgagcataatgttgggtctgggtgagacggaggaagagctgtttgaagcactcagggaactccgcaaagcccaggttgatgtagtgacctttggccagtacatgcgtccgacaaagcgtcacctcaaggttgagaagtacataacgcccgacgagttcgagctgtggcgccagcgcgcgctggacatgggcttcttgtactgtgccagcgggccacttgtgcggtcttcgtacaaggctggagaggcgttcattgagaacgtgctcaagaagcgggcgggcgagaaggcagcagcagcagccgctgccgcttcaggtaccaccgcaaacgcccccaagttggatccctctgcgctgccatga

SEQ ID NO: 2730 - protein, 445 aa, Magnaporthe grisea 70-15
MSCSLPSSLRRAAAPLRRTFATVTATSTTSAKNCRAYATIPSKDSDPTPSASSADSSAGSVTSQQQTPKSSRPTYFKDTSVASFSDFLATSSPAAPLSPSEAYTLRTAEVGPAGRKKTITRLPEWLKTPIPNPGSNENFRSIKADLRGLGLHTVCEEARCPNISDCWGGSSKAAATATIMLMGDTCTRGCRFCSVKTSRAPAPLDPHEPENTAEALARWGLGYVVLTSVDRDDLADGGARHFAETIRKIKAKKPTLLVEALTGDFQGDLEMVRLVADSGLDVYAHNVETVEGLTPYVRDRRATFRQSLKVLAEVKRHKGDDIITKTSIMLGLGETEEELFEALRELRKAQVDVVTFGQYMRPTKRHLKVEKYITPDEFELWRQRALDMGFLYCASGPLVRSSYKAGEAFIENVLKKRAGEKAAAAAAAASGTTANAPKLDPSALP

SEQ ID NO: 2731 - DNA, 1947 bp, Nasonia vitripennis
  CDS (1)..(1947)
atgtcgagtattctagcgttgatgctgttgatggtaacagtcggtgtatggggagcagaggagacgacaacgacgagtagcacgacgacagcagagtcgacgacgacgacgttgaataattccgagcttctgaccggaggtacggctgacaaaatcgccaggaggatcatcgacgatcgactaacgccccccagggctacggattttgcaccttggaataagaagctgccgctcggagagatttacagaggtaattcccagcctccgagggtcaccgaggaggtggacgataacgtcaccgacagagccgtgcccaagaagacgaggaccgttggacccacgcaagatacaagctgttgcgggggcaaatcgcagggtcctaatggcttcgcggatgggaaggacaagtcgcagcatcagtcgagtccaagctccgagtcgcaggacctcaacgctggacccgcgccacgtttccacggaaacagaccgtcggacgacaggtatggtcacgggtggagaagctcgagctatatcgggttcaacaaggacaaggactactacgatcagcgcaatcgttacccttatgacagatacagcacagcgtcgaggcccagctcgaactacggcgcgtcggcggtcgatggcgaccggtacggagccagcagcagcaacactcggccgagtaacttccagagctcgaattacggctatcctccgtacggcgacaggcctagacccggcggcacttacggcatcgggccgagcagcaaccaggacaccgacaccgactaccccttcgccgagggcggacctggcagcggtggaccgccgtccaatctgcagacgcagaaggcagcggctgagagggcggatgatttgtttcatttttcggcttgggcgatgagctcgttgtatccagaagagttttctcaaaaattggaaaatggtccacagttagaaaattttatatctggtgatgccactgcaactgagtacgatgggatacttaaattggccaaaggagataagtcacgattaagattaccaccttggctcaagacccaaataccaatgggtaaaaattatagtcgtatcaaatcccaacttcgcgacctacgattgagcacagtgtgtgaagaggctcgttgtccaaatattggagaatgttggggaggtggagctcatggaacagctacggcaacaataatgttaatgggagacacatgcacaagaggctgtaggttttgctcagtaaaaacagcaagagctccaccacctcttgatccagaagaaccaaagaatacagcaacagcaataacagaatggggattagattatgttgtattgacatctgtagatcgtgatgatgtagcagatggtggtgcaagtcacattgcagctactgtaagagagctcaagaacaggagtaatattctagttgaatgcttggtacctgattttcaaggaaacttggatagtgtaaaaacagtagttgagtctggtttggacgtttatgcacacaacatagaaactgttgagagattgacgccattcgtccgcgatagacgcgcaagatacaagcagtcactatcaatgctggggggagcaaagaaggtcaatccagatttgataacgaaatcgtcaataatgttgggtcttggagaaacagatgatgaagtgatgcaaaccatgaaagatctcagagctgctggtgtagaagctcttacattgggacaatacatgcagccgacaaaaagacatttaaaagtgattgaatatgtgacacctgaaaaattcaaatattgggaaaaagttggtcaagaacttggttttctgtatactgctagtggacctttggtacgatcttcttacaaggctggcgaatatttcctaacgaacatattaaaagagaaacggggtgaaaagaacgtgaaagagagtacgtag

SEQ ID NO: 2732 - protein, 648 aa, Nasonia vitripennis
MSSILALMLLMVTVGVWGAEETTTTSSTTTAESTTTTLNNSELLTGGTADKIARRIIDDRLTPPRATDFAPWNKKLPLGEIYRGNSQPPRVTEEVDDNVTDRAVPKKTRTVGPTQDTSCCGGKSQGPNGFADGKDKSQHQSSPSSESQDLNAGPAPRFHGNRPSDDRYGHGWRSSSYIGFNKDKDYYDQRNRYPYDRYSTASRPSSNYGASAVDGDRYGASSSNTRPSNFQSSNYGYPPYGDRPRPGGTYGIGPSSNQDTDTDYPFAEGGPGSGGPPSNLQTQKAAAERADDLFHFSAWAMSSLYPEEFSQKLENGPQLENFISGDATATEYDGILKLAKGDKSRLRLPPWLKTQIPMGKNYSRIKSQLRDLRLSTVCEEARCPNIGECWGGGAHGTATATIMLMGDTCTRGCRFCSVKTARAPPPLDPEEPKNTATAITEWGLDYVVLTSVDRDDVADGGASHIAATVRELKNRSNILVECLVPDFQGNLDSVKTVVESGLDVYAHNIETVERLTPFVRDRRARYKQSLSMLGGAKKVNPDLITKSSIMLGLGETDDEVMQTMKDLRAAGVEALTLGQYMQPTKRHLKVIEYVTPEKFKYWEKVGQELGFLYTASGPLVRSSYKAGEYFLTNILKEKRGEKNVKEST

SEQ ID NO: 2733 - DNA, 1182 bp, Aedes aegypti
  CDS (1)..(1182)
atgtcgcaaatttcgtcaaatttgctcagaaataccgttcaaaatggaaaatttggttgcctaaagaactccatccagtgcaaacacaccgcggccaatccgttggagaagatccgcgagcggctcgaaagtggacccagctttcaggatttcgtacagaatccctcgtacaaccgggatgactggaccgactacgaaggaaaattgcggcgggagaagggcgaaaacgatcggcttcggttgccaccctggctaaaaacgaagattccgatggggaagaattttagccgcatcaaggaccagctgcgggagctcaagttggccaccgtgtgcgaggaggccaagtgcccaaatattggcgaatgctggggcggaggagagcatggaacgcagacggcgaccattatgcttatgggtgacacttgtacgcgaggttgtcgcttctgcagcgtgaaaacggcacgagtgccgcctcccctcgatcctgcggaaccaacaaataccgcctcggctatcgcttcctggggtctggactatatcgtgctcacatcggtggatcgcgatgacttgcccgatggaggatcgaatcacattgcggcgacgatcagggaaataaaacgacaaaatccccgcatctttgtggaatgcttggcgccggatttccgtggagatttggaatgcgttaaggtagttgcgcaatccggcttggacgtgtatgcccacaatatcgaaacggttgaagccctgacgccatttgtgagggatcgacgagcacgctatcgtcaaagtttggatgtactgcgaagcatcaaagaaatcaaccccagcatgattacgaagacttcgattatgttggggttgggcgagacggacgaacaaatcgaacagaccatgaaagatcttcgttcggttggtgtcgactgtctcaccctgggccagtacatgcagcccaccaagcgccacctgaaggtaatcgagtacgttacgccggaaaagttcaaacactgggaaacacgtggcaacgagctgggattcctgtacacggctagcggtccgttggtgcgcagttcgtacaaggcgggcgaatttttcatcaccagcattctcaagaaccgggccgaagaggccgagagacgcaaggaggcagcgggtgggcaggacacaaaaacggaacagacatag

SEQ ID NO: 2734 - protein, 393 aa, Aedes aegypti
MSQISSNLLRNTVQNGKFGCLKNSIQCKHTAANPLEKIRERLESGPSFQDFVQNPSYNRDDWTDYEGKLRREKGENDRLRLPPWLKTKIPMGKNFSRIKDQLRELKLATVCEEAKCPNIGECWGGGEHGTQTATIMLMGDTCTRGCRFCSVKTARVPPPLDPAEPTNTASAIASWGLDYIVLTSVDRDDLPDGGSNHIAATIREIKRQNPRIFVECLAPDFRGDLECVKVVAQSGLDVYAHNIETVEALTPFVRDRRARYRQSLDVLRSIKEINPSMITKTSIMLGLGETDEQIEQTMKDLRSVGVDCLTLGQYMQPTKRHLKVIEYVTPEKFKHWETRGNELGFLYTASGPLVRSSYKAGEFFITSILKNRAEEAERRKEAAGGQDTKTEQT

SEQ ID NO: 2735 - DNA, 1293 bp, Chlamydomonas reinhardtii
  CDS (1)..(1293)
atgcgtagcttagcgaccctgcatcagtcgccagcaagctgctcgcgaagcgcgccggtggcgccatgcccggcgcgacgtgccaacagcagcaggcgcgtcgctcgccagggtccccgcgcccgcgccagttcgccggtcgtggagacggagtcggaggatgtcgacatcacgccacaaatcgacgcctttgaggagctcgtgcgcctggccgtggaaaaggacccctcgctcgcgactctcgccgagcagcacctgcgcagcaagtccaagtccgcagccccggtctcgcccttcgccgccccctcgcccggcagcccttccgccagcagcatgctcggcccctcgctcggcgccctgcccaaccaaaacaagcccgcctggctgcggcagcgcgcgccgcagggggaaatttactcgggcctgaaggaccagctgcgcggcctgaagctggcgaccgtgtgtgaggaggcgcagtgccccaacatcggcgagtgctggaacggcgagctggccaccgccaccatcatgctgctgggtgacacctgcacacgcggctgccgcttctgcgccgtcaacacggcgcgcacgccgccgccgcccgaccccaatgagcctgtgaacaccgccacagcggtggcgtcctggggcgtgggctatgtggtgctgaccagtgtggaccgtgacgacatgcctgacggcggctcggagcatttcgccgccacggtgcgcaccctgaagcagctgcggcccggcatcctggtggagtgcctcacgccggacttcaagggcgacctggacgcggtccggcacctggctcgctcgggcctggacgtgtacgcgcacaacgtggagacagtggagcggctgcagaagcgagtgcgcgacccgcgcgccggctacatgcagactctggacgtgttgcgtgcggccaaggagtgcggcgtgtacaccaagtcctccatcatgctggggctgggcgagacggacgacgaggtgatcgacaccatgcttgacctcaaggcggtgggggtggacatcttcacgctggggcagtacctgcagcccacgccgcaccacctgccggtcacggagtttgtgacccccgagaagtttgagtactggcgcaaattcggtcaggaggagatcggcttccgctacgttgcctctgggcccatggtccgctcctcctacaaggctggcgagttcttcctgcactccatgatcgagagcgacagggccaaggcgcgggccgcgcaggagggcgcggcgggcagggtgcggccgctgtga

SEQ ID NO: 2736 - protein, 430 aa, Chlamydomonas reinhardtii
MRSLATLHQSPASCSRSAPVAPCPARRANSSRRVARQGPRARASSPVVETESEDVDITPQIDAFEELVRLAVEKDPSLATLAEQHLRSKSKSAAPVSPFAAPSPGSPSASSMLGPSLGALPNQNKPAWLRQRAPQGEIYSGLKDQLRGLKLATVCEEAQCPNIGECWNGELATATIMLLGDTCTRGCRFCAVNTARTPPPPDPNEPVNTATAVASWGVGYVVLTSVDRDDMPDGGSEHFAATVRTLKQLRPGILVECLTPDFKGDLDAVRHLARSGLDVYAHNVETVERLQKRVRDPRAGYMQTLDVLRAAKECGVYTKSSIMLGLGETDDEVIDTMLDLKAVGVDIFTLGQYLQPTPHHLPVTEFVTPEKFEYWRKFGQEEIGFRYVASGPMVRSSYKAGEFFLHSMIESDRAKARAAQEGAAGRVRPL

SEQ ID NO: 2737 - DNA, 957 bp, Chlamydomonas reinhardtii
  CDS (1)..(957)
atgaagcgaaacaaactgccgggtggagacaagtacacagagatcaaggccaagctgcgcgagctgaagctgagcacggtgtgtgaggaggcgcgctgccccaacctgggggagtgctggggcggcggcgacggccacaccgccaccgccaccatcatgctcatgggcgacacctgcacacgcggctgcaagttctgcgcggtcaagaccagcaaggcgccgccgccgctggacccgcacgagccggagaacgtgtccaaggccattgcggcctgggggctggattacgtggtgctcaccagcgtggaccgcgacgacctgcccgacggcggcgccgcccacatcgcctccaccatccggctgctcaagcagaagacggaggggcggctgctagtggaggcgctggtgcccgacttccagggggacatgggcggcgtgcagactattgtggaggctggcctggacgtgtacgctcacaacatcgagaccgtggagcgcctgcaggggcaggtccgcgaccggcgtgcgggctgggcccagagcctggccacgctgtccgccgccaagcgggtgtcgggcgggcggctgctgaccaagtcctccatcatgctgggctgcggcgagagccgggaggaggtggtggacacgctgaaggcgctgcgcgccaacggtgtggacgtggtgacgctggggcagtacatgcggcccacaaagaagcacatggcagtggccgagttcgtcacaccggaggcgttcgcggcctacgagcagatcgccaaggacttgggtttcctgtacgtggccagcggccccatggtccgctcctcctaccgcgccggagagctgtacatcaccaacgtgctcaagggccgccgcggcggggagggcgagggtggagagggccagcagcagcagcagggccagcagcagcagcaggcacgggcggccacggcataa

SEQ ID NO: 2738 - protein, 318 aa, Chlamydomonas reinhardtii
MKRNKLPGGDKYTEIKAKLRELKLSTVCEEARCPNLGECWGGGDGHTATATIMLMGDTCTRGCKFCAVKTSKAPPPLDPHEPENVSKAIAAWGLDYVVLTSVDRDDLPDGGAAHIASTIRLLKQKTEGRLLVEALVPDFQGDMGGVQTIVEAGLDVYAHNIETVERLQGQVRDRRAGWAQSLATLSAAKRVSGGRLLTKSSIMLGCGESREEVVDTLKALRANGVDVVTLGQYMRPTKKHMAVAEFVTPEAFAAYEQIAKDLGFLYVASGPMVRSSYRAGELYITNVLKGRRGGEGEGGEGQQQQQGQQQQQARAATA

SEQ ID NO: 2739 - DNA, 1146 bp, Physcomitrella patens subsp. patens
  CDS (1)..(1146)
atggagtcgttagctcggggtaatcttgcgaatgtagcctccagcttcacctcgtctactgaattgttggggttttccttgcgcggtgatgatctgctacgttcagtgagattgggtggccgcaaagtacggtcagttgggtttcgagtgacgtctgtgtctacaacagaagacaaaactcccgctcgctctgggaatgtgggactctacactgggcgagatcctaatgtgaagaagcctgcgtggttgcggcaacgggcgccgcaaggagagaagctatcaaagctcaaggagagcatcaccaccttgaagctgaataccgtttgtgaggaagcgcaatgccccaacattggagagtgttggaatggtggcggaggagcagggggtgaaggggatggcattgctacagccactatcatgctgctcggtgacacttgcactcgcggatgccgattttgtgcagttgcgactagtagaaatcctgcacccgcggatcctatggaaccagaaaatacagctcgggcaatagccagttggggcgtagggtatgttgtattgactagcgttgacagagatgacatgcctgatggtgggagtgatcactttgctcgaacagtgaaaaccctcaaggcgttaaagccagaattattggtagaatgtcttgtgtctgatttcagaggtgatctgaacgccgtgcatcatctcgccagctctgggctggatgtctttgctcataacatcgagacagtgaagcgattgcagcggattgtcagagatccacgggctgggtatgaacagagcatggcagtattaaagcatgccaagactctgaagggaatggtgactaagtcctccataatgctgggcttgggcgagcgtgatgaagaaataaaacaaactatgctggatctgcgtgatgctggagtggacatatttactctaggccaatatttacagcccacgcctcttcacctaactgtgaaggagtacgtgacacccgagaagttcgaatattggaagcagtatggcgagtccattggtttcagatatgtcgcaagcggtcctcttgttcgatcctcttaccgagcaggggagttcttcattgagagcatgattcgtaacgaacggaacaatgctgcggtgtaa

SEQ ID NO: 2740 - protein, 381 aa, Physcomitrella patens subsp. patens
MESLARGNLANVASSFTSSTELLGFSLRGDDLLRSVRLGGRKVRSVGFRVTSVSTTEDKTPARSGNVGLYTGRDPNVKKPAWLRQRAPQGEKLSKLKESITTLKLNTVCEEAQCPNIGECWNGGGGAGGEGDGIATATIMLLGDTCTRGCRFCAVATSRNPAPADPMEPENTARAIASWGVGYVVLTSVDRDDMPDGGSDHFARTVKTLKALKPELLVECLVSDFRGDLNAVHHLASSGLDVFAHNIETVKRLQRIVRDPRAGYEQSMAVLKHAKTLKGMVTKSSIMLGLGERDEEIKQTMLDLRDAGVDIFTLGQYLQPTPLHLTVKEYVTPEKFEYWKQYGESIGFRYVASGPLVRSSYRAGEFFIESMIRNERNNAAV

SEQ ID NO: 2741 - DNA, 1191 bp, Physcomitrella patens subsp. patens
  CDS (1)..(1191)
atgaagggaggagggcgagcgttagggtttcctgctctcatccggttcacccaggagcaagcgcgacgggcagtgcccattttaggtcaacaggttcgaagttcttccacgaccaatccccccacggagtcatcctcaactccagcaacccctaccctcaccgcattgcgagagcgtctcgccaaagggggtcctagcctaggtgattttatcactcattcgagcacaactccggagggatactctgtggaagtgggcaccaagaagaatcccaagccaaagcctgaatggatgaagatggttgttcctggcggagacaagtatgcttcaattaagtccaagttgagggaattgaaactgaatacggtttgcgaggaggccaggtgccccaacattggagaatgctggacagggggtgaaaccggcactgcaaccgctaccatcatgatactcggggatacctgcacacgaggttgcaggttctgtgcggtgaaaacttcgcgagcccctccaccggcggaccctgaagagcctctgcgagttgccgaagctatagttgcatggggattggattacgtggtgctgactagtgttgacagagatgacatgcctgatcagggcagcgcacacttcgctgagactgtgaaaaatctgaaagagcgcaaaccaacaatgcttgttgaagcgcttgttccggatttccgtggtgatccggcgtgtgtggaaagagttgcaacatcggggcttgatgtgttcgctcacaatattgaaactgttgaagagcttcaaagctctgtacgggatcgaagagctaatttcaagcaatccttggacgtgttgcgcatggccaagaagttcgcacccccgggcactcttactaaaacatcaattatgctcggctgtggagagactcctgcacaggtggtaaaagcaatgaagagtgtgcgggcggcaggtgtggatgtgatgacactaggccaatacatgaggccaacaaaacggcacatgcctgtttccgagtttgtcactcctgaggcatttgaagagtaccggaagttgggagttgaattgggcttccgatacgtggcatctggcccaatggtacgctcgtcctacaaagccggggagtatttcattaagtccatgatcgatgaagatcgtgaaaggcaaagaatcgctgccatagagtag

SEQ ID NO: 2742 - protein, 396 aa, Physcomitrella patens subsp. patens
MKGGGRALGFPALIRFTQEQARRAVPILGQQVRSSSTTNPPTESSSTPATPTLTALRERLAKGGPSLGDFITHSSTTPEGYSVEVGTKKNPKPKPEWMKMVVPGGDKYASIKSKLRELKLNTVCEEARCPNIGECWTGGETGTATATIMILGDTCTRGCRFCAVKTSRAPPPADPEEPLRVAEAIVAWGLDYVVLTSVDRDDMPDQGSAHFAETVKNLKERKPTMLVEALVPDFRGDPACVERVATSGLDVFAHNIETVEELQSSVRDRRANFKQSLDVLRMAKKFAPPGTLTKTSIMLGCGETPAQVVKAMKSVRAAGVDVMTLGQYMRPTKRHMPVSEFVTPEAFEEYRKLGVELGFRYVASGPMVRSSYKAGEYFIKSMIDEDRERQRIAAIE

SEQ ID NO: 2743 - DNA, 1173 bp, Coprinopsis cinerea okayama7#130
  CDS (1)..(1173)
atggctttgtaccgtgcacccaaactccagcgttctttgctcaaccgctgtctcgctactgcatccaccaccccagccgctgcttcgacgtcacggacctcgacgtttcgcaaaacattggaagagggtcccaccctcgatgactttattgctggagatgtacccaacaacagggttgtattgggaaacacctcagcacctcgccttccatcttacttgaagacttcaatccctacaggagcatcattttctaaaataaagaaagacttgcgtgggctcaacctgcacactgtgtgcgaagaagcccggtgtccgaacattggggactgttggggaggaaagcccggtgctaccgaggcagagggacgcagcgctgccactgctactatcatgcttatgggtgacacatgcactcgtggttgcaggttctgctcagtgaagacttcccgaacaccacctcctctcgatcctcacgaacccgaaaacactgctgaagctatcagtcgatggggtctcggttacattgttctaaccagtgttgacagagacgaccttgcagacggcggagctcgccacttcgcagagacgatttcaaagatcaaacaaaaagcgccccatattctcgtcgaggcacttaccggcgactttgcaggaaaccttgaacatgtatcccttgttgcgaaatctgggcttgacgtctacgctcacaacattgagaccgtggaagccttgactccgtttgttcgagaccgaagagccaccttccgacaatccctgagtgtgctgaaacgcgcaaaggaggaaggtgtcaaggtcacgaagaccagcatcatgttgggtgtgggcgagacggaggaccaagttctcgacgcacttaaggagctacgcaaggttgatgttgacgtcgtcacctttggccaatacatgcgaccaacgaagcgacacatgaaggtcgacagatacgtagaacccgccgagttcgacaggtggaagcaggttgcagaggatctcgggttcctgtatgttgctagcggacctttggtcaggagcagctacaaggccggtgaattttacattgagaacgtccttaagggcaagagtgtcaacaaaagggtgaagaacctcaccatggaatccgagctctcggaaaaatcagcctcggcgtcgctctga

SEQ ID NO: 2744 - protein, 390 aa, Coprinopsis cinerea okayama7#130
MALYRAPKLQRSLLNRCLATASTTPAAASTSRTSTFRKTLEEGPTLDDFIAGDVPNNRVVLGNTSAPRLPSYLKTSIPTGASFSKIKKDLRGLNLHTVCEEARCPNIGDCWGGKPGATEAEGRSAATATIMLMGDTCTRGCRFCSVKTSRTPPPLDPHEPENTAEAISRWGLGYIVLTSVDRDDLADGGARHFAETISKIKQKAPHILVEALTGDFAGNLEHVSLVAKSGLDVYAHNIETVEALTPFVRDRRATFRQSLSVLKRAKEEGVKVTKTSIMLGVGETEDQVLDALKELRKVDVDVVTFGQYMRPTKRHMKVDRYVEPAEFDRWKQVAEDLGFLYVASGPLVRSSYKAGEFYIENVLKGKSVNKRVKNLTMESELSEKSASASL

SEQ ID NO: 2745 - DNA, 1143 bp, Culex quinquefasciatus
  CDS (1)..(1143)
atgaaatactttttctccctcccctttcccaaggtccacacgacatgtaaacacacggcggcagcgacggccagccagcccctgcagaagattcgcgagcggctcgaaagtggccccggtttccaggagttcgtgcagaacccgtcgtacaaccgggaagactggagcgcctacgagggcaagttgaagcgcgaaaagggcgagcaggaccggctgcggttgccgccgtggcttaaaacgaagatcccaatgggaaagaactttagccgcatcaaggaccagctgcgcgagcttaagctggccaccgtctgcgaggaggccaaatgtccgaacattggcgagtgttggggcggcggagagcatggcacccagacggcgacgattatgctaatgggcgacacgtgcacccgcggatgtcgcttttgcagcgtcaaaaccgcccgcgctcctcccccgctggatccggacgagccaaagaaaaccgccagcgccatcgcatcctgggggctggactacatcgtactaacatccgtagaccgagacgacttgcccgacggaggctcaaatcacatcgccgagaccattcgcgaaatcaagcgccagaatccgcgcattttcgtcgaatgtctggcgccggacttccggggcaatctggactgcatccggacggtggccacgtccgggctggacgtttacgcgcacaacatcgaaacggtggaatcgctcacgccgtttgtgagggatcgccgcgccgagtaccgacagagcttgaagtgtttggccagcgtgaaggaaatcaacccgaacatggttacgaagacgtcgattatgctggggttgggcgaaacggacgaacaagttgagcagacgatgaaggatctacgcgccgtcggagtcgactgcttaaccctgggtcagtacatgcaaccgacgaagcgccacctgaaggtcatcgagtacgtgacgccggaaaagtttaaacactgggagacccggggcaacgaactgggcttcctgtacacggccagtggtcccctcgtgcgcagttcctacaaagcgggcgaatttttcatcacgagcattctcaagaatcgtgctgccgccgccgctgaagaggctacggccaccaagccgagcgagtga

SEQ ID NO: 2746 - protein, 380 aa, Culex quinquefasciatus
MKYFFSLPFPKVHTTCKHTAAATASQPLQKIRERLESGPGFQEFVQNPSYNREDWSAYEGKLKREKGEQDRLRLPPWLKTKIPMGKNFSRIKDQLRELKLATVCEEAKCPNIGECWGGGEHGTQTATIMLMGDTCTRGCRFCSVKTARAPPPLDPDEPKKTASAIASWGLDYIVLTSVDRDDLPDGGSNHIAETIREIKRQNPRIFVECLAPDFRGNLDCIRTVATSGLDVYAHNIETVESLTPFVRDRRAEYRQSLKCLASVKEINPNMVTKTSIMLGLGETDEQVEQTMKDLRAVGVDCLTLGQYMQPTKRHLKVIEYVTPEKFKHWETRGNELGFLYTASGPLVRSSYKAGEFFITSILKNRAAAAAEEATATKPSE

SEQ ID NO: 2747 - DNA, 1233 bp, Gibberella zeae PH-1
  CDS (1)..(1233)
atggcatccttggcttctctaaagcgggcgcatgcccctctccgcaaagcgctgagcgcaactcccaccctccgaactttcgccactgtacctcccagtggcaacgagcctgctaaacctcaaagaaagagttatttcaaggacacaacagtctccgacttcaacgacttccttgctacctcttctcccgcccaaccactgtctgcagcagaggcctactctctcaagaccgccgaagtcggcccagagggcaagaaacgaacgatcacacgactgccagaatggctcaagacgccgatccccgccggtaacgataacttcaagagcatcaagaaggatctgcgaggattgggactacacactgtttgcgaggaggctcgatgccccaacatttcagaatgttggggtggttccgataagaacgctgcgacagctaccatcatgctgatgggagatacatgcacccgaggatgtcgtttctgcagtgtcaagacaaacagaaaccctgctgcgttggatcctcacgagcccgagaatactgcagaagcattggctaggtggggtctgggctacgttgtgttgaccagcgtggaccgtgacgatctggcagacggtggtgcgcaccactttgcggagacaattcgaagaattaagcaaaagaagccctcattgctcgttgaagccttgaccggtgacttccgtggagatttggatatggtcaaggttgtggccgagagtggacttgatgtatatgcacacaatgttgagaccgtcgaggacctcactccttatgtgcgagaccgaagagctactttccgacagagtttggctgtcttgaagcacgttaaggatgttatgggcaaagatggtcctatcaccaagaccagtctgatgcttggtctcggtgagcaggagcgtgagcttatgtctgcgcttgaggaactccgaaaggcagacgtggacgttgtcacatttggtcaatacatgcgaccaactaagcgtcaccttaaggtagagaagtatgtgactcctgatgagtttgagatgtggcgcaagcgtgctctggatatgggtttcttgtactgcgccagtggccctcttgtgcgctcctcgtacaaggctggtgaggcctttatcgagaacgtccttcgcaagcgctctggcgagaaggccatggccagtggaaacctcggccagaccgtcgctctcgactcaactcaatcgtcgatctaa

SEQ ID NO: 2748 - protein, 410 aa, Gibberella zeae PH-1
MASLASLKRAHAPLRKALSATPTLRTFATVPPSGNEPAKPQRKSYFKDTTVSDFNDFLATSSPAQPLSAAEAYSLKTAEVGPEGKKRTITRLPEWLKTPIPAGNDNFKSIKKDLRGLGLHTVCEEARCPNISECWGGSDKNAATATIMLMGDTCTRGCRFCSVKTNRNPAALDPHEPENTAEALARWGLGYVVLTSVDRDDLADGGAHHFAETIRRIKQKKPSLLVEALTGDFRGDLDMVKVVAESGLDVYAHNVETVEDLTPYVRDRRATFRQSLAVLKHVKDVMGKDGPITKTSLMLGLGEQERELMSALEELRKADVDVVTFGQYMRPTKRHLKVEKYVTPDEFEMWRKRALDMGFLYCASGPLVRSSYKAGEAFIENVLRKRSGEKAMASGNLGQTVALDSTQSSI

SEQ ID NO: 2749 - DNA, 1167 bp, Candida glabrata CBS 138
  CDS (1)..(1167)
atgaggttaaccaccgtgcagcggaggtttctggtgtcgaccaaggctaaagtttctggggccagcatatcgagcacagctaacactggttcagcaagcgctggcgcgccaaatggacagaccagaagaagaagacgtataactgagttcaaggatgctctcaatttgggaccatcatttgaagatttcgtaagtgggcgagccgctggttttactgtagttgatcctttagaacaaatgcggcaggaccgtgaggaatataagaaattgcccaaatggctgaaagttcccattcctaaaggtgtcaactaccacaagctaaaaaaggacgtaaaggagcttaagttaagtactgtttgtgaggaagcaagatgtccgaatattggcgaatgttggggaggtaaggataaatctaaggctacagctacaataatgctactgggagacacttgtactagaggttgtagattctgctctgtcaagacaaatagaaatcctgcaaaaccggacccaacagaacctgagaatactgctgaagctatatctcggtggggtctcggttatgtggttttaacgacagtggatagagatgatttgccagatggtggtgcccatcatttggccgaaactgtgattaaaattaagcagaaggctccaaagacgcttgttgaagctttgacgggtgatttcttgggaaatcttgaaatggtagacgtaatggctaaaagtggactagatgtatatgcacataacttggagactgtggaagctttaaccccacatgtcagggatcgtcgtgccgggtacaggcagtcattaaatgtattgaagagggctaaggagactgtcccttctttgataactaaaacttcagttatgcttggtttaggtgaaactgatgaccagatcattcagactatgcaagatttaagggccattaactgtgatgtgataacatttggacaatatatgagaccaactaagaggcatatgaaagtagtagaatatgtaaggcctgaaaagtttgattattggaaagacaaagctaaagaaatgggattcttgtattgtgcttctggtcctttggttagatcatcatataaggcaggtgaagcatttattgagaatgttcttaacaaaagaaagcaagacaataagcgaatctaa

SEQ ID NO: 2750 - protein, 388 aa, Candida glabrata CBS 138
MRLTTVQRRFLVSTKAKVSGASISSTANTGSASAGAPNGQTRRRRRITEFKDALNLGPSFEDFVSGRAAGFTVVDPLEQMRQDREEYKKLPKWLKVPIPKGVNYHKLKKDVKELKLSTVCEEARCPNIGECWGGKDKSKATATIMLLGDTCTRGCRFCSVKTNRNPAKPDPTEPENTAEAISRWGLGYVVLTTVDRDDLPDGGAHHLAETVIKIKQKAPKTLVEALTGDFLGNLEMVDVMAKSGLDVYAHNLETVEALTPHVRDRRAGYRQSLNVLKRAKETVPSLITKTSVMLGLGETDDQIIQTMQDLRAINCDVITFGQYMRPTKRHMKVVEYVRPEKFDYWKDKAKEMGFLYCASGPLVRSSYKAGEAFIENVLNKRKQDNKRI

SEQ ID NO: 2751 - DNA, 1113 bp, Kluyveromyces lactis NRRL Y-1140
  CDS (1)..(1113)
atgctaaaaccaggaattcgttcggtacaaaaacggttcattacagaaactgtggtaaggtctacccagccatctgtttctagaagaaggaagactactcatttcacagataagttgaataaagggccctcttttgaagattttgttaacggtaatgcacaaaaatttaccttagatccgttagaaaaggcaaggcagaacagtgaagaagtgcaaaggctaccaacttggttaaaagtgccgattgccaagggttcaaatttccataagttgaaaaacgacgtgaaggagttgaaactaagtaccgtttgtgaggaagctaagtgtcccaacatcggagaatgttggggtggtggtgataagtcaaaggcaacagcaacaatcatgttgttaggtgatacttgtaccagaggttgtagattctgttccgtgaagactaatcggaaaccttcagcaccggatccgacagaaccagagaatactgcagaagctatttcgagatggggtctgggttacgtcgtgttaactaccgttgatagagatgatctcgtggatggtggtgcataccatttggcagaaactgttcagaagataaagcaaaaggcgcccaatattttggttgaaacattatctggtgatttcagaggtgacttagaaatggttaaagtcatggctctctcgggacttgacgtctacgcacataatatggaaaccgttgaagctttgacaccacacgttagggacagaagagccacttatagacaatcgttgagcgtgttggaatgcgccaagaaaaccgttccaactctggtaacaaaaacttcggtcatgttaggcttaggtgaaacggatgaacaagtcttgcaaaccatgaaggatcttcgtgccatcggttgtgatgtcatcacttttggtcagtatatgagacccacaaagagacacatgaaggttgtggagtacgtcacgccagaaaaattcgattattggaaacagaaagcgttagagttaggtttcctatattgtgcatctggtccgcttgttagatcctcttataaagctggtgaatcatttattgaaaatgttctaagaggcaggagtagagcaagaatttag

SEQ ID NO: 2752 - protein, 370 aa, Kluyveromyces lactis NRRL Y-1140
MLKPGIRSVQKRFITETVVRSTQPSVSRRRKTTHFTDKLNKGPSFEDFVNGNAQKFTLDPLEKARQNSEEVQRLPTWLKVPIAKGSNFHKLKNDVKELKLSTVCEEAKCPNIGECWGGGDKSKATATIMLLGDTCTRGCRFCSVKTNRKPSAPDPTEPENTAEAISRWGLGYVVLTTVDRDDLVDGGAYHLAETVQKIKQKAPNILVETLSGDFRGDLEMVKVMALSGLDVYAHNMETVEALTPHVRDRRATYRQSLSVLECAKKTVPTLVTKTSVMLGLGETDEQVLQTMKDLRAIGCDVITFGQYMRPTKRHMKVVEYVTPEKFDYWKQKALELGFLYCASGPLVRSSYKAGESFIENVLRGRSRARI

SEQ ID NO: 2753 - DNA, 1206 bp, Debaryomyces hansenii CBS767
  CDS (1)..(1206)
atgatttcattaaggagtatactgagaagtcctgcggttcaaccggcacggatttatcgtacgttagcgacagctgatacgtcgggtatcaatgagcaagccaaacctaagaccaagagaaagaagacagtgttttcagattcattaaataaaggaccatcgtttgaggactttgtgaacgggaaagcagcggatatgttggttgatccattagaagcggccagacaagatccgaaccaaagattgcccaaatggttgaaggtgccaatccccaagggaaagtcgtttaacaacttgaaaaatgacgtgagggagttgaaattagcaacggtgtgtgaagaggccaaatgtccaaacatcggtgaatgttggggaggaaagaagtcggaggccactgccacgatcatgttgatgggggacacctgtaccagaggatgccgtttttgctctgtgaagaccagcagggcgccagccaagccagatcctatggagccggagaacacggccgaagctatcagtagatgggggcttggatacgttgttttgaccacggtcgacagggacgatttagtggatggtggtgctaaccacttggcggaaacggtgagaaagatcaaagaaaaagcaccccaaatcttggtagaagtattgggaggtgacttcagaggagacttggatatggctgcgattttggcaagatcgggcttagatgtgtatgcccacaacatcgaaacggtcgaggcattgacaccctacgtaagagaccgcagggccacttatagacaatccttgtcaatcttgaacaaggccaaggagacaaagccatcgttggtgaccaagacgtcgcttatgttaggattcggtgagaccgacgaacagatcatgcaaacgttgaaagacttgagagaaataaagtgtgacgtcgtgacattcggccaatacatgagacctaccaagagacacatgaaggtggttgattatgtcaagcctgaaaaattcgactactggagagacaccgctttacaaatgggcttcctttatgttgccagtggtcctttggttagatcgtcctacaaggcaggtgaagcctttattgaaaacgttattagaaagagaagacacaatgttggtgaaacccccaagattggcccaagaagtcaacccaaagattatatcccaatccatttgatgagaatattgctttaa

SEQ ID NO: 2754 - protein, 401 aa, Debaryomyces hansenii CBS767
MISLRSILRSPAVQPARIYRTLATADTSGINEQAKPKTKRKKTVFSDSLNKGPSFEDFVNGKAADMLVDPLEAARQDPNQRLPKWLKVPIPKGKSFNNLKNDVRELKLATVCEEAKCPNIGECWGGKKSEATATIMLMGDTCTRGCRFCSVKTSRAPAKPDPMEPENTAEAISRWGLGYVVLTTVDRDDLVDGGANHLAETVRKIKEKAPQILVEVLGGDFRGDLDMAAILARSGLDVYAHNIETVEALTPYVRDRRATYRQSLSILNKAKETKPSLVTKTSLMLGFGETDEQIMQTLKDLREIKCDVVTFGQYMRPTKRHMKVVDYVKPEKFDYWRDTALQMGFLYVASGPLVRSSYKAGEAFIENVIRKRRHNVGETPKIGPRSQPKDYIPIHLMRILL

SEQ ID NO: 2755 - DNA, 1056 bp, Yarrowia lipolytica CLIB122
  CDS (1)..(1056)
atgctcaagcgacagctccattccgccagcaaacggtcggccacccgtttttccgacgcactcaacaagggcccctcgttcgatgactttctgaccggacgagcaggaaaggcagcagccgttgatcctgtcctggcagcatcgtcagacggaaaacgactgcccaagtggctcaagacagaaattcccaagggaaagaacctgcacaacatccgggaggacctgcgaggtctgggtctgcacactgtgtgtgaggaggcccgatgtcctaacattggagagtgttggggtggatcggacaagagcaaggccacagccaccatcatgctcatgggagacacgtgcactcgaggctgtcgattctgctccgtcaagacaaaccgaaaccccggccctctggaccccaacgagcccgaaaacaccgccgtggccatctccaagtggggtctgggctatgtggtgctcactactgtggacagagacgacttgtccgatggaggatcgtggcattttgcagacaccgtcaaacgaatcaaggagaaggcgccccacattctggtcgagacgctatctggagacttccgaggcaatctggaccacgttactactctcgccgagtctggactcgatgtctttgcccacaacatggagaccgtcgaggctctgaccccctttgtgcgagaccgaagagccacgttccagcagtcgttatccgtgctcagacaggccaaggtggccgtgcccgacctcatcacaaagacatctatcatgctgggtttcggagagaccgacgaacaggtcgaagacactcttatgcagttgcggggcgtgggtgtcgacattgtcacctttggacagtacatgcggcccacaatccgacatctgaaggtggctgaatacgtgacacccgagaagtttgactactggcagaagcgggccatggatatgggtttcctttactgtgcatccggacctctagtgcgatcttcgtacaaggccggcgaggtgttcattgaaaacgtgttgaagaagcgaaatgccgccaaggctgtctaa

SEQ ID NO: 2756 - protein, 351 aa, Yarrowia lipolytica CLIB122
MLKRQLHSASKRSATRFSDALNKGPSFDDFLTGRAGKAAAVDPVLAASSDGKRLPKWLKTEIPKGKNLHNIREDLRGLGLHTVCEEARCPNIGECWGGSDKSKATATIMLMGDTCTRGCRFCSVKTNRNPGPLDPNEPENTAVAISKWGLGYVVLTTVDRDDLSDGGSWHFADTVKRIKEKAPHILVETLSGDFRGNLDHVTTLAESGLDVFAHNMETVEALTPFVRDRRATFQQSLSVLRQAKVAVPDLITKTSIMLGFGETDEQVEDTLMQLRGVGVDIVTFGQYMRPTIRHLKVAEYVTPEKFDYWQKRAMDMGFLYCASGPLVRSSYKAGEVFIENVLKKRNAAKAV

SEQ ID NO: 2757 - DNA, 1161 bp, Candida albicans SC5314
  CDS (1)..(1161): transl_table=12
atgatttcaagaaactctatacttttgagaagactatatcctacaactataataaggacactagctacagatgccactgaatctactctggtaaagacgaaaagaagaagaacaattttcactgatgaattgaataaaggaccatcattcgatgatttcgtcagtggaaaagccaaagatatgttggaggatccattggaaacagcaagaaaggatccaaatgccaaattgccaagttggttaaaagttcctattcctaaagggaagtcattccataatgtgaagaaagatgtacgtgaattgaaattagccacagtgtgtgaagaagctaaatgtcctaacattggagaatgttggggtggtaaaaaatctgaagctactgctacaatcatgcttttgggtgatacatgtactagaggatgtcgattctgttcggtaaagactaaccgtaaacctgctgccccagatccaatggaaccagaaaataccgctgaagctattagtagatgggggttgggatacgttgttttgacaaccgttgatagagatgatttagtcgatggtggtgctagacatttggcagaaacggtgcaaaagataaagcaaaaggctccacagattcttgttgaagtattgggaggtgattttagaggtgatttatctatggttgaaatattagctgattcaggattggatgtttatgctcataatttggaaactgtggaagctttgacccctcatatcagagaccgtcgtgctacttaccgtcaatcattggctgttttagagagggccaaacaaacaaactcatctttgatcactaaaacttcgttgatgcttggatttggtgaaactgatgaccaagttttgcaaacattaagagatttacgtgagattggttgtgacgtggtaacttttggtcaatatatgagaccaacaaagagacatatgaaggttgttgagtacattaaaccagaaaaattcgattattggcgtgacactgctttagatatgggattcctttatgttgcaagtggaccattggttagatcatcgtataaagcaggtgaagcttttatagaaaatgtgttgaaaaagagaaaacacaatgttggtgaaacaccaagattagcacaagaaattaagccaagcatatactaa

SEQ ID NO: 2758 - protein, 386 aa, Candida albicans SC5314
MISRNSILLRRLYPTTIIRTLATDATESTSVKTKRRRTIFTDELNKGPSFDDFVSGKAKDMLEDPLETARKDPNAKLPSWLKVPIPKGKSFHNVKKDVRELKLATVCEEAKCPNIGECWGGKKSEATATIMLLGDTCTRGCRFCSVKTNRKPAAPDPMEPENTAEAISRWGLGYVVLTTVDRDDLVDGGARHLAETVQKIKQKAPQILVEVLGGDFRGDLSMVEILADSGLDVYAHNLETVEALTPHIRDRRATYRQSLAVLERAKQTNSSLITKTSLMLGFGETDDQVLQTLRDLREIGCDVVTFGQYMRPTKRHMKVVEYIKPEKFDYWRDTALDMGFLYVASGPLVRSSYKAGEAFIENVLKKRKHNVGETPRLAQEIKPSIY

SEQ ID NO: 2759 - DNA, 2358 bp, Ustilago maydis 521
  CDS (1)..(2358)
atgagctgctggactacctcggccgcatctgtccgcgctgtagcaccaaggctgctgcgtgcaccaagcgctgcttctactcttccaagccagttgctcgccacctctatcagccgtgtcgccacagcagcagcatcctcctcctcttctccttcctcctcaaggcacattttttcgtcggctagactcaagaacaacacagctgcaccttcaaagacagtttctggccaagatatttcgatcgcattggatgacaagggacaaattccagcagcgccctactcgcagttgccccttgccgggacttcgccctcgtacaaggtgcatctgatcgtgcacccctacgaccaccctcgaccggtcgaatcgtggccttcccacctcgagtccgtctctcccttactctcggagctcgagagccgcgctaagaagggaggcagccttgagggctatggcatttcgttttcgtctggtgacggccgcaccggcaccgggaccgggacccgttccgaagcgttgaagccatgggatgcgaccacttcgcgaatgatgcgcagcgttcccaattcagcgcaggagcaggagcaattcctagtctacgcttataccaccaatggcaccatggccaaagtcggtcccatctcacttgccacgctcgactctggctcgccgtttcgccaacgtattgacgatgctctcgcctctgcgcagcctcagacgggacgtgccaagcaggacgatgagacgcatgtgtacgtgtgcacgcatggcgcgcgcgactgccgttgcggtgtcgccggaaccgccgtgtacgaagctcttaaagacgaggttcgctcacaccaagcctcgatcatcaagagtggcaaggatgcacccaagaaggtcaaagtatttgccgtcagtcacgtcggtggacacgcgtgggcggcgaatgcgctcgtttacccacatggtgattggtacggcaacttgagggtaaccgactcaaagctcgtcttgcgcgctgcgctggcacctgccagttcgatgcacgacctcgacgatttgcgggagagacttgtacactggccacgatggcgtggcaggttggggctcagcaaagcagcacagcgtgaccactatgcagagtggggcccacccaccatcaacacggcgcacatcacgccgcgaagcagagggacagccagctcggcgcgatctcggccatctttggctgcgctatccacacctgggcatgctcacgcgagcacgtcttctgcaaggacgtatgccacagatgcgtctgacagcaagaagaaggcgccgtcggcacggatggtggcgttcagagagaagctcgcggctgatctgtcgatcgatgactttgctgcgggcgaggtggactcgatcatgacgtctgcttcggcgtcaggtcgagtgcagatgggtcgaacgggagaagcgcggcttccgtctcatttgaaaaccaagattccgacaggcgccaactacacgcgcatcaagtcggaccttcgcggtcttgggctttccacagtatgcgaggaagcgcgatgtccgaatatcggcgaatgttggggcgggtctggaggcaaagatacggctacggctacgatcatgattatgggcgatacgtgtacgcgaggctgtcggttctgtgcggtcaagacgtctcgtgcacccgcgccgctcgatccgcacgaaccggagaacacagcggaagcgatctcgcgctggggtcttggatacattgttctcacctctgtggatcgggatgatattgcggatggcggtgcaagtcatatcgccagtaccatctccaagatcaaggccaagtcgcgcaagattctggtcgaggctctggtgcctgatttttcgggcgatatggcgtgtgtagaaaaagtggcgcattcgggcgtcgatgtatttgcacacaacgtagagaccgtagagcggacaacgcctatggtgcgcgatcgacgtgccaagtatcgtcagtcgctggctgtgctactgcatgcgaaacaggcgaatccggcgttgatcacaaagacgtcgatcatgcttggatgcggcgaacgcgacgacgaggtcgagcagacgcttcgcgatctcagaaatgcacacgtagacgtcgtcacttttggccagtacatgcgtcctacaaagcgacacatgaaggttcaccaatataaacgcgccgaacacctcggcttcttgtacgtcgccagcgggcccctagtcagaagcagctacaaggccggcgagttcttcatcaagaacgtcctcgaacagagaaacagtgcacacaacctctatcccacctccgagcaagctgtccagagcacaacctcatag

SEQ ID NO: 2760 - protein, 785 aa, Ustilago maydis 521
MSCWTTSAASVRAVAPRLLRAPSAASTLPSQLLATSISRVATAAASSSSSPSSSRHIFSSARLKNNTAAPSKTVSGQDISIALDDKGQIPAAPYSQLPLAGTSPSYKVHLIVHPYDHPRPVESWPSHLESVSPLLSELESRAKKGGSLEGYGISFSSGDGRTGTGTGTRSEALKPWDATTSRMMRSVPNSAQEQEQFLVYAYTTNGTMAKVGPISLATLDSGSPFRQRIDDALASAQPQTGRAKQDDETHVYVCTHGARDCRCGVAGTAVYEALKDEVRSHQASIIKSGKDAPKKVKVFAVSHVGGHAWAANALVYPHGDWYGNLRVTDSKLVLRAALAPASSMHDLDDLRERLVHWPRWRGRLGLSKAAQRDHYAEWGPPTINTAHITPRSRGTASSARSRPSLAALSTPGHAHASTSSARTYATDASDSKKKAPSARMVAFREKLAADLSIDDFAAGEVDSIMTSASASGRVQMGRTGEARLPSHLKTKIPTGANYTRIKSDLRGLGLSTVCEEARCPNIGECWGGSGGKDTATATIMIMGDTCTRGCRFCAVKTSRAPAPLDPHEPENTAEAISRWGLGYIVLTSVDRDDIADGGASHIASTISKIKAKSRKILVEALVPDFSGDMACVEKVAHSGVDVFAHNVETVERTTPMVRDRRAKYRQSLAVLLHAKQANPALITKTSIMLGCGERDDEVEQTLRDLRNAHVDVVTFGQYMRPTKRHMKVHQYKRAEHLGFLYVASGPLVRSSYKAGEFFIKNVLEQRNSAHNLYPTSEQAVQSTTS

SEQ ID NO: 2761 - DNA, 1188 bp, Cryptococcus neoformans var. neoformans B-3501A
  CDS (1)..(1188)
atggtaaagctcccctcagcatcccgcatccgttctctcgccaccgtgccctccacggccaccagggctttcgctaccgtcaatcccacccctcctgccgcccagcccacaaaatccaaacctcgtttcgaaaagctcgacgatggattgacttttgacgactttttatcaggcgatgttccccccgagaacgaacgtgtggttctgggtaacacgaaacaacctcgtttgccatcttttctcaagcacccgatccccactggcgcttcctacagcggtataaaaaaggaactccgtggattaggactacacactgtctgtgaagaagccaagtgtcccaacattggcgaatgctggggcggcggtaaaggaaatgcgacggcgacgatcatgttgatgggcgatcaatgtacgagaggatgtcgattctgctctgtaaagacctccagggcacctcctccactggacgtccacgagccggagaacactgcggaagcaatcagccgatggggtttgggttacattgtactgacaagtgtcgatcgagatgacctggtggacggtggtgcggcccatatcgcctctacgatttccaaaatcaagcaaaaggcacccaatatcctcgtcgaagcgcttactcccgacttcgccacaaagggcgtcaacgttatccacaccgttgcttcctctggccttgatgtctttgcgcataacgtggagactgttgaaaggtgtacgccgtttgtacgagataggcgggcggggttcagccagagtttaaaagtgttggaagaggccaagaagggagccaaggccgcgggcagggagattttgacaaagagcagtatcatgctgggtgtcggggagatggaagaggagatccacgaaacactgagacggttacgcgcgtcggacgttgacgttgtcacttttggtcaatacatgcgaccgacaaaacgacacatgaaggtggaccggtatgtcgaacctgaagagtttgcgaaatggaaaaacgttgccgaggggatggggttcttgtatgtggccagcggacctcttgtcaggtcaagttacaaggctggtgaattctttattgaaaatgtactcaagaagcgacgtgcagctgctgccgagcacgctgcttcccaattatctacacagccgccagagatcgctgccaaggtgtaa

SEQ ID NO: 2762 - protein, 395 aa, Cryptococcus neoformans var. neoformans B-3501A
MVKLPSASRIRSLATVPSTATRAFATVNPTPPAAQPTKSKPRFEKLDDGLTFDDFLSGDVPPENERVVLGNTKQPRLPSFLKHPIPTGASYSGIKKELRGLGLHTVCEEAKCPNIGECWGGGKGNATATIMLMGDQCTRGCRFCSVKTSRAPPPLDVHEPENTAEAISRWGLGYIVLTSVDRDDLVDGGAAHIASTISKIKQKAPNILVEALTPDFATKGVNVIHTVASSGLDVFAHNVETVERCTPFVRDRRAGFSQSLKVLEEAKKGAKAAGREILTKSSIMLGVGEMEEEIHETLRRLRASDVDVVTFGQYMRPTKRHMKVDRYVEPEEFAKWKNVAEGMGFLYVASGPLVRSSYKAGEFFIENVLKKRRAAAAEHAASQLSTQPPEIAAKV

SEQ ID NO: 2763 - DNA, 1242 bp, Aspergillus nidulans FGSC A4
  CDS (1)..(1242)
atggctgctgcgacaaatcgcttcagagctctatactcgtcctcaagggtcgctactcctcaagcgggcagcgcatcctatctcagttatcggggctatgctactacggatccctcatccgccactggcggagcttcgacagctggcaagagacggacaacattcacggacaagctcaacgcgggaccttcttttggagactttgtctctgggggaagagacaatgctcccctcgatccttccgaagcttatgctcttaagaccgccctagttgggccggctggccgcaagaaggaaatgactcggttaccatcgtggctgaaaacgccgattcccgattcgaagaactaccagcgcctcaaaaaagatcttcgtgggctcaatttgcatactgtatgtgaggaagcccggtgtcccaatatttccgactgctggggtggtggtgacaaggctgctgctactgcgacaatcatgctgatgggtgacacttgcacacgaggttgtcggttctgcagcgtgaagacttcacgcgcgccgccgccgcttgatccgcatgagccggagaataccgcggaggctatttcgcgatggggactgggatatgtggtgctgacgagtgtcgaccgcgacgacctagccgacggtggtgctcgccacttcgcggagacggtcatcaaaatcaaacagaaggcgcctaatattttggtggaatgcttgacaggtgattatgcgggagacttggaaatggtcggtgtcgtggcccgatcaggtctagatgtctacgcgcataatgtcgagactgttgaggccctaacaccacacgtccgcgaccgtcgagctaccttccagcagtccctccgtgtgcttgaagctgcaaagaaagccaagccatcgcttatcacaaagacctctcttatgttgggacttggggagaccgaagaacagctctgggatgcgctccgccaactccgcgctgtcaatgttgatgttgtgacgtttggtcagtatatgcgcccaacaaagcgtcacatggccgtgcacgaatatgttacccctgaccgatttgaactctggcggcagcgtgctcttgacatgggcttcctctactgtgcttccggtccgttggtcaggagtagttacaaagcaggcgaggcgtttattgagaacgtcctgaagaaaagaaggtctggcgccccggaagtcagccataacacggtcccagttgatgaggcgacgcggtaa

SEQ ID NO: 2764 - protein, 413 aa, Aspergillus nidulans FGSC A4
MAAATNRFRALYSSSRVATPQAGSASYLSYRGYATTDPSSATGGASTAGKRRTTFTDKLNAGPSFGDFVSGGRDNAPLDPSEAYALKTALVGPAGRKKEMTRLPSWLKTPIPDSKNYQRLKKDLRGLNLHTVCEEARCPNISDCWGGGDKAAATATIMLMGDTCTRGCRFCSVKTSRAPPPLDPHEPENTAEAISRWGLGYVVLTSVDRDDLADGGARHFAETVIKIKQKAPNILVECLTGDYAGDLEMVGVVARSGLDVYAHNVETVEALTPHVRDRRATFQQSLRVLEAAKKAKPSLITKTSLMLGLGETEEQLWDALRQLRAVNVDVVTFGQYMRPTKRHMAVHEYVTPDRFELWRQRALDMGFLYCASGPLVRSSYKAGEAFIENVLKKRRSGAPEVSHNTVPVDEATR

SEQ ID NO: 2765 - DNA, 1119 bp, Tribolium castaneum
  CDS (1)..(1119)
atgtccaactttaaacgcctcttaaatgtgccccacgttaacaaaaccacttttcgattatcccacaaatcacacttggaagccctccgagaacggattataaacggccccagtctccaagactttataaagagccccgatcctgtcttaaaagaagactccgaggcttggaaagactacaatgggaggctcaaaagaaccaaaagtgaaagttcccgtcttaggttacccccatggttaaagacctcaattcccaaaggaaaaaaattcagcgagcttaaagaacagttaaggaaccttaatttgcacactgtgtgcgaggaggcaaggtgtccaaatattggggagtgttggggtggaggcgagcatgggacggctacagctaccatcatgttgttaggagacacttgtacaagggggtgccgattctgttccgttaagacctcaaaaacgcctccagcacccgacccaaacgaacctgttaaaactgcctcagctatagcatcatgggggctggactatattgtgctaacatcagttgaccgcgacgatttgcctgatggaggttcaaatcattttgccgaaactgtgagagagataaagaagcgtaagagcgagattctagtagagtgcttagtgcctgactttgctggtgacctaaatgctgtgaagacaattgttgattcaggtttggatgtttacgctcacaatattgaaactgttgaagctttaactccgtttgtaagagacagaagagcaaaatataggcagtcgttggcaactcttgaagctgttaaaaaatttaaccccgatatgattacaaagtcgtcaattatgttgggtttgggtgaaactgacgatgaagttagacaaactttggaggatttaaagacagcaggtgttgattgtgtgactcttggacagtacatgcaaccaactaaaaaacatctactggttgttgaatatgtaacacctgagaagtatcaatattgggaaaaagtaggaaatgaaatgaagtttttgtacgttgcgagtggacctcttgtgagaagttcctacaaagctggtgaattcttcattgcgagtattttaaaaaatagaaaaactaatgctgtgtaa

SEQ ID NO: 2766 - protein, 372 aa, Tribolium castaneum
MSNFKRLLNVPHVNKTTFRLSHKSHLEALRERIINGPSLQDFIKSPDPVLKEDSEAWKDYNGRLKRTKSESSRLRLPPWLKTSIPKGKKFSELKEQLRNLNLHTVCEEARCPNIGECWGGGEHGTATATIMLLGDTCTRGCRFCSVKTSKTPPAPDPNEPVKTASAIASWGLDYIVLTSVDRDDLPDGGSNHFAETVREIKKRKSEILVECLVPDFAGDLNAVKTIVDSGLDVYAHNIETVEALTPFVRDRRAKYRQSLATLEAVKKFNPDMITKSSIMLGLGETDDEVRQTLEDLKTAGVDCVTLGQYMQPTKKHLLVVEYVTPEKYQYWEKVGNEMKFLYVASGPLVRSSYKAGEFFIASILKNRKTNAV

SEQ ID NO: 2767 - DNA, 894 bp, Prochlorococcus marinus str. AS9601
  CDS (1)..(894): transl_table=11
ttgactaataattccaatagtttaatttcaaaacctgactggttaagagtaaaggctccacaagttgagagaattgggagtactgcaaatttgttaaatgatttaaatctcaatactgtatgtcaagaggcaagttgtccaaatattggtgaatgttttgctagtggcactgccactttcctcataatgggtcctggctgtactagggcatgtccatattgcgatattgattttgatagatctaaaagagaattagatccaacagaaccatatcgtttagccgaagctgtttatagaatgcaacttaaacatgttgtaatcacatcagttaatagagacgatcttgaggatggtggcgcatctcaattttttgaatgtgtttatcaagtaagaaaaaaatcgcctgaaactactattgagcttttaatacctgacctttgtggcaactggaaagcgcttgaaaaagttcttgattcaaatccaaatgttttaaatcataatattgaaactgtgcctgcgctatataaaaaagtaagacctcagggtaaatatgagagaactcttgagttgcttaaaaggaccagagaatattctcccaaagtttatacaaagtcaggttttatgcttggtttaggggaaaaagatgaggaggtcttaagtcttcttaaggatttaaaaactaattccgttgatattgttactattggccaatacttatctcctggtccaaatcatttacctgtacaaagatttgtgagtccctcaaaatttaattattataaagttttcggagaaaaaaatttggactttatgcaagtagttagttctcctttaactcgtagcagttaccatgctgaagaaattcaaaaacttatgaaaaagtatccaagatag

SEQ ID NO: 2768 - protein, 297 aa, Prochlorococcus marinus str. AS9601
MTNNSNSLISKPDWLRVKAPQVERIGSTANLLNDLNLNTVCQEASCPNIGECFASGTATFLIMGPGCTRACPYCDIDFDRSKRELDPTEPYRLAEAVYRMQLKHVVITSVNRDDLEDGGASQFFECVYQVRKKSPETTIELLIPDLCGNWKALEKVLDSNPNVLNHNIETVPALYKKVRPQGKYERTLELLKRTREYSPKVYTKSGFMLGLGEKDEEVLSLLKDLKTNSVDIVTIGQYLSPGPNHLPVQRFVSPSKFNYYKVFGEKNLDFMQVVSSPLTRSSYHAEEIQKLMKKYPR

SEQ ID NO: 2769 - DNA, 900 bp, Prochlorococcus marinus str. MIT 9515
  CDS (1)..(900): transl_table=11
atgaaagataaaaatcaaattaaaatagaaaagattttaaggcttccttcttggataaaatttccaattagtaaagcctctgaatttgagaagattcaaacacttataaaaaaatcgaatattcatactatttgtgaagagggaagatgtccaaatagagccgaatgttatgcagcagggacagctactttcttactgggaggctcaatttgttctcgcgcgtgcgccttctgtcaggtaaataaaggtaaacctactcccttaaataacttcgaaagcattcaagtcgcagaagcagtaaaaatcctaaatttaaaatatgtcgttttaacctcagtcgctagagatgatctccccgatcatggagctaatttatttatttcaacgattaatgagataagaaagtttgatccaaaaattcaaattgaggtactaacccctgatttatggggcggcggtaaaagttttgaagataaagataaacttcaaaaagagagacttagaaccatactagaaaaaaaaccaacttgttttaatcataatcttgagacggttgaaagacttcaaaaagaagttcgtagaggagctagttataaaaattctttaagcttgctagaaaaagctaaatctattgctcctgatattcaaactaaatcaggaattatgttgggtttaggagaaacattaaaggagatagaaacaacaattcttgatctaaaaaaagtaaattgcgatcaaattacaattggacaatacctaagaccttcattgaagcatttatcagttaaaaaatattgggaaccaagtgaatttgaatatctaacaaatttttccaagaaattagggtttaagaaagtatcatgtggacctttagttagaagtagttatcacgctggttga

SEQ ID NO: 2770 - protein, 299 aa, Prochlorococcus marinus str. MIT 9515
MKDKNQIKIEKILRLPSWIKFPISKASEFEKIQTLIKKSNIHTICEEGRCPNRAECYAAGTATFLLGGSICSRACAFCQVNKGKPTPLNNFESIQVAEAVKILNLKYVVLTSVARDDLPDHGANLFISTINEIRKFDPKIQIEVLTPDLWGGGKSFEDKDKLQKERLRTILEKKPTCFNHNLETVERLQKEVRRGASYKNSLSLLEKAKSIAPDIQTKSGIMLGLGETLKEIETTILDLKKVNCDQITIGQYLRPSLKHLSVKKYWEPSEFEYLTNFSKKLGFKKVSCGPLVRSSYHAG

SEQ ID NO: 2771 - DNA, 894 bp, Prochlorococcus marinus str. MIT 9515
  CDS (1)..(894): transl_table=11
ttgactaatattttaaataattcagttgccaaacctgaatggttaagagtaaaagcacctcaagttgagagaattggtaatatttcaaatttattgagtgatctaaaattaaatacagtttgtcaagaagcaagctgtcctaacattggggaatgttttgccagcggtactgcaacctttttaatcatgggccctggttgcactagggcatgtccatattgcgatattaattttgatagatcaaagagagatttagacccaacagaacctgaccgtttagcagaggctgtacatagaatgaaacttaagcatgtggtaataacatcagttaacagagatgatcttgatgatggtggtgcttctcaattctacaaatgtgtctcggaagttagaataaagtctcctcaaactactattgaattattaatcccagatttatgtggcaactggggagcacttgaacaggtattagattctaaaccaaatgttttgaatcataatattgaaactgtaccaagcttgtatagaaaagtaagaccacaaggaaactatcaaagaactttagagttacttaaaagaacaagagaatattttccaaatgtttatacaaagtcaggttttatgcttggattaggagaaaaggatgatgaagttttaaatctcctaatggatctaagaagaaatgatgtagatatagttactattggacaatacttatctccaggcccaaaacatcttcctgttcaaagatttgtgagcccttcgaaatttaattattttaaattatttggagaagatgaattaggttttatgcaaatcgtgagttctcctttaacacgtagtagttatcatgctgaagaaattcaaaaactcatgaaaaaacatccaagataa

SEQ ID NO: 2772 - protein, 297 aa, Prochlorococcus marinus str. MIT 9515
MTNILNNSVAKPEWLRVKAPQVERIGNISNLLSDLKLNTVCQEASCPNIGECFASGTATFLIMGPGCTRACPYCDINFDRSKRDLDPTEPDRLAEAVHRMKLKHVVITSVNRDDLDDGGASQFYKCVSEVRIKSPQTTIELLIPDLCGNWGALEQVLDSKPNVLNHNIETVPSLYRKVRPQGNYQRTLELLKRTREYFPNVYTKSGFMLGLGEKDDEVLNLLMDLRRNDVDIVTIGQYLSPGPKHLPVQRFVSPSKFNYFKLFGEDELGFMQIVSSPLTRSSYHAEEIQKLMKKHPR

SEQ ID NO: 2773 - DNA, 924 bp, Prochlorococcus marinus str. NATL1A
  CDS (1)..(924): transl_table=11
atgacaacaacaacaagaaaaaaaacaaaatacagtagcttcctcccagaagagcgtttacctaattggatcaaaccatccataggtaacgcaactcaactagagaaagttcaaaagctcgtaaaggaaaacagattacatacgatctgtgaagaaggcagatgcccgaacagaggtgaatgttatgccgctggtacggctacttttttattgggcggctcaatatgtacaaggagctgtgccttttgccaagtagagaaaggaaagtcgccagagaaagtaaatatttttgaggcagagaaagtagcaaatgctgttcaggtattgaatcttaaatatgtggtactaacagcagtcgcaagagatgatttgccggatcacggtgcaagtctattcacgacaacaatggatgcaattagatccttgaatccaggtgtcgcaatagaggtactaacaccagatttctggggtggcaacaacaaggacaatgtcgaaaagcaaagagagcgccttaagctagttctttcggctaatccgatttgtttcaaccataatcttgaaactgtcaaaagacttcaaggagaagtcaggagaggtgctacttaccaacactcactcaatcttctcaaatttgctagagaaatcgatccaaaaattcctacaaaatcaggaataatgcttggactgggagaaaaatttcatgaaataattcaaacccttaaagaccttaggaaagtagactgtcaatatttgactatcggtcaatatttacgaccttcacttgctcacattccagtttctcattattggtcaccaacaaaattcaaggattttgcagaaatagcaaagggattaggttttaagaaagtaaacagcggtcctttagtaagaagcagctaccatgcgaatgagaccttagattag

SEQ ID NO: 2774 - protein, 307 aa, Prochlorococcus marinus str. NATL1A
MTTTTRKKTKYSSFLPEERLPNWIKPSIGNATQLEKVQKLVKENRLHTICEEGRCPNRGECYAAGTATFLLGGSICTRSCAFCQVEKGKSPEKVNIFEAEKVANAVQVLNLKYVVLTAVARDDLPDHGASLFTTTMDAIRSLNPGVAIEVLTPDFWGGNNKDNVEKQRERLKLVLSANPICFNHNLETVKRLQGEVRRGATYQHSLNLLKFAREIDPKIPTKSGIMLGLGEKFHEIIQTLKDLRKVDCQYLTIGQYLRPSLAHIPVSHYWSPTKFKDFAEIAKGLGFKKVNSGPLVRSSYHANETLD

SEQ ID NO: 2775 - DNA, 870 bp, Prochlorococcus marinus str. NATL1A
  CDS (1)..(870): transl_table=11
ttgcttaaaccagactggcttcgtgttaaagcaccacagcaagagaggattggtaatgttgctgatctattagttgatttaaaactcaatacagtttgtcaggaagcaagttgtccaaatattggagagtgttttgcaggaggtactgctactttcttaataatgggacctgcttgcacgagaaaatgtccttattgcgatatttcatttgataattcaaaaaggcttttagacccatcagaacctgatcgtctaggtgaagctgtttacagaatgggcttaacgcatgtcgtaataacttccgttaatcgtgatgatttagaagatggaggcgctagtcaatttttgaaatgtattaaggctgtgcaaagtaaatctccttttacttctattgaagtcttaatcccagatctttgcggaaattgggatgctttgaaagttatcttggatgctgcgccaaatgtccttaatcacaatatcgagacagttccgaggctatatccaagagttagacctcaagggaaatatgaaaggtctttagaattattaaaaagagttcgggaaggttggccaagagtttatacaaaatcaggactaatggctggattaggggagacagatgatgagattttgagtgttctaagtgatctccatttaaataaagttgatatagtaactattgggcaatatttatcaccaggaccaaaacatttacctgttaatagatttgtttccccttcgcaatttgatagttatcgtgttgagggagaaaataaattaggatttttacaggtcattagttcaccattaactagaagtagttatcacgctggagaagttaaaaaattaatgatgtctcatccaagatga

SEQ ID NO: 2776 - protein, 289 aa, Prochlorococcus marinus str. NATL1A
MLKPDWLRVKAPQQERIGNVADLLVDLKLNTVCQEASCPNIGECFAGGTATFLIMGPACTRKCPYCDISFDNSKRLLDPSEPDRLGEAVYRMGLTHVVITSVNRDDLEDGGASQFLKCIKAVQSKSPFTSIEVLIPDLCGNWDALKVILDAAPNVLNHNIETVPRLYPRVRPQGKYERSLELLKRVREGWPRVYTKSGLMAGLGETDDEILSVLSDLHLNKVDIVTIGQYLSPGPKHLPVNRFVSPSQFDSYRVEGENKLGFLQVISSPLTRSSYHAGEVKKLMMSHPR

SEQ ID NO: 2777 - DNA, 921 bp, Prochlorococcus marinus str. MIT 9303
  CDS (1)..(921): transl_table=11
atgtcttccacccatcgtcagacccaatacagcaccattttgcctgcggagcgccttccggaatggttgcgtcgccccattggcagcgtctcccagttggagcagatgcagcagctggtgaaggggaatcaactacacaccatttgtgaggaagggcgttgtcccaatcgcggcgagtgttacgcagccggcacagcaacttttctcttaggcggatcgatctgtacgcgtagttgtgctttctgccaggtcatgaaaggccaatctcctcaggcaattgatccgctcgaagcagagcgagttgcagatgcggtgcagcagatgggtcttcgttatgtggttcttacttcagtcgcaagggatgatttgcccgaccatggggtgagtatttttactggcaccatggcggccattcgccagcgcaatcctcttattgagatagaagtgctgacgccggatttttggggcggattcgctgatctggccaaggcattagaggcccagagagaacggctcacgcagttgctcatggctgcaccagtttgtttcaaccacaacctcgaaaccgttgaaaggcttcagagcaaggttcgacggggagctacgtatcaccattctctcaatctgctggctgcagcgcgggaacttgctcccaacatccccaccaaatcaggcttgatgttgggactaggagaagagcaagaagaggtgattcagactcttgaggatctccgttctgttgactgtcaacgggtcacattgggtcagtatctgcgcccttcattggcacatattccggtgcatcgttattggcatcctgaggatttcaagaacttggctgaagttgctcgcaagcttggatttgctcaggtgcgtagtgggcctctagtgcgtagtagttatcacgctggtgaagaatga

SEQ ID NO: 2778 - protein, 306 aa, Prochlorococcus marinus str. MIT 9303
MSSTHRQTQYSTILPAERLPEWLRRPIGSVSQLEQMQQLVKGNQLHTICEEGRCPNRGECYAAGTATFLLGGSICTRSCAFCQVMKGQSPQAIDPLEAERVADAVQQMGLRYVVLTSVARDDLPDHGVSIFTGTMAAIRQRNPLIEIEVLTPDFWGGFADLAKALEAQRERLTQLLMAAPVCFNHNLETVERLQSKVRRGATYHHSLNLLAAARELAPNIPTKSGLMLGLGEEQEEVIQTLEDLRSVDCQRVTLGQYLRPSLAHIPVHRYWHPEDFKNLAEVARKLGFAQVRSGPLVRSSYHAGEE

SEQ ID NO: 2779 - DNA, 885 bp, Prochlorococcus marinus str. MIT 9303
  CDS (1)..(885): transl_table=11
atgactggaaagaccttactgaaaccccattggttgcgcgtcaaggctccacaacagcaacgcatcggcgaggtggccgagctgctgaatggcctcaatctcaagacggtgtgtcaagaggccagctgcccgaatatcggggagtgcttcgcaggaggaactgccaccttcttgatcatggggccgggctgcacccgcgcttgcccttactgcgacatcgactttgacaaaagcccacgatccctagaccccactgagccagagcacctaagcgaagcggtggctcagatgaaccttcgtcatgtggtcatcacttcagttaaccgtgatgacctcagcgacgggggagccagtcaattcgtcgcatgcatcgaggccattcgccaacgttctcccctaaccacaattgagctgctaattccggatttcaacggcaactgggatgccctcgccaaggtaatgggagcagctccggaggtgctgaaccacaacattgagaccgtcccccggctctacaaacgggcccgtccacaagctgactacatgcgatctcttgagctgttgtatcaagtgcggcaaggctggccaaaggtctatagcaagtccggcctgatggtggggctaggtgaaacagatgctgaggtaattgaggtcctagaggatctacgccgtcaccgagtcgacatagtgaccatcggccaatacctatcgccaagcccaaagcatctgccagtcgatcgctttgtgacaccagaacagttcgaatatttccgctctatgggggaaactgagctggggttccttcaagtggttagtacccctctcacacgcagcagctaccacgccggcgaggtccagcggctgatggccgcccacccacgctga

SEQ ID NO: 2780 - protein, 294 aa, Prochlorococcus marinus str. MIT 9303
MTGKTLLKPHWLRVKAPQQQRIGEVAELLNGLNLKTVCQEASCPNIGECFAGGTATFLIMGPGCTRACPYCDIDFDKSPRSLDPTEPEHLSEAVAQMNLRHVVITSVNRDDLSDGGASQFVACIEAIRQRSPLTTIELLIPDFNGNWDALAKVMGAAPEVLNHNIETVPRLYKRARPQADYMRSLELLYQVRQGWPKVYSKSGLMVGLGETDAEVIEVLEDLRRHRVDIVTIGQYLSPSPKHLPVDRFVTPEQFEYFRSMGETELGFLQVVSTPLTRSSYHAGEVQRLMAAHPR

SEQ ID NO: 2781 - DNA, 900 bp, Prochlorococcus marinus str. MIT 9301
  CDS (1)..(900): transl_table=11
atgagagaaattaatctaatcaagaaagaaaaaatcttaagacttccctcttggattaaatttcctattagtaaagcttcagaattcgaaaaaatacaaacactcatcaaaaaatcaaatattcataccatttgtgaagaagcaagatgtccaaatagagcagaatgttatgcctcaggaacagccaccttcttactgggtggatcgatatgttctcgttcatgtgctttttgtcaggtaaataaagggagaccaagtcctatcaatattgatgaatgtactcaagtcgctgaagctgtgaaagtactaaatttgaaatatgttgttttgacatctgtagctagagacgatctccctgatcatggtgcaaatttatttatatctacaattgatgagattagaaaaattgattcaacaattaaaattgaagttctaactcctgatttatggggtggaggcaaaaatcttgatgaaacaaataatcttcagactgagagattgaagatgattttagaaaaagatccaatatgctttaatcataatcttgagactgttgaaagactgcaaaaagaagttaggaggggtgcaaattacaaaaaatcccttagtttactagaaaagtcaaaggatattgctcctcatattcaaactaaatcaggcattatgttaggacttggggaaacattggatgaaataaaaaatacaatttatgatcttaaaaaaatagattgtgatcaaattacaattggccaatatttaaggccctcattcaatcatttggcagttaagaaatattgggatccatcagaatttcaatatttatatcgtttctctaaggaattaggattcaaaaaagtatcttctggccctttagttagaagtagttatcacgcgggttaa

SEQ ID NO: 2782 - protein, 299 aa, Prochlorococcus marinus str. MIT 9301
MREINLIKKEKILRLPSWIKFPISKASEFEKIQTLIKKSNIHTICEEARCPNRAECYASGTATFLLGGSICSRSCAFCQVNKGRPSPINIDECTQVAEAVKVLNLKYVVLTSVARDDLPDHGANLFISTIDEIRKIDSTIKIEVLTPDLWGGGKNLDETNNLQTERLKMILEKDPICFNHNLETVERLQKEVRRGANYKKSLSLLEKSKDIAPHIQTKSGIMLGLGETLDEIKNTIYDLKKIDCDQITIGQYLRPSFNHLAVKKYWDPSEFQYLYRFSKELGFKKVSSGPLVRSSYHAG

SEQ ID NO: 2783 - DNA, 894 bp, Prochlorococcus marinus str. MIT 9301
  CDS (1)..(894): transl_table=11
gtgactaataatcccaatagtttaatttctaaacctgaatggttaagggtcaaagctccacaagttgagcgaattggtaatactgcaaatttattaaatgatttaaatctcaataccgtatgtcaagaagcaagctgtccaaatatcggcgaatgttttgctagtggaactgcaactttcctcataatgggtcctggctgcactagggcatgtccatactgcgatattgattttgatagatctaagagagacttagaccccactgaaccatatcgtttagctgaagctgtttttagaatgaagcttaagcatgttgtaatcacatcagttaatagagacgatcttgaggatggtggcgcatctcaattttttcaatgtgttcatcaaataagagaaaagtctcctgaaactactattgagcttctaatacctgatctttgtggcaactggaaagcgcttgaaaaagtacttgattcaaatccaaacgttttaaaccacaatattgagactgtgtcttcgctatataaaaaagtaagacctcaaggcaaatatgaaagaactcttgagttgctcaaaagaaccagagactattctcctaaaatttatacaaagtctggcttcatgcttggtttaggggaaaaagacgaggaggtcttaagtctgcttaaggatttaaaaagtaatttcgttgatattgttactattggccaatatttatctcctggccctaatcatttacctgttaaaagatttgtaagtccttcaaaatttgactactttaaagcgttcggggaaaaagatttaaacttcatgcaagtagttagttctcctttaactcgtagtagctaccatgctgaagagattcaaaaacttatgaaaaagtatccaagatag

SEQ ID NO: 2784 - protein, 297 aa, Prochlorococcus marinus str. MIT 9301
MTNNPNSLISKPEWLRVKAPQVERIGNTANLLNDLNLNTVCQEASCPNIGECFASGTATFLIMGPGCTRACPYCDIDFDRSKRDLDPTEPYRLAEAVFRMKLKHVVITSVNRDDLEDGGASQFFQCVHQIREKSPETTIELLIPDLCGNWKALEKVLDSNPNVLNHNIETVSSLYKKVRPQGKYERTLELLKRTRDYSPKIYTKSGFMLGLGEKDEEVLSLLKDLKSNFVDIVTIGQYLSPGPNHLPVKRFVSPSKFDYFKAFGEKDLNFMQVVSSPLTRSSYHAEEIQKLMKKYPR

SEQ ID NO: 2785 - DNA, 966 bp, Burkholderia vietnamiensis G4
  CDS (1)..(966): transl_table=11
atggccgccgcgctcgaacgacccagcctcaccgcgctcggccagccgggcgcgcgcagccgcgacaagctcgcgcgcattccggtgcgcgtcgagcccgcggcgggcgcggcgctgccgaagccgtcgtggctgcgggcgcggccgatgtcgagcggggcggtcgccgacatggcggccgtgctgcgcgatcatcggctgcattccgtctgcgaggaggcgatgtgtccgaacatcggcgaatgcttcgcgcagcgcaccgcgaccttcatgatcatgggcgggctgtgcacgcggcgctgcccgttctgcgacgtcgcgcacggccgtcccgagccgctcgatcccgacgagcccgcgcggctcgccgcggcggcggccgcgctcgggctgcgctacgtcgtgatcacgtcggtcgatcgggacgacctgcgcgacggcggcgccgcgcatttcgccgcctgcatcgcggcggtgcgcgcgcgcgtgccgggcatcggcgtcgaggtgctgacgcccgattttcgcggccgcgtcgcgcgtgcgctcgacgcgttgtcgtcggcatggccggacgtgttcaatcacaacatcgagacggtgccgtcgctgtatcgggccgcgcggcccggcgccgattatcgcggctcgctcgaactgctcgcgcaggcgaaggccgcgcggccggcgctcgtgacgaaatcgggcttgatgctcgggctcggcgagcgcgacgacgaggtgcgcgcgacgctgcacgacctgcgcgcgcacgaggtcgacgtgctgacgctcggccagtatctggcgccgtccgcgcatcatctgccggtgcggcgctacgtgagccccgacgcgttcgacgcgtggcgcgacgaggcgctggcgctggggtttcgcgaagtcgtcgcaggcccgctcgtgcgctcgtcgtatcacgcggccgacgtgctgaagcccgcgtga

SEQ ID NO: 2786 - protein, 321 aa, Burkholderia vietnamiensis G4
MAAALERPSLTALGQPGARSRDKLARIPVRVEPAAGAALPKPSWLRARPMSSGAVADMAAVLRDHRLHSVCEEAMCPNIGECFAQRTATFMIMGGLCTRRCPFCDVAHGRPEPLDPDEPARLAAAAAALGLRYVVITSVDRDDLRDGGAAHFAACIAAVRARVPGIGVEVLTPDFRGRVARALDALSSAWPDVFNHNIETVPSLYRAARPGADYRGSLELLAQAKAARPALVTKSGLMLGLGERDDEVRATLHDLRAHEVDVLTLGQYLAPSAHHLPVRRYVSPDAFDAWRDEALALGFREVVAGPLVRSSYHAADVLKPA

SEQ ID NO: 2787 - DNA, 993 bp, Burkholderia vietnamiensis G4
  CDS (1)..(993): transl_table=11
atgactgacgttaccgcttcccccgccccggccgatccggccgcgacccctgcctacgatcccaccgccaagcagaaggcgcaggcgaagacggcgcgcatcccgatcaaggtcattccgatcgagaagctgaagaagcccgagtggatccgcgtgaaggcggccaccggcagctcgcgcttcaacgagatcaagacgatcctgcgcgagcacaacctgcataccgtgtgcgaggaagcgagctgcccgaacatcggcgaatgcttcggcaagggcaccgcgacgttcatgatcatgggcgacaagtgcacgcgccgctgcccgttctgcgacgtcggccacggccgtcccgatccgctcgacgcggatgaaccgaagaacctcgcccgcacgatcgccgcgctcaagctcaagtacgtggtgatcacgagcgtcgaccgcgacgacctgcgcgacggcggcgccgcccacttcgtcgagtgcatccgcgaaacgcgtgcgcagtcgccggacacgcgcatcgagatcctgacgccggacttccgcggccgtctcgatcgcgcgatctcgatcctgaacgccgcaccgcccgacgtgatgaaccacaacctggaaacggtgccgcgcctgtacaaggaagcgcgcccgggctcggactacgcgcattcgctgaagctgctgaaggacttcaaggcgctgcatccggacgtcgcgaccaagtcgggcctgatggtcggcctcggcgagaccgaagaggaaatcctgcaggtgatgcgcgacctgcgcgcgcacgacgtcgacatgctgacgatcggccagtatctgcagccgtcggagcaccatctgccggtgcgtgcatacgtgcatccggataccttcaagatgtacgaggaagaagcgtacaagatgggcttcacgcacgcggccgtcggcgcgatggtgcgctcgagctatcacgccgatctgcaggcgcatggggccggcgtggtctga

SEQ ID NO: 2788 - protein, 330 aa, Burkholderia vietnamiensis G4
MTDVTASPAPADPAATPAYDPTAKQKAQAKTARIPIKVIPIEKLKKPEWIRVKAATGSSRFNEIKTILREHNLHTVCEEASCPNIGECFGKGTATFMIMGDKCTRRCPFCDVGHGRPDPLDADEPKNLARTIAALKLKYVVITSVDRDDLRDGGAAHFVECIRETRAQSPDTRIEILTPDFRGRLDRAISILNAAPPDVMNHNLETVPRLYKEARPGSDYAHSLKLLKDFKALHPDVATKSGLMVGLGETEEEILQVMRDLRAHDVDMLTIGQYLQPSEHHLPVRAYVHPDTFKMYEEEAYKMGFTHAAVGAMVRSSYHADLQAHGAGVV

SEQ ID NO: 2789 - DNA, 912 bp, Synechococcus sp. WH 7803
  CDS (1)..(912): transl_table=11
atgggccagaagatcagtcgctactcctcgattccaccgcgagaacgcctgcccgaatggttgcggcgacccgtgggcaacgtctcggcgattgagcatgttcagacccttgtgaaatccaacgcccttcacaccatctgcgaagaagggcgctgtccgaatcggggcgagtgctacgccgctggcacggccacatttcttctgggtgggtcgatctgcacgcgcagttgtgcgttctgtcaggtggataaaggccaggcacccgagctgctgaatcccatggaagcggagcgggtggccgatgccgtgatcaccatggggctgcgttacgtggtgctcacagcagtggcccgcgacgatctggaggaccatggcgcgtccctgttcacccgtgccatcgaggccatccgccggcgcaacccactgatcgcgattgaagtgctgacgccagacttctggggcggccagccggaccagcgcgaggcgatccaggtgcagcggcaacggttgcaaacggtgctggatgcctcacccgtctgcttcaaccacaatctggaaaccgtggagcgcctccaaggcgaagtgagacggggagcgacctacgcccgctcgctcggactgctggccgctgccagggaacttgcacccgagatccccaccaaaagtggcttgatgctcggacttggagaaacccaggaggaggtgatccaaaccatggagcacctccgagccgtggactgccagcgcctcaccatcggtcagtacatgcggccgtcgttggcccacattcccgtggcccgctactggcatccagatgcattcgcggagctcggtcagatcgccacggagcttggcttctcagtggtgcgcagcgctccactggtgcgcagcagctatcacgctgccgtttga

SEQ ID NO: 2790 - protein, 303 aa, Synechococcus sp. WH 7803
MGQKISRYSSIPPRERLPEWLRRPVGNVSAIEHVQTLVKSNALHTICEEGRCPNRGECYAAGTATFLLGGSICTRSCAFCQVDKGQAPELLNPMEAERVADAVITMGLRYVVLTAVARDDLEDHGASLFTRAIEAIRRRNPLIAIEVLTPDFWGGQPDQREAIQVQRQRLQTVLDASPVCFNHNLETVERLQGEVRRGATYARSLGLLAAARELAPEIPTKSGLMLGLGETQEEVIQTMEHLRAVDCQRLTIGQYMRPSLAHIPVARYWHPDAFAELGQIATELGFSVVRSAPLVRSSYHAAV

SEQ ID NO: 2791 - DNA, 954 bp, Xanthobacter autotrophicus Py2
  CDS (1)..(954): transl_table=11
atggtcacggtcatcgacaccctcgcccgcccgcgccacccggaaaaggccaaccgtccggaaaccgaggtgctgcgcaagcccgactggatccgcgtgaaggcgccgggctcggccggctggtcgcagacggcggagatcgtgcgggccaacggcctgcacaccgtgtgcgaagaggcgggctgccccaatatcggcgagtgctgggagaagaagcacgccaccttcatgatcatgggcgacacctgcacgcgggcctgcgccttctgcaacgtgcgcaccggcatgccggaagcgctcgaccagggcgaaccgcagaaggtgggcgacgccgtggccaagctcggcctctcccatgtggtcatcacctccgtggaccgggacgacctcgccgacggcggcgccgagcacttcgcccgtaccatcgccgccatccgcaaggcgagccccggcaccaccatcgagatcctcaccccggacttcctgcgcaaggacggggcgcttgaggtggtggtggcggccaggcccgacgtgttcaaccacaatctggaaacggtgccggccaaatatctctcggtgcggccaggcgcgcgctatttccactccctgcgcctgctgcagaaggtgaaggagctggacggctccatcttcaccaagtccggcatcatggtgggcctcggcgaggagcggcccgaagtgctccagctgatggacgacctgcgctcggcggaggtggatttcatcaccatcggccagtatctccagcccacgcgcaagcaccacaaggtggagcgcttcgtgacgccggacgagttcaaggcctatgagacggtcgcctatgccaagggcttcctgatggtttcggcgagcccgctcacgcgctcgtcgcaccatgcgggcgatgatttcgagaaattgcgcgcggcccgggtggcgcgtctcggccggtcctga

SEQ ID NO: 2792 - protein, 317 aa, Xanthobacter autotrophicus Py2
MVTVIDTLARPRHPEKANRPETEVLRKPDWIRVKAPGSAGWSQTAEIVRANGLHTVCEEAGCPNIGECWEKKHATFMIMGDTCTRACAFCNVRTGMPEALDQGEPQKVGDAVAKLGLSHVVITSVDRDDLADGGAEHFARTIAAIRKASPGTTIEILTPDFLRKDGALEVVVAARPDVFNHNLETVPAKYLSVRPGARYFHSLRLLQKVKELDGSIFTKSGIMVGLGEERPEVLQLMDDLRSAEVDFITIGQYLQPTRKHHKVERFVTPDEFKAYETVAYAKGFLMVSASPLTRSSHHAGDDFEKLRAARVARLGRS

SEQ ID NO: 2793 - DNA, 900 bp, Prochlorococcus marinus str. MIT 9215
  CDS (1)..(900): transl_table=11
atgagagacaataatctaatcaagaaagaaaaaatcttaagacttccctcttggattaaatttcctattagtaaagcttcagaattcgaaaaaatacaaacactcatcaaaaaatcaaatattcatactatttgtgaagaagcaagatgtccaaatagagcagaatgttatgcctcaggaatagccacgtttttactggggggatcgatatgtactcgttcatgtgctttctgtcaggtaaataaaggtagacctagttctctcaatattgatgaatgtactcaagtcgctgaagcagtgaaagtactaaatttgaaatatgttgttttgacatctgtagctcgagatgatctccctgatcatggtgcaaatttatttatatctacaattgatgagattagaaaaattgattcaaaaattaaaatagaggtcttaactcctgatttatggggtggaggcaaaaattttgatgaaactaataaccttcagactgaaagattgaagatgattttagaaaaagatccaatatgctttaatcataatcttgaaactgttgaaagacttcaaaaagaagttaggaggggtgcaaattacaaaaaatccctaaatttactaaaaaagtcaaaagatattgctcctcatattcaaaccaaatcaggcattatgttaggtcttggggaaacattggatgaaataaaaaatacaatttatgatcttaaaaaaatagattgtgatcaaattacaattggccaatatttaaggccctcgttaaatcatttggcagttaagaaatattgggatccatcagagtttgaatatttatatcacttctctaaggaattaggattcaaaaaaatatcttctggccctctagttagaagtagttatcatgcaggttaa

SEQ ID NO: 2794 - protein, 299 aa, Prochlorococcus marinus str. MIT 9215
MRDNNLIKKEKILRLPSWIKFPISKASEFEKIQTLIKKSNIHTICEEARCPNRAECYASGIATFLLGGSICTRSCAFCQVNKGRPSSLNIDECTQVAEAVKVLNLKYVVLTSVARDDLPDHGANLFISTIDEIRKIDSKIKIEVLTPDLWGGGKNFDETNNLQTERLKMILEKDPICFNHNLETVERLQKEVRRGANYKKSLNLLKKSKDIAPHIQTKSGIMLGLGETLDEIKNTIYDLKKIDCDQITIGQYLRPSLNHLAVKKYWDPSEFEYLYHFSKELGFKKISSGPLVRSSYHAG

SEQ ID NO: 2795 - DNA, 921 bp, Prochlorococcus marinus str. MIT 9211
  CDS (1)..(921): transl_table=11
atgactacatttaatagacaaactaaatacagtaaagttcttccagaagaacgtcttcctagttggattaagccaggcattgggaaggcatcgcaattagaaaaagttcaaaaactggtcaaacgcaatagattgcacacaatctgcgaagaagggcgttgtcccaatcgaagtgaatgctatgcatctggtacagcctcttttcttctaggtgggtcaatatgcacaagaagctgcgcattctgccaggttgagaaaggaaagtctccccaagaagtagatgtaaatgaagctaagcgtgtcgcacaagcaatacaacagttgaaactcaattatgttgtacttactgctgtagcaagagatgatttacatgatcatggagcaagtatttttacagaaacaatagttgcgattagagaactagtgccaaacatcaacatagaagtcctaacaccagacttctggggggggagttcaaatgaggatacagctctaagacttcaaaaggagcgtctagctaaagtactctctgcaaaacctgtatgttttaatcataatcttgaaacagttgagcgactccaaaaagaagtcagaagaggtgcaacttacaggcgatctttaggtttattaaaaacagcaaaagaattagctccaaagactcctacaaagtcaggtttaatgcttggtcttggtgaaactcttgatgaaataatcaaaacccttaaggacctaagagatgtcaattgtcaacaagtaacaattggacaatacctcaggccttctctttcacacttaccagtccataaatattggcacccatcagagttcgatgacttggctgatatcgccaaaaatttaggtttcctcaaagtaaatagtggaccactagtcagaagtagttatcacgcagaagagagctag

SEQ ID NO: 2796 - protein, 306 aa, Prochlorococcus marinus str. MIT 9211
MTTFNRQTKYSKVLPEERLPSWIKPGIGKASQLEKVQKLVKRNRLHTICEEGRCPNRSECYASGTASFLLGGSICTRSCAFCQVEKGKSPQEVDVNEAKRVAQAIQQLKLNYVVLTAVARDDLHDHGASIFTETIVAIRELVPNINIEVLTPDFWGGSSNEDTALRLQKERLAKVLSAKPVCFNHNLETVERLQKEVRRGATYRRSLGLLKTAKELAPKTPTKSGLMLGLGETLDEIIKTLKDLRDVNCQQVTIGQYLRPSLSHLPVHKYWHPSEFDDLADIAKNLGFLKVNSGPLVRSSYHAEES

SEQ ID NO: 2797 - DNA, 885 bp, Prochlorococcus marinus str. MIT 9211
  CDS (1)..(885): transl_table=11
atgaagagaccgaacttgctcaaaccggaatggctacgagtcaaagcacctcaacaggagaggattggctcagtagctgagttgttgtcagatttaaaactcaatactgtttgtcaagaagctagttgccccaatattggggagtgttttgcaggaggcactgctacttttctgataatggggccaggatgtacacgtgcatgtccatattgtgatatagcttttgataaaagtgagcgaggtttagatccaacggaaccacatcgccttggagaggctgtttcgagattagggttaaaccatgttgttattacttctgtaaatcgagatgatctcaaggatggtggtgcaagccagtttgtggcttgtattgagtcagtccgggcacgttctccagaaacaacaatagagctattgattcccgacttatgtggcgactggaatgctctaaatgttgtgatgaaagcaaagccaaatgttctgaatcacaatatagaaacagttccacgcttatataaaaaggctagacctcaagggcaatatgaacgttctttggaattattgcgtcgtgttagagatggttggcctaaggtatataccaagtcaggattgatggttggccttggagagacagatgaagaggttatgaatgtcttatccgatcttaggtctaaccaagttgatattgttacgataggtcaatatctttctcctgggcctaagcatttgcctgtagcacgctttgtcacccctgaccaatttgcagcttatagaaaggaaggagaagcaaaattagggttccttcaagttgttagctccccactcactaggagtagttatcacgctggagaggtacaaagactaatggctacttacccaagatga

SEQ ID NO: 2798 - protein, 294 aa, Prochlorococcus marinus str. MIT 9211
MKRPNLLKPEWLRVKAPQQERIGSVAELLSDLKLNTVCQEASCPNIGECFAGGTATFLIMGPGCTRACPYCDIAFDKSERGLDPTEPHRLGEAVSRLGLNHVVITSVNRDDLKDGGASQFVACIESVRARSPETTIELLIPDLCGDWNALNVVMKAKPNVLNHNIETVPRLYKKARPQGQYERSLELLRRVRDGWPKVYTKSGLMVGLGETDEEVMNVLSDLRSNQVDIVTIGQYLSPGPKHLPVARFVTPDQFAAYRKEGEAKLGFLQVVSSPLTRSSYHAGEVQRLMATYPR

SEQ ID NO: 2799 - DNA, 975 bp, Pseudomonas putida GB-1
  CDS (1)..(975): transl_table=11
atgtcaaccgaacaactgcaacacagcccaccgcgtccccagccgctgcaggccggggtgaaactgcgcggtgccgagaaagtggcgcgtatcccggtgaaaatcctccccaccgaagatgtaccccgcaaacccgactggatccgcgtggcgattcccactacaccggaggtggcgcgggtcaaggccctgctgcgcaagcacaagttgcacagcgtgtgcgaggaagccgcctgcccgaacctgggcgagtgcttttctggcggtacggcgacgttcatgatcatgggcgacatctgcacccggcgttgtccgttctgcgatgtcggccacggtcggcccaagccgctcgacgtcgacgagccgaagaacctggccatcgccattgctgacctgcgcttgaaatacgtggtcatcacctcggtagaccgcgacgacctgcgtgacggtggtgcccagcactttgtcgattgcctgcgcgagatccgcgcattgtcgccgggcatccaactggaaaccctggtgccggattaccgtgggcgcatggacgtggcgctggcgatcaccgagcagcaaccaccggatgtgttcaaccacaacctcgagaccgtgccacgcttgtacaaggcggcacgtccgggctcggacttcgagtggtcgctggacctgctggagcgcttcaagcaacgtgtacccacggtgccgaccaagtcagggcttatgcttggcctgggcgaaaccgatgccgaagtgctcgaagtgatgcagcgcctgcgcgagcatcaggtcgacatgttgaccttggggcagtacctgcaaccttcgcgcagtcatttgccggtgcagcgcttcgtccacccggacacgttcgcctggtttgccgagcaagcgttggcgatgggtttcaggaatgtagcttccgggccattggtgcgctcgtcctaccatgcggaccgacaggcgcaggctgtgtaa

SEQ ID NO: 2800 - protein, 324 aa, Pseudomonas putida GB-1
MSTEQLQHSPPRPQPLQAGVKLRGAEKVARIPVKILPTEDVPRKPDWIRVAIPTTPEVARVKALLRKHKLHSVCEEAACPNLGECFSGGTATFMIMGDICTRRCPFCDVGHGRPKPLDVDEPKNLAIAIADLRLKYVVITSVDRDDLRDGGAQHFVDCLREIRALSPGIQLETLVPDYRGRMDVALAITEQQPPDVFNHNLETVPRLYKAARPGSDFEWSLDLLERFKQRVPTVPTKSGLMLGLGETDAEVLEVMQRLREHQVDMLTLGQYLQPSRSHLPVQRFVHPDTFAWFAEQALAMGFRNVASGPLVRSSYHADRQAQAV

SEQ ID NO: 2801 - DNA, 1017 bp, Pseudomonas putida GB-1
  CDS (1)..(1017): transl_table=11
atgacaactgtgcaagaagccgtgccgaacctgatacctacccaggatgccaccccgcgcccagcgccaaagaaggtggaagctggggtcaagctgcgtggcgccgacaaggtggcgcgcatcccggtaaaaatcatccctaccgacgagttgccgaaaaagcctgactggatccgcgtgcggatcccggtgtcgcccgaggtagaccgcatcaagcaactgctgcgcaagcataagctgcacagcgtgtgcgaagaggcctcctgcccgaacctgggcgagtgcttctccggtggtaccgctaccttcatgatcatgggtgacatctgcacccgtcgttgcccgttctgcgacgttggccacggccggccgaaaccgctggacctggacgagccgaaaaacctggctgtcgcgattgccgacctgcgcctgaagtatgtggtgatcacctcggtggaccgcgacgacctgcgtgacggcggtgcccagcactttgccgactgcatccgcgaaatccgcgcattgtcgccgggtgtgcaactggaaaccctggtgccggactaccgtggccgcatggacgttgcgttggagatcaccgcgcaagagccgccagatgtgttcaaccacaacctcgaaaccgtaccgcgcctgtacaaggccgcacgcccaggctcggactacgactggtcgctggacctgctgcagaagttcaagcagatggtgccgcacgtaccgaccaagtcgggcttgatgctcggcctgggcgagaccgacgaagaagtgatcgaggtaatgcaccgcatgcgtgagcatgaaatcgacatgctcaccctcggccagtacctgcagccatcgcgcagccacctgccggtacaacgtttcgtgcacccggacaccttcgcctggttcgccgaagaaggttacaagatgggcttcaagaacgttgcctccggcccgctggtgcgctcttcgtaccacgccgaccaacaggctcacgaagccaagatcaagctctga

SEQ ID NO: 2802 - protein, 338 aa, Pseudomonas putida GB-1
MTTVQEAVPNLIPTQDATPRPAPKKVEAGVKLRGADKVARIPVKIIPTDELPKKPDWIRVRIPVSPEVDRIKQLLRKHKLHSVCEEASCPNLGECFSGGTATFMIMGDICTRRCPFCDVGHGRPKPLDLDEPKNLAVAIADLRLKYVVITSVDRDDLRDGGAQHFADCIREIRALSPGVQLETLVPDYRGRMDVALEITAQEPPDVFNHNLETVPRLYKAARPGSDYDWSLDLLQKFKQMVPHVPTKSGLMLGLGETDEEVIEVMHRMREHEIDMLTLGQYLQPSRSHLPVQRFVHPDTFAWFAEEGYKMGFKNVASGPLVRSSYHADQQAHEAKIKL

SEQ ID NO: 2803 - DNA, 990 bp, Mycobacterium abscessus
  CDS (1)..(990): transl_table=11
atgacagaaccccgcaagctactgcggctggaagtccgcaacgcccaaaccccgatcgagcgcaagccggactggattcgcacccgcgcgaagatgggccccgaatacaaagaactcaagtcgttggtgcgctccggcggactgcacaccgtgtgcgaggaagccggatgccccaacatctttgagtgctgggaggaccgtgaggccaccttcctcatcggcggtgagcaatgcacacgccgctgcgatttctgccagatcgacactggtaagcccgccgacctggaccgcgacgaaccacgacgtgtggccgagagcgtccacaccatgggcctgcggtactcgacggttaccggagtggcccgcgacgacctgcccgacggcggtgcctggctgtacgccgaaacggtgcgatacatcaaggacctcaatccggccacgggggtggagttgctcatccccgacttcaacgccattcccgcgcagctggacgaggtattcgcgtcccgtccggaggtgctggcgcacaacctggagacggtgccacgggtgttccgccgcatccggcccgcgttcagctatgagcgaagcctgtcggtgatcaccgccgcgcgcgaggcgcagctggtgaccaagagcaatctgattctcggtatgggcgaaaccaatgacgagattcgtgaagcgctggtcgccctgcacgaagcgggctgcgacatcatcaccatcacccagtatctgcggccctcgccacgccaccacccggttgaccggtgggtcaaaccgcaggaattcgtggagctttcggaattcgcggaggggctgggcttcgccggtgtgatggccggcccgctggtgcgctcctcctaccgggccggacgactgtacgcacaggcgatggctcatcatgggcgtccgctgcctgccgcactggaacacctggcgacggcgggttcggcgcggcaagaggccatcaacctcatcggatga

SEQ ID NO: 2804 - protein, 329 aa, Mycobacterium abscessus
MTEPRKLLRLEVRNAQTPIERKPDWIRTRAKMGPEYKELKSLVRSGGLHTVCEEAGCPNIFECWEDREATFLIGGEQCTRRCDFCQIDTGKPADLDRDEPRRVAESVHTMGLRYSTVTGVARDDLPDGGAWLYAETVRYIKDLNPATGVELLIPDFNAIPAQLDEVFASRPEVLAHNLETVPRVFRRIRPAFSYERSLSVITAAREAQLVTKSNLILGMGETNDEIREALVALHEAGCDIITITQYLRPSPRHHPVDRWVKPQEFVELSEFAEGLGFAGVMAGPLVRSSYRAGRLYAQAMAHHGRPLPAALEHLATAGSARQEAINLIG

SEQ ID NO: 2805 - DNA, 990 bp, Clavibacter michiganensis subsp. sepedonicus
  CDS (1)..(990): transl_table=11
atgagcgccgcgcccgagggtcgccgcatgctccgcctcgaggtccgcaacgccgagacgcccatcgagcggaagccggagtggatcaagacgaaggcccgcatggggccggagtaccaggccctccagcagctcgtgaagaccgaggacctgcacaccgtctgccaggaggcggcgtgccccaacatctacgagtgctgggaggaccgcgaggccacgttcctcatcggcggatcccagtgcacgcgccgatgcgacttctgccagatcgacaccggcaagcccgccgactacgacaccgacgagccgcgccgcgtcgccgactcggtgcgccggatggggctccgctacgccaccgtcacgggtgtggcgcgcgacgacctccccgacgagggcgcgtggctgcacgcggagaccgtgcggcgtatccacgcggacaaccccggcacgggcgtcgagatcctcgcgaccgacttctccgggaaccccgacctcctcgccgaggtcttctcgtcccggcccgaggtcttcgcgcacaacgtcgagacggtgccgcgcatcttcaagcggatccggccggcattccggtacgagcgctccctcgacgtgatcacgcaggggcgcgacgccgacctcatcacgaagtccaacctcatcctcggcatgggcgagacgcgcgaggaggtgtccgaggcccttgccgacctgcacgacgcgggctgcgacatcatcaccgtcacgcagtacctgcggccgtcgccgcggcatctgccggtcgcgcgctgggtgcggccggaggagttcgtggagatcaaggcggaagccgaggccatcggcttcctcggcgtgctcgccggaccgctcgtgcgctcgtcgtaccgcgccggccggctgtacgcgcagtcgatgagcgcgaagggccgggagctccccgcgagtctggcgcacctcgcggatccggcgaacggcttcgcgcaggccgtcggctga

SEQ ID NO: 2806 - protein, 329 aa, Clavibacter michiganensis subsp. sepedonicus
MSAAPEGRRMLRLEVRNAETPIERKPEWIKTKARMGPEYQALQQLVKTEDLHTVCQEAACPNIYECWEDREATFLIGGSQCTRRCDFCQIDTGKPADYDTDEPRRVADSVRRMGLRYATVTGVARDDLPDEGAWLHAETVRRIHADNPGTGVEILATDFSGNPDLLAEVFSSRPEVFAHNVETVPRIFKRIRPAFRYERSLDVITQGRDADLITKSNLILGMGETREEVSEALADLHDAGCDIITVTQYLRPSPRHLPVARWVRPEEFVEIKAEAEAIGFLGVLAGPLVRSSYRAGRLYAQSMSAKGRELPASLAHLADPANGFAQAVG

SEQ ID NO: 2807 - DNA, 906 bp, Synechococcus sp. PCC 7002
  CDS (1)..(906): transl_table=11
gtggcggtaaaaccagattggctcagagtaaaggccccccaatggcaacgggttggcagcgtcaaagaaattttacgggacctcagcctcaacaccgtctgcgaagaagcctcctgtcccaacattggcgaatgttttaatgcaggcaccgccacctttttgattatggggccagcctgcacccgtgcttgcccctactgcgacattgacttcgacaaagtgccccggggtttagatcccacagaacccgacaatcttgccgaagccgtccgccgtctgaatctcaatcatgtcgtgatcacttccgtcaaccgtgacgatctccccgatggtggcgcaagccaatttgtaaaatgtatcgaacgaactcgcgaactgtcacccaaaaccaccattgaagtcttgattcctgacctctgcggtaattgggacgccctcaaaacgatccttgatgctgcccccgaagtgttgaaccacaacaccgagaccgtcccccgtctttataaaaaaacgcgtccccaaggggattatcaacgttccctggagttactccagcgcacccgcgagctaaccccctgggtttacaccaaatcggggattatggttggccttggagaaaccgatgccgaagtgcgtgaagtaatgcgtgatctgcgagccgtagactgtgacattctcaccattggtcaatacctccagcccacccaaaaacatttaggggtgcaagattttattaccccagcacaatttgacgcttggcgggaatatggtgaatccctcggctttttgcaagtagtatctagccccctcacccgcagttcctaccatgccgaacaggtgcggcgcttaatggaaacccacccacgatctaagccagaactcagtcagttacattcactaaaataa

SEQ ID NO: 2808 - protein, 301 aa, Synechococcus sp. PCC 7002
MAVKPDWLRVKAPQWQRVGSVKEILRDLSLNTVCEEASCPNIGECFNAGTATFLIMGPACTRACPYCDIDFDKVPRGLDPTEPDNLAEAVRRLNLNHVVITSVNRDDLPDGGASQFVKCIERTRELSPKTTIEVLIPDLCGNWDALKTILDAAPEVLNHNTETVPRLYKKTRPQGDYQRSLELLQRTRELTPWVYTKSGIMVGLGETDAEVREVMRDLRAVDCDILTIGQYLQPTQKHLGVQDFITPAQFDAWREYGESLGFLQVVSSPLTRSSYHAEQVRRLMETHPRSKPELSQLHSLK

SEQ ID NO: 2809 - DNA, 903 bp, Synechococcus sp. PCC 7002
  CDS (1)..(903): transl_table=11
atggcttcttctgcgtctcactcctccagcgccccgattttgcccatgcctagttgggtcaaagctccccttggtaaagcgagtgagatctcgacagtccagcgcatcattaaacaacggggcattcataccatctgtgaggaagggaaatgtccgaatcgaggtgagtgctacgccaatagaactgcaacctttttattgatggggcaagtttgcaccagggcctgtgccttctgtcaggttgataaaggccaaattcccctccctcttgacccggaggaaccccaaaaagtggcggagtcagtgcgactgttgggactgagttatgtggtgttgacatcggtggcgcgggacgatcttgccgatgggggagcaggctggtttgtggctgtgatggaagcgatccgggcggaaaatccagggacacaaattgaagtcctgactccggatttttggagtgggaaaggggcagaggtggcccaggaggaacgggtaaaaacagttgtggcagcgcaaccagcttgttataaccacaacattgaaacagtagaaaggctccagggtcctgtgcgtcggggggcaaagtatgagcgatcgctccgggttttggaattggtaaaagcgtacaatcctgagataccgacgaaatcaggcttaatgctcggccatggagaaacgaaaacagaaattatccaggcgttacaagatttgctggccgtgggctgcgatcgcctcaccctaggccaatatatgcgcccctccctcgcccatttacccgtccagaaatattggacaccagcggaatttgaacacctaggggcgatcgccaaagaaatgggcttttcccatgtgcgttcagggcctctggtgcgtagttcctaccatgctggcaaatcgatctaa

SEQ ID NO: 2810 - protein, 300 aa, Synechococcus sp. PCC 7002
MASSASHSSSAPILPMPSWVKAPLGKASEISTVQRIIKQRGIHTICEEGKCPNRGECYANRTATFLLMGQVCTRACAFCQVDKGQIPLPLDPEEPQKVAESVRLLGLSYVVLTSVARDDLADGGAGWFVAVMEAIRAENPGTQIEVLTPDFWSGKGAEVAQEERVKTVVAAQPACYNHNIETVERLQGPVRRGAKYERSLRVLELVKAYNPEIPTKSGLMLGHGETKTEIIQALQDLLAVGCDRLTLGQYMRPSLAHLPVQKYWTPAEFEHLGAIAKEMGFSHVRSGPLVRSSYHAGKSI

SEQ ID NO: 2811 - DNA, 996 bp, Cyanothece sp. ATCC 51142
  CDS (1)..(996): transl_table=11
ttgaagtcaataactatgataatcagatccttgataattctatgtgagagcagtcacatcaagccaagagaaatgattaatgataagatccgattaggcaaatattcatgcagaaatgaaacacaaatgacagttaaaccagaatggttgcgggtgaaagcccctcaatggcaaagagtaggaagtgttaaagaaatattacgggatttaggattaaatacggtatgtgaagaagcctcttgtcctaatattggagagtgtttccatgcagggacagcgacttttttgatcatgggtcccgcttgtacccgtgcttgtccttactgtgacattgattttgagaagaaacccctacccctagacccccaggaacccttaaacttagctgaagcagtgcgtcgtctccgtcttaaccatgtggtgattacgtcggttaaccgtgatgatttagccgatggtggggcttctcaatttgtacgctgtattgaggccattcgtcaagtttctcccaataccaccattgaggtgttaattcctgatttatgcggtaattgggaggcattagccatgattttacaggctaatccagaagtgcttaaccataataccgaaaccgtcccccgtttgtatcgtcgggttcggcctcaaggggattatcagcgatcgctgttattattagaacaagcgaaaactttagctcctaaactctataccaagtctggcatcatggtggggttaggggaaacggatgcagaagtgcgtcaagtgatggaagatttaagagccgtcgattgtgatattttgaccctaggacagtatttacaaccctctgccaaacatttaggggttaaagaatttgtcaccccccaaacctttgaagcttggcaaacctttggggagtccatcggctttttacaagtagtttcctctcctttaacccgtagttcgtatcatgctgaacaagttcgagaattgatgaatcaatatcctcgataa

SEQ ID NO: 2812 - protein, 331 aa, Cyanothece sp. ATCC 51142
MKSITMIIRSLIILCESSHIKPREMINDKIRLGKYSCRNETQMTVKPEWLRVKAPQWQRVGSVKEILRDLGLNTVCEEASCPNIGECFHAGTATFLIMGPACTRACPYCDIDFEKKPLPLDPQEPLNLAEAVRRLRLNHVVITSVNRDDLADGGASQFVRCIEAIRQVSPNTTIEVLIPDLCGNWEALAMILQANPEVLNHNTETVPRLYRRVRPQGDYQRSLLLLEQAKTLAPKLYTKSGIMVGLGETDAEVRQVMEDLRAVDCDILTLGQYLQPSAKHLGVKEFVTPQTFEAWQTFGESIGFLQVVSSPLTRSSYHAEQVRELMNQYPR

SEQ ID NO: 2813 - DNA, 900 bp, Cyanothece sp. ATCC 51142
  CDS (1)..(900): transl_table=11
atggctaaaagttctctgaaaaatgatattaatattactccaattccctattggttaaaaaaaccaataggaaaagcaagtgaactttctaccgttcaaaaaattataaaaactcgtaatattcatacgatttgcgaagaaggccgttgtcctaatcgtggagaatgttacagtaatagaacagcaacctttctgttaatggggccaacttgtacccgttcttgtgccttttgccaagtagataaaggtcacgcacccatatctctagacccagaagaaccccaaaaagtagcagaatccgttaaattattaggattaagctacgttgttcttacctccgttgcacgggatgatttagaagacggtggggctaactggttcgttaaaaccatgactgctattcgtacccttaaccccaacacggacatagaagttttaaccccggacttttggggaggacaaggaggtcaaaaaagtcaaaaagaacgaattagtaccgttgtaaaggcaaaaccagcttgctacaaccataatattgaaacggtgcagcgtttacaaggtccagtgagacgaggggcaaaatatgagcgatcgctcgatgtattgcgatgggttaaagaaatagattcgaccattcccacaaaatcagggttaatgttaggtcacggggaaaccgagacagaaattatcacaacgttaaaggatttaagacgggtgcaatgcgatcgcattacgttaggacaatatatgcgtccttctttagctcatctttcggtacagaaatattggactcctgaagaatttgaaaaattgggagaaatcgctcgttctttgggtttttctcatgttcgttctggtcctttagttcgtagttcctatcatgccggagaagagaattaa

SEQ ID NO: 2814 - protein, 299 aa, Cyanothece sp. ATCC 51142
MAKSSLKNDINITPIPYWLKKPIGKASELSTVQKIIKTRNIHTICEEGRCPNRGECYSNRTATFLLMGPTCTRSCAFCQVDKGHAPISLDPEEPQKVAESVKLLGLSYVVLTSVARDDLEDGGANWFVKTMTAIRTLNPNTDIEVLTPDFWGGQGGQKSQKERISTVVKAKPACYNHNIETVQRLQGPVRRGAKYERSLDVLRWVKEIDSTIPTKSGLMLGHGETETEIITTLKDLRRVQCDRITLGQYMRPSLAHLSVQKYWTPEEFEKLGEIARSLGFSHVRSGPLVRSSYHAGEEN

SEQ ID NO: 2815 - DNA, 900 bp, Exiguobacterium sibiricum 255-15
  CDS (1)..(900): transl_table=11
atgggacgcagagagatacaacgtaaaccagaatggctgaagatcaagctgaacacgaatgagacttacacagaactcaaaagtatgatgcgtgaaaaaaagcttcacacggtatgtgaggaagcaaaatgtccgaacattcacgagtgttgggcggttcgccggacggcgacattcatgattcttggaagcatttgtacacgggcctgccgtttttgtgccgtgacgacaggacgtccaaatgaacttgacttagaagaaccgaaacgcgtagcggaatccgttcgtctgatgaatctgaagcatgccgtcattacagcggttgcacgtgatgatttaaatgatttcggggcaggggtatatgcggagacggtacgggaagtccgtcgcatgaacccggaaacatcgattgaagttttaccgtccgacatgggtgggaacttcgaggcgttgcagacgctgattgaagccaaaccggacatcatgaaccataacatcgagacggttcgccgtctgacaccaacggtccgggcgaaagcgacatacgaccgaacacttgaattcctgcgtcgttccaaagaactcgcaccggaaattccgacgaaatcgagtctgatgctcggactcggggagacgtgggacgaaatcttacagacgatggacgacctgcgtgcgaacgacgtcgacatcatgacgattggtcagtatctccaaccgacgaaaaagcacttggacgttatcaagtactacacgccacaagaatttgctgaattaaaacagattgcgctcggaaaaggcttctcgcattgtgaggccggtccgcttgtccgttcgtcgtaccatgctgacgagcaagtcaacgcggcgaaaaaaaataaagcggctctgccgatcgattga

SEQ ID NO: 2816 - protein, 299 aa, Exiguobacterium sibiricum 255-15
MGRREIQRKPEWLKIKLNTNETYTELKSMMREKKLHTVCEEAKCPNIHECWAVRRTATFMILGSICTRACRFCAVTTGRPNELDLEEPKRVAESVRLMNLKHAVITAVARDDLNDFGAGVYAETVREVRRMNPETSIEVLPSDMGGNFEALQTLIEAKPDIMNHNIETVRRLTPTVRAKATYDRTLEFLRRSKELAPEIPTKSSLMLGLGETWDEILQTMDDLRANDVDIMTIGQYLQPTKKHLDVIKYYTPQEFAELKQIALGKGFSHCEAGPLVRSSYHADEQVNAAKKNKAALPID

SEQ ID NO: 2817 - DNA, 873 bp, Nostoc punctiforme PCC 73102
  CDS (1)..(873): transl_table=11
gtgactgtaaaaccagactggttgcgggtaaaagcacctgggcgtgagcgcatcggtaacgttaaagacattttgcgggatttatccctcaatacagtttgtgaggaagcatcctgtccgaatattggcgaatgcttcaatgccggtactgctacgtttttgattatgggcccggcttgtacacgcgcttgtccctactgcgatattgattttgagaaaaaaccgaaaccactagatcccacggaacctgcacggctagcggaagctgttcgccgcatgaaccttaatcatgtagtaatcacttctgtaaatcgagatgacttgtttgatggtggtgcatctcagtttgttgcgtgtattgatgcggttcactctgtttcacctaacaccacaatagaggtgctaattcctgacttgtgcggtaattggaatgctttagagttgattctacaagcagcgccagaggtattaaaccacaataccgaaactgttccacgcctgtatcgccgggtgcgtccccaaggaaactacgatcgcacattagaattattacagcgaactcgccaactctctcctagcacatacaccaaatccgggattatggttggactcggtgaaacagatgccgaaattcgtcaagtcatgcaagacttacgaaccgtagattgcgacattttgacaattgggcaatatctccaacccagtcaaaaacatttacaagtaaatgaatttatcaatccagaacaatttgttgcttggaagacattcggcgaagaaatcggatttttacaaattgtttcttctgcattgacaagaagttcatatcatgcggaacaagtcagggaattaatggaacgttatccccggagctaa

SEQ ID NO: 2818 - protein, 290 aa, Nostoc punctiforme PCC 73102
MTVKPDWLRVKAPGRERIGNVKDILRDLSLNTVCEEASCPNIGECFNAGTATFLIMGPACTRACPYCDIDFEKKPKPLDPTEPARLAEAVRRMNLNHVVITSVNRDDLFDGGASQFVACIDAVHSVSPNTTIEVLIPDLCGNWNALELILQAAPEVLNHNTETVPRLYRRVRPQGNYDRTLELLQRTRQLSPSTYTKSGIMVGLGETDAEIRQVMQDLRTVDCDILTIGQYLQPSQKHLQVNEFINPEQFVAWKTFGEEIGFLQIVSSALTRSSYHAEQVRELMERYPRS

SEQ ID NO: 2819 - DNA, 927 bp, Nostoc punctiforme PCC 73102
  CDS (1)..(927): transl_table=11
atgtctatgatttcgtcacaacaagccgaactaaagtctgaaattgcggcaatgcctagctggttacgtcgccctatcggtaaagccagtgaaatctctaccgtacaacgcattattaagcagcgccaaatccacacaatttgcgaagaaggtcgctgtcccaaccggggagagtgctatgcccaaaaaactgcaactttcttgctaatggggcctacttgcacacgctcttgtgctttttgtcaagtagataaaggtcatgcacccatgcctcttgatttagaggaaccccaaaaggttgcacaggcagtacagcttttaggattgcgttatgtagtgctgacttctgtcgcccgtgatgacttgcccgatcagggcgcaggtcactttgtggagacgatcgctactatccgccagttgaatccagagactcaaattgaggtgctgaccccagatttttggggcggtgcaggtgtaggagaatcaggtcaacgccaacggatagcgatgattgtaaaagccaaaccagcttgtttcaatcacaatatcgagacagtgcggcggttaactgggccagtgcgccggggagccaaatacgatcgctcgcttttggtacttgctatggttaaagaaatcgattcgacaattcctaccaaatcaggtttgatgctgggacatggcgaaacacttgatgaagtcgtcgaagcaatggctgatttaagggctgtggggtgcgatcgcttgactatcgggcagtatatgcgtccttctttagaacatctcccagtccaaaaatattggactccagaggaattcgatcaactcggcagattagcatgggaaatgggattcaaccatgtccgttctgggcctctggttcgcagttcctatcatgctggagaagagggagtgggaaatgaggagtag

SEQ ID NO: 2820 - protein, 308 aa, Nostoc punctiforme PCC 73102
MSMISSQQAELKSEIAAMPSWLRRPIGKASEISTVQRIIKQRQIHTICEEGRCPNRGECYAQKTATFLLMGPTCTRSCAFCQVDKGHAPMPLDLEEPQKVAQAVQLLGLRYVVLTSVARDDLPDQGAGHFVETIATIRQLNPETQIEVLTPDFWGGAGVGESGQRQRIAMIVKAKPACFNHNIETVRRLTGPVRRGAKYDRSLLVLAMVKEIDSTIPTKSGLMLGHGETLDEVVEAMADLRAVGCDRLTIGQYMRPSLEHLPVQKYWTPEEFDQLGRLAWEMGFNHVRSGPLVRSSYHAGEEGVGNEE

SEQ ID NO: 2821 - DNA, 1032 bp, Acinetobacter sp. ADP1
  CDS (1)..(1032): transl_table=11
atggatttaaaaataaatgaccaacccgataaaaatatttatcttggtgaaaaactacgtgggcaggaaaagctcgagcgtattcctgttaaaattattcctagtactgaaatagcagaaaaaccagattggattcgtaccaaaatcagtgatcccaaagaaatcaaacgtattcagactttattacgtcaacaaaaattgcatacggtgtgcgaagaagctgcttgtcctaacttgccacaatgttttggaagtggcacagccacttttatgattatgggcgatatctgcactcggcgctgccctttttgcgatgtcgcacatggtcggcccaatacactcgacccattagaaccccaacatttagcagaagcagtatccaatcttcagcttcaatatgtggttatcacctcggtagatcgagatgatcttaaggatggaggagcgcagcattttgttgattgcataaaagcaattcgtgcaaccaatcctcatacattaatcgaaattttagtgcctgattttcgtggtcgactcgaaatagctttaaaaattctagccagctctccgcctgatgtttttaatcacaatatcgaaactgttccacgtttgtatcgcgccctgcgaccaggttctgattaccaacattcattaaagcttttacagcaatttaaaaaatattgtccagatgtcgtcaccaaatgtggtctgatggttggacttggtgaagtagaagctgaagtcattaccttactcaatgatctgcgcgatcatgatattgagctggtcaccattggacaatacttacaaccctccaaagcgcatgcacctgtacatcgatttgtttcaccaacagaatttgaacattatgaacagcatggcaaacgtctaggttttaaaaatatctggagtgcaccgctggttcgctccagttatcatgcagatcgtcaataccgaggcgaagctgtaccgaagccttttacacgagaagatttaaaacaactaaaacataccacatctgatattgcttaa

SEQ ID NO: 2822 - protein, 343 aa, Acinetobacter sp. ADP1
MDLKINDQPDKNIYLGEKLRGQEKLERIPVKIIPSTEIAEKPDWIRTKISDPKEIKRIQTLLRQQKLHTVCEEAACPNLPQCFGSGTATFMIMGDICTRRCPFCDVAHGRPNTLDPLEPQHLAEAVSNLQLQYVVITSVDRDDLKDGGAQHFVDCIKAIRATNPHTLIEILVPDFRGRLEIALKILASSPPDVFNHNIETVPRLYRALRPGSDYQHSLKLLQQFKKYCPDVVTKCGLMVGLGEVEAEVITLLNDLRDHDIELVTIGQYLQPSKAHAPVHRFVSPTEFEHYEQHGKRLGFKNIWSAPLVRSSYHADRQYRGEAVPKPFTREDLKQLKHTTSDIA

SEQ ID NO: 2823 - DNA, 1014 bp, Acinetobacter sp. ADP1
  CDS (1)..(1014): transl_table=11
atgtctgaaagccgtaaacctgaacagggtgtaaaactccgtggtgccgaaaaagtagcccgaattcctgtaaaagttgtacctacggttgaagtaccgcgtaaaccagactggattcgcgtcaagatgactgcgccagaagaagtgcaacgcatcaaaaccacattacgatcacaaaaattgcatactgtatgtgaagaagcggcttgccccaatctgccagaatgttttgggggcggtacagcgacatttatgattatgggcgatatctgtacacgtcgctgcccattctgcgatgtggctcatggtcgtccaaatgctttagatgcagatgaacctcgccatatggcagaaaccattgcaaatcttaagcttaagtatgcggtaattacctcggtagaccgtgatgatttgctcgatggtggcgctcagcactttgttgattgtattaaagaagcgcgcgcattaagcccaaatacactgcttgaaattctggtaccagacttccgtggtcgtatggatattgcacttcgcatcatgactgaatgcccaccagatgtgtttaatcacaatattgaaactgttcctcgtttgtataaagccatgcgtccaggttcagattatcagcattctttaacactgctgaaaatgtttaaagaatattgcccagatattccaactaaatgtggattaatggtcggtattggtgaaactgaagatgaagtcattgctttacttgatgacttgcgtgcacatgatgttgattacgtcacgattggtcaatacttacagccttcaaaacaacatgctcctattgatcgttttgtaacaccagaagaatttgaacgttatgcggaacatggtcgtcaacttggctttagaaatatctggtcggccccaatggttcgctcaagctactttgcagatcgtcaataccacggcgaacctgtaccagctgtacgccgtaaagtagatcctgccaaaaagattgctgttcaggctatcgaagcttaa

SEQ ID NO: 2824 - protein, 337 aa, Acinetobacter sp. ADP1
MSESRKPEQGVKLRGAEKVARIPVKVVPTVEVPRKPDWIRVKMTAPEEVQRIKTTLRSQKLHTVCEEAACPNLPECFGGGTATFMIMGDICTRRCPFCDVAHGRPNALDADEPRHMAETIANLKLKYAVITSVDRDDLLDGGAQHFVDCIKEARALSPNTLLEILVPDFRGRMDIALRIMTECPPDVFNHNIETVPRLYKAMRPGSDYQHSLTLLKMFKEYCPDIPTKCGLMVGIGETEDEVIALLDDLRAHDVDYVTIGQYLQPSKQHAPIDRFVTPEEFERYAEHGRQLGFRNIWSAPMVRSSYFADRQYHGEPVPAVRRKVDPAKKIAVQAIEA

SEQ ID NO: 2825 - DNA, 897 bp, Bacillus licheniformis ATCC 14580
  CDS (1)..(897): transl_table=11
ttggcaaagaaagacgagcacctaagaaagcccgaatggcttaaaatcaagctgaacacgaatgaaaactatacgggcttaaaaaaattaatgcgggaaaacaacctccatacggtctgcgaagaggcaaaatgcccgaacatccacgaatgctgggccgtcagacgtaccgcgacctttatgattctcggatctgtctgtacgagagcctgccgcttctgtgcggtgaagacggggctgccgacagagcttgacttgaatgagccggaaagagtcgcagattctgtgagcatcatgaacctgaaacacgcggtcattacagccgttgcccgtgacgatttaaaagacggaggagcgggggtattcgccgaaaccgtacgcgccgtccggagaaaaagcccatttacaacaatcgaagttctgccgtccgatatgggcggagactataataatttgaaaacgctgatggatacgcgtccggacattttaaaccataatattgaaacggtccgccgcctgacgccgagagtccgtgcgagagctacatatgaaagatcattggaatttttgcgccgcgccaaagagatgcagccggacatcccgacgaaatccagcatcatgatcggtcttggcgaaacaaaagaagaaatcatcgaaacaatggacgaccttcttgcgaacaacgtcgacatcatggcaatcggccagtatctgcagccgtccaaaaaacacattaaagtacagaaatattaccatcctgacgagtttgccgaactgaaagaaatcgccatggaaaagggcttcagccactgtgaagcaggaccgctcgtccgttcttcataccatgccgacgaacaggtgaatgaagcgtctaaaaaacgccaggcgcaggcataa

SEQ ID NO: 2826 - protein, 298 aa, Bacillus licheniformis ATCC 14580
MAKKDEHLRKPEWLKIKLNTNENYTGLKKLMRENNLHTVCEEAKCPNIHECWAVRRTATFMILGSVCTRACRFCAVKTGLPTELDLNEPERVADSVSIMNLKHAVITAVARDDLKDGGAGVFAETVRAVRRKSPFTTIEVLPSDMGGDYNNLKTLMDTRPDILNHNIETVRRLTPRVRARATYERSLEFLRRAKEMQPDIPTKSSIMIGLGETKEEIIETMDDLLANNVDIMAIGQYLQPSKKHIKVQKYYHPDEFAELKEIAMEKGFSHCEAGPLVRSSYHADEQVNEASKKRQAQA

SEQ ID NO: 2827 - DNA, 912 bp, Bacillus licheniformis ATCC 14580
  CDS (1)..(912): transl_table=11
atggagatgatggaattggcaaagaaagacgagcacctaagaaagcccgaatggcttaaaatcaagctgaacacgaatgaaaactatacgggcttaaaaaaattaatgcgggaaaacaacctccatacggtctgcgaagaggcaaaatgcccgaacatccacgaatgctgggccgtcagacgtaccgcgacctttatgattctcggatctgtctgtacgagagcctgccgcttctgtgcggtgaagacggggctgccgacagagcttgacttgaatgagccggaaagagtcgcagattctgtgagcatcatgaacctgaaacacgcggtcattacagccgttgcccgtgacgatttaaaagacggaggagcgggggtattcgccgaaaccgtacgcgccgtccggagaaaaagcccatttacaacaatcgaagttctgccgtccgatatgggcggagactataataatttgaaaacgctgatggatacgcgtccggacattttaaaccataatattgaaacggtccgccgcctgacgccgagagtccgtgcgagagctacatatgaaagatcattggaatttttgcgccgcgccaaagagatgcagccggacatcccgacgaaatccagcatcatgatcggtcttggcgaaacaaaagaagaaatcatcgaaacaatggacgaccttcttgcgaacaacgtcgacatcatggcaatcggccagtatctgcagccgtccaaaaaacacattaaagtacagaaatattaccatcctgacgagtttgccgaactgaaagaaatcgccatggaaaagggcttcagccactgtgaagcaggaccgctcgtccgttcttcataccatgccgacgaacaggtgaatgaagcgtctaaaaaacgccaggcgcaggcataa

SEQ ID NO: 2828 - protein, 303 aa, Bacillus licheniformis ATCC 14580
MEMMELAKKDEHLRKPEWLKIKLNTNENYTGLKKLMRENNLHTVCEEAKCPNIHECWAVRRTATFMILGSVCTRACRFCAVKTGLPTELDLNEPERVADSVSIMNLKHAVITAVARDDLKDGGAGVFAETVRAVRRKSPFTTIEVLPSDMGGDYNNLKTLMDTRPDILNHNIETVRRLTPRVRARATYERSLEFLRRAKEMQPDIPTKSSIMIGLGETKEEIIETMDDLLANNVDIMAIGQYLQPSKKHIKVQKYYHPDEFAELKEIAMEKGFSHCEAGPLVRSSYHADEQVNEASKKRQAQA

SEQ ID NO: 2829 - DNA, 942 bp, Anaplasma marginale str. St. Maries
  CDS (1)..(942): transl_table=11
ttgacaagcgttgcagtttttactacgctactcggtagtttgttgctggtcagtatggaaaacaagcccgattggttgagggtgcggatgccgggcggtgcggtctttgatgaggttaccgaactcgtgcgtcgctacgagctcaatacagtctgcgaggaagctgcgtgtcctaatataggtgagtgttggaacaaacgccacgctaccatcatgataatgggttccgtgtgtacaagggcgtgcgcattctgtaacgtgaaggttggtgtgccgaacgctctcgatcctgatgagcctgagagggtcggcgctgcgatcagtaagcttggcctaaaacacgtggtaataacttctgtggatagggacgaccttccagatgggggggcgagccacttcgctaagtgcgttcgggagataagaaagcgtgatagctctgtaacggtggagattctcactccggactttctaggtaagccgtgcgcgattgatattatcgcctctgcgcgcccagatgtttataaccacaacttggaaaccgtacccaggttgtattctagagtcaggcccagggcgaagtattttaattcgctcaatctgcttaaggaggtaaaggacaaaagccctggggtatttaccaagtctgggtttatgctagggctgggggagtctaaggaagaagtgtaccaagttatggatgacctaaggtgtgctggggtggactttatagtgatggggcagtatttgcagcctacaaagaacaacattgaagtacatcgctatgtccccccttcggaatttgagcagtataaactcatggcgtatgcaaaggggttttccatggttgctgcaagtccgcttgcgcggtcttcctaccacgctgaggatgactttcgaaagcttaaggagcttaggttcgcacgcgctaaagtgaacgaatag

SEQ ID NO: 2830 - protein, 313 aa, Anaplasma marginale str. St. Maries
MTSVAVFTTLLGSLLLVSMENKPDWLRVRMPGGAVFDEVTELVRRYELNTVCEEAACPNIGECWNKRHATIMIMGSVCTRACAFCNVKVGVPNALDPDEPERVGAAISKLGLKHVVITSVDRDDLPDGGASHFAKCVREIRKRDSSVTVEILTPDFLGKPCAIDIIASARPDVYNHNLETVPRLYSRVRPRAKYFNSLNLLKEVKDKSPGVFTKSGFMLGLGESKEEVYQVMDDLRCAGVDFIVMGQYLQPTKNNIEVHRYVPPSEFEQYKLMAYAKGFSMVAASPLARSSYHAEDDFRKLKELRFARAKVNE

SEQ ID NO: 2831 - DNA, 951 bp, Silicibacter pomeroyi DSS-3
  CDS (1)..(951): transl_table=11
gtgcgtgacctgaagatccccgagcagcgccaccccgaaaaggcgcatcgccccgaccaggcgcaacccaagaaaccggactggatccgggtcaaggcgccggggggcaagggctatgccgatacccgccggatcatgcgcgacaacaacctggtcaccgtctgtgaagaggccggatgcccgaacgtcggcgaatgctggagccagggccacgccaccatgatgatcatgggcgagatctgtacccgtggctgcaccttctgcaacatcgccaccgggcgccccgacgcgctggacgcgttcgagccgggccgggtggcccatgcggtggagaagctggggctgaaccatgtggtgatcacgagcgtcgaccgcgacgacctggccgatggcggggccgagcattttgcccagaccatccgtgccatccgccatcgcagcccctcgaccacgatcgagatcctgacgcccgatttcctgaaatgcgcgcccgaggtgctggaagtcgtggttgcgtccaagcccgacgtgttcaaccacaatctggaaaccgtgccgggcctgtaccccgaggtgcgccccggcgcgcgctatttccactcgctgcgtctgctccagcgggtcaaggagctggatccgtcgatctttaccaaatccggcatcatggtcggcctgggtgagaccgaacagcaggtgcgccaggtgatggacgacatgcgcgccgccgatatcgatttcctgaccatcggccagtatctgcaaccgacaccgaaacatcaccgggtcgatcgtttcgtgcatcccgatgaattcgcctcttatgagaaagccgcctatggcaagggcttcctgatggtctcggcaacgccgctgacgcgctcgtcctaccacgcgggcgacgactttgcgcgcctgcgggacgcccggcagaagaagctcggcctggcatga

SEQ ID NO: 2832 - protein, 316 aa, Silicibacter pomeroyi DSS-3
MRDLKIPEQRHPEKAHRPDQAQPKKPDWIRVKAPGGKGYADTRRIMRDNNLVTVCEEAGCPNVGECWSQGHATMMIMGEICTRGCTFCNIATGRPDALDAFEPGRVAHAVEKLGLNHVVITSVDRDDLADGGAEHFAQTIRAIRHRSPSTTIEILTPDFLKCAPEVLEVVVASKPDVFNHNLETVPGLYPEVRPGARYFHSLRLLQRVKELDPSIFTKSGIMVGLGETEQQVRQVMDDMRAADIDFLTIGQYLQPTPKHHRVDRFVHPDEFASYEKAAYGKGFLMVSATPLTRSSYHAGDDFARLRDARQKKLGLA

SEQ ID NO: 2833 - DNA, 894 bp, Synechococcus elongatus PCC 6301
  CDS (1)..(894): transl_table=11
ttggtcgtcaaaccggaatggctgcgagtcaaagcaccgcagtggcaacgcgtcggtaacgtcaagcaagtcttggcggatctggggctgaataccgtttgcgaagaggcatcctgtcccaatattggtgagtgttttaacgctgggacggccacctttttgatcatgggtccggcttgcacgcgggcttgcccctactgcgatatcgacttcgaaaagaaacccaaagcgctcgatccgacggagccgcaacgactcacagaagctgtgggccgactgaatctcaatcacgtcgtgatcacgtcagtcaatcgtgatgacttgccggatggtggtgctgagcaattcaaacgctgtattgaagcggtgcgatcgcgatcgcctcagaccacgattgaggttctgattcccgatctctgcggcaactgggaagcgctggaaattattttgtccgcagcgcccgaggtgctgaaccacaacatcgaaacggtctcacgactctaccgacgcgtgcgaccccaaggtgactatcagcgatcgctggaactattgcgccgcagtcgggaacaagcgccgtggatctataccaagtctggcttgatggtgggtcttggtgaaactgcggaagaagtgcagcaggtcctggtggacctccgtagcgtcgactgcgacatcgtcacgatcggtcagtacctgcagccgacccaaaaacatttaggcgtcgatcgctttgtcacgccggcggaatttgatgcttggcaacagcaaggcagtcagctcggcttcctgcaagtcgtggcttcacccctgacccgcagttcctatcacgccgaagaagtgcgccgactgatgcaggaatatccgcgtcagcgaccggcgatcgccctgaattaa

SEQ ID NO: 2834 - protein, 297 aa, Synechococcus elongatus PCC 6301
MVVKPEWLRVKAPQWQRVGNVKQVLADLGLNTVCEEASCPNIGECFNAGTATFLIMGPACTRACPYCDIDFEKKPKALDPTEPQRLTEAVGRLNLNHVVITSVNRDDLPDGGAEQFKRCIEAVRSRSPQTTIEVLIPDLCGNWEALEIILSAAPEVLNHNIETVSRLYRRVRPQGDYQRSLELLRRSREQAPWIYTKSGLMVGLGETAEEVQQVLVDLRSVDCDIVTIGQYLQPTQKHLGVDRFVTPAEFDAWQQQGSQLGFLQVVASPLTRSSYHAEEVRRLMQEYPRQRPAIALN

SEQ ID NO: 2835 - DNA, 1023 bp, Pseudomonas fluorescens Pf-5
  CDS (1)..(1023): transl_table=11
atgactactgcgcaagacgctgttcaaaccctgatcccgacgctggatatctccgagcgagcggcccgtccgaaagttgaaaccggcgtcaaattgcgcggtgcggaaaaggtcgcgcgcattccggtgaagatcattccgactaccgaactgccgaagaaaccggactggattcgcgtacgcatccccgtctccccggaagtcgatcggatcaagcagctgctgcgcaagcacaagctgcacagcgtctgcgaagaggcgtcctgcccgaacctgggcgagtgcttctccggcggcaccgcgaccttcatgatcatgggcgacatctgcacccgtcgctgccccttctgtgacgttggtcatggccgtccgaagcctctggatgtcgacgagccgatgaacctggcggtggccatcgccgatctgcgcctgaaatacgtggtgatcacctcggtggaccgcgatgacctgcgtgacggcggtgcccagcactttgccgactgcatccgtgaaatccgcaagttgtcgccgaacgtgcagttggaaaccctggttcccgactaccgtggccgcatggatgttgctctggaaatcaccgccgccacgccgccggacgtgttcaaccacaacctggaaaccgtgccgcgcctgtacaaggccgcccgtcctggctcggactaccagtggtcgctgaccctgctgcagaaattcaagcaactggtgccgcatgtgccgaccaagtccgggctgatgctgggcctgggtgaaaccgatgacgaagtcatcgaggtcatgaagcgcatgcgcgagcacgacatcgacatgctgacccttggccagtacctgcaaccgtcgcgcaaccacctgccggtccagcgcttcgtgcaccctgacaccttcgcctggttcgccgaggaaggttatcggatggggttcaagaacgttgcttccggcccgctggtacgttcttcgtaccatgccgacgaacaagcgaaactggccaaggcaggcctggtttcctga

SEQ ID NO: 2836 - protein, 340 aa, Pseudomonas fluorescens Pf-5
MTTAQDAVQTLIPTLDISERAARPKVETGVKLRGAEKVARIPVKIIPTTELPKKPDWIRVRIPVSPEVDRIKQLLRKHKLHSVCEEASCPNLGECFSGGTATFMIMGDICTRRCPFCDVGHGRPKPLDVDEPMNLAVAIADLRLKYVVITSVDRDDLRDGGAQHFADCIREIRKLSPNVQLETLVPDYRGRMDVALEITAATPPDVFNHNLETVPRLYKAARPGSDYQWSLTLLQKFKQLVPHVPTKSGLMLGLGETDDEVIEVMKRMREHDIDMLTLGQYLQPSRNHLPVQRFVHPDTFAWFAEEGYRMGFKNVASGPLVRSSYHADEQAKLAKAGLVS

SEQ ID NO: 2837 - DNA, 876 bp, Anabaena variabilis ATCC 29413
  CDS (1)..(876): transl_table=11
gtgactgtaaaaccagactggttgcgggtaaaagcgcctcaatgggagcgcgttggtaacgttaaagaaattttgcgggatttagcgctaaatacagtttgtgaggaagcgtcatgtccgaacattggtgaatgcttccaagctggtacagccacatttttgattatggggccagcctgcacccgtgcttgtccttattgcgatattgattttgagaaaaaacccaaagctctcgaccccacagaacccacacgattagctgaagctgtgcggcggatgagactaaatcatgtagtcatcacttccgtaaaccgagatgatttaccagatggtggtgcatcgcagtttgttaagtgtatagcagaggtgcgcgcggtttcgcctcaaaccacaattgaggtgctaatccctgatttgtgcggtaactgggaggcgttaaagataattcttcaagcatcaccagaggtattaaaccataatacagaaacaattcctcgcctttatcgacgagtcagaccccaaggcaactacgatcgcaccctagaattattgcagcgatcgcgtcaaattgctccctggctctacacaaaatccggtatcatggtcggcttaggcgaaactgatgccgaagttcgccaagttatgcaagacctacgcgctgtagattgcgatatcctcacaatcgggcaatatctccaacccagtcaaaagcacttgcaagttaacgattttgttactccagaacaatttgctgcttggcaagcctatggtgaagaaatcggatttctacaagttgtatcctcacctttgacgagaagttcttaccacgccgaacaagtacgacaattaatggagcgttacccccggaacaaatag

SEQ ID NO: 2838 - protein, 291 aa, Anabaena variabilis ATCC 29413
MTVKPDWLRVKAPQWERVGNVKEILRDLALNTVCEEASCPNIGECFQAGTATFLIMGPACTRACPYCDIDFEKKPKALDPTEPTRLAEAVRRMRLNHVVITSVNRDDLPDGGASQFVKCIAEVRAVSPQTTIEVLIPDLCGNWEALKIILQASPEVLNHNTETIPRLYRRVRPQGNYDRTLELLQRSRQIAPWLYTKSGIMVGLGETDAEVRQVMQDLRAVDCDILTIGQYLQPSQKHLQVNDFVTPEQFAAWQAYGEEIGFLQVVSSPLTRSSYHAEQVRQLMERYPRNK

SEQ ID NO: 2839 - DNA, 918 bp, Anabaena variabilis ATCC 29413
  CDS (1)..(918): transl_table=11
atgactgcctcacaacctgctcagtttaagtcggaaatcacggcaatgcccagttggttgcgccgtcccattggcaaagctagtgaactgtcaacagtacagcgcattattaaacagcgtcaaattcatacaatttgtgaagaaggtcgctgcccgaatcggggtgagtgctatgcccaaaaaacggctacattcttacttatggggcctacctgcacccgtgcttgtgctttttgtcaagtcgataagggtcatgcaccaatgccaattgacccagaggaagcagcaaaggtggcagaagcggtacaacttttgggactgcgttatgtagtacttacttctgtcgctcgtgatgatttacaagatcagggagcaagccactttgtccaaactatggaggcaattcgtcaactaaatccgggtactcaaattgaagtgttgacaccggatttttggggtggtgcaggcgcaggggaagccggacaacgccagcgcctaaaaatgattgtagaggcgcaaccagcttgttttaaccataacattgagacagtgcgtcgcttaaccgggccagtccgccggggtgctaaatacgatcgctctttgcgggttctctctcttgtcaaagaactaaacccccatattcccaccaaatcaggcttaatggtgggacatggagagacggttactgaactagtcgaagcaatgacagacttaagggctataggatgcgatcgcctcactatcggtcagtatatgcgcccatccctagaacatttaccagtccaaaaatattggacaccagaagaatttgagcatctgggcaaactagccagagaaataggctttagccacgtccgttcgggtccactagttcgcagttcctatcatgctggggaggaaccaataccgttcggataa

SEQ ID NO: 2840 - protein, 305 aa, Anabaena variabilis ATCC 29413
MTASQPAQFKSEITAMPSWLRRPIGKASELSTVQRIIKQRQIHTICEEGRCPNRGECYAQKTATFLLMGPTCTRACAFCQVDKGHAPMPIDPEEAAKVAEAVQLLGLRYVVLTSVARDDLQDQGASHFVQTMEAIRQLNPGTQIEVLTPDFWGGAGAGEAGQRQRLKMIVEAQPACFNHNIETVRRLTGPVRRGAKYDRSLRVLSLVKELNPHIPTKSGLMVGHGETVTELVEAMTDLRAIGCDRLTIGQYMRPSLEHLPVQKYWTPEEFEHLGKLAREIGFSHVRSGPLVRSSYHAGEEPIPFG

SEQ ID NO: 2841 - DNA, 966 bp, Burkholderia sp. 383
  CDS (1)..(966): transl_table=11
atggccgccgcgctcgaacgacccagcctcacggcgctcggccagccgggcgcgagaagccgcgacaagctcgcgcgcattccggtgcgcgtcgagcccgcggccggtgcggcgttgccgaagccgccgtggctgcgcgcgcggccgatgatgagcgcggcggttgccgatatggcggccgtgctgcgcgaccatcggctgcattccgtctgcgaggaggcgatgtgcccgaacatcggcgaatgcttcgcgcagcgcacggcgaccttcatgatcatgggcgggctgtgtacgcggcgttgcccgttctgcgacgtcgcgcacggccgtcccgaaccgctcgatccggacgagcccgcgcgactggccgatgcggctgcggcgctcgggctgcgctatgtcgtgatcacgtcggtcgatcgcgacgacctgcgcgacggcggcgccgcgcattttgccgcttgcatcgcggcggtgcgcgcgagcgtgccgggcatcggcgtcgaagtgctgacaccggacttccgcggtcgcgtggcccgcgcgctcgatgcgctgtcgatggcctggcccgacgtgttcaaccacaacatcgagacggtgccgtcgctgtatcgcgcggcgcggccgggcgccgactatcgcggctcgctcgaactgctcgcgcaggcgaagcgggcgcggccggggctggtgacgaaatcggggttgatgctcggccttggcgagtgcgacgacgaagtgcgcgacacgctgcgcgacctgcgcgcgcatgacgtcgacgtgctgacgctcggccagtatctcgcgccgtccgcgcatcatctgccggtgcgacgctacgtgagcccggacgcattcgccgcgtggcgcgacgaagcgctattgctcggtttcagggaagtcgtcgccggcccgctcgtgcggtcgtcgtatcacgcggccgacgtgcttgaggagaagtag

SEQ ID NO: 2842 - protein, 321 aa, Burkholderia sp. 383
MAAALERPSLTALGQPGARSRDKLARIPVRVEPAAGAALPKPPWLRARPMMSAAVADMAAVLRDHRLHSVCEEAMCPNIGECFAQRTATFMIMGGLCTRRCPFCDVAHGRPEPLDPDEPARLADAAAALGLRYVVITSVDRDDLRDGGAAHFAACIAAVRASVPGIGVEVLTPDFRGRVARALDALSMAWPDVFNHNIETVPSLYRAARPGADYRGSLELLAQAKRARPGLVTKSGLMLGLGECDDEVRDTLRDLRAHDVDVLTLGQYLAPSAHHLPVRRYVSPDAFAAWRDEALLLGFREVVAGPLVRSSYHAADVLEEK

SEQ ID NO: 2843 - DNA, 993 bp, Burkholderia sp. 383
  CDS (1)..(993): transl_table=11
atgactgacgttaccgcttcccccgcactggccgattcggccgcgacccctgcctacgatccgaccgccaagcagaaggcgcaggcgaagacggcgcgcatcccgatcaaggtcattccgatcgagaagctgaagaagcccgagtggatccgcgtgaaggcggccaccggcagctcgcgcttcaacgagatcaagacgatcctgcgtgagcacaacctgcatacggtgtgcgaggaagcgagctgcccgaacatcggcgaatgcttcggcaagggcaccgcgacgttcatgatcatgggcgacaagtgcacgcgccgctgcccgttctgcgacgtcggtcatggccgtcccgatccgctggatccggacgagccgaagaacctcgcacgcacgatcggcgcgctgaagctcaagtacgtggtgatcacgagcgtcgaccgcgacgacctgcgtgacggcggcgccggccacttcgtcgagtgcatccgcgaagtgcgcgagcagtcgccggaaacgcgcatcgagatcctgacgccggatttccgcggccgtctcgaccgcgcgatctcgatcctgaacgccgccccgccggacgtgatgaaccacaacctcgaaacggtgccgcgcctgtacaaggaagcgcgcccgggttcggactacgcgcactcgctgaagctgctgaaggacttcaaggcgctgcatccggacgtcgcgacgaagtcgggcctgatggtcggcctcggcgaaaccgaagaggaaatcctgcaggtgatgcgcgacctgcgcgcgcacgacgtcgacatgctgacgatcggccagtacctgcaaccgtccgagcaccacctgccggtgcgtgcgtacgtgcatcccgataccttcaagatgtacgaggaagaggcgtacaagatgggcttcacgcacgcggccgtcggcgcgatggtgcggtcgagctatcacgccgatctgcaggcgcacggggccggggtggtctga

SEQ ID NO: 2844 - protein, 330 aa, Burkholderia sp. 383
MTDVTASPALADSAATPAYDPTAKQKAQAKTARIPIKVIPIEKLKKPEWIRVKAATGSSRFNEIKTILREHNLHTVCEEASCPNIGECFGKGTATFMIMGDKCTRRCPFCDVGHGRPDPLDPDEPKNLARTIGALKLKYVVITSVDRDDLRDGGAGHFVECIREVREQSPETRIEILTPDFRGRLDRAISILNAAPPDVMNHNLETVPRLYKEARPGSDYAHSLKLLKDFKALHPDVATKSGLMVGLGETEEEILQVMRDLRAHDVDMLTIGQYLQPSEHHLPVRAYVHPDTFKMYEEEAYKMGFTHAAVGAMVRSSYHADLQAHGAGVV

SEQ ID NO: 2845 - DNA, 870 bp, Synechococcus sp. CC9605
  CDS (1)..(870): transl_table=11
gtgctcaagccggagtggttgcgcgttaaggctccgcagcgcgagcggatcggcgccgtagccgacctgctgctggatttaaacctgaacacggtctgccaggaggcgagctgccccaacatcggcgaatgcttcgcaggcggcaccgccacgtttttgatcatggggcccggctgcacccgcgcctgcccctactgcgacatcgactttgacaagagggtgcgtgagctcgatcccactgagccgcaacggcttggggaagcggtggcccgtctgggactgaagcatgtggtgatcacctcggtgaaccgcgacgatctcgccgatggaggtgcgtcccagttcgttgcctgcatcgaacaggtgaagcaacgctcaccgctcaccacgatcgagctgctgattcccgacttctgcggcaactgggatgccctggcaacggtgatggccgccgccccccacgtgctgaaccacaacattgaaacggtgccgcggatgtaccgcctggcgcggccccagggcatttatgaacgctccctcgagctgctgcaacgggtgagggagcaatggcccaaggcctacagcaagtcgggactgatggtggggctcggggaaaccgatgaggagataatcgagacgctccgggatctgcgcaaacacaaggtcgacatcgtcaccatcggtcagtacctctcacctggcccaaagcacctggccgtcgaccgctttgtctctccggctcaattcgagacctacagaacagtgggcgaagaggagctgggcttcctccaggtcgtcagcacaccactcacccgcagcagctaccacgccggcgaggtgcaacggctcatggccagccatccccgctga

SEQ ID NO: 2846 - protein, 289 aa, Synechococcus sp. CC9605
MLKPEWLRVKAPQRERIGAVADLLLDLNLNTVCQEASCPNIGECFAGGTATFLIMGPGCTRACPYCDIDFDKRVRELDPTEPQRLGEAVARLGLKHVVITSVNRDDLADGGASQFVACIEQVKQRSPLTTIELLIPDFCGNWDALATVMAAAPHVLNHNIETVPRMYRLARPQGIYERSLELLQRVREQWPKAYSKSGLMVGLGETDEEIIETLRDLRKHKVDIVTIGQYLSPGPKHLAVDRFVSPAQFETYRTVGEEELGFLQVVSTPLTRSSYHAGEVQRLMASHPR

SEQ ID NO: 2847 - DNA, 900 bp, Synechococcus sp. CC9605
  CDS (1)..(900): transl_table=11
atgagcaagtacagcgccatccctccggtcgagcgattgccggactggctgcggcgaccgatcggcaatgcctcggagttggagcgggtgcaggggctggtgaagcagaaccgcctgcacaccatctgtgaggaggggcgctgccccaaccgcggcgagtgctacgccgccggaacggcgacatttctcttgggtggctcgatctgcacccgcagctgtgccttctgccaggtggacaagggccaggccccgatgccggtggatgccgccgaagccgagcgggtggccgatgcggtggaggcgatgcagctccgttatgtagtgcttacggcggtggcccgcgatgatctcgccgatcacggtgcctgcctgttcactagcaccatggcggcgatccgagcccgcaatccgctgatcgccttggaggtgctcacccccgatttctgggggggtgtggcggatcacgctcaggccttggcggcccaacggcagcggctggccacagtgctggcagcccagccagtgtgcttcaaccacaacctggaaactgtgcagcggttgcagggggaggtgcgccgcggtgccacctatgaacgatccctgggtttactggcggccgcccgtgagttggcgccggagatccccaccaaaagtggcctgatgcttggcctgggggaaagccgcgaggaggtgatcgccaccctccacgacctccgcgctgtggattgccaacggatcaccctggggcagtacctgcgtccctcactggagcacatcccggtggcccgctactggacgccgcaggagttcgatgcgctggcggaggtggcccgagagctgggctttgcccaggttcgcagtggtccgctggtgcgcagcagctatcacgctgccgactga

SEQ ID NO: 2848 - protein, 299 aa, Synechococcus sp. CC9605
MSKYSAIPPVERLPDWLRRPIGNASELERVQGLVKQNRLHTICEEGRCPNRGECYAAGTATFLLGGSICTRSCAFCQVDKGQAPMPVDAAEAERVADAVEAMQLRYVVLTAVARDDLADHGACLFTSTMAAIRARNPLIALEVLTPDFWGGVADHAQALAAQRQRLATVLAAQPVCFNHNLETVQRLQGEVRRGATYERSLGLLAAARELAPEIPTKSGLMLGLGESREEVIATLHDLRAVDCQRITLGQYLRPSLEHIPVARYWTPQEFDALAEVARELGFAQVRSGPLVRSSYHAAD

SEQ ID NO: 2849 - DNA, 900 bp, Prochlorococcus marinus str. MIT 9312
  CDS (1)..(900): transl_table=11
atgagagacaataatctaatcaagaaagaaaaaatcttaagacttccctcttggattaaatttcctattagtaaagcttcagaattcgaaaaaatacaaacactcatcaaaaaatcaaattttcatactatttgtgaagaagcaagatgtcctaatagagcagaatgttatgcctcaggaacagccactttcttactgggtggatcgatatgttctcgttcatgtgctttttgtcaggtaaataaaggtagacctagttctgtcaatattgatgaatgtactcaagtcgctgaagcagtgaaagtactaaatttaaaatatgttgttttgacatctgtagctagagacgatctccctgatcatggtgcaaatttatttatatctacaattgatgagatcagaaaaattgattcaacaattaaaatagaggttttaactcctgatttatggggtgggggcaaaaattttgatgaaactaataaccttcagactgagagattgaagatgattttagaaaaagatccaatatgctttaatcataaccttgaaactgttgaaagactgcaaaaagaagttaggaggggtgcaaattacaaaaaatcccttagtttactaaaaaagtcaaaagatattgctcctcatattcaaactaaatcaggcattatgttaggtcttggtgaaacattggatgaaataaaaaatacaattcatgatcttaaaaaaatagattgtgatcaaattacaattggccaatatttaaggccctcattcaatcatttggaagttaagaaatattgggatccatcagagtttgaatatttatatcgcttctctaaggaattaggattcaaaaaagtatcttctggccctttagttagaagcagttatcatgcgggttaa

SEQ ID NO: 2850 - protein, 299 aa, Prochlorococcus marinus str. MIT 9312
MRDNNLIKKEKILRLPSWIKFPISKASEFEKIQTLIKKSNFHTICEEARCPNRAECYASGTATFLLGGSICSRSCAFCQVNKGRPSSVNIDECTQVAEAVKVLNLKYVVLTSVARDDLPDHGANLFISTIDEIRKIDSTIKIEVLTPDLWGGGKNFDETNNLQTERLKMILEKDPICFNHNLETVERLQKEVRRGANYKKSLSLLKKSKDIAPHIQTKSGIMLGLGETLDEIKNTIHDLKKIDCDQITIGQYLRPSFNHLEVKKYWDPSEFEYLYRFSKELGFKKVSSGPLVRSSYHAG

SEQ ID NO: 2851 - DNA, 894 bp, Prochlorococcus marinus str. MIT 9312
  CDS (1)..(894): transl_table=11
ttgactaaaaatcctaatagtttaagttcaaaacctgattggttaagagtaaaagctccgcaagttcagagaattggggatactgcaaatttgttaaatgatttaaatctcaatactgtatgtcaagaagcaagctgtccaaatattggtgaatgttttgctagtggaactgcgacttttctcataatgggtcctggctgtactagggcatgtccatattgtgatattgattttgatagatctaaaagggaattagatccaacagaaccatatcgtctagccgaagcagtttatagaatgaggcttaaacatgttgtaattacatcagttaatagagacgatcttgaggatggtggcgcatctcaattttttgaatgtgtttatcaagtaagaaaaaaatctcctgaaactacgatcgagcttttaattccagatttttgtggcaactggaaagctcttgaaaaagttcttgattccaatccaaacgttttaaaccacaatatagaaactgtgccatcgctatataaaaaagtaaggcctcagggtaaatatgagagaactctagagttacttaaaagaactagagattattctcctaaagtttatacaaagtctggctttatgcttggtttaggggaaaaagatgaggaggttttgaatcttcttgaggatttaaggagtaattacgttgatatagttactattggtcaatatttatctcctggccctaatcatttacctgttcaaagatttgtgagtccttcaaaatttaattattttaaagtttttggggaaaaagatttggactttatgcaagtagttagttctcctctaactcgtagcagttaccatgcagaagagattcaaaaacttatgaaaaagtatccaagatag

SEQ ID NO: 2852 - protein, 297 aa, Prochlorococcus marinus str. MIT 9312
MTKNPNSLSSKPDWLRVKAPQVQRIGDTANLLNDLNLNTVCQEASCPNIGECFASGTATFLIMGPGCTRACPYCDIDFDRSKRELDPTEPYRLAEAVYRMRLKHVVITSVNRDDLEDGGASQFFECVYQVRKKSPETTIELLIPDFCGNWKALEKVLDSNPNVLNHNIETVPSLYKKVRPQGKYERTLELLKRTRDYSPKVYTKSGFMLGLGEKDEEVLNLLEDLRSNYVDIVTIGQYLSPGPNHLPVQRFVSPSKFNYFKVFGEKDLDFMQVVSSPLTRSSYHAEEIQKLMKKYPR

SEQ ID NO: 2853 - DNA, 894 bp, Synechococcus elongatus PCC 7942
  CDS (1)..(894): transl_table=11
ttggtcgtcaaaccggaatggctgcgagtcaaagcaccgcagtggcaacgcgtcggtaacgtcaagcaagtcttggcggatctggggctgaataccgtttgcgaagaggcatcctgtcccaatattggtgagtgttttaacgctgggacggccacctttttgatcatgggtccggcttgcacgcgggcttgcccctactgcgatatcgacttcgaaaagaaacccaaagcgctcgatccgacggagccgcaacgactcgcagaagctgtgggccgactgaatctcaatcacgtcgtgatcacgtcagtcaatcgtgatgacttgccggatggtggtgctgagcaattcaaacgctgtattgaagcggtgcgatcgcgatcgcctcagaccacgattgaggttctgattcccgatctctgcggcaactgggaagcgctggaaattattttgtccgcagcgcccgaggtgctgaaccacaacatcgaaacggtctcacgactctaccgacgcgtgcgaccccaaggtgactatcagcgatcgctggaactattgcgccgcagtcgggaacaagcgccgtggatctataccaagtctggcttgatggtgggtcttggtgaaactgcggaagaagtgcagcaggtcctggtggatctccgtagcgtcgactgcgacatcgtcacgatcggtcagtacctgcagccgacccaaaaacatttaggcgtcgatcgctttgtcacgccggcggaatttgatgcttggcaacagcaaggcagtcagctcggcttcctgcaagtcgtggcttcacccctgacccgcagttcctatcacgccgaagaagtgcgccgactgatgcaggaatatccgcgtcagcgaccggcgatcgccctgaattaa

SEQ ID NO: 2854 - protein, 297 aa, Synechococcus elongatus PCC 7942
MVVKPEWLRVKAPQWQRVGNVKQVLADLGLNTVCEEASCPNIGECFNAGTATFLIMGPACTRACPYCDIDFEKKPKALDPTEPQRLAEAVGRLNLNHVVITSVNRDDLPDGGAEQFKRCIEAVRSRSPQTTIEVLIPDLCGNWEALEIILSAAPEVLNHNIETVSRLYRRVRPQGDYQRSLELLRRSREQAPWIYTKSGLMVGLGETAEEVQQVLVDLRSVDCDIVTIGQYLQPTQKHLGVDRFVTPAEFDAWQQQGSQLGFLQVVASPLTRSSYHAEEVRRLMQEYPRQRPAIALN

SEQ ID NO: 2855 - DNA, 936 bp, Synechococcus elongatus PCC 7942
  CDS (1)..(936): transl_table=11
gtgccacaatgcctgcagcgttggacttttgcggtgagtgcctctagaccgcccgcttccaccctccccccttggctgcgatcaggcctggggtttgccagtcaggtctcgcgcgtccaacaaattgtcaaacaacgccagattcacaccatttgtgaggaaggccgctgtccaaatcggggcgaatgctatgcccgggggacagccacctttttactgatgggaccgacctgtacgcggtcctgtgctttttgccaagtagataaaggccatgcaccgctgccactggatccgactgaacccgatcgcgtggccgaagcggttgagaccttgggcctccagtatgtggtgctgacagcggttgcccgagatgatcggccggatcagggtgcgactcaattcgccgctacgatgcaagcgatcacccagcgctgtcctcagacccaaattgaagtgttgaccccagacttttgggggggcgaacccgatcgcgatcgcgctgaacaggctcaggcggatcgcttggcagttgttctcgctgaacaacccgcttgctttaaccacaaccttgaaaccgtcgagcgactgcaaggccaagtgcggcgcggcgctcgctacgatcgctcgctacggttgctggcgctagcgaagcagcaagctcccatgattcccacgaagtcaggtttgatgttgggtctgggcgaaacccaggctgaagtgattgaaacgatgcaggcgctgcggcaagtcggttgcgatcgcctgaccttggggcaatatctccagccctctctagctcacctaccggtgcagcgctattggacgccagctgaatttgaggaactgggggcgatcgcccgagatttgggttttcagcaggtgcgatcggggccactcgtgcgcagctcctatcatgctgacagcagccaagactaa

SEQ ID NO: 2856 - protein, 311 aa, Synechococcus elongatus PCC 7942
MPQCLQRWTFAVSASRPPASTLPPWLRSGLGFASQVSRVQQIVKQRQIHTICEEGRCPNRGECYARGTATFLLMGPTCTRSCAFCQVDKGHAPLPLDPTEPDRVAEAVETLGLQYVVLTAVARDDRPDQGATQFAATMQAITQRCPQTQIEVLTPDFWGGEPDRDRAEQAQADRLAVVLAEQPACFNHNLETVERLQGQVRRGARYDRSLRLLALAKQQAPMIPTKSGLMLGLGETQAEVIETMQALRQVGCDRLTLGQYLQPSLAHLPVQRYWTPAEFEELGAIARDLGFQQVRSGPLVRSSYHADSSQD

SEQ ID NO: 2857 - DNA, 1068 bp, Saccharophagus degradans 2-40
  CDS (1)..(1068): transl_table=11
atgagcgaatcctcagagaacaacactggcgtacaaagccatgaacccaacgcggccacaagccaagaaagcgtaatgatgtccgatgcaatagcaaccgacggcgtgcctgttaaacgcacccgccgcattaaacagggcgaaaaactgcgcgatgccgataaggtagagcgtatccccgtaaaagtaattgcaacggatagcatgctgcgcaaacccgattggattcgcattcgcgtaaaagccgaccccgaagtggatcgtattaaaaaactactgcgcaaaaacaaactgtctacggtttgtgaagaagccaactgccctaacctaagcgaatgctttggcggcggtactgctacctttatgatcatgggcgatatctgtactcgtcgctgccctttttgcgacgtgggccacggcaagcccaacccgttagacgagaatgagccaaaacacttggccgaagctatcgccgatatgggcctcaaatacgtggtggttacctcggtggaccgcgacgacttgcgcgatggcggtgctcagcattttgccgactgtatccgtgaatcccgtgcgctttcgcccaacctgcaggtagaaattctcaccccagattttcgtggccgcatggatatagcgttagatattctcgccaacgagccgcccgatgtatttaaccacaacctagaaaccgtgccgcgtttgtaccgcgaggcgcgcccaggtgccaattacaaatggtcgctcgagctgcttaaaaagtacaaagcgcttaggccagaagtgcttactaaatctggcttgatggtaggtttaggggaaaccaaagaagaaatctttgaaaccctgaaagatatgcgcgaacacgatatagacatgttaaccatcggtcagtacctacagccgtcgcgcgatcacttgccggttaaacgctatgtagagcctgcagagtttgacgagtacaccgcaatggcagagcagctaggctttaagcacgccgcttgtggcccgcttgtgcgctcgtcctaccatgccgataaacaagctcacggtgaagaagttaagtaa

SEQ ID NO: 2858 - protein, 355 aa, Saccharophagus degradans 2-40
MSESSENNTGVQSHEPNAATSQESVMMSDAIATDGVPVKRTRRIKQGEKLRDADKVERIPVKVIATDSMLRKPDWIRIRVKADPEVDRIKKLLRKNKLSTVCEEANCPNLSECFGGGTATFMIMGDICTRRCPFCDVGHGKPNPLDENEPKHLAEAIADMGLKYVVVTSVDRDDLRDGGAQHFADCIRESRALSPNLQVEILTPDFRGRMDIALDILANEPPDVFNHNLETVPRLYREARPGANYKWSLELLKKYKALRPEVLTKSGLMVGLGETKEEIFETLKDMREHDIDMLTIGQYLQPSRDHLPVKRYVEPAEFDEYTAMAEQLGFKHAACGPLVRSSYHADKQAHGEEVK

SEQ ID NO: 2859 - DNA, 990 bp, Burkholderia xenovorans LB400
  CDS (1)..(990): transl_table=11
atggaagccgccctgcatggcgatagcgtcacggcacttggccagcacggcaagcgcagtggcgacaaactcgcgcggattccggtgaagatcgtgccgctcgccggtggcgatgccttgccgaaaccgccctggctgcgtgcgaggccgatgatgagcgagactgtcgccagcatggcggcgatcctgcgcgaacatcggctgcattcggtttgcgaggaggcaatgtgtccgaacatcggcgaatgttttgcacagcgcaccgccacgttcatgataatgggcggcatctgcacgcggcgctgtgctttctgcgacgtcgctcacggccggccggagccgctcgacgagggcgagccgcgcaggctcgccgcagcggtggcggcgctcggtttgcgctatgtcgtcgtgacctcggtggatcgcgacgatttgcgcgacggcggcgccgcgcattttgcccgctgcatcgcgttactgcgcgagcgtgtgccgggcatccggatcgaagtgctgacaccggattttcgcggacgtgtcgagcgggcagtgtccgaactctcccaggcgtggcccgatgtgttcaatcacaacatcgagacggtgccttcactctatcgggccgcgcgcgccggcgcggactatcgtggctcgctcgacttgctggcgcgcgtcaaacaggagaatggcgcagtgttgacgaagtcgggattgatggtcggactcggcgaatccgaccaggaactgctcggcaccatgcgcgatttgcgcgcgcatcatgtcgatatcctgactatcggccaataccttgcgccttcgcgctttcatatgccggtgcgccgatatgtcgagccggggcagttcgcttcatggcgcgacgagggtttgcaaatgggctttcgcgaggtggtggcgggacctttggtgcgctcgtcatatcacgcggatcatgccgccgacgtggtaacgaccacgggccaggagcggtga

SEQ ID NO: 2860 - protein, 329 aa, Burkholderia xenovorans LB400
MEAALHGDSVTALGQHGKRSGDKLARIPVKIVPLAGGDALPKPPWLRARPMMSETVASMAAILREHRLHSVCEEAMCPNIGECFAQRTATFMIMGGICTRRCAFCDVAHGRPEPLDEGEPRRLAAAVAALGLRYVVVTSVDRDDLRDGGAAHFARCIALLRERVPGIRIEVLTPDFRGRVERAVSELSQAWPDVFNHNIETVPSLYRAARAGADYRGSLDLLARVKQENGAVLTKSGLMVGLGESDQELLGTMRDLRAHHVDILTIGQYLAPSRFHMPVRRYVEPGQFASWRDEGLQMGFREVVAGPLVRSSYHADHAADVVTTTGQER

SEQ ID NO: 2861 - DNA, 993 bp, Silicibacter sp. TM1040
  CDS (1)..(993): transl_table=11
atgttgcgcccaaatacctgtcgcagtcacaaggaagaccctgtgagagatctgaaaatcccggaacagcgccacccggaaaaggcgcaccgtcccgataatgctcagcccaaaaagccaagctggattcgcgtcaaggcgccaggtggcaagggctatgccgagacgcataaaattatgagggaaaacaacctcgtaaccgtgtgcgaagaggcgggctgccccaatgtgggcgaatgctggagccagggccacgcaaccatgatgatcatgggtgaaatctgtactcgtggctgcaccttctgcaatattgcaaccggtcgccccgacactctggatgcgtttgagcctgggcgcgtggcgcatgcggtgcaaaaactcggcctcaaccatgttgtgatcacatccgtggaccgcgacgatctagaggatggcggtgccgatcactttgcgcaaacgatccgcgcggtgcgtcatcgctcgccgcagaccacgatcgagatcctcaccccggactttctgaaatgtgcccctgaggtgctggaaacggttgtcgaggccaagccagacgtgttcaaccacaacctcgaaaccgttcccgggctctatcccgaggtgcggccaggtgcgcgttatttccactcgctgcggttgttgcagcgcgtcaaagagctcgatccgagcatctttaccaaatcgggcatcatggtggggctgggagagcaggcgcctcaggtgaaacaggtgatggatgacatgcgtgcggcggatgttgatttcctgaccatcggccaatatctgcagccgacgcccaagcaccatgcggtggatcggttcgtgacaccggaagagtttgagtcatacgaaaaagcagcctatggcaaaggctttctgatggtgtcggcaacaccgctgacccggtcgtcctatcacgcgggcgatgatttcgccaagctgcgcgcggcgcggaatgccaagcttgggcttgcatga

SEQ ID NO: 2862 - protein, 330 aa, Silicibacter sp. TM1040
MLRPNTCRSHKEDPVRDLKIPEQRHPEKAHRPDNAQPKKPSWIRVKAPGGKGYAETHKIMRENNLVTVCEEAGCPNVGECWSQGHATMMIMGEICTRGCTFCNIATGRPDTLDAFEPGRVAHAVQKLGLNHVVITSVDRDDLEDGGADHFAQTIRAVRHRSPQTTIEILTPDFLKCAPEVLETVVEAKPDVFNHNLETVPGLYPEVRPGARYFHSLRLLQRVKELDPSIFTKSGIMVGLGEQAPQVKQVMDDMRAADVDFLTIGQYLQPTPKHHAVDRFVTPEEFESYEKAAYGKGFLMVSATPLTRSSYHAGDDFAKLRAARNAKLGLA

SEQ ID NO: 2863 - DNA, 930 bp, Myxococcus xanthus DK 1622
  CDS (1)..(930): transl_table=11
atggcgactcccgaccggttccctctgccccaggtgactgagaccacccgcaagccggagtggctgaaggtgcggctcccgcacggagaaggttacgagcgggtcaaagccatcgtgaagcgcaccaagctggccacggtgtgcgaagaggcccgctgcccgaacatcgccgagtgctggggcggtggcaccgccacggtgatgctgatgggcgaggtgtgcacgcgcgcgtgccgcttctgccacgtgaaggtcggcgcgcctcctccgctggatccgatggagcccatccatctggcccaggcggtgaaggagatggacctggagtacatcgtcgtcacgtccgtgaaccgggatgaccggccggacggcggcgccagccacttcgcttccgccatccgcgagctgcgccgggagagcccgcgcaccatcgtcgaagtgctcatcccggacttcaagggcgtggagaaggacctgaccaccgtggcggaggccaagccccacgtggtggcgcacaacgtggagacggtggagcgcctcacgccgacggtccgtgaccggcgcgcgaagtaccaccagtccctgcgcgtgctggagtacctcaagaaccgccccgagggcctgtacaccaagacgtccgtcatggtgggcctgggggagacggacgcggagctggagcagacgttcaaggacctgcgcgacgtgggcgtggacgtgctgacgctgggccagtacctgcagccgtcgcagtaccacctgcgcgtggagcgcttcgtgacgcccgcgcagttcgaggcgtacaagacgctggccgagtcctacggcttcctctacgtggcctccggtccgctggtgcggtccagctaccgggccgctgagttcttcatgaagggcctgatggagcgcgagcggctcgagcggctcggctga

SEQ ID NO: 2864 - protein, 309 aa, Myxococcus xanthus DK 1622
MATPDRFPLPQVTETTRKPEWLKVRLPHGEGYERVKAIVKRTKLATVCEEARCPNIAECWGGGTATVMLMGEVCTRACRFCHVKVGAPPPLDPMEPIHLAQAVKEMDLEYIVVTSVNRDDRPDGGASHFASAIRELRRESPRTIVEVLIPDFKGVEKDLTTVAEAKPHVVAHNVETVERLTPTVRDRRAKYHQSLRVLEYLKNRPEGLYTKTSVMVGLGETDAELEQTFKDLRDVGVDVLTLGQYLQPSQYHLRVERFVTPAQFEAYKTLAESYGFLYVASGPLVRSSYRAAEFFMKGLMERERLERLG

SEQ ID NO: 2865 - DNA, 1041 bp, Rhodococcus sp. RHA1
  CDS (1)..(1041): transl_table=11
gtgcgacgggccgggcgtaccatcgaccgcgtgactgtggccccagaaggacgcaaattgctccgcctcgagatccgaaatgcggagactccgatcgaacgcaaaccgaactggatcaagacgagagcgaagatgggcccggaatactccgagctcaagagcctcgtcaagcgcgagggtttgcacaccgtctgcgaagaagccggctgccccaacatctacgaatgctgggaagaccgcgaggcgaccttcctcatcggcggtgaacaatgcacccgccgctgcgacttctgccagatcgacaccggcaaacccgacgacctcgaccgcgacgaaccccgccgcgtcgccgaatccgtccaggcgatgggactgcgctactccaccatcaccggcgtcgcccgcgacgacctccccgacggcggcgcctggctctacgccgaaaccgtccgcctgatccaccagctcaatcccggcaccggcgtcgaactgctcatccccgacttcaacgccaagcccgatcagctcgccgaggtgttctccacccgccccgaggtgctcgcccacaacgtcgaaaccgtcccccgcatcttcaagcggatccggcccgcgttccgctaccagcgcagcctcgacgtgatcaccgccgcccgcgaagacaacctcgtcaccaagtccaacctcatcctcgggatgggcgaaacccccgacgaggtcacccaggcgttgcacgacctgcacgacgccggctgcgacatcatcaccatcacccagtacctgcgcccctccccccgccaccacccggtcgagcggtgggtcaagcccgaagagttcgtcgagcactccaagaccgccgaggaaatcggattcgccggcgtcatggccggacccctcgtccgctcctcctaccgcgccggccgcctctacgcgcaggcgatggcccaccatggccgcgaattgcctgcaggacaggcacatctcaccgaaagcggcgatgcgtcgcaggaggcgagttccctcatggcgcggctcgcccgctga

SEQ ID NO: 2866 - protein, 346 aa, Rhodococcus sp. RHA1
MRRAGRTIDRVTVAPEGRKLLRLEIRNAETPIERKPNWIKTRAKMGPEYSELKSLVKREGLHTVCEEAGCPNIYECWEDREATFLIGGEQCTRRCDFCQIDTGKPDDLDRDEPRRVAESVQAMGLRYSTITGVARDDLPDGGAWLYAETVRLIHQLNPGTGVELLIPDFNAKPDQLAEVFSTRPEVLAHNVETVPRIFKRIRPAFRYQRSLDVITAAREDNLVTKSNLILGMGETPDEVTQALHDLHDAGCDIITITQYLRPSPRHHPVERWVKPEEFVEHSKTAEEIGFAGVMAGPLVRSSYRAGRLYAQAMAHHGRELPAGQAHLTESGDASQEASSLMARLAR

SEQ ID NO: 2867 - DNA, 930 bp, Rhodococcus sp. RHA1
  CDS (1)..(930): transl_table=11
atgactgcacagcctgacggccgccgactgctccgcctcgaagtccgcaacgccaagactccggtcgaacgcaaaccgtcgtggatgaaggtgcagatgcggacaggccccgaataccgggacctcgccgctctcgtcgaacgcgagaacctgcacaccgtgtgccaggaagcgggatgtcccaacatcttcgaatgctgggaggaccgtgaggcgacgttcctcatcggcggaagccagtgcacccggcggtgcgacttctgccagatcgacaccggccggcccgccgcactcgaccggggagagcccagacgggtcgcggagtcggtgcagaccatgggccttcggtacgccaccgtcaccggggttgcccgcgacgatctgccggacggcggcgcctggctgtacgcggagacggtgcggcagattcacgaactgtgcccgggcaccggcgtcgaactgctgatccccgatttcaacgccgacgccgcgcaactacgcgaggtgttcgacacccgtccggaagtgcttgcgcacaacgtggagactgttccccggatattccgtcgtatccgccctgccttcacgtacgagcgttccctcgaggtgatcacccgggcccgggaggacggcctgatcaccaagtcgaacctcatcctcgggatgggggagaccgcggacgaggtgattcaggccctccgggatctgcataccgccggttgccagttgatcacgatcacccagtatctgcggccgtccgcccggcaccatccggtggcgcggtgggcgaaaccggacgagttcgtcatgctcgacgggatcgcccgcgagatcggcttcctcggcgtcctgtccggtccgctcgtgcgctcctcctatcgggccggccgcctccacgcggaggccgtcgccgcgaccgcagttcactga

SEQ ID NO: 2868 - protein, 309 aa, Rhodococcus sp. RHA1
MTAQPDGRRLLRLEVRNAKTPVERKPSWMKVQMRTGPEYRDLAALVERENLHTVCQEAGCPNIFECWEDREATFLIGGSQCTRRCDFCQIDTGRPAALDRGEPRRVAESVQTMGLRYATVTGVARDDLPDGGAWLYAETVRQIHELCPGTGVELLIPDFNADAAQLREVFDTRPEVLAHNVETVPRIFRRIRPAFTYERSLEVITRAREDGLITKSNLILGMGETADEVIQALRDLHTAGCQLITITQYLRPSARHHPVARWAKPDEFVMLDGIAREIGFLGVLSGPLVRSSYRAGRLHAEAVAATAVH

SEQ ID NO: 2869 - DNA, 945 bp, Haemophilus somnus 129PT
  CDS (1)..(945): transl_table=11
atggaacgtggtgtcaaatatcgtgatgctgcaaaaacgtcaatcattccggttaaaaatatcgatcccaatcaggagttattaaaaaaacctgaatggatgaaaatcaagcttcctgcaaattctgcgaaaattaacagtattaaaaacggaatgcgtcgtcatggattacattccgtatgtgaagaagcgtcttgtccaaatttacatgaatgcttcaatcacggcacagcaacatttatgattttaggtgcaatttgtacacgccgatgtccattctgcgatgttgcccatggaaaaccattacccccagatccggatgaaccaaaaaaattggcggaaactattcaagatatgaaattacgttatgtcgttattacatcagtggatcgtgatgatttaccggatcgtggtgcgggacattttgctgaatgtgttaaagaaattcgtaaacttaatccaggtattaaaattgaaattttggtgcctgattttcgtggacgcattgagcaagcattagaaaaattaaaagataatccccctgatgtttttaaccataatttagaaaatgtacctcgtttatatcgtgaaatcagaccaggtgcggactataattggtcgttaaaattactcaaagaatttaaaaccatttttccacatatccctaccaaatcaggcattatggttggcttgggagaaaccaatgaagaaattttacaggtaatgcaggacttacgggataacggtgtaaccatgttgactctaggtcaatatttgcaaccaagtcgccaccacttacctgttgcccgatacgttccacctgaggaatttgatgatttccgtgataaagccgaaaaaatgggatttgagcatgccgcttgcggaccttttgtgcgttcttcgtatcatgctgacttacaagcaagtggcgggctagtcaaataa

SEQ ID NO: 2870 - protein, 314 aa, Haemophilus somnus 129PT
MERGVKYRDAAKTSIIPVKNIDPNQELLKKPEWMKIKLPANSAKINSIKNGMRRHGLHSVCEEASCPNLHECFNHGTATFMILGAICTRRCPFCDVAHGKPLPPDPDEPKKLAETIQDMKLRYVVITSVDRDDLPDRGAGHFAECVKEIRKLNPGIKIEILVPDFRGRIEQALEKLKDNPPDVFNHNLENVPRLYREIRPGADYNWSLKLLKEFKTIFPHIPTKSGIMVGLGETNEEILQVMQDLRDNGVTMLTLGQYLQPSRHHLPVARYVPPEEFDDFRDKAEKMGFEHAACGPFVRSSYHADLQASGGLVK

SEQ ID NO: 2871 - DNA, 879 bp, Trichodesmium erythraeum IMS101
  CDS (1)..(879): transl_table=11
gtggtagtaaaaccagattggttaagagtcaaagctccccaatggcagagagtcggtacggttaaagaaattttgcgagacttaagtctcaaaacggtctgtgaagaagcttcctgtccaaacattggtgaatgttttaatgctgggacagcaacttttttaattatgggaccagcttgtactcgtgcttgtccttactgtgatattaattttgagaaaaaacctcagcctttagatgttaatgaaccaaaacagctagcagaagcagtaaaaagattaagacttaatcatgtagttattacttctgtcaatagggatgatttaactgatggaggtgctactcagtttgctaaatgtatttctcaagtccgggcaatttcacctcagactactatagaagtcctgataccagatttatgtggtaattggcaagctttagaaattattcttaatgctaaaccagaagttattaatcataatactgagactgttcaacggttatatcgccgagttaggcctcaaggtaattatcatcgaacattagaactgttgaagcgagctcgagaattagccccagaaatatatacaaaatctggaattatggtaggtgtcggagaaactgacgcagaagtccaagaggtaatgaaggacttacgagttgttgactgtgatattttaactattggacaatacctacaaccaagtcttaaacatctaccagtagatactttcatcaaacctgaacaatttgatcaatggaaaaaaatagggctttcaatgggatttttacaagttgtggcttcgcccttgactcgtagctcatatcatgctgaagaggtaaaagaattgatggtaaattatccaaagaccaaaagttag

SEQ ID NO: 2872 - protein, 292 aa, Trichodesmium erythraeum IMS101
MVVKPDWLRVKAPQWQRVGTVKEILRDLSLKTVCEEASCPNIGECFNAGTATFLIMGPACTRACPYCDINFEKKPQPLDVNEPKQLAEAVKRLRLNHVVITSVNRDDLTDGGATQFAKCISQVRAISPQTTIEVLIPDLCGNWQALEIILNAKPEVINHNTETVQRLYRRVRPQGNYHRTLELLKRARELAPEIYTKSGIMVGVGETDAEVQEVMKDLRVVDCDILTIGQYLQPSLKHLPVDTFIKPEQFDQWKKIGLSMGFLQVVASPLTRSSYHAEEVKELMVNYPKTKS

SEQ ID NO: 2873 - DNA, 924 bp, Trichodesmium erythraeum IMS101
  CDS (1)..(924): transl_table=11
atggtcaattcaattaagatgaaagcccaaattcagagtatgccaaagtggctgcgcccctctttgggtaaagctagtgagatttctactgtacaaaaaactatcaaacagcgtcagctccatacaatttgtgaggaaggtcgctgtcctaaccgaggagaatgctatgcccaaaaaactgctacttttttgttaatgggtcctacctgtactaggtcttgtgctttttgtcaagtagataagggtcacgctccaatggctttggacccagaagaaccgcaaaaagtagcggaagcagtggaattattgggtttgaagtatgtagtactgacttctgtagctagagatgatctctctgatggtggtgctagttggtttgtagctacaatgatggctattagggatcggaagccagaggcgaaaatagaggttttgactgctgacttttggggtggtcagaaggtcaggggggctgaaaagttatctgttcctctagctcaaagacaaagaaaacggattgagattgtggtaaatgctgaaccagcttgttataatcataatattgaaacggtttctaggttgcaagggcctgtacgtcgtggggccaaatatcagcgatcgcttgatgtattgcgaattgttaaagagttaaaccccagtattcctactaagtctggtttgatgttgggacatggagaaaaggaaactgaagtggtagaagcaatgggagacttgagaaaggtaggatgcgatcgcataactctgggtcagtatatgcgaccttccctggcacatttaccagtacaaaaatattggacaccagaagaatttgatcatcttggggcgatcgctctttcaatgggcttttctcatgttcgttctggccccttagttcgtagctcctatcatgctggagagatatag

SEQ ID NO: 2874 - protein, 307 aa, Trichodesmium erythraeum IMS101
MVNSIKMKAQIQSMPKWLRPSLGKASEISTVQKTIKQRQLHTICEEGRCPNRGECYAQKTATFLLMGPTCTRSCAFCQVDKGHAPMALDPEEPQKVAEAVELLGLKYVVLTSVARDDLSDGGASWFVATMMAIRDRKPEAKIEVLTADFWGGQKVRGAEKLSVPLAQRQRKRIEIVVNAEPACYNHNIETVSRLQGPVRRGAKYQRSLDVLRIVKELNPSIPTKSGLMLGHGEKETEVVEAMGDLRKVGCDRITLGQYMRPSLAHLPVQKYWTPEEFDHLGAIALSMGFSHVRSGPLVRSSYHAGEI

SEQ ID NO: 2875 - DNA, 879 bp, Synechococcus sp. CC9311
  CDS (1)..(879): transl_table=11
atgacgtccattcagaaacctgactggttgcgcgtcaaagccccccagcgcgagcgcattggcgaggtggccgacctgctgctggacctcaagttgaacaccgtttgccaggaggcaagctgcccgaatatcggcgaatgctttgccggagggaccgcgacgttcctgatcatggggcccggatgcacccgcgcctgtccctactgcgatatcgacttcgacaagagcgtccgcgcccttgatccaacagaaccccaacggctcggggaggcggtatcccggcttgggcttaaacacgtcgtgatcacatcagtgaaccgtgacgacctagaggacggaggggcgtctcagttcgtggcctgcatcgagcaggtgaagcaacactcgccgctcaccacgattgagctgctcattcccgatttctgtggcaattgggatgcgctagccacggtgatggaggcatcaccccatgtgctcaatcacaacattgaaacggtgccgcggctgtatcgccaagcgcgtccacagggggtttacgaacgctcccttgaacttctcaaacgggttcgcgatggctggtctcgggcttacagcaagtcgggactgatggtgggtctcggcgaaagcgactcagaagtgatcgaggtgcttcgcgatctaagagagcaccgagttgacatcgtcaccattggccaatacctatctccaggccccaaacacctgcgggtggaccggttcgtcactccggagcagttcgagagctaccgcctcaagggcgaacaagaacttggatttctccaagtggtcagcactccgcttacgcgcagcagttaccacgcaggggaagtgcagaaactaatgaccattcatcctcgctga

SEQ ID NO: 2876 - protein, 292 aa, Synechococcus sp. CC9311
MTSIQKPDWLRVKAPQRERIGEVADLLLDLKLNTVCQEASCPNIGECFAGGTATFLIMGPGCTRACPYCDIDFDKSVRALDPTEPQRLGEAVSRLGLKHVVITSVNRDDLEDGGASQFVACIEQVKQHSPLTTIELLIPDFCGNWDALATVMEASPHVLNHNIETVPRLYRQARPQGVYERSLELLKRVRDGWSRAYSKSGLMVGLGESDSEVIEVLRDLREHRVDIVTIGQYLSPGPKHLRVDRFVTPEQFESYRLKGEQELGFLQVVSTPLTRSSYHAGEVQKLMTIHPR

SEQ ID NO: 2877 - DNA, 903 bp, Synechococcus sp. CC9311
  CDS (1)..(903): transl_table=11
atgagccgttacagcggaatacgccccagtgagcgcttgccggaatggttgagacgacccatcggtaatgcctcagcgattgaacaggtgcaaactctggtcaaacagaatgggctcaacacgatttgcgaggagggccgctgccccaatcgaggggagtgttacgcagctggtaccgcaactttcttactcggtggctccatctgcacccgtagttgtgcgttctgccaagtggataaaggacgttcacctgaagcagtgaaccctgaagaaggtgaacgggttgcagaagccgtgcttcgcatgggactgcgctacgtggtcctcacggccgtagcccgcgatgaccttgaagaccatggggccagtttgttcacgaacgcgatggcggcgattcgtgcccgcaatgctttgatcgccatcgaagtactcaccccagacttctggggcggtatcgccgatcaaaccaaagcgcttcaagctcaacagaaacgtttagccactgttctgaaagcacagccagtttgtttcaaccacaatcttgaaacggtgaagcgactacaaggtgaagtccgccgtggggcgacttacacccgctcgcttgggctacttgccgcggccagagaacttgccccatcgatacccaccaaaagcggcctgatgcttggtttgggcgagagcaaagatgaagtcatcaacaccttgaaagacctacgcagtgtcgattgtcagcgcatcaccctcggccagtacctaaggccatccttagcccatatccctgtagctcgttactggcaccccacggaatttgcagaacttggcgccatcgccaccgaccttggatttactcaagtgcgcagtgggccattagtgcgcagcagttatcacgcagcaggagactga

SEQ ID NO: 2878 - protein, 300 aa, Synechococcus sp. CC9311
MSRYSGIRPSERLPEWLRRPIGNASAIEQVQTLVKQNGLNTICEEGRCPNRGECYAAGTATFLLGGSICTRSCAFCQVDKGRSPEAVNPEEGERVAEAVLRMGLRYVVLTAVARDDLEDHGASLFTNAMAAIRARNALIAIEVLTPDFWGGIADQTKALQAQQKRLATVLKAQPVCFNHNLETVKRLQGEVRRGATYTRSLGLLAAARELAPSIPTKSGLMLGLGESKDEVINTLKDLRSVDCQRITLGQYLRPSLAHIPVARYWHPTEFAELGAIATDLGFTQVRSGPLVRSSYHAAGD

SEQ ID NO: 2879 - DNA, 1056 bp, Hyphomonas neptunium ATCC 15444
  CDS (1)..(1056): transl_table=11
ttgccagtgcgccccacctcctgcatgggtcgtctgcagacgctgacgcttgatggaatcgcctcgaaggtccatttcctccccatggccaatctcatagacacccgttccggcgccccgcgcccgcgccatcccgaaaagcaggcccggccagacacgcccgttctgcgcaagccggactggattcgcgtcaaggcgcccacctcgcagggctataacgagacccgcaatatcgtgaagtcgaagggcctcgtcactgtctgcgaggaggccggctgccccaatatcggcgagtgctgggacaagaaacacgccaccatgatgatcctgggcgaggtctgcacccgcgcctgctccttctgcaacgtcgccaccggcaagccaaagcccggcgtggaagaagacgagcccgcccgcgtggccgaggccgtcgccgaaatgggcctctcccatgtcgtcatcacatccgttgaccgcgacgatctggaagacggcggcgccatgcacttcgtcaatacgatcaacgccatccgcgaacgctcgcccggcacgacgattgaaatcctcacgccggatttcctgcgcaaggatggctgggaaaaccgcgtcatcgatgcgcggcccgacgtgttcaatcacaatctggaaaccgtcccgcgcctctatctcaccatccgccccggcgcgcgctatttccattccctccgcctgctgcaaaaggtgaaggaccgcgaccccgcccagttcaccaaatccgggctgatggtgggcctgggtgaaaccaaggaagaggtgatgcaggtgatggacgacatgcgctctgccggcgtcgacttcctcaccatcggccaatatcttcagcccacgcgcaaacacgccgcgattgaccgcttcgtcacgcccgaagagttcaaggcgtatgaagaaatcgcccgcgccaaaggcttcctcatggtctcggccagcccgctcacgcgctccagccaccatgcgggcgaagacttcgcccagctgcgcgccgcgcgcgaagcctttctcgccgcccgcaaagcgtaa

SEQ ID NO: 2880 - protein, 351 aa, Hyphomonas neptunium ATCC 15444
MPVRPTSCMGRLQTLTLDGIASKVHFLPMANLIDTRSGAPRPRHPEKQARPDTPVLRKPDWIRVKAPTSQGYNETRNIVKSKGLVTVCEEAGCPNIGECWDKKHATMMILGEVCTRACSFCNVATGKPKPGVEEDEPARVAEAVAEMGLSHVVITSVDRDDLEDGGAMHFVNTINAIRERSPGTTIEILTPDFLRKDGWENRVIDARPDVFNHNLETVPRLYLTIRPGARYFHSLRLLQKVKDRDPAQFTKSGLMVGLGETKEEVMQVMDDMRSAGVDFLTIGQYLQPTRKHAAIDRFVTPEEFKAYEEIARAKGFLMVSASPLTRSSHHAGEDFAQLRAAREAFLAARKA

SEQ ID NO: 2881 - DNA, 927 bp, Solibacter usitatus Ellin6076
  CDS (1)..(927): transl_table=11
gtgaccgatgggctggtgcagatcggcggcagtgcgccgcgacccgcgcgggcccgcctgccggaatgggcgcgcaagagcaagacgcatttccaatcgctcaaccatttgaagcgaggcctgcgcgaactgaaactccacaccgtgtgcgaggaggcgcgctgtcccaacatccacgaatgcttccaccgcggagcggcaacgttcatgatattgggcgacctctgcactcgcggctgcggcttctgcagcgttcgcaaattgaatccgcggaaacacgatgtgcggctggatgagaacgagccggccaacgtggcgcgaatggcgcgggagatgaagctgcgctacgtggtgatcaccagcgtaaatcgcgacgatctgccggacggcgggtcgcggcatttcgcggagactgtccgcgaggtgcggaaggcgctgcccgaggcgcgcgtggaagtgttgacgccggatttctgcggcgacctggacgcggtcgcgcgcgtgctggacgccgggcctcacgtgttcaaccacaatatggaaacggtgccgcggctctacgcgcgagttcgtccgcaggcggaatatcgacagtcgctggacgtgctggcgttcgcccggagattcgcggaaggcgtgctggtgaaatccggattcatggtcgggttgggggagcgcgcggatgaggtggaggcgctgctgcgcgacctgcacgaggcgggcacacaaatcgcgaccataggacagtacctgcagccgacgcggcgcaacttgccggtggaggaatttgtggagccgcatcaattcgaagcgtggcgcgactacggcatggggctgggattccaggcggtattcagcggtccgttggtgcgtagttcgtatatggccgatctggtcagcgaggaggcccagcggggtctcggatga

SEQ ID NO: 2882 - protein, 308 aa, Solibacter usitatus Ellin6076
MTDGLVQIGGSAPRPARARLPEWARKSKTHFQSLNHLKRGLRELKLHTVCEEARCPNIHECFHRGAATFMILGDLCTRGCGFCSVRKLNPRKHDVRLDENEPANVARMAREMKLRYVVITSVNRDDLPDGGSRHFAETVREVRKALPEARVEVLTPDFCGDLDAVARVLDAGPHVFNHNMETVPRLYARVRPQAEYRQSLDVLAFARRFAEGVLVKSGFMVGLGERADEVEALLRDLHEAGTQIATIGQYLQPTRRNLPVEEFVEPHQFEAWRDYGMGLGFQAVFSGPLVRSSYMADLVSEEAQRGLG

SEQ ID NO: 2883 - DNA, 873 bp, Solibacter usitatus Ellin6076
  CDS (1)..(873): transl_table=11
atggaatcagtgctggtttccatttcccccaagctcgatcgtccgcagtggctgcgtgcgcccgcacccgcaggcgagaattatcgcgatctcaaacagttgatcgatcgcctgcgcctgcacaccgtctgcgaaagcgccgcctgtcccaacgtcggcgaatgctggaatcatcgcaccgcgaccttcatgatgctgggcaatgtctgcacccgccgctgcggcttctgcgccgtgcagaagggcgcgcccctgccggtggactacgacgagccctcgcgaatcgccgaggccgtggccgcgatgggcctcaagttcgccgtgatcaccagcgtcaatcgcgatgatcgccgcgatggcggcgcggaactcttcgctatggtgatccgcgcgattcgcgaccgcgtgcccggttgcggcgtggaagtgctgatccccgatttccagggcaatcgcgaggccgtggagaccgtcatggaagcgcgtcccgacgtgctcaatcacaataccgagactgtgccccgcctctaccggcaggtgcgcctcggcgcgcgctacgagcgctcgctcgacgtgctcgcccacgccaagcgcgtgcagcccgccactccgaccaagtccggcctcatgctcgggctcggcgaaaccgccgacgaagtcttgcaggtaatgcgcgatctccgcgcccacaacgtcgatatcctgacgctgggtcaatacctgaggccgtcgcccaagcacctgcccatcgtccgctacgtaactcccgcggagttcgaagagttccgcgacgcgggccgcgccatgggcttcgcccacgtggaatccggccccctggtccgcagttcctatcacgcctccaacgccgtgtag

SEQ ID NO: 2884 - protein, 290 aa, Solibacter usitatus Ellin6076
MESVLVSISPKLDRPQWLRAPAPAGENYRDLKQLIDRLRLHTVCESAACPNVGECWNHRTATFMMLGNVCTRRCGFCAVQKGAPLPVDYDEPSRIAEAVAAMGLKFAVITSVNRDDRRDGGAELFAMVIRAIRDRVPGCGVEVLIPDFQGNREAVETVMEARPDVLNHNTETVPRLYRQVRLGARYERSLDVLAHAKRVQPATPTKSGLMLGLGETADEVLQVMRDLRAHNVDILTLGQYLRPSPKHLPIVRYVTPAEFEEFRDAGRAMGFAHVESGPLVRSSYHASNAV

SEQ ID NO: 2885 - DNA, 1071 bp, Neisseria meningitidis FAM18
  CDS (1)..(1071): transl_table=11
ttgtccaaccctgccccacgccggacgaagtcgccgccaaacttaccgcacaccttgaaacacaattcacaccgaaagcagataacaatgagtgaaatcaaaaccgacgaccccaaacgcggcatcaaactcagaggcgcggacaaaaccgcgcgcatccccatcaaagtcgtcccccttcaggaaaaactgaaaaagcccgaatggatacgcgccaaactcccatcgcgcaaattctttgaaatcaaagacattttgcgcgaacaaaagatgcacaccgtttgcgaggaagcctcctgccccaacatcggcgaatgcttcagcaaaggcacggcgaccttcatgattatgggcgatatctgcacccgccgctgcccgttctgcgacgtgggacacggtcggcccaatatgctcgaccccgacgaaccgaaaaacctcgccgaatccgtcaaagccatgaacctgcgttacgtcgtcatcacctccgtcgaccgcgacgacctgcgcgacggcggcgcacagcatttcgccgactgcatcaaagccatccgcgaaaccagcccgaacaccaaaatcgaaatcctcgtccccgacttccgaggacgcttggacatcgcactcaaaatccttgccgaaaccccgcccgacgtgatgaaccacaacctagaaacccatccgagcctgtacagaaaagcccgtcccggtgccaattatcaacattctttagacttattaaaacgttataaagaaatgatgccgcacatcccgaccaaatccggcatcatggtcggcttgggcgaaacagacgaagacgtgcgtgaaattatgcgcgatatgcgggcgcacaatatcgaaatgattaccatcggacagtacctccagccttcagacggacacctgcccgtcctgcgctacgttacgcccgagcagttcaaaatctttgaaaaagaagcatacgaactgggcttcagcaatgccgccatcggcgcgatggtacgttccagctaccacgccgacgaacaggctgccgaagccttacgcgaaagccacggcggttgcgggcatcattaa

SEQ ID NO: 2886 - protein, 356 aa, Neisseria meningitidis FAM18
MSNPAPRRTKSPPNLPHTLKHNSHRKQITMSEIKTDDPKRGIKLRGADKTARIPIKVVPLQEKLKKPEWIRAKLPSRKFFEIKDILREQKMHTVCEEASCPNIGECFSKGTATFMIMGDICTRRCPFCDVGHGRPNMLDPDEPKNLAESVKAMNLRYVVITSVDRDDLRDGGAQHFADCIKAIRETSPNTKIEILVPDFRGRLDIALKILAETPPDVMNHNLETHPSLYRKARPGANYQHSLDLLKRYKEMMPHIPTKSGIMVGLGETDEDVREIMRDMRAHNIEMITIGQYLQPSDGHLPVLRYVTPEQFKIFEKEAYELGFSNAAIGAMVRSSYHADEQAAEALRESHGGCGHH

SEQ ID NO: 2887 - DNA, 963 bp, Magnetospirillum magnetotacticum MS-1
  CDS (1)..(963): transl_table=11
ttgctggacgatatccaagccatgaacgacaagcagtccctgcgtcatcccgaaaaagcccgcaagccggaccagatcagtccgcgcaagcccgactggatcagggtcaaggctccgacctcggaagaggcggcggaagtgcgccgcctgatgcgcgaaaagaacctgcacaccgtgtgcgaagaggcggcctgccccaatatcggcgaatgctggaagcacaagcacgccaccttcatgatcctgggcgatacctgcacgcgggcctgcgccttctgcaatgtcaagaccggcaatcccaaaggtgctgtcgatctggccgagcccgagcatctggccgaatcggtcaaggccatggggctcaaacacgtcgtcatcacctcggtggacagagatgatctggccgatggcggcgccttccagttcgtggcctgtatcgaggccatccgcgcctcgtcgcctgaatgcaccatcgaggtgctgacgcctgattttcgcgacaaaggcgaggggaccgtcgagcgcatcgccatcgcccgtcccgatgtgttcaaccacaatctggaaaccgtgccgcggctttatcccggcattcgtcccggtgcccgctatttcgagtccctgcgcgtgctgcagcgggccaaagctgcgaacacttccattttcaccaagtcaggcatcatggtggggctgggggaggagcgggccgaggtactgcaggtcatggatgacatgcgctctgccggggtggatttcatcaccatcggccagtatcttcagccgaccttgaagcatgtggcggtgtcgcgcttcgtcacccccgacgagttcgaggattaccgcgcccaggcccgcgccaagggctttcttatggtggcggccacgccgctgacccgatccagccaccacgccgaccgcgatttcgaggcgctgaaggccgaacgccagcgccgccaggggtaa

SEQ ID NO: 2888 - protein, 320 aa, Magnetospirillum magnetotacticum MS-1
MLDDIQAMNDKQSLRHPEKARKPDQISPRKPDWIRVKAPTSEEAAEVRRLMREKNLHTVCEEAACPNIGECWKHKHATFMILGDTCTRACAFCNVKTGNPKGAVDLAEPEHLAESVKAMGLKHVVITSVDRDDLADGGAFQFVACIEAIRASSPECTIEVLTPDFRDKGEGTVERIAIARPDVFNHNLETVPRLYPGIRPGARYFESLRVLQRAKAANTSIFTKSGIMVGLGEERAEVLQVMDDMRSAGVDFITIGQYLQPTLKHVAVSRFVTPDEFEDYRAQARAKGFLMVAATPLTRSSHHADRDFEALKAERQRRQG

SEQ ID NO: 2889 - DNA, 870 bp, Crocosphaera watsonii WH 8501
  CDS (1)..(870): transl_table=11
atgacggttaaaccgcagtggttacgggtaaaagcccctcaatggcaacgggtaggaagtgttaaggaaatattacgggatttaggcttaaatacggtttgcgaggaagcttcttgtcctaatattggggaatgtttccatgtagggacggcaacttttttgattatggggcctgcttgtactcgcgcttgtccttactgtgatattgattttgagaagaaaccccaacccctagacccccaggaacccttaaatttagctgaagcggtgcgtcgtttacgtctcaatcatgtggtgattacctcggttaaccgtgatgatttaccggatgggggtgcgtctcaatttgtcctttgtattgaggctattcgtcaagtttccccaaaaaccaccattgaggtgttaattcctgatttatgcggtaactgggatggtttagggattattttagaggctaaaccagaagttcttaaccataataccgaaactgtcccccgtttgtatcgtcgggttcgtcctcaaggaaattatcagcgatcgctggctttattacaagagtccaaaaccttggccccgaaactctataccaagtccggtattatggtggggttaggagaaaccgatgcagaggtgcgtcaagtgatggaagacttacgagccgttgattgtgatattttgaccataggacagtatttacaaccctctgctaaacatttagggataaaagagtttgttacccccgaaagttttgcaggatggcaaacctttggggagtctatcggctttttgcaagttgtttcctctcccttaacccgtagttcttatcatgcggaacaagttcgagagttgatgactgaatatcctcgttaa

SEQ ID NO: 2890 - protein, 289 aa, Crocosphaera watsonii WH 8501
MTVKPQWLRVKAPQWQRVGSVKEILRDLGLNTVCEEASCPNIGECFHVGTATFLIMGPACTRACPYCDIDFEKKPQPLDPQEPLNLAEAVRRLRLNHVVITSVNRDDLPDGGASQFVLCIEAIRQVSPKTTIEVLIPDLCGNWDGLGIILEAKPEVLNHNTETVPRLYRRVRPQGNYQRSLALLQESKTLAPKLYTKSGIMVGLGETDAEVRQVMEDLRAVDCDILTIGQYLQPSAKHLGIKEFVTPESFAGWQTFGESIGFLQVVSSPLTRSSYHAEQVRELMTEYPR

SEQ ID NO: 2891 - DNA, 879 bp, Prosthecochloris aestuarii DSM 271
  CDS (1)..(879): transl_table=11
atgaagattcaacgaaaacccgattggctgaaactcaggctttcgggaacggctcaatttgcatcaaccaggaaactgattgccgggtatggtctcaataccgtctgccgctcggcgcagtgcccgaacctgcacgaatgctggtcatcgggaacggctacctttctgctgcttggcaatacctgtacacgaagctgcaggttctgcgctgtaggcacaaaaaaggatcttcctcccccagacccgaacgaaccggaaaacgtcgcgcaagctgtccggaaaatgaaactcacccacgtcgtcctgacaagcgtcacccgagatgatctctccgatttcggttccggggcctgggctgaaacgatcagaaaaattcgcgaatccaatcccgataccaccatagaatgcctgattcctgatttcaggggaaatctggacgccctcgatagcgtgatgcaactccgtccggaggtgctcaatcacaatgtggaaaccgttccttcctgctacgcctcagtgcgccctgaagccgagtaccgtcaatcactcggggtacttcgtctggctgcatcaacctatggactgcaggcaaaatcaggccttatggtcggtctgggcgagacccctgaagaggtatacgaggtgcttgacgatcttctggcctacggctgccgtcacatcaccatcggtcagtacctgcagccatccaaacaccactatccggttcaacgatacgtcccaccggaagagtttgaccaataccgaacttacgcactcgaaaaaggatgcacaacggtccagtcaggcccctatgttcgaagttcctatcacgctgcagaatgcgtagagaacaagcataatacacttaccacaacgtaa

SEQ ID NO: 2892 - protein, 292 aa, Prosthecochloris aestuarii DSM 271
MKIQRKPDWLKLRLSGTAQFASTRKLIAGYGLNTVCRSAQCPNLHECWSSGTATFLLLGNTCTRSCRFCAVGTKKDLPPPDPNEPENVAQAVRKMKLTHVVLTSVTRDDLSDFGSGAWAETIRKIRESNPDTTIECLIPDFRGNLDALDSVMQLRPEVLNHNVETVPSCYASVRPEAEYRQSLGVLRLAASTYGLQAKSGLMVGLGETPEEVYEVLDDLLAYGCRHITIGQYLQPSKHHYPVQRYVPPEEFDQYRTYALEKGCTTVQSGPYVRSSYHAAECVENKHNTLTTT

SEQ ID NO: 2893 - DNA, 1122 bp, Xylella fastidiosa Ann-1
  CDS (1)..(1122): transl_table=11
atgactcaacctattgtccgttctatcccgttgcatgttgtctcaaatgatcatccttcatcttccccattgcagcctggaataaagcaatcgggtgaagacaagattgggcgttcgcctgtgcaatttgcagatgttccggtgttacgtaagccatcatggattcgtgttcgcattccatccggcaatgcggtacaaagtctcaaagccaagctacgtgagaatcgtttagtcacggtgtgtgaggaggctgcctgccctaatatccatgagtgttttagccatggcacagcgacgttcatgattctgggtgaagtgtgcacgcgtcgttgttcgttttgcgatgtggcgcatggccgccccaaaccgccggacccggaggaaccaatcagtttggcacgcaccgtcgctgagatgggtttgaagtacgtggtggtgaccagtgtggatcgcgatgatttgcgtgacggtggtgcccagcattttgttgattgcattgctgcaatccgtcagagtgcgccacagacacggatcgagattctgaccccagatttccgaggaaagggacgcatggatcgtgcattggacattttggcggcatgtccgccggatgtattcaatcataacgttgaaacggtgcccgctttgtatcccaatgtgcgacccggagcggattatcaatggtcattgacgctcttaaaacgctttaaggcacagcatccgcaggtgcctacgaagtccgggatcatgctcggtttaggggagactctggatcaggtacaggcgacgttgcgtgacttgcgtgctcatgacgtggatatggtcacggttggtcagtatctgcagccgacgccgcatcatcacccagtgttgcggtattggactccggatgagtacaaggcgttggaagagtacggtatggcgttgggtttcagccacgttgcttcaggtccgatggtgcgttcttcgtatcacgccgaccatcaggcgaaagaggcgggcttaggtttcaatgccaccgtttcgctgagctctccagcggtatcgtcgactgaacatcgggagcgccataccatcgcatcaaaatcagcctctaagactgaatcgatccgtcatagatag

SEQ ID NO: 2894 - protein, 373 aa, Xylella fastidiosa Ann-1
MTQPIVRSIPLHVVSNDHPSSSPLQPGIKQSGEDKIGRSPVQFADVPVLRKPSWIRVRIPSGNAVQSLKAKLRENRLVTVCEEAACPNIHECFSHGTATFMILGEVCTRRCSFCDVAHGRPKPPDPEEPISLARTVAEMGLKYVVVTSVDRDDLRDGGAQHFVDCIAAIRQSAPQTRIEILTPDFRGKGRMDRALDILAACPPDVFNHNVETVPALYPNVRPGADYQWSLTLLKRFKAQHPQVPTKSGIMLGLGETLDQVQATLRDLRAHDVDMVTVGQYLQPTPHHHPVLRYWTPDEYKALEEYGMALGFSHVASGPMVRSSYHADHQAKEAGLGFNATVSLSSPAVSSTEHRERHTIASKSASKTESIRHR

SEQ ID NO: 2895 - DNA, 873 bp, Croceibacter atlanticus HTCC2559
  CDS (1)..(873): transl_table=11
atgcaaacagaaacactttcagttataaaaccaaagccaaaaccaaaatggcttagagttaaattaccgacaggaaaaaagtataaagaactaagaggtcttgtagataaatatgaccttcacactatctgtacatcaggaagttgcccaaatatgggcgaatgttggagtgaaggaacagctacattcatgattcttggaaacgtctgtacacgttcttgtgggttttgtggtgtaaagacaggtagaccagatacagttgaatgggatgagcctgagaaagtggcacgttctattaagttaatggacattaagcacgccgtagttacaagtgtagatagagatgatcttaaagatatgggatctatcatatgggcagagactgtaaatgccataagacgtatgaatcctaacacaacacttgaaacattaataccagattttcaagggattgaaaagcatatagatcgtataatagccgttaatccagaagttgtttctcataatatggaaactgtaaaacgcttaactagagaagtacgtatacaagcaaaatacgaacgtagtttaggtgttttaaaatacttaaaagatcaaggtattaagcgtactaaatctggtattatgttaggtttaggagaaactgaagacgaggttatacaaacccttaaagatttaagagctgttaacttagatattgtaaccataggacagtatttacaaccaagtaaaaagcatttacctgtaaaacaatttatcactccagatcaatttaagaaatacgaggaaattggtttagaaatgggctttcgtcacgtagaaagtggtgctttagtaagatcttcatacaaagctcaaaagcacttaacgtaa

SEQ ID NO: 2896 - protein, 290 aa, Croceibacter atlanticus HTCC2559
MQTETLSVIKPKPKPKWLRVKLPTGKKYKELRGLVDKYDLHTICTSGSCPNMGECWSEGTATFMILGNVCTRSCGFCGVKTGRPDTVEWDEPEKVARSIKLMDIKHAVVTSVDRDDLKDMGSIIWAETVNAIRRMNPNTTLETLIPDFQGIEKHIDRIIAVNPEVVSHNMETVKRLTREVRIQAKYERSLGVLKYLKDQGIKRTKSGIMLGLGETEDEVIQTLKDLRAVNLDIVTIGQYLQPSKKHLPVKQFITPDQFKKYEEIGLEMGFRHVESGALVRSSYKAQKHLT

SEQ ID NO: 2897 - DNA, 948 bp, Sulfitobacter sp. EE-36
  CDS (1)..(948): transl_table=11
atgcgagacctgaaaatccccgagcagcgccaccctgaaaaggcccgacgccccgacaatccacagccgaaaaagccgtcgtggatccgggtgaaggcgccgggtggcaaaggctatgcggataccgcaaagatcatgcgcgagaacaaactggtgactgtctgcgaagaagcgggctgcccgaatgtgggcgaatgctggtcgcagggccatgccaccatgatgatcatgggcgaggtctgcacccgcgcctgtaccttctgcaacatcgcgacagggcgcccaccggaagcgctggacatctttgaacccgggcgtgtggccgatgcggtgtccaaactggggctgaaccacgtggtaatcaccagcgtggaccgcgacgacatcgaagacggcggggcagagcattttgcccagaccatccgtgccgtgcgcaaacggtccccgggcaccacgatcgaaatcctgacccccgatttcatccgctgtgatcccaaagtgctggaaaccgtggtcgaggcgcgcccggatgtgtttaaccacaatctggaaacagtgcccggcctctaccccgaggtccgccccggggcgcggtattttcattcgctgcgtctgttgcagcgggtcaaagagcttgatccgacgatgtttaccaaatccggcatcatggtcggtctgggcgaggatcgtcagtcggttatgcaagtcatggaagacatgcgcgcggcggacatcgattttctgaccatcgggcaatacctgcagccgacaccaaagcaccacgcggtggaccgctttgtgcatcccgatgaattcgccgcttatgaaaaatcggcctatggcaaagggttcttgatggtctctgcgacgcctctcacgcggtcgagctaccacgcaggggatgactttgcgcggctgcaggcggcgcggttggccaagctggggtaa

SEQ ID NO: 2898 - protein, 315 aa, Sulfitobacter sp. EE-36
MRDLKIPEQRHPEKARRPDNPQPKKPSWIRVKAPGGKGYADTAKIMRENKLVTVCEEAGCPNVGECWSQGHATMMIMGEVCTRACTFCNIATGRPPEALDIFEPGRVADAVSKLGLNHVVITSVDRDDIEDGGAEHFAQTIRAVRKRSPGTTIEILTPDFIRCDPKVLETVVEARPDVFNHNLETVPGLYPEVRPGARYFHSLRLLQRVKELDPTMFTKSGIMVGLGEDRQSVMQVMEDMRAADIDFLTIGQYLQPTPKHHAVDRFVHPDEFAAYEKSAYGKGFLMVSATPLTRSSYHAGDDFARLQAARLAKLG

SEQ ID NO: 2899 - DNA, 978 bp, Roseovarius nubinhibens ISM
  CDS (1)..(978): transl_table=11
atgattggcggggaaattcctgtgcgcgacctcaaattgccggaccagcggcacccggaaaaagcccataggcctgacaacgcgcagcccaagaaacccaagtggatcagggtcaaagcgccggtcggcaagggctatatggagacccggaagatcatgcgcgatcacaaacttgtgaccgtgtgcgaagaggccggatgcccgaatgtcggcgaatgttggaatcagggccacgccacgatgatgatcatgggcgaggtctgtacccgcgcctgcaccttttgcaacatcgccaccggcaagccgcctgaggatctcgatccgttcgagccggggcgcgtggccgatgcggtgcaaaagctcgggcttaatcatgtggtggtgaccagcgtcgaccgcgatgacgtcaaggatggcggggccgaacatttcgcccagacgatccgggcgatccggcatcgcagcccgggcaccacgatcgagattctgacgccggacttcatcaattgcgatcctgcggtgctcgaactggtggtcgaggccaagccggatgtgttcaaccacaatctcgaaaccgtgccggggctctatcccgaggtgcggccgggggcgcggtatttccattcgctgcggctcttgcagcgggtcaaggagatggacccgtcgatctttaccaagtctggaatcatggtgggtctcggggagacgcgccagcaggtgcatcaggtgatggatgacatgcgcgcggcgcagatcgatttcctgaccatcggtcaatatctgcagccgacgcccaaacatcacacgctggaccggttcgtgacgcccgaggaattcgcggcttatgagaaggcggcgaagggcaaggggttcttgatggtgtcggcgacgccgctcacccggtcgagctatcacgcgggcgatgatttcgcgcggctgcgcgaggcgcgggaacgggcgctggcggcggcctcctga

SEQ ID NO: 2900 - protein, 325 aa, Roseovarius nubinhibens ISM
MIGGEIPVRDLKLPDQRHPEKAHRPDNAQPKKPKWIRVKAPVGKGYMETRKIMRDHKLVTVCEEAGCPNVGECWNQGHATMMIMGEVCTRACTFCNIATGKPPEDLDPFEPGRVADAVQKLGLNHVVVTSVDRDDVKDGGAEHFAQTIRAIRHRSPGTTIEILTPDFINCDPAVLELVVEAKPDVFNHNLETVPGLYPEVRPGARYFHSLRLLQRVKEMDPSIFTKSGIMVGLGETRQQVHQVMDDMRAAQIDFLTIGQYLQPTPKHHTLDRFVTPEEFAAYEKAAKGKGFLMVSATPLTRSSYHAGDDFARLREARERALAAAS

SEQ ID NO: 2901 - DNA, 957 bp, Oceanicola batsensis HTCC2597
  CDS (1)..(957): transl_table=11
atgcgcgatctcaagatccccgaacagcgccatcccgaaaaggcgcgcaagccggacaacccccagccgagaaagccggactggatccgcgtcaaggcgccgacgtccaaggggtatttcgagacccgcagcatcatgcgcgagcatcggctgaccaccgtctgcgaggaggcgggttgcccgaacgccggcgaatgctggagccagggccacgccacgatgatgatcatgggcgaggtctgcacccgcgcctgcaccttctgcaacatcgccaccggcaagccgcccgaggcgctcgacgtgttcgagccgggccgggtcgccgatgctgtggccaagctggggctgaaccacgtggtcatcaccagcgtggaccgggacgatatcgaggacggcggggccgagcatttcgcccagaccatccgcgccatccgccaccgggcccccggcaccaccatcgagatcctcacgccggacttcatccgctgcggtcccgaggcgctggaggtcgtggtggcggcgaagcccgatgtcttcaaccacaacctggaaaccgtgcccggcctctatcccgaggtgcggcccggcgcgcgctatttccattcgctgcgcctgctgcagcgcgtcaaggaactggacccggcgatgttcaccaagtcgggcatcatggtcgggctgggcgaggcccggcagcaggtcgtgcaggtgatggaggacatgcgcgctgccgacatcgatttcctgaccatcggccagtacctccagcccacgcccaagcatcacgcggtcgaccggttcgtcccgcccgaggaattcgccagctacgagaagacggcctacaacaagggcttcctgatggtgtcggccacgccgctgacccggtcgtcctaccatgcgggcgacgatttcgcgcggctgcgcgagaatcggctgaagaagctgggtcagagcgcctga

SEQ ID NO: 2902 - protein, 318 aa, Oceanicola batsensis HTCC2597
MRDLKIPEQRHPEKARKPDNPQPRKPDWIRVKAPTSKGYFETRSIMREHRLTTVCEEAGCPNAGECWSQGHATMMIMGEVCTRACTFCNIATGKPPEALDVFEPGRVADAVAKLGLNHVVITSVDRDDIEDGGAEHFAQTIRAIRHRAPGTTIEILTPDFIRCGPEALEVVVAAKPDVFNHNLETVPGLYPEVRPGARYFHSLRLLQRVKELDPAMFTKSGIMVGLGEARQQVVQVMEDMRAADIDFLTIGQYLQPTPKHHAVDRFVPPEEFASYEKTAYNKGFLMVSATPLTRSSYHAGDDFARLRENRLKKLGQSA

SEQ ID NO: 2903 - DNA, 957 bp, Erythrobacter sp. NAP1
  CDS (1)..(957): transl_table=11
atgaacgacctctccaatctgcctgaggcagccaagagcgaagagcgcccacaacgtcagcgcaagcctgactggatccgcgtccgcgcgccagtgagccaaggctacaatgagacgcgcaaacttatgcgcgagctcaacctgaacacggtttgtgaagaggccgcttgccccaacatcggtgagtgctggtcgaagaagcacgcgacggtcatgatcctcggagatgtttgcacccgcgcctgcgcgttctgcaacgtcaagaccggcatgccacgccccgtcgacccgatggagcccgagaatacggccgtggctgcggcaaagatgggccttgaacacatcgtcatcaccagcgtcgatcgcgatgaccttcccgacggtggcgcagggcagttcgttaaagtgatcgaggcactgcgtcgcaatacgcccgacaccaccattgaaattctgacaccggacttccgcggcaagatgcgccctgcggttgaggcaatctgtgaagctgggcccgatgtctacaaccacaacctcgaaaccgtcccgaggctttatccgacgattaggcccggagcgcgctattacgcatcgcttcgccttctcgaagaggtaaaggcgcacaacccgctgatctttacgaagtcaggcatcatgctcggccttggtgaggagcgccttgaagtgcaccaggtcatggatgacatgcgcagcgccgatgtcgattttatcacgatgggccagtatcttcagccaacgcccaaacacgccaaggtggaagaattcgtcacgccaaaggcgttcggagcatacggttctatcgctcgagccaaaggctttttgcaggttgcttccagtcccctgacgcgttcgagctaccatgctggcgatgactttgctcagatgcgaaaggcgcgcgaggaaaagctccgcaaaaaggatcggctgagtatctga

SEQ ID NO: 2904 - protein, 318 aa, Erythrobacter sp. NAP1
MNDLSNLPEAAKSEERPQRQRKPDWIRVRAPVSQGYNETRKLMRELNLNTVCEEAACPNIGECWSKKHATVMILGDVCTRACAFCNVKTGMPRPVDPMEPENTAVAAAKMGLEHIVITSVDRDDLPDGGAGQFVKVIEALRRNTPDTTIEILTPDFRGKMRPAVEAICEAGPDVYNHNLETVPRLYPTIRPGARYYASLRLLEEVKAHNPLIFTKSGIMLGLGEERLEVHQVMDDMRSADVDFITMGQYLQPTPKHAKVEEFVTPKAFGAYGSIARAKGFLQVASSPLTRSSYHAGDDFAQMRKAREEKLRKKDRLSI

SEQ ID NO: 2905 - DNA, 915 bp, Synechococcus sp. RS9917
  CDS (1)..(915): transl_table=11
atgagtccagttagtcgctacagcagcctgcgccccaaagagcgcctgccccactggctgcgccgacccgtgggcaatgccagcgccctggaggcggtgcaggcggtggtgaagcagggcgccctgcacacgatctgcgaagaggggcgctgcccgaaccgggccgagtgctacgccgccggaaccgccaccttcctgctggggggatcgatctgcacccgcagctgcgccttctgtcaggtggagaagggccgggcacccatggccctcgatgcaggcgaagcggaacgggtggccgatgcggtgcaacgcatgggcctgcgctatgtggtgctcaccgcggtcgcccgcgatgacctcgccgatcacggtgccagcctgttcaccaccaccatggcggcgatccgggcccgcaaccccctgatcgcgatcgagctgctcacccccgatttctggggaggccaccgggagtgcagggagggcgaacaggcccagcgacagcgactccagaccgtgctcgccgcccaaccggtgtgtttcaaccacaacctggaaacggtgcagcgcctgcagggggaggtgcgccggggcgcgacctacagccgctccctcgggctcctggccgccgcccgggagctggccccccagatccccaccaaaagcggcctgatgctgggcttgggggagacgcgcgatgaggtgatcgccacgttgcgggatctgcgcgccgtcgattgccagcggctcaccctggggcagtatctgcgtccatcgctggcccacctgccggtggcgcgttactggacgccggaggagtttgaccagctgggcagcatcgcccgggagctggggttcgccgatgttcgctccgggccgctggtgcgcagcagctatcacgcagccgaggccggctga

SEQ ID NO: 2906 - protein, 304 aa, Synechococcus sp. RS9917
MSPVSRYSSLRPKERLPHWLRRPVGNASALEAVQAVVKQGALHTICEEGRCPNRAECYAAGTATFLLGGSICTRSCAFCQVEKGRAPMALDAGEAERVADAVQRMGLRYVVLTAVARDDLADHGASLFTTTMAAIRARNPLIAIELLTPDFWGGHRECREGEQAQRQRLQTVLAAQPVCFNHNLETVQRLQGEVRRGATYSRSLGLLAAARELAPQIPTKSGLMLGLGETRDEVIATLRDLRAVDCQRLTLGQYLRPSLAHLPVARYWTPEEFDQLGSIARELGFADVRSGPLVRSSYHAAEAG

SEQ ID NO: 2907 - DNA, 879 bp, Synechococcus sp. RS9917
  CDS (1)..(879): transl_table=11
atgacctccgccttgaaacctgagtggctgcgcgtcaaagcgccgcagcgggaacggatcggcgccgtggccgatctgctgctcgatctcaggctcaacacggtctgccaggaagcgagctgccccaatatcggcgagtgcttcgccggtggcaccgccacgtttctgatcatggggcccggctgcacccgcgcctgcccctactgcgacatcgatttcgacaagagcgtgcgggaactcgaccccaccgagcccgaacggctgggcgaggcggtggcgcgacttggacttcgccacgtggtgatcacctcggtgaaccgcgacgacctgaacgacggcggggccagtcagttcgtcgcctgcatccaacaggtgcgtcagcgctctcccctgaccacgatcgaactgctgattcctgatttctgcggcgactggaacgccctggccaccgtgatggacgccgcaccggatgtgctgaaccacaacatcgaaaccgttcccagcctctacaaacgggcgcgaccgcaggggatgtacagccgctcgctggagctgttgcaacgcgttcgggagggctggccgaaggcctacagcaaatcaggcctgatggtggggctgggggaaaccgatgccgaggtgcgcgagacaatggccgacctgcggcgccatgcggtcgacatcgtcaccatcggccagtacctctcgccggggcctaagcatctgccggtgcatcggttcgtgaccccggagcaattcgagagcttccgccgacatggtgaagaccagctcggcttcctgcaggtggtgagcagcccgctgacgcgcagcagctatcacgcggcggaggttcaacggctgatggccactcacccacgctga

SEQ ID NO: 2908 - protein, 292 aa, Synechococcus sp. RS9917
MTSALKPEWLRVKAPQRERIGAVADLLLDLRLNTVCQEASCPNIGECFAGGTATFLIMGPGCTRACPYCDIDFDKSVRELDPTEPERLGEAVARLGLRHVVITSVNRDDLNDGGASQFVACIQQVRQRSPLTTIELLIPDFCGDWNALATVMDAAPDVLNHNIETVPSLYKRARPQGMYSRSLELLQRVREGWPKAYSKSGLMVGLGETDAEVRETMADLRRHAVDIVTIGQYLSPGPKHLPVHRFVTPEQFESFRRHGEDQLGFLQVVSSPLTRSSYHAAEVQRLMATHPR

SEQ ID NO: 2909 - DNA, 924 bp, Synechococcus sp. WH 5701
  CDS (1)..(924): transl_table=11
gtgagcgccatggttcgcccgatcagccgttacagcgccatcgcccctgccgagcggcttccctcctggttgcgccgcccgatcggcagtgcctcggccctggaaacggtgcaggccgtggtcaaggggcagcggctgcacaccatctgcgaagagggacgctgccccaaccgaggggagtgctacgccgctggcaccgccacctttctgctgggcggaccggtctgcacccgcagctgcgccttctgtcaggtggagaagggccgcccgcccgcacccttcgaggcccaggaagcggagcgggtggcgaaggctgtggagcagctggccctgcgctatgtggtgctcaccgccgtggcccgcgacgatctggccgaccacggcgccgtgctgttcaccggcaccatgaccgccatccggcgccgcaaccccctgatcgccattgaggtgctcacccctgatttctggggcggccacagcaatcagacccaggcagaagccgcgcagcgccagcggctcgcctccgtgctggccgccggtcccgtctgcttcaaccacaacctcgaaaccgtgcgacgccttcagggccaggtccggcgtggcgccacctatgaacgctcgctgggcctgctggcggcggcccgggagctggccccggaaatccccaccaaatcagggttgatgctgggcctgggggaaaccgagcaggacgtggtggaggccatggaggacctgcgacgggccaactgtcagcgcctcacccttggccagtacatgcgcccctccctcgcccacctgccggtggcccgctactgggaacccgccgagttcgagcgcctcggtgcgatcgcccgcgagctcgggttccagcaggtgcgcagtggccccctggtgcgcagcagctatcacgcggccggcgattga

SEQ ID NO: 2910 - protein, 307 aa, Synechococcus sp. WH 5701
MSAMVRPISRYSAIAPAERLPSWLRRPIGSASALETVQAVVKGQRLHTICEEGRCPNRGECYAAGTATFLLGGPVCTRSCAFCQVEKGRPPAPFEAQEAERVAKAVEQLALRYVVLTAVARDDLADHGAVLFTGTMTAIRRRNPLIAIEVLTPDFWGGHSNQTQAEAAQRQRLASVLAAGPVCFNHNLETVRRLQGQVRRGATYERSLGLLAAARELAPEIPTKSGLMLGLGETEQDVVEAMEDLRRANCQRLTLGQYMRPSLAHLPVARYWEPAEFERLGAIARELGFQQVRSGPLVRSSYHAAGD

SEQ ID NO: 2911 - DNA, 879 bp, Synechococcus sp. WH 7805
  CDS (1)..(879): transl_table=11
atgacatccgccttgaaacccgagtggttgcgcgtgaaagcgccgcagcgggagcgcatcggtgctgttgccgatcttctgctcgacctgaagctgaacacggtctgccaggaggccagctgccccaacatcggcgagtgcttcgccggcggcaccgccacctttctgatcatggggccaggctgcacccgcgcctgcccttactgcgacatcgacttcgacaagagtgtccgtgcgctcgaccccaccgagccggagcggctcggggtagcggtggcgcgtttgggtctgaagcatgtggtgatcacctcggtgaaccgcgacgacctgccggatgggggagcctcccagttcgtggcctgcatcgaacaagtgaagcaacgctctccgctcaccacgatcgagctgctgattcccgacttctgcggcaactgggaggccctggccacagtgatggcggcagcaccccatgtgctcaaccacaacatcgaaaccgtgccacggatgtaccgcctggctcgcccccagggcatctacgagcgctccctggagctgctgaagcgggtccgcgacgactggcccagggcttacagcaaatcaggactgatggtgggcctgggggagagcgacgaggaagtgatcagcaccctgcgggatctgcgcgaccatcgggtggacatcgtcaccatcggccaatacctctccccaggccccaagcacctggctgtggaacgtttcgtgacccctgagcagttcgacacctaccgccgcatcggcgaagaggaactgggctttctgcaggtggtgagcacccccctgacccgcagcagctatcacgccggcgaggtgcagcggctcatgcaacaacacgctcgctga

SEQ ID NO: 2912 - protein, 292 aa, Synechococcus sp. WH 7805
MTSALKPEWLRVKAPQRERIGAVADLLLDLKLNTVCQEASCPNIGECFAGGTATFLIMGPGCTRACPYCDIDFDKSVRALDPTEPERLGVAVARLGLKHVVITSVNRDDLPDGGASQFVACIEQVKQRSPLTTIELLIPDFCGNWEALATVMAAAPHVLNHNIETVPRMYRLARPQGIYERSLELLKRVRDDWPRAYSKSGLMVGLGESDEEVISTLRDLRDHRVDIVTIGQYLSPGPKHLAVERFVTPEQFDTYRRIGEEELGFLQVVSTPLTRSSYHAGEVQRLMQQHAR

SEQ ID NO: 2913 - DNA, 909 bp, Synechococcus sp. WH 7805
  CDS (1)..(909): transl_table=11
atgggtcagatcagtcgctattcctccatcccaccgagggaacgtctacccgaatggttgcggcgatccgtaggcgacgcctccgcgatcgaacgtgttcagacccttgtgaaatccaacgctcttcacaccatctgtgaagaaggacgctgcccgaatcggggcgagtgttatgccgccggcacggccacatttctgctgggtgggtccatctgcacccgcagttgtgcgttctgtcaggtggacaagggccgggcccccgaagccctgaaccccttggaagcagagcgggtggcggatgccgtgatcactatggagctgcgttatgtggtgctcaccgcagtcgcccgagacgatcttgaggaccatggagcatccctcttcaccagtgccatggaggcgatccgacagcgcaatccgttgatcgcgatcgaggtgctcactccagacttctggggcgggcggccagaccagcgcgaaggagtccaggtccagcggcagcgattgaaaacggttctggatgccctacccatctgcttcaaccacaatctggaaaccgttgagcgattgcagggcgaagtgagacggggagcgacctatgaacgctcgcttggattgctggccgctgcgaaggaactcgcacctgagattcccaccaagagcggactgatgctcgggctaggcgagacccgggaggaggtgatccaaaccatggagcacctccgctctgtgaactgccagcgcctgaccatcggtcagtacatgcggccttccctggcccacattcccgtcgcccgctactggcatccggatgaattcgcggaactggggactatcgccagggagcttggcttctccgtagtgcgcagcgcaccactggtgcgcagcagttatcacgccgcggcctga

SEQ ID NO: 2914 - protein, 302 aa, Synechococcus sp. WH 7805
MGQISRYSSIPPRERLPEWLRRSVGDASAIERVQTLVKSNALHTICEEGRCPNRGECYAAGTATFLLGGSICTRSCAFCQVDKGRAPEALNPLEAERVADAVITMELRYVVLTAVARDDLEDHGASLFTSAMEAIRQRNPLIAIEVLTPDFWGGRPDQREGVQVQRQRLKTVLDALPICFNHNLETVERLQGEVRRGATYERSLGLLAAAKELAPEIPTKSGLMLGLGETREEVIQTMEHLRSVNCQRLTIGQYMRPSLAHIPVARYWHPDEFAELGTIARELGFSVVRSAPLVRSSYHAAA

SEQ ID NO: 2915 - DNA, 966 bp, Pseudoalteromonas tunicata D2
  CDS (1)..(966): transl_table=11
atgaataaaccagtaaagatccaaccaggtgtaaaactgcgtgatgcagaaaaaatggcattgatcccagttaaagtattaccgactgagaaaacagaaatgttgcgtaaacctgaatggctaaaaatacgcttgccaaaatctaccgagcgtattgatggcatcaaaagtgcgcttcgtaaacatgggttgcattctgtttgtgaagaagcgtcttgtccaaatttatcggagtgctttaatcacggtacagcaaccttcatgattttaggtgcaatttgtacacgccgttgtcctttttgtgatgttgctcatggtcgtcctcttgctcccgatgcagctgagcctgaaaaactagccctcactatccgtgacatgaagttaagctatgtggttattacttcagtggaccgtgatgatttacgtgatggtggtgcacaacattttgccgattgtattcgtgagatccgcaagtacaaccctgatattacgattgaagttctagtaccagatttccgaggtcgtatggaccgtgcacttgaaattcttattcaaacgccgccagatgtgtttaaccacaacctagaaactgcgccgcgtttatataaacttgcacgtccgggggctgattataaatggtcgttagaattacttcgtcgttttaaagaagcacatccaaacgttaaaactaaatcaggtttaatggttggtcttggtgaagaaatcagcgagattgaacaagtattacgtgacctacgtgaacacaatgtcgatatgctgaccgtgggccaatatttacagccatcgaagcaccacttgccggtaaagcgctatgtaccgcctgttgagtttgatgcgctaaaagcctatgccgatgagattggttttgttcatgctgcctgtggcccatttgtccgctcaagctaccatgccgatcagcaagctgcgggtaaagaagtaaaataa

SEQ ID NO: 2916 - protein, 321 aa, Pseudoalteromonas tunicata D2
MNKPVKIQPGVKLRDAEKMALIPVKVLPTEKTEMLRKPEWLKIRLPKSTERIDGIKSALRKHGLHSVCEEASCPNLSECFNHGTATFMILGAICTRRCPFCDVAHGRPLAPDAAEPEKLALTIRDMKLSYVVITSVDRDDLRDGGAQHFADCIREIRKYNPDITIEVLVPDFRGRMDRALEILIQTPPDVFNHNLETAPRLYKLARPGADYKWSLELLRRFKEAHPNVKTKSGLMVGLGEEISEIEQVLRDLREHNVDMLTVGQYLQPSKHHLPVKRYVPPVEFDALKAYADEIGFVHAACGPFVRSSYHADQQAAGKEVK

SEQ ID NO: 2917 - DNA, 972 bp, Photobacterium sp. SKA34
  CDS (1)..(972): transl_table=11
atgagtaaaccaattaagattgaacaaggcgtcaaatatcgcgatgccgataaaatggcattgatcccagttcgtaatgttgcgaacgaagaagcgccaaaagaagtattacgtaaacctgaatggatgaaaatcaagctaccgtctgatagtaagcgtattcaggaaatcaaatcagccctacgtaaaaacaaacttcactcagtctgtgaagaggcttcttgcccgaatttagcagaatgttttaatcacggtacagcaacctttatgatcttaggtgccatttgtacccgtcgttgcccattctgcgacgttgcccatggtcgtcctctaccgcctaatgctgaagagcccgcccatttagcacaaacaatcgcagatatgaaactacgctatgtggttgtaacctctgttgaccgtgatgatcttcgtgatggtggtgcacaacatttcgtggactgtattactgagattagagcaaagaacccaagtattcatattgaaacattagtgcctgatttccgtggccgcatggatcgtgcgctagagatcttccgtgataccgcaccgaatgtttttaaccacaacttagaaactgcaccacgcctataccgtaaagcgcgcccaggtgctaactaccagtggtctttggatttattgaaaaagttcaaagagcttcatcctgatgtaccgactaagtcaggtgtgatgatgggcttaggtgaaaccaaagaagaaatcattcaagtactaaaagatcttcgtgctcacggcgttaccatgctgacactaggtcaatatttagcaccaagccgccaccacttaccagttgagcgttatgtaccgccagaagagtttgatgaacttaaagaaatcgctctcgatcttggctttacacacgctgcatgtggaccatttgtacgatcgtcgtaccacgccgatcttcaagcgcaaggtgtagagattaaataa

SEQ ID NO: 2918 - protein, 323 aa, Photobacterium sp. SKA34
MSKPIKIEQGVKYRDADKMALIPVRNVANEEAPKEVLRKPEWMKIKLPSDSKRIQEIKSALRKNKLHSVCEEASCPNLAECFNHGTATFMILGAICTRRCPFCDVAHGRPLPPNAEEPAHLAQTIADMKLRYVVVTSVDRDDLRDGGAQHFVDCITEIRAKNPSIHIETLVPDFRGRMDRALEIFRDTAPNVFNHNLETAPRLYRKARPGANYQWSLDLLKKFKELHPDVPTKSGVMMGLGETKEEIIQVLKDLRAHGVTMLTLGQYLAPSRHHLPVERYVPPEEFDELKEIALDLGFTHAACGPFVRSSYHADLQAQGVEIK

SEQ ID NO: 2919 - DNA, 984 bp, Neptuniibacter caesariensis
  CDS (1)..(984): transl_table=11
atgtcagaacataacaacaaagaaacagcgaagaagagagtggagcaaggtgttaagctccggggtgcagataaagtcgatcgtattcctatcaaggtaataccgaccgaaaaagaagacatgccgcgtaagccggactggctgagagtgcgcatgggatcgaatgctaaggttaagcgtataaaggacaagttgcgtaagcacaaattggcgtccgtttgcgaagaagcaagctgccctaatctgggtgaatgttttagccacggtaccgccactttcatgattatgggtgatatttgtacccgacgttgccccttctgtgatgttgctcacggtcgtccaaatgcgctggatgaaaacgagccgaaagagatggccgatgctattgccgacatggagctgcgctatgtcgttgtgacctcggttgatcgcgatgacctaagggatggtggtgctcagcattttgccaactgtatcactgaaacccgtaagcaggtaccaaccattgagatggaaatactggtgcccgatttccgcggtcgtatggatattgcggttgatattctgacagagacgccacctgacgtattcaaccataatatggaaacggtgccgcgtttgtataaagctgtgcgccctggttctgactacgaatggtctttgcagttattgaaaaaatacaaagctaagaaccctgatgtacggactaagtccggtttgatggtgggtattggcgagactaatgaagagattattcaggttatgaaagatctgcgagctcatgatgtggatatgctgacgattggccagtacttgcagccaagccgcagtcacctcaaggttgaacgatttgttacgccggaagagtttgatgagttcagtcgattggcgaaagagatgggcttcaaacatgccgcttgtggtccgttggtgcgctcctcttatcatgctgatttgcaggctaaaggtgaaaaggtcggataa

SEQ ID NO: 2920 - protein, 327 aa, Neptuniibacter caesariensis
MSEHNNKETAKKRVEQGVKLRGADKVDRIPIKVIPTEKEDMPRKPDWLRVRMGSNAKVKRIKDKLRKHKLASVCEEASCPNLGECFSHGTATFMIMGDICTRRCPFCDVAHGRPNALDENEPKEMADAIADMELRYVVVTSVDRDDLRDGGAQHFANCITETRKQVPTIEMEILVPDFRGRMDIAVDILTETPPDVFNHNMETVPRLYKAVRPGSDYEWSLQLLKKYKAKNPDVRTKSGLMVGIGETNEEIIQVMKDLRAHDVDMLTIGQYLQPSRSHLKVERFVTPEEFDEFSRLAKEMGFKHAACGPLVRSSYHADLQAKGEKVG

SEQ ID NO: 2921 - DNA, 936 bp, Neptuniibacter caesariensis
  CDS (1)..(936): transl_table=11
atggagctgattccattacaagagcttaaaggcgaatcaaaaatgtcccgtttacgtcataaaccggacccggaacgcaaacgtctgcgtaagccggagtggattcgtatcgacgctcactctaatgccaacgtaaagaaggttaagaaacagcttcgcgacctcaaactacacactgtctgcgaagaagcctcctgccctaacctggccgagtgcttcagtcataagaccgcaactttgatgatcatgggtgcaatttgtacacgtcgctgcccattctgcgatgtggctcatggccgccccatgccgctagacccggaagagccgaagaacgttgcttcgacaattaagcaacttggccttaaatatgtcgtaattacctccgtagaccgtgatgaccttcgagatggtggagcaggtcactttgcggaagtcgttaaagaagcccgcgcaatcagtgatgatcttaaagttgagattctggttcctgacttccgtggaaaactggacccagcgctagaagcactgtccagccagatccctgatgtactgaatcacaatatggaaagcgtacctcgtctttatgaccacgtacgcccaggcgctgactatcactggtctcttaacctgctgtatcagttcaaacgcctgcacccacaagtggataccaagtcaggcctgatggttggcctgggtgaaaccaaagaagagatcatcgaagtcatgaaggatctgcgtgcgaatgacgtagatatgctgaccatcggccagtaccttcagccaagtaaatatcatctggcggtggagcgttacgtaacgccggaagagttcaaggaatatgaagagatcggttatgagctgggctttaagaatgtagccagcggccccatggtgcgctcctcgtaccacgccgatcttcaggcaaaagccctgtaa

SEQ ID NO: 2922 - protein, 311 aa, Neptuniibacter caesariensis
MELIPLQELKGESKMSRLRHKPDPERKRLRKPEWIRIDAHSNANVKKVKKQLRDLKLHTVCEEASCPNLAECFSHKTATLMIMGAICTRRCPFCDVAHGRPMPLDPEEPKNVASTIKQLGLKYVVITSVDRDDLRDGGAGHFAEVVKEARAISDDLKVEILVPDFRGKLDPALEALSSQIPDVLNHNMESVPRLYDHVRPGADYHWSLNLLYQFKRLHPQVDTKSGLMVGLGETKEEIIEVMKDLRANDVDMLTIGQYLQPSKYHLAVERYVTPEEFKEYEEIGYELGFKNVASGPMVRSSYHADLQAKAL

SEQ ID NO: 2923 - DNA, 876 bp, Flavobacteria bacterium BBFL7
  CDS (1)..(876): transl_table=11
atgaatacagtaaaagaatccatcgctccaccagcaaagggtaaaccgaaatggttgcgcgttaaacttcctgtagggaagaaatataaagaattacgaggtctagttgataaatatgacttgcataccatttgtacctcaggtagttgccctaacatgggtgaatgctggactgaaggtactgcaacgtttatgattttaggtaatacttgtactagatcttgtgggttttgtggtgtaaaaacaggccgaccagatgatatagactgggctgaacctgagaaagtagcacgttctattaaattaatgggaattaaacacgctgtaattactagtgtagatcgtgatgatttaaaagacatgggatctataatatggaaagaaaccgttgctgccatacgacgtatgaatcctgaaactacattagaaactttaataccagactttcaaggtaataaacgtaatatagatcgcatcgtggaagcaaatcccgaagttgtttcacataatatggaaacagtgcgtcgtctaacaagagaagtgcgaattcaggcaaaatatgatactagtctggaagttctacgttatttgaaacaacaaggaattaatagaactaaatctggaatcatgttaggattaggtgaactagaagaagaagttatccaaacgatgcaagacttgagagataacgatgttgatgtagtgactataggtcaatatttacaaccttctaagaaacacttaccagtaaaggaatttattactccagaacaatttaaaaaatacgaaactataggtctggaaatgggctttagacatgtagaaagtggcgctttagtaagaagctcttataaggcccacaagcatattttatag

SEQ ID NO: 2924 - protein, 291 aa, Flavobacteria bacterium BBFL7
MNTVKESIAPPAKGKPKWLRVKLPVGKKYKELRGLVDKYDLHTICTSGSCPNMGECWTEGTATFMILGNTCTRSCGFCGVKTGRPDDIDWAEPEKVARSIKLMGIKHAVITSVDRDDLKDMGSIIWKETVAAIRRMNPETTLETLIPDFQGNKRNIDRIVEANPEVVSHNMETVRRLTREVRIQAKYDTSLEVLRYLKQQGINRTKSGIMLGLGELEEEVIQTMQDLRDNDVDVVTIGQYLQPSKKHLPVKEFITPEQFKKYETIGLEMGFRHVESGALVRSSYKAHKHIL

SEQ ID NO: 2925 - DNA, 1074 bp, Oceanobacter sp. RED65
  CDS (1)..(1074): transl_table=11
atgtccaaatcagcgccggccaatcctgacaagcaagccagtgatcaagccgcccaagagcccgttcgcagtggtagcaaattcaaaagcgagcaaggattcagtgccattaaagatggtattaagtcgggttccggacatgctgaaaacgcccctattttgcgcaagcctaaatggttaagagccaagattccaagtggtcagcgctttgaagccgtcaaatccaatgtacgtgaacatcgcctaagcacggtttgtgaagaaagccattgcccaaatatcggcgaatgctggaataacggcacggccaccatcatggtgatgggctccgtctgtactcgagcttgtcgcttctgtgcagtcgataccggcaacccaaaaggctggttagatcgagaggagcccgctaatgttgccgaatcggtagaactcatggggctgcgctacattgtattaacgtcagtcgatcgagatgacctagaggacggtggtgcccagcattacgccgactgtgtaaagtccatcaaacaacgcactccagacgtaaaagtggaagccctaacaccagactttgatggcattgaagaacacgttgccaaagtggttgattcgggcctcgatgtctttgcgcaaaatgtggaaaccgtaaaacgtctgactcacgatgtacgtgaccctcgtgctggttacgagcaaaccattgaagtactgcgcttcgctaagcagcacaacccagaggtgttaacaaaaactagcatcatggtaggcctaggcgaaaccgacgaagaaatctatgaagccatggatgacttgcgcgccgccaatgtggatattttaactctgggccaatacctgcgtccgacgcgtaatcacttacctattgaccgttatgtgacaccagagcagtttaatcgctatcgcgaaattggtttagaaaaaggctttatggaagtagcgtctggggccatggtacgttctagctatcgtgcggaccaagtattcgaaaagaataatctaggtatagaattaccagcaatcccagacaccgaccgcattccggtaaaacaggtgtaa

SEQ ID NO: 2926 - protein, 357 aa, Oceanobacter sp. RED65
MSKSAPANPDKQASDQAAQEPVRSGSKFKSEQGFSAIKDGIKSGSGHAENAPILRKPKWLRAKIPSGQRFEAVKSNVREHRLSTVCEESHCPNIGECWNNGTATIMVMGSVCTRACRFCAVDTGNPKGWLDREEPANVAESVELMGLRYIVLTSVDRDDLEDGGAQHYADCVKSIKQRTPDVKVEALTPDFDGIEEHVAKVVDSGLDVFAQNVETVKRLTHDVRDPRAGYEQTIEVLRFAKQHNPEVLTKTSIMVGLGETDEEIYEAMDDLRAANVDILTLGQYLRPTRNHLPIDRYVTPEQFNRYREIGLEKGFMEVASGAMVRSSYRADQVFEKNNLGIELPAIPDTDRIPVKQV

SEQ ID NO: 2927 - DNA, 912 bp, Synechococcus sp. RS9916
  CDS (1)..(912): transl_table=11
atgagcaagcccacccgctacagccagatccgcccccaagaacgcctgccggagtggttgaggagacctgtgggcacggtctcccaactggagaccgttcaggggttggtgaaagaccgcggactgcacaccatctgcgaggaggggcgctgcccgaaccgcgctgagtgctatgccgcaggcaccgccaccttcctccttggaggatcgatctgcacccgcagctgcgccttctgccaagtggagaaaggcaaagcaccgatgactgtcgaccctgccgaagcggagcgcgtggctgatgcagtagcgcagatgggcctgcgctacgtggtgctgaccgccgtagcccgcgatgatctggccgaccacggcgccggactgttcacggctgcgatggccgcaatccgggcccgcaatccgctggtggcaatcgaggtgctcacgcccgatttctggggcggtcatgccgacctcaacacgggtctcgaggcgcagcgctcacgcctgaaaacggtgctcgatgcacagccagtgtgcttcaaccacaacctggaaaccgtccaacgcctccagggagaggtgcgtcgcggcgccacctatgaacggtctcttggtctgctcgcagcggcccgcgagcttgcgccgatgattcccaccaagagtggtttgatgctgggcttaggcgaaaccgcagacgaagtggtggaggccatgcatgatctgcgcgccgcgggttgtgaacggctcacgcttggccaatacctccgtccgtcgctcgcccatctgcccgtgcagcgctactggcatcccgatgaattcgaccgcttggggcagaccgctacgcagttggggttcagccacgtgcgcagcggccccctggtacgcagcagctatcacgccgaagtgccctga

SEQ ID NO: 2928 - protein, 303 aa, Synechococcus sp. RS9916
MSKPTRYSQIRPQERLPEWLRRPVGTVSQLETVQGLVKDRGLHTICEEGRCPNRAECYAAGTATFLLGGSICTRSCAFCQVEKGKAPMTVDPAEAERVADAVAQMGLRYVVLTAVARDDLADHGAGLFTAAMAAIRARNPLVAIEVLTPDFWGGHADLNTGLEAQRSRLKTVLDAQPVCFNHNLETVQRLQGEVRRGATYERSLGLLAAARELAPMIPTKSGLMLGLGETADEVVEAMHDLRAAGCERLTLGQYLRPSLAHLPVQRYWHPDEFDRLGQTATQLGFSHVRSGPLVRSSYHAEVP

SEQ ID NO: 2929 - DNA, 966 bp, Alteromonadales bacterium TW-7
  CDS (1)..(966): transl_table=11
atgaataaaccagtcaaaatggaaccaggtgtaaaactacgcgacgcagaaaaaatggcgttgatccccgttaaagttttaccaacagaaaaaactgaaatgttgcgtaagccagagtggcttaaaattcgcttaccaaagtcaacagagcgtattgacggtattaaacaagccatgcgtaagcacggcttacactcagtatgtgaagaggcatcttgcccaaacctatcagagtgctttaaccacggtacagcaacctttatgattttaggtgctatttgtacgcgtcgttgcccattttgtgatgttgctcatggtcgcccattaaaacctgatgcagcagagcctgaaaagcttgcactaacaattaaagacatgaagcttagctacgttgtaattacttcggttgaccgtgatgatcttcgtgatggcggcgcacagcactttgccgattgtatccgtgaaattcgtaagcacaacccaaccattaccatcgaaattttagtacccgatttccgtggccgtatggaccgtgctcttgaaattttaattgagacaccgcctgatgtgtttaaccacaacctagaaacagcaccgcgtttgtacaagcttgcgcgcccaggtgccgattacaaatggtcgttagaattacttcgtcgctttaaagaagcacacccagaagtaaaaactaaatctggcttaatggttggtctgggtgaagagattagcgaaatagaagaagtacttcgtgatctacgtgctcataacgttgacatgcttaccgttgggcaatatttacaaccttctaagcatcacttgccagttaaacgttacgtgccaccagcggaatttgacgcgttgaaagaatacgctgatgaaattggctttacacatgccgcctctggcccattcgttcgttcaagctaccacgctgaccaacaagctgccggtaaagaagtaaaatag

SEQ ID NO: 2930 - protein, 321 aa, Alteromonadales bacterium TW-7
MNKPVKMEPGVKLRDAEKMALIPVKVLPTEKTEMLRKPEWLKIRLPKSTERIDGIKQAMRKHGLHSVCEEASCPNLSECFNHGTATFMILGAICTRRCPFCDVAHGRPLKPDAAEPEKLALTIKDMKLSYVVITSVDRDDLRDGGAQHFADCIREIRKHNPTITIEILVPDFRGRMDRALEILIETPPDVFNHNLETAPRLYKLARPGADYKWSLELLRRFKEAHPEVKTKSGLMVGLGEEISEIEEVLRDLRAHNVDMLTVGQYLQPSKHHLPVKRYVPPAEFDALKEYADEIGFTHAASGPFVRSSYHADQQAAGKEVK

SEQ ID NO: 2931 - DNA, 1017 bp, marine gamma proteobacterium HTCC2080
  CDS (1)..(1017): transl_table=11
atgtcagtcatgagtgaatcttcggtcaataaaacaatcgagttaatccccacccgacaggtgaaaagcggcgagaaattcaccactgataagggtgttcgggcgatcaaagatggcattaaaagaagtgctacggcttctgctggcttgaaaaagcccgattggctacgcgtacgcattcacagcacgccccaatatgccgcggtaaaaaccatcgtgcgagataacgatttggcgaccgtatgcgaggaggccaagtgccccaatattagcgagtgttggagtgctggtaccgccaccattatgctgatgggtgatgtttgtacccgagcctgccagttttgtgcggtgaatacgggtaacccccagggttggctcgatcccgatgaagctgacaagaccgctcgcgcggtgcaattgatggggcttaaatacgttgtgttgacttcggttaaccgtgacgacttgccggatggcggtgcatctcgatatgccgaggttgtgattgcggtaaagaatcaaaatccagaaacggcggtggaggcactaacgcctgattttctgggtgatactcgagcggttgaagttttgctcgattctggcgtagaggtatttgcacaaaacattgaaactgtcgagcgattaactcatccggttagagacgtgcgagctagttatgagcaaacgctgtccgtgttggctcatggtaagcaataccgccccgatgtcatcactaaaacgtcgcttatgttggggttgggcgagtctgaagacgagatcgtgcagtgcatgaaagactgtcgagagcatggtgtcgatgtcattacattaggacagtaccttcaacccactaaaaaccactatccgatcgcgagatacgtcaccccccaggaatttgagcattatcgaaacctcgggttgtctctaggctttatggaggtggttgcgggtgcactggtgcggtcaagctatcgggctgagcgggtgcttgagggcaacaatgtgggccttagttag

SEQ ID NO: 2932 - protein, 338 aa, marine gamma proteobacterium HTCC2080
MSVMSESSVNKTIELIPTRQVKSGEKFTTDKGVRAIKDGIKRSATASAGLKKPDWLRVRIHSTPQYAAVKTIVRDNDLATVCEEAKCPNISECWSAGTATIMLMGDVCTRACQFCAVNTGNPQGWLDPDEADKTARAVQLMGLKYVVLTSVNRDDLPDGGASRYAEVVIAVKNQNPETAVEALTPDFLGDTRAVEVLLDSGVEVFAQNIETVERLTHPVRDVRASYEQTLSVLAHGKQYRPDVITKTSLMLGLGESEDEIVQCMKDCREHGVDVITLGQYLQPTKNHYPIARYVTPQEFEHYRNLGLSLGFMEVVAGALVRSSYRAERVLEGNNVGLS

SEQ ID NO: 2933 - DNA, 1080 bp, Marinobacter sp. ELB17
  CDS (1)..(1080): transl_table=11
atgaccgcaaacaccaagccccgtgtggccagtggcgccaagttccgcagtgaacatggcttttctgctattaaggacggcgttaagcaaagccgcaatgtttccaacgaaggcgtcagcaacgacccaaaacccaagtggttgcgtgcacgtatgcccggtggtgagcgctacgaggctgtcaaacagaatgtgaaaagccacaaggttgccaccgtgtgccaggaatctcactgtcccaatattggtgagtgctggaccaacggcactgcaacgatcatggtgatgggttcggtgtgtacacgtgcctgcaaattctgcgcggtagacaccggcaaccccaacggctggctagataaagaagaacccgagaatactgcaaaatcggtagaactgatgggcttgcgctacattgtgctgacatcggttgaccgcgatgacctgcgcgacggcggtgccggccattatgcggcctgtgtgttggccatcaagcaccgcacgccggaagtcagagtggaagcactcacgccggactttgatgcggtaatgcagcacgtagagcaggttttagactccgggctggatgtattcgcccagaacgtcgaaaccgttcgccgcctgactcacccggtacgcgacccgcgagccggctatgagaagactataagcgtactaaagcatgccaagcaataccgcccggacgtactgacaaaaaccagtttaatgctgggcctgggcgaaaccgacgaagaaattcagcaaaccatggacgacttgctggcggtgggcgtggatattctgacactgggccagtacctgcgccctactccgaaccatttgccggtgatgcgctacgtcaccccggaagaattcaaccgttaccgggaaattggcttggccaagggctttatggaagtgccatcaggccccttggtgcggtcgagctaccgtgcagatcgagtgtttgacaagaacaacttgggattggcggtgccagcagttcctgcatcaatagaaacgatgtcggcagaatccgagccagtcaacgccctgcagatactggtcaaatccgtaggctga

SEQ ID NO: 2934 - protein, 359 aa, Marinobacter sp. ELB17
MTANTKPRVASGAKFRSEHGFSAIKDGVKQSRNVSNEGVSNDPKPKWLRARMPGGERYEAVKQNVKSHKVATVCQESHCPNIGECWTNGTATIMVMGSVCTRACKFCAVDTGNPNGWLDKEEPENTAKSVELMGLRYIVLTSVDRDDLRDGGAGHYAACVLAIKHRTPEVRVEALTPDFDAVMQHVEQVLDSGLDVFAQNVETVRRLTHPVRDPRAGYEKTISVLKHAKQYRPDVLTKTSLMLGLGETDEEIQQTMDDLLAVGVDILTLGQYLRPTPNHLPVMRYVTPEEFNRYREIGLAKGFMEVPSGPLVRSSYRADRVFDKNNLGLAVPAVPASIETMSAESEPVNALQILVKSVG

SEQ ID NO: 2935 - DNA, 966 bp, Erythrobacter sp. SD-21
  CDS (1)..(966): transl_table=11
atgggcggcgcgatgaacgatctttcctccacaccgaagcccgagggcgaacagccgaagaagcagcgcaagcccgactggatccgcgtcaaggcgccggtcagcaagggctatcacgagacgcgcaagctgatgcgcgacctgtcgctcaacaccgtgtgcgaggaagcggcctgtccgaacatcggcgaatgctgggacaagaagcacgccacggtgatgatcctcggcgatgtttgcacccgcgcctgtgctttctgcaacgttaagaccggcatgccgcgcatcgtcgatccgatggagcctgagaatgtcgccattgcggcgggacagatgggcctcaaccacatcgtcatcacgtcggtggaccgcgacgatctgcccgatggcggcgcggaccagttcgtgaaggtcatcaaggcccttcgccgcgagaccccggacacgacgatcgagatcctcacccccgatttccgcggcaagatgcgcggggcggtcgaaaagatctgcgaagccggtccggacgtttacaaccacaacctcgaaaccgtgccgcgcctttatccgacgatccgtccgggcgcgcgttattacgcctcgctgcgcttgttggaggaagtgaaaaatcacgacccgcttatcttcaccaagtcgggcattatgctcggtctcggcgaacagcgcctcgaagtgcatcaggtgatggacgacatgcgcagcgcggacgtcgatttcatcaccatgggccagtatctccagccgacgccgaaacacgccaaggtggaagatttcgtcacgcccaaggcctttgccgcttacggttcgatcgcgcgcgctaaaggcttcctgcaggtcgcctcgagcccgctgacccgttcgagctatcacgcgggcgacgatttcgccgtgatgaaggccgcgcgcgaagagcggctcgcgaaggagcgcgcgaggcagtccgcctga

SEQ ID NO: 2936 - protein, 321 aa, Erythrobacter sp. SD-21
MGGAMNDLSSTPKPEGEQPKKQRKPDWIRVKAPVSKGYHETRKLMRDLSLNTVCEEAACPNIGECWDKKHATVMILGDVCTRACAFCNVKTGMPRIVDPMEPENVAIAAGQMGLNHIVITSVDRDDLPDGGADQFVKVIKALRRETPDTTIEILTPDFRGKMRGAVEKICEAGPDVYNHNLETVPRLYPTIRPGARYYASLRLLEEVKNHDPLIFTKSGIMLGLGEQRLEVHQVMDDMRSADVDFITMGQYLQPTPKHAKVEDFVTPKAFAAYGSIARAKGFLQVASSPLTRSSYHAGDDFAVMKAAREERLAKERARQSA

SEQ ID NO: 2937 - DNA, 966 bp, Moritella sp. PE36
  CDS (1)..(966): transl_table=11
atgagtaataccgttcgattagagccaggcgttaaacttcgcgacgccgataaaatggctaaaattccagttaaaattattgctactgagaatgatgagatcctgcgtaagccatcgtggctgaagatccgtctaccgaaaagctctgctcgtatccaagaaattaaagctgtgatgcgtgaaaacaacctgcattcagtttgtgaagaagcatcttgtccaaaccttactgagtgctttaaccacggtactgcgacctttatgatcatgggtgcaatctgcactcgtcgctgcccattctgcgatgttgctcatggtaaaccattaccactcgttgccgaagaaccgcttaaattagcgcaaacgattgccaagatgaagctaaaatacgtggtaattacctctgtagatcgtgatgatttacgtgatggtggcgcacagcattttgtcgattgtatccgtgaaatccgcttactgaaccctgaaataaaaatcgaaattttggttcccgatttcaaaggccgtatggataaagcattagaaatctttaaagatacaccaccagatgtatttaaccacaacctagaaactgcaccacaacattacaaaatggcgcgtcctggttctgattatcagtggtctttacgtttacttaaacgctttaaagaaatgcacccgaacgttccaactaagtcaggtctaatgatgggcttgggtgaaaccaacgaagagattgcagaagtaattaatgatcttgctgagaatggcgtaacgatgctgacactaggtcaatatttacaaccaagccgtcatcacttgccagtgaaacgctacgttcacccagacgactttgatgcacttggtgtacttgcaaaagaagttggctttgagcatgctgcctgcggtccattcgtgcgttcttcataccatgcagacttacaagcacaaggcaaagaggttacttaa

SEQ ID NO: 2938 - protein, 321 aa, Moritella sp. PE36
MSNTVRLEPGVKLRDADKMAKIPVKIIATENDEILRKPSWLKIRLPKSSARIQEIKAVMRENNLHSVCEEASCPNLTECFNHGTATFMIMGAICTRRCPFCDVAHGKPLPLVAEEPLKLAQTIAKMKLKYVVITSVDRDDLRDGGAQHFVDCIREIRLLNPEIKIEILVPDFKGRMDKALEIFKDTPPDVFNHNLETAPQHYKMARPGSDYQWSLRLLKRFKEMHPNVPTKSGLMMGLGETNEEIAEVINDLAENGVTMLTLGQYLQPSRHHLPVKRYVHPDDFDALGVLAKEVGFEHAACGPFVRSSYHADLQAQGKEVT

SEQ ID NO: 2939 - DNA, 906 bp, Opitutaceae bacterium TAV2
  CDS (1)..(906): transl_table=11
atgatcgacacttcgcgcaaaccttcctggctccgagccaagctcccgaccggccccggctatgccgccgtccgccaactcgtggacaagacccatctccacaccgtctgccagagtgcgcagtgccccaatctcggcgaatgctggtcgcgcggcaccgccacggtcatgatccttggcaacatttgcacgcgctcgtgtaatttttgcgcgatccagaccggacgtcccacggagctggatctcgccgagcccgcccgcgtggcggaggctgtggcgacgatgaatctgcgccattgcgtcatcacgtccgtggcgcgcgatgagttgcaggatggcggagcctcggtgtgggcagccacgattcgcgcgatccgttaccgcaatccgcagacggccatcgaggtgctggtgcccgatttcaaggggcgcacggagcatgtggacatggtaatggatgcgcggcccgatatttttaatcacaacgtggagaccgtggagcggttgcaacgtccggtgcgcgtgcaggcgcgttacgatcgttcgcgcggcgtgctgcgtcatgcgaaggggcgcggtttcacgaccaagacgggcatcatgctcggcctcggcgaacgtcaggaggaaattgagcaaacgatccgagacatcgcctccgacggcaccgacatcctcaccatcggccagtatttgcaacccacgccgcagcactggaaaatcgaccgctgggtgcaccccgacgagtttgcgcattggaagcaattcggcctcgccgccggccttggcgtggtggaaagcggcgcgatggtgcgctccagttaccacgccgacgagcagtcgcataaatacaccggcgacgcgcatctcaacaaggtgaacgccttggtggacgcgacagcgtag

SEQ ID NO: 2940 - protein, 301 aa, Opitutaceae bacterium TAV2
MIDTSRKPSWLRAKLPTGPGYAAVRQLVDKTHLHTVCQSAQCPNLGECWSRGTATVMILGNICTRSCNFCAIQTGRPTELDLAEPARVAEAVATMNLRHCVITSVARDELQDGGASVWAATIRAIRYRNPQTAIEVLVPDFKGRTEHVDMVMDARPDIFNHNVETVERLQRPVRVQARYDRSRGVLRHAKGRGFTTKTGIMLGLGERQEEIEQTIRDIASDGTDILTIGQYLQPTPQHWKIDRWVHPDEFAHWKQFGLAAGLGVVESGAMVRSSYHADEQSHKYTGDAHLNKVNALVDATA

SEQ ID NO: 2941 - DNA, 951 bp, Rickettsiella grylli
  CDS (1)..(951): transl_table=11
atggaaataaaacgactggatccgacacaaaaacaacgcggcgccgaaaaaatggctcgcatccccataaaaattaaatcggcccctcctttacgtaaaccggattggattcgcattaaattaccgctcacaaacggcatagaccaacttaaaaccatgattcggaaaaatcgtcttcataccgtttgtgaagaagcggcttgccctaatttaagtgaatgttttagccagggtaccgcgacgtttatgattatgggcgataaatgcacacggcgctgtaccttttgcgatgtcggccacggccgaccggatccactggatccagatgaaccctttaatttagccaatacggtccagcaaatggggcttcgttatgtcgtcattacgtcggtcgaccgcgatgatctgcgtgatggcggagccggtcactttacggcctgcttacaggcattacggaaacagtgtccagcactcactatagaagtacttgtccctgactttcgaggccggatggagcttgctttacaggccatagcacctgaattaccggatgtttttaatcataacatcgaaacgatacctcgcttatataaacaagtccgtcccggttctgattatcaatggtcactccaactcttgctggaatttaaacaacgctttccagggattccgactaaatcgggtctcatgctcgggttgggagaaacacgggatgaagttgaaaacgtcctgcacgatcttcgtcgacatcacgttgatatgataactattggtcaatatcttgccccgagccctcatcattttccggttgcgcgttacgtttctccacaagaattcaatgacctgggtcgtttagcgaaagacatgggatttattcgtgtagccagcggacccttggtccgctcttcctatcacgcggataaacaagctgcgggggagaacgtcgcctaa

SEQ ID NO: 2942 - protein, 316 aa, Rickettsiella grylli
MEIKRLDPTQKQRGAEKMARIPIKIKSAPPLRKPDWIRIKLPLTNGIDQLKTMIRKNRLHTVCEEAACPNLSECFSQGTATFMIMGDKCTRRCTFCDVGHGRPDPLDPDEPFNLANTVQQMGLRYVVITSVDRDDLRDGGAGHFTACLQALRKQCPALTIEVLVPDFRGRMELALQAIAPELPDVFNHNIETIPRLYKQVRPGSDYQWSLQLLLEFKQRFPGIPTKSGLMLGLGETRDEVENVLHDLRRHHVDMITIGQYLAPSPHHFPVARYVSPQEFNDLGRLAKDMGFIRVASGPLVRSSYHADKQAAGENVA

SEQ ID NO: 2943 - DNA, 948 bp, Thauera sp. MZ1T
  CDS (1)..(948): transl_table=11
atggaaacccccgctcgcaaacagcgcggcgccgacaagaccgcccgcatcccgatcaagatcgtccctgccgaacgcctcaagaagcccgagtggatccgcatcaagctcggcgccggcatggaggccgagcgcttcaacgagatcaaggccacgctgcgcgaccacaagctgcacaccgtgtgcgaggaagcctcctgcccgaacatccacgaatgcttcggcaagggcacggccaccttcatgatcatgggcgacatctgcacccggcgctgcccgttctgcgacgtcggccacggccgtcccgagccgctcaaccccgacgagccgcgcgacctcgccaagaccatcgccgcgatgcggctgaactacgtggtgatcacctcggtggaccgcgacgacctgcgtgacggcggcgcccagcacttcgtcgactgcatccgcgagacccgcgccgcctcgccgagtacccgcatcgaggtgctggtgcccgacttccgcggccgcatggagatcgcgctcgacatcttcgacgccgccccgcccgacgtcatgaaccacaacctcgagaccgtgccgcgcctgtacaagcaggcccgcccgggttcggactacgcgtattcgctcgagctgctcaagcagttcaaggcccgccatccggacgtggcgaccaagtccggcctgatggtgggcctgggcgagaccgacgacgagatcctcgaggtcatgcgcgacctgcgcgcgcacgacgtcgagatgctcaccatcggccagtacctgcagccctcaggcggccacctgccggtgctgcgctacgtgcatccggacaccttcaagatgttcgagaccgaggcgctgaagatgggcttcagaaacgccgcctgcggcccgatggtgcgctcgagctactgggccgaccagcaggcgcacggggccggggtggtctga

SEQ ID NO: 2944 - protein, 315 aa, Thauera sp. MZ1T
METPARKQRGADKTARIPIKIVPAERLKKPEWIRIKLGAGMEAERFNEIKATLRDHKLHTVCEEASCPNIHECFGKGTATFMIMGDICTRRCPFCDVGHGRPEPLNPDEPRDLAKTIAAMRLNYVVITSVDRDDLRDGGAQHFVDCIRETRAASPSTRIEVLVPDFRGRMEIALDIFDAAPPDVMNHNLETVPRLYKQARPGSDYAYSLELLKQFKARHPDVATKSGLMVGLGETDDEILEVMRDLRAHDVEMLTIGQYLQPSGGHLPVLRYVHPDTFKMFETEALKMGFRNAACGPMVRSSYWADQQAHGAGVV

SEQ ID NO: 2945 - DNA, 903 bp, Verrucomicrobium spinosum DSM 4136
  CDS (1)..(903): transl_table=11
atgacgcccaagattgaccctgcgctgcacacagaaaagaagcctgactggattcgtgtgaagctcccgcgtgaccccgtgttctggagcacgaagtccctgatttccgacttgcgcctgcacaccgtctgcgaagaggcccaatgccccaaccgctgggagtgctggagccagggcacagcaactttcatgatcgcgggcgaccgctgcacacgggcctgtggattctgtgcggtgaagacggccaagccctttgcgctggaggcagacgagccccagcgggtcgcccaggccgttcagcggatgaaactgaaccacatcgtgatcacggccgtggcccgagatgacgtgccagacggtggtgcggaacactttgccaggacgatcgaggcggttcgtgaagtccagccgggcatcacgattgagattctcgtgccggatttcaatgacaaggacgacgccctcatgaccgtgatgaaggcgaagccggagatcttcaaccacaatctggagacggtggagcgtctgactccgctggtgcgttcccgcgccaagtaccatcgcagcctgaacgtgctgaagcgcgccaaggaaatggcagtggaactgggtggcaaggtggccaccaagagcggcctgatgctgggcctcggtgagacagagccggaactcttccaggccatggacgatctgctggagcacggcgtgaccgtgctgaccctggggcagtacctgcgcccgtctgccaatcacctgccagtggtggagtacgttcaccccgacacgtttgagaactacaagcagatcgcgctgaagaaaggcttccgccatgttgccagtgcgccgctggtacgcagttcttatcacgctgcggacttcaagccggagctggatctggactga

SEQ ID NO: 2946 - protein, 300 aa, Verrucomicrobium spinosum DSM 4136
MTPKIDPALHTEKKPDWIRVKLPRDPVFWSTKSLISDLRLHTVCEEAQCPNRWECWSQGTATFMIAGDRCTRACGFCAVKTAKPFALEADEPQRVAQAVQRMKLNHIVITAVARDDVPDGGAEHFARTIEAVREVQPGITIEILVPDFNDKDDALMTVMKAKPEIFNHNLETVERLTPLVRSRAKYHRSLNVLKRAKEMAVELGGKVATKSGLMLGLGETEPELFQAMDDLLEHGVTVLTLGQYLRPSANHLPVVEYVHPDTFENYKQIALKKGFRHVASAPLVRSSYHAADFKPELDLD

SEQ ID NO: 2947 - DNA, 903 bp, Cyanothece sp. PCC 8801
  CDS (1)..(903): transl_table=11
atgaataaacaaacttcaactcaggatctaacccccttacctcgatggttaaagcgttctatcggtaaagcaagtgaaatttcaaccgttcaacgtattattaaacaacggaatattcatactatttgtgaagaaggtcgctgtcctaaccgtggggaatgttatgctcaaaaaaccgctacgtttctgttaatgggtccaacttgcacccgttcctgtgctttttgtcaagtggataaaggtcacgcaccgatgccattagaccccgatgaaccccaaaaagtggcagaatcggttaaattgttaggattacgctatgtcgtattgacttccgttgcacgggatgacttagcggatgggggtgcagggtggtttgttaaggtgatggagtctattcgtcagcttaaccctgaaacgcaaattgaagtgttaacccctgacttttggggggggaaagaacgagaaattagtcaaaaacaaagagttaacaccgttgttgaggcaaaaccggcctgttataaccacaatattgaaaccgttagacgacttcaaggacctgtcagacgaggagctaattatcagcgatcgctcaatgtcctaaaatgggttaaagaccttgatccttctattgccacaaaatcagggttaatgttaggtcatggggaaacagaagcggaaatactggaaacgttgcaagatttacggggggttaactgcgatcgcttaaccttgggacaatatatgcgtccttccttagctcatctaccagtacaaaaatactggactcctgaagagtttgaaaaattaggggaaatagcgcgatcgctaggattttctcaggtgcgatcgggtcctctggttcgtagttcctatcatgcaggggagcaagaaaatgagctataa

SEQ ID NO: 2948 - protein, 300 aa, Cyanothece sp. PCC 8801
MNKQTSTQDLTPLPRWLKRSIGKASEISTVQRIIKQRNIHTICEEGRCPNRGECYAQKTATFLLMGPTCTRSCAFCQVDKGHAPMPLDPDEPQKVAESVKLLGLRYVVLTSVARDDLADGGAGWFVKVMESIRQLNPETQIEVLTPDFWGGKEREISQKQRVNTVVEAKPACYNHNIETVRRLQGPVRRGANYQRSLNVLKWVKDLDPSIATKSGLMLGHGETEAEILETLQDLRGVNCDRLTLGQYMRPSLAHLPVQKYWTPEEFEKLGEIARSLGFSQVRSGPLVRSSYHAGEQENEL

SEQ ID NO: 2949 - DNA, 870 bp, Cyanothece sp. PCC 8801
  CDS (1)..(870): transl_table=11
gtggcggttaaaccggaatggttacgggtaaaagccccccaatgggaaagagtgggcaacgttaaggagattttacgcgatttaaacctcaataccgtttgtgaagaggcatcttgtcctaatattggcgaatgcttcaacgcgggaacagccacctttttaatcatgggacctgcttgtacccgtgcttgtccctattgtgacattgattttgagaaaaaaccccaagccttagaccccctcgaacccctcaacctcgctgaagctgtccgtcgtcttaagcttaaccacgtcgtcattacctccgtcaaccgagatgacttacccgatgggggtgcgtctcaatttgtgcggtgtatccaagaaattcgtaaagtttccctaaaaaccacgattgaggtcttaattcctgatttatgcggtaattggacagctttagaggtgattttatccgctaaccccgaagtgctcaaccataataccgaaaccgttccccgtttataccgtcgagtccgtccccaaggagattatcagcgatcgctcgaacttttgcaacaggcaaagggattatctcctcaaatttacacaaaatcgggtattatggtcggtttaggggaaaccgatgaggaagttcgccaagtgatggaagatttgcgcggtgttgattgtgatattctcaccctaggacaatacctacaaccttcccctaaacatttagaagtgaaaggatttattcccccttcccagttcgatgaatggcgaaaatttggggaagaaattggctttttacaagtggtttcttctcccttaacccgcagttcctaccacgcagaacaagttcaaaaattgatggaaaaataccctcgctaa

SEQ ID NO: 2950 - protein, 289 aa, Cyanothece sp. PCC 8801
MAVKPEWLRVKAPQWERVGNVKEILRDLNLNTVCEEASCPNIGECFNAGTATFLIMGPACTRACPYCDIDFEKKPQALDPLEPLNLAEAVRRLKLNHVVITSVNRDDLPDGGASQFVRCIQEIRKVSLKTTIEVLIPDLCGNWTALEVILSANPEVLNHNTETVPRLYRRVRPQGDYQRSLELLQQAKGLSPQIYTKSGIMVGLGETDEEVRQVMEDLRGVDCDILTLGQYLQPSPKHLEVKGFIPPSQFDEWRKFGEEIGFLQVVSSPLTRSSYHAEQVQKLMEKYPR

SEQ ID NO: 2951 - DNA, 885 bp, Cyanothece sp. PCC 7424
  CDS (1)..(885): transl_table=11
gtgactgtaaaacctgaatggctgagggtaaaagcgcctcaatggcaacgagtgggaagtgttaaagaaattcttcgagatttagccttaaataccgtctgtgaagaagcgtcttgtccgaatattggcgaatgtttccacgccggaaccgctacttttttaattatggggccggcttgtacccgtgcctgtccctattgtgacatcgattttgaaaaaaaacccttacccctcgatcaaagcgaacctctacggttagctgaagcagtacaacgcctcaaactcaatcatgtcgtcattacttctgtcaaccgagatgacttacccgatgggggtgcgtctcaatttgtccgatgtatcgaagaagtccgcaaaatatcccctcatacaaccatagaagtgttaattcccgatttgtgcggcaattgggacgcattagccctaattttacaagctaatcccgaagttctcaaccacaataccgaaactatcccccgattatatcgacgggttcgtcctcaagccaactatgagcgatcgctcgaactgctccaacgtacccgacacttagcccctcaagtttacactaaatcggggatcatggtcggacttggagaaagtgacgaagaagtgcgtcaagtgatggaagatttacgccgagtagagtgtgatattctcaccataggacaatatcttcaaccctctcaaaaacatttaggggtacaagagtttgttactcctggacaatttgaagcttggcgagaatacggggaaagcatcggttttttacaagtggtgtcttctcctttaacccggagttcctatcatgcagaacaagtcagaaatttaatgcaaaaatatccccgttccctcataaagagttaa

SEQ ID NO: 2952 - protein, 294 aa, Cyanothece sp. PCC 7424
MTVKPEWLRVKAPQWQRVGSVKEILRDLALNTVCEEASCPNIGECFHAGTATFLIMGPACTRACPYCDIDFEKKPLPLDQSEPLRLAEAVQRLKLNHVVITSVNRDDLPDGGASQFVRCIEEVRKISPHTTIEVLIPDLCGNWDALALILQANPEVLNHNTETIPRLYRRVRPQANYERSLELLQRTRHLAPQVYTKSGIMVGLGESDEEVRQVMEDLRRVECDILTIGQYLQPSQKHLGVQEFVTPGQFEAWREYGESIGFLQVVSSPLTRSSYHAEQVRNLMQKYPRSLIKS

SEQ ID NO: 2953 - DNA, 909 bp, Cyanothece sp. PCC 7424
  CDS (1)..(909): transl_table=11
atgacaaactctccctcaacctctcaacaatggcgctctgaaattaccgcccttccctcctggttaaaacgtcctatcggcaaagcaagcgaactatccaccgttcaacgcatcattaaacagcgtaatattcataccatttgtgaagaggggcgctgtcccaaccgaggagaatgttatgctcaaaaaaccgccacatttttattaatggggccaacttgtacccgttcctgtgctttttgtcaagtcgacaaaggtcatgcccctatggctttagatgcagaagaaccccaaaaagtagccgaagccgtccaattattaggactgcgttatgtcgtcttaacttccgtcgccagagatgatctttttgatgggggcgcgagttggtttgtcaaggttatcgatgctattcgtcaaaatacccccgaaacccaaatcgaagttttaactcccgacttttggggcggaaaagggggagaaatcacccaaaaagaaagagtagccaccgtcgttgctgccaaacccgtctgttataaccacaatatagaaaccgtccgacgactacaaggaacagtccgacgaggggcaaaatatgaacggtctttaactgtattgcagtgggtaaaacaatttgatcctaatatcgccactaaatcagggttaatgttaggtcatggggaaaccgaaacagaaattattgaaaccatgaaagatttaagggcggtagaatgcgatcgcattaccctaggtcaatatatgcgaccttccctagaccatcttcccgttcaaaaatattggactcctgatgagtttgaaagattaggagaaattgcccggtctatggggttttctcaagtgcgctcaggccccctagtgcggagttcttatcatgccggagaaccagagtaa

SEQ ID NO: 2954 - protein, 302 aa, Cyanothece sp. PCC 7424
MTNSPSTSQQWRSEITALPSWLKRPIGKASELSTVQRIIKQRNIHTICEEGRCPNRGECYAQKTATFLLMGPTCTRSCAFCQVDKGHAPMALDAEEPQKVAEAVQLLGLRYVVLTSVARDDLFDGGASWFVKVIDAIRQNTPETQIEVLTPDFWGGKGGEITQKERVATVVAAKPVCYNHNIETVRRLQGTVRRGAKYERSLTVLQWVKQFDPNIATKSGLMLGHGETETEIIETMKDLRAVECDRITLGQYMRPSLDHLPVQKYWTPDEFERLGEIARSMGFSQVRSGPLVRSSYHAGEPE

SEQ ID NO: 2955 - DNA, 1266 bp, Pichia stipitis
  CDS (1)..(1197): transl_table=12
atgattgcgctcagggtacacaacacacgcgtcgtatcgaggtccttaaccgtgtggacgcgtccctcacctacgcttactctttccagaagtctagccacagagtcagatgcgctagacaaacccaagacaagaagaagaaagacggtcttcacggatgccctcaattctggcccttcattcgacgacttcgtcagtggtaaagcatccgaaatcatggatcctctagaagcagccagaaaagaccccaatcaacgtcttccactgtggttgaaagttcccatcccaaaagggaaatcgtaccacaacgtgaagaaggatgtccgggagttgaagttggcgacagtttgcgaggaagcgaagtgtcccaacatcggcgagtgctggggtgggaaaaagtccgaagccacagctaccatcatgttgttgggtgacacttgtactcgaggatgtagattctgcctggtgaagactaacagaaatcctgccaagccggaccccatggaaccggaaaatacagctgaggccatcagccgatggggattgggatacgtggtgcttaccactgtcgacagagatgacttagcggacggtggagcacatcatttggcagagactgtcatgaaaatcaagcagaaagctccacaaattcttgttgaagtgttgggtggtgatttccgcggtgatttggacatggccactgtgttggccaagtcaggattggatgtatatgcccataatttggagactgtagaagctttgactccatttgtcagagaccgtagagccacatatagacagtccttgtctgtgttacagagggctaaagagaccaaatcttccttggtgacaaagacgtcgcttatgttaggtttgggcgagactgacgaacagatcttgcaaacattgaaggatttgcgtgagatcaactgtgacgtcgtgacttttggacagtacatgagaccaaccaagagacacatgaaggtggtcgagtacgtaacaccagagaagtttgactactggagggacacagcattggagatgggcttcttgtatgtggccagtggtccgttggtcaggtcttcgtacaaggctggagaagcttttattgagaatgtgatcagaaagagaagacacaatgtaggtgaggctcctcggttggcccaggagatccagcccaagattttcagagaatagtcatgtatttagcacaagggaaagggttgtagataagtatgataactatataatagacgcaactataag

SEQ ID NO: 2956 - protein, 398 aa, Pichia stipitis
MIALRVHNTRVVSRSLTVWTRPSPTLTLSRSLATESDALDKPKTRRRKTVFTDALNSGPSFDDFVSGKASEIMDPLEAARKDPNQRLPLWLKVPIPKGKSYHNVKKDVRELKLATVCEEAKCPNIGECWGGKKSEATATIMLLGDTCTRGCRFCLVKTNRNPAKPDPMEPENTAEAISRWGLGYVVLTTVDRDDLADGGAHHLAETVMKIKQKAPQILVEVLGGDFRGDLDMATVLAKSGLDVYAHNLETVEALTPFVRDRRATYRQSLSVLQRAKETKSSLVTKTSLMLGLGETDEQILQTLKDLREINCDVVTFGQYMRPTKRHMKVVEYVTPEKFDYWRDTALEMGFLYVASGPLVRSSYKAGEAFIENVIRKRRHNVGEAPRLAQEIQPKIFRE

SEQ ID NO: 2957 - DNA, 1155 bp, Magnetospirillum gryphiswaldense
  CDS (1)..(1155): transl_table=11
atggtcgggcgattcatttttagaggcgcgcccgtgacgggcggctgtgtgcggagcactcgtctccgactccaggcgccactcgggctttttaaatcggcctttcgggcaaagggtgggggcacgggggcgcgtatatccccgtgccctttgttctggaagggctatgaaattcttgaccttggccgcaacgtggacgatacccaagccatgactgacaagcccgttctccgccaccccgaaaaggcccgccgtcccgacaatccgtcgcccaagaagccggattggatcagggtcaaggcgcccacctccgccgaagccgccgaagtgcgcaagctgatgcgcgacaagaacctgcacaccgtgtgcgaggaagcggcctgtcccaatatcggtgaatgctggaagcacaagcacgccaccttcatgatcctgggcgacacctgcacgcgcgcttgcgccttttgcaacgtgaagaccggcaagcccggcgcggtggatgtgtccgagccggaaaacctggcggccagcgtcgcctccatgggcttgaagcatgtggtcatcacctcggtcgatcgtgacgatctggccgatggcggcgccttccagttcgtcgcctgcatcgagcgcattcgcgccaccagccccgattgcaccatcgaggtgctgactccggatttccgcgacaaggacggcgccatcgctgccgtcgcccgcgcccggcccgacgtcttcaaccacaatctggagaccgtgccgcgcctgtatccgggcatccgccccggggcgcgctatttccattcgctccggctgttgcagatggtcaaggaaatcgacccgaccatcttcaccaagtcgggcatcatggtgggcttgggcgaaacccgggccgaagtcttgcaggtgatggacgacatgcgctcggccggcatcgatttcatgaccatcggccagtatttgcagccgacgctcaagcatgtggccatcgaccgcttcgtcaccccggacgagttcgacgattatcgcgccaccgccaaggccaagggttttctgatggtggcggcgacgccgctgacccggtcgtcgcaccatgccgaccgcgatttcgatgaattgcgcaaagcccgcgccgccgcccaaagcgcggcggaatag

SEQ ID NO: 2958 - protein, 384 aa, Magnetospirillum gryphiswaldense
MVGRFIFRGAPVTGGCVRSTRLRLQAPLGLFKSAFRAKGGGTGARISPCPLFWKGYEILDLGRNVDDTQAMTDKPVLRHPEKARRPDNPSPKKPDWIRVKAPTSAEAAEVRKLMRDKNLHTVCEEAACPNIGECWKHKHATFMILGDTCTRACAFCNVKTGKPGAVDVSEPENLAASVASMGLKHVVITSVDRDDLADGGAFQFVACIERIRATSPDCTIEVLTPDFRDKDGAIAAVARARPDVFNHNLETVPRLYPGIRPGARYFHSLRLLQMVKEIDPTIFTKSGIMVGLGETRAEVLQVMDDMRSAGIDFMTIGQYLQPTLKHVAIDRFVTPDEFDDYRATAKAKGFLMVAATPLTRSSHHADRDFDELRKARAAAQSAAE

SEQ ID NO: 2959 - DNA, 885 bp, Microcystis aeruginosa PCC 7806
  CDS (1)..(885): transl_table=11
atgtccaatatacccccacagtggcgcgaggaaattacgtctttacccgcttggttacggcgttcactcggcaaatctagcgaaatttccacggttcagcgcattatcaaacaaaggaacattcatactatctgcgaggagggtcgctgtcccaatcgcggcgaatgttatgcccaaggtacggcgacttttttgttgatgggtcccacttgtacccggtcctgtgctttttgtcaagtggataagggtcatgcacccatgcctctcgatgtggaggaaccgcaaaaagtggcggaagcggtgcaattgttaaatttaagttacgttgtcttgacttctgtagccagagatgatatgcaagacggcggagccagttggtttgtgcggacgatgacagccattcgcgaacgcaatccccacactttaattgaggtgttaaccccggattttgctggaggtaagggaagtcaacaggaacgggtggcgacggtggtaggggcaaaacctgcctgttacaatcacaatatcgagacggtgcgccgtttgcaaaagccggttagacgcggggctaaatatgatcgctctttggcagttttgcgttatgttaaggaaatcgatcggtcaattccgacgaaatctggcttaatggtcggtcacggtgagacaaaagaggaaattatcgagactttggcagatttacgcgcgatcgactgcgatcgagttactattggtcaatatatgcgtccttctctggaacatttgctcgtacagaaatattggactccctcagaatttagcgagttaggagaaattgcccaaaaaatggggttttctcaggttaggtctggccccctagtccgcagttcctatcatgcgggagagtaa

SEQ ID NO: 2960 - protein, 294 aa, Microcystis aeruginosa PCC 7806
MSNIPPQWREEITSLPAWLRRSLGKSSEISTVQRIIKQRNIHTICEEGRCPNRGECYAQGTATFLLMGPTCTRSCAFCQVDKGHAPMPLDVEEPQKVAEAVQLLNLSYVVLTSVARDDMQDGGASWFVRTMTAIRERNPHTLIEVLTPDFAGGKGSQQERVATVVGAKPACYNHNIETVRRLQKPVRRGAKYDRSLAVLRYVKEIDRSIPTKSGLMVGHGETKEEIIETLADLRAIDCDRVTIGQYMRPSLEHLLVQKYWTPSEFSELGEIAQKMGFSQVRSGPLVRSSYHAGE

SEQ ID NO: 2961 - DNA, 876 bp, Microcystis aeruginosa PCC 7806
  CDS (1)..(876): transl_table=11
gtgacggtcaaaccagagtggttacgggtaaaagcaccgcaatggcaaagagtcggcagtgttaaggaggttttacgcgatttaggcttaaataccgtttgtgaggaggcttcctgtcccaatatcggcgaatgtttccacgcggggacggctacctttttaattatgggtcctgcttgcactcgtgcctgtccttactgtgacatcgattttgagaaaaaaccgcaacctttagactccacggaaccccagcgactagcggcagccgtgcaacgtctcgatcttaatcatgtggtgatcacttctgtcaatcgcgatgatttggctgatggaggcgctagtcaatttgtccgttgtatcgaggaaattcgccgcatttctccaaaaaccaccatcgaagtgctgattcccgatctttgcggcaattggcaggctttagctttgattcttgccgctaaacctgaagttttaaaccataacaccgaaactgttccccgtctctatcgtcgtgtgcgtccccagggtgattatccgcgttctctagaattattgcagcgcgctcgcgctattgttcccgctacctacacaaaatcgggcattatggtgggattgggggaaaccgacgaggaagtgcggcaagtgatgggcgatttacgggccgtcgattgtgatattctcaccatcgggcagtatctgcaaccatcgtcaaaacatctcggtgtgcaggaatttatcacccccgaacagttcaaagcttggcgcgaatacggtgagtcgctgggatttttacaaattgttgcgagtcccttgacaagaagctcttatcatgctgaacaagtcagagccttgatgaatttgtatccgcgagagtcttga

SEQ ID NO: 2962 - protein, 291 aa, Microcystis aeruginosa PCC 7806
MTVKPEWLRVKAPQWQRVGSVKEVLRDLGLNTVCEEASCPNIGECFHAGTATFLIMGPACTRACPYCDIDFEKKPQPLDSTEPQRLAAAVQRLDLNHVVITSVNRDDLADGGASQFVRCIEEIRRISPKTTIEVLIPDLCGNWQALALILAAKPEVLNHNTETVPRLYRRVRPQGDYPRSLELLQRARAIVPATYTKSGIMVGLGETDEEVRQVMGDLRAVDCDILTIGQYLQPSSKHLGVQEFITPEQFKAWREYGESLGFLQIVASPLTRSSYHAEQVRALMNLYPRES

SEQ ID NO: 2963 - DNA, 1161 bp, Picea sitchensis
  CDS (1)..(1161)
atgtccataaatccggctttcttacgtaggatcacctggggatcgaaatccctccatcaccaattcacccggtgtcaagttcgagccctctcaagctccgtagaacaaacccctgaatcaaccactcctgcgctgtccgccctgcgagagcggctggccaatggcggtccaactttatctgatttcctcacacggaacctcggagaggagccttactctgtggacgttggcaccaagaaaaaccccctccccaagcccaagtggatgaaagccgcggttccaggaggggacaagtatacggccatcaaagccaaattacgggaaatgaatttacacacggtctgcgaggaggcgaagtgtcccaatttaggagagtgctggtcgggcggagaaacggggactgccactgccactattatgatacttggagatacatgcacccgaggttgcagattttgtgcagtgaaaacatcgcgcaccccgcctccacctgatcctaatgagcctactaatgtggcagaggcaattgtctcatgggggcttgattacgtggtcttgacaagtgtcgatagagacgacttgcctgaccaaggaagtggtcattttgccaagactgtacagaaattgaagcagttgaaacctaaaatgcttgtagaggctcttgtgccagatttccaagggaattcggaatgtgtgcaaaaagttgcaacttcagggttggacgtttttgcccacaacattgagactgtagaagagcttcaacgcgtagttcgagaccatcgagccaatttcaatcaatcacttgaagtgttgaaaatggcaaaaacttattctccgcttggtgttttaacaaaaacatcagtgatgttaggctgtggggaaaccccagctcaagtgattgagacaatggagaaggtcagagaagcaggtgttgacgtaataacatttggtcaatacatgcgccccacaaagagacatatggccgtctctgagtatgtaacaccagaggcctttgaaaagtaccaaaagttgggtatggaaatgggcttccgatatgtagcatctgggccaatggtaaggtcgtcatataaggcaggggagttttatataaagtctatgattgaagatgataggaagaaggcatcctcatcttctatatag

SEQ ID NO: 2964 - protein, 386 aa, Picea sitchensis
MSINPAFLRRITWGSKSLHHQFTRCQVRALSSSVEQTPESTTPALSALRERLANGGPTLSDFLTRNLGEEPYSVDVGTKKNPLPKPKWMKAAVPGGDKYTAIKAKLREMNLHTVCEEAKCPNLGECWSGGETGTATATIMILGDTCTRGCRFCAVKTSRTPPPPDPNEPTNVAEAIVSWGLDYVVLTSVDRDDLPDQGSGHFAKTVQKLKQLKPKMLVEALVPDFQGNSECVQKVATSGLDVFAHNIETVEELQRVVRDHRANFNQSLEVLKMAKTYSPLGVLTKTSVMLGCGETPAQVIETMEKVREAGVDVITFGQYMRPTKRHMAVSEYVTPEAFEKYQKLGMEMGFRYVASGPMVRSSYKAGEFYIKSMIEDDRKKASSSSI

SEQ ID NO: 2965 - DNA, 1149 bp, Oryza sativa
  CDS (1)..(1149)
atgcacggccgccgccacctcgccgcctccctggcccgcgccctgacctacgccccctcccgctccatctcctccaccccgtcgctcctccaaaacctcgaaccgtccacgccctcccccgaggacgacccgaccaccgcggggcggatcgcggagctccggaagcggctgcaggcggacgcgccgtcgctgggggacttcacgtactcggtggaggtggggacgcggaagaagccgctgcccaagcccaagtggatgaaggagacgataccaggcggcgccaagtacgcggggatcaaggccaagctgcgggagctgaagctgcacaccgtctgcgaggaggcgcgctgccccaacctcggcgagtgctggtccggcggcgagaccggcaccgccaccgccaccatcatgatcctcggggacacctgcacgcgcggctgcaggttttgtaatgtcaagacctcgcgaactcctccgccaccagatcctgatgaaccttctaatgttgctcaagctattgcctcgtggggcctggagtatattgtcatcacaagtgttgaccgcgatgatttacctgatcaagggagtggtcactttgctgaaacagttcaaaagctaaaggtgttgaagccagaaatgcttattgaagcacttgttcctgatttccgtggagacccagcatgtgtagagaaggttgctacttctgggttgcatgttttcgcccacaacattgaaacagttgaagagctgcaaagaaatgtgagagatcatcgtgcgaacttcaagcaatcaatagatgtcctgaaattggcaaaagagtatgctccagctggtaccctcacaaagacatcaatcatgctgggttgtggagaaacgcctgatcaggttatcagcacgatggaaaaggttagggctgctggtgttgatgtaatgacatttggtcagtacatgagaccatctaaacgtcatatgcctgtttccgagtatgttactcccgaagcctttgagaggtatcgatcccttggtgttgacatgggcttccgttatgtggcttcgggcccaatggttcgatcttcctacaaagctggtgagttctacataaaagccatgattgaagctgacagagcaaaagctacgactgcaatatag

SEQ ID NO: 2966 - protein, 382 aa, Oryza sativa
MHGRRHLAASLARALTYAPSRSISSTPSLLQNLEPSTPSPEDDPTTAGRIAELRKRLQADAPSLGDFTYSVEVGTRKKPLPKPKWMKETIPGGAKYAGIKAKLRELKLHTVCEEARCPNLGECWSGGETGTATATIMILGDTCTRGCRFCNVKTSRTPPPPDPDEPSNVAQAIASWGLEYIVITSVDRDDLPDQGSGHFAETVQKLKVLKPEMLIEALVPDFRGDPACVEKVATSGLHVFAHNIETVEELQRNVRDHRANFKQSIDVLKLAKEYAPAGTLTKTSIMLGCGETPDQVISTMEKVRAAGVDVMTFGQYMRPSKRHMPVSEYVTPEAFERYRSLGVDMGFRYVASGPMVRSSYKAGEFYIKAMIEADRAKATTAI

SEQ ID NO: 2967 - DNA, 885 bp, Candidatus Kuenenia stuttgartiensis
  CDS (1)..(885): transl_table=11
atgagacctccttggataagggcaaaattcccgtcaggtaaaggtttcacggaaataagggagatactgcaggaatatcggttgcagaccgtgtgcgatgcggctttgtgccccaatatcggcgaatgctacaatcaaaaaacggcaacgtttctaatactgggcggtgtatgtaccagaaaatgcgggtattgtgccgttacaaaaggaaccgctgcgacactggatgaagaagaaccatatcgggtcgctacggctgtcaggaaaatgggattaaaatatgtcgttatcacatcagtaaccagggatgatatcacagacggcggtgcgggcatctttgcacaaacgattcaatgtgttcgtgattttgttaatgattgcaaggtggaagtattgattcctgattttgggggttccgttgatgcgttatggacggtattggatgcaaggcctgatgttttaaatcataatatagaaactgttcgccgtttgtatccaatagtaagatctggggctgattatgaaagatcactgcaattattgcgtattgcaagtgaagagaggctgcttatgccaacaaaatcagggatcatgctgggattgggagaacaatgggatgagataacagaggttctacacgatattaaaaataccggttgtgaaataataacgttgggacagtatcttcgtccaaataaaaacgccttacctgctaaacggtattatacacctatggagtttgaaagattacaacgggaaggagaaaaaatgggtttccgttgtgttgagtccggccccttggtaagaagctcttaccatgcaaaggcacaatcagagagtattttagaaaaaaaaccagaaattatacaaaaaacccataattaa

SEQ ID NO: 2968 - protein, 294 aa, Candidatus Kuenenia stuttgartiensis
MRPPWIRAKFPSGKGFTEIREILQEYRLQTVCDAALCPNIGECYNQKTATFLILGGVCTRKCGYCAVTKGTAATLDEEEPYRVATAVRKMGLKYVVITSVTRDDITDGGAGIFAQTIQCVRDFVNDCKVEVLIPDFGGSVDALWTVLDARPDVLNHNIETVRRLYPIVRSGADYERSLQLLRIASEERLLMPTKSGIMLGLGEQWDEITEVLHDIKNTGCEIITLGQYLRPNKNALPAKRYYTPMEFERLQREGEKMGFRCVESGPLVRSSYHAKAQSESILEKKPEIIQKTHN

SEQ ID NO: 2969 - DNA, 1131 bp, Pisum sativum
  CDS (1)..(1131)
atgatgtattcgcggtttagaaccgtcgccggaaatctcaattgcgccgcgaaacgtctctcttcatcttccaccaccaccacaaccacctcagctccgtctgaattacagcagaacctagcagcgctccgggctcggctggcgatggagtcgccatctctgtcggacttcatttccttgaaatcggacaacgcctactctgttgaggttgggacaaagaagaaacctcttccgaaaccgaaatggatgaaggaatcaattcccggtggtgagaagtatgtgcagattaaaaaaaagctccgtgagttgaagcttcacacggtttgtgaagaggcaaagtgccctaatttgggagagtgttggtcaggtggtgaaactggcactgccacagctactatcatgattctcggagatacttgtactcgaggttgcagattttgcaatgttaagacatcaagaactcctccaccgcctgaccctgatgagcccaccaatgtggctgaggcaattgcatcatggggtttggattatgtggttataacaagtgttgaccgtgatgatttacctgatcaagggagtggtcattttactgaaacagtgcagaagctgaaggcactgaaacctagcacgctgatagaagccttagttcccgattttcgaggaaatgctgaatgtgtagagaaggtttccaaatcaggactagatgtctttgcacataatattgagacagttgaagagcttcagagtgctgtgagggatcaccgggctaattttaagcagtctttggatgttctgatgatggcgaaggagtatgcccctgcggggacactcaccaagacttcaataatgttgggttgtggggaaacacctgaccagattgtgaagacaatggagaaggtgagagcagctggtgttgatgtgatgacatttggtcagtatatgagaccctcaaagcgccatatgcctgtatcagaatatattacccctgaggcctttgagaagtatcagactcttggcatggaaatgggatttcgctatgtggcatctggacccatggtaaggtcatcatacaaggcaggtgaattctatattaaatccatgattgactcagatcgggctgcatcttcctaa

SEQ ID NO: 2970 - protein, 376 aa, Pisum sativum
MMYSRFRTVAGNLNCAAKRLSSSSTTTTTTSAPSELQQNLAALRARLAMESPSLSDFISLKSDNAYSVEVGTKKKPLPKPKWMKESIPGGEKYVQIKKKLRELKLHTVCEEAKCPNLGECWSGGETGTATATIMILGDTCTRGCRFCNVKTSRTPPPPDPDEPTNVAEAIASWGLDYVVITSVDRDDLPDQGSGHFTETVQKLKALKPSTLIEALVPDFRGNAECVEKVSKSGLDVFAHNIETVEELQSAVRDHRANFKQSLDVLMMAKEYAPAGTLTKTSIMLGCGETPDQIVKTMEKVRAAGVDVMTFGQYMRPSKRHMPVSEYITPEAFEKYQTLGMEMGFRYVASGPMVRSSYKAGEFYIKSMIDSDRAASS

SEQ ID NO: 2971 - DNA, 1131 bp, Pisum sativum
  CDS (1)..(1131)
atgatgtattcgcggtttagaaccgtcgccggaaatctcaattgcgccgcgaaacgtctctcttcatcttccaccaccaccacaaccacctcagctccgtctgaattacagcagaacctagcagcgctccgggctcggctggcgatggagtcgccatctctgtcggacttcatttccttgaaatcggacaacgcctactctgttgaggttgggacaaagaagaaacctcttccgaaaccgaaatggatgaaggaatcaattcccggtggtgagaagtatgtgcagattaaaaaaaagctccgtgagttgaagcttcacacggtttgtgaagaggcaaagtgccctaatttgggagagtgttggtcaggtggtgaaactggcactgccacagctactatcatgattctcggagatacttgtactcgaggttgcagattttgcaatgttaagacatcaaggactcctccaccgcctgaccctgatgagcccaccaatgtggctgaggcaattgcatcgtggggtttggattatgtggttataacaagtgttgaccgtgatgatttacctgatcaagggagtggtcattttactgaaacagtgcagaagctgaaggcactgaaacctagcatgctgatagaagccttagttcccgattttcgaggaaatgctgaatgtgtagagaaggtttccaaatcaggactagatgtctttgcacataatattgagacagttgaagagcttcagagtgctgtgagggatcaccgggctaattttaagcagtctttggatgttctgatgatggcgaaggagtatgcccctgcggggacactcaccaagacttcaataatgttgggttgtggggaaacacctgaccagattgtgaagacaatggagaaggtgagagcagctggtgttgatgtgatgacatttggtcagcatatgagaccctcaaagcgccatatgcctgtatcagaatatattacccctgaggcctttgagaagtatcagactcttggcatggaaatgggatttcgctatgtggcatctggacccatggtaaggtcatcatacaaggcaggtgaattctatattaaatccatgattgactcagatcgggctgcatcttcctaa

SEQ ID NO: 2972 - protein, 376 aa, Pisum sativum
MMYSRFRTVAGNLNCAAKRLSSSSTTTTTTSAPSELQQNLAALRARLAMESPSLSDFISLKSDNAYSVEVGTKKKPLPKPKWMKESIPGGEKYVQIKKKLRELKLHTVCEEAKCPNLGECWSGGETGTATATIMILGDTCTRGCRFCNVKTSRTPPPPDPDEPTNVAEAIASWGLDYVVITSVDRDDLPDQGSGHFTETVQKLKALKPSMLIEALVPDFRGNAECVEKVSKSGLDVFAHNIETVEELQSAVRDHRANFKQSLDVLMMAKEYAPAGTLTKTSIMLGCGETPDQIVKTMEKVRAAGVDVMTFGQHMRPSKRHMPVSEYITPEAFEKYQTLGMEMGFRYVASGPMVRSSYKAGEFYIKSMIDSDRAASS

SEQ ID NO: 2973 - DNA, 1182 bp, Arabidopsis thaliana
  CDS (1)..(1182)
atgcatcattgctcaattacgaaacccactttctcaatttcgatctcgacccagaagcttcatcatcattccagtaaattcttgaatttgggtttcagaatccgatgcgaatccggggatgtttcgtcgccattgcggaccaaggcggtgtctttgtcgtcggagatggaggattcgtcgtccttgaagaagagtttgatggagttagaagggaagaagagtgagccttacccaggaggaatgccgaagatgggtccattcacagggagagatccgaatgtgaagaaacctgcttggttgagacagaaggcaccacaaggcgaaaggtttcaggaggtgaaagagtccctttctcgtctcaatctcaatactgtttgtgaagaagctcagtgtcctaatatcggcgagtgttggaatggaggtggtgatggtgtagcaactgcaaccatcatggttcttggtgatacttgtactcgtggctgtagattctgtgctgttaaaacaagtagaaatcctcctcctcctgacccaatggaaccagagaacactgccaaggccatagccagttggggtgtagactacatagttattaccagcgtagaccgtgacgatatacctgatggtggaagtggacattttgcgcagactgtcaaagctatgaagagacataagccggatataatgatagaatgcttaacttctgattttcgtggggatttggaggctgtcgacactcttgtgcactcgggattggatgtttttgctcacaatgtcgagactgtgaaaaggctccagcgacttgtgagggatcctagggctggatatgagcagagcatgtcagttttgaaacatgcaaagatcagcaaacctggaatgatcacaaagacatccataatgcttggtcttggagaaacagacgaagagttgaaggaagcaatggctgatctaagagctatagatgttgatattctaacacttggccagtatctacagccaactccattgcatctgactgtgaaagagtatgtcacacctgagaagtttgatttctggaaaacatacggagaatcaataggatttcgttatgttgcaagtggtccactggtaagatcttcatatagagcaggagagctttttgttaagacaatggtgaaagaaagctactctaaatccttgtcttaa

SEQ ID NO: 2974 - protein, 393 aa, Arabidopsis thaliana
MHHCSITKPTFSISISTQKLHHHSSKFLNLGFRIRCESGDVSSPLRTKAVSLSSEMEDSSSLKKSLMELEGKKSEPYPGGMPKMGPFTGRDPNVKKPAWLRQKAPQGERFQEVKESLSRLNLNTVCEEAQCPNIGECWNGGGDGVATATIMVLGDTCTRGCRFCAVKTSRNPPPPDPMEPENTAKAIASWGVDYIVITSVDRDDIPDGGSGHFAQTVKAMKRHKPDIMIECLTSDFRGDLEAVDTLVHSGLDVFAHNVETVKRLQRLVRDPRAGYEQSMSVLKHAKISKPGMITKTSIMLGLGETDEELKEAMADLRAIDVDILTLGQYLQPTPLHLTVKEYVTPEKFDFWKTYGESIGFRYVASGPLVRSSYRAGELFVKTMVKESYSKSLS

SEQ ID NO: 2975 - DNA, 1128 bp, Bruguiera gymnorhiza
  CDS (1)..(1128)
atgcagtcccgtgtgccctccttgttggctcgcaccctccggtcccgatgcttctccgccaccgtggagcctaccaagagcgatgccaccgctgcatccctggcggctctccgggcccgattggctgacgaatcgccgtctctaggcgacttcatgaacctccagtccggttactccgtggaagtcggcaacaagaagaagcccatgcctaagcctaagtggatgagggaggctattcccggaggggacaagtacgtgcacatcaagaagaagctcagggaattgaagctccacaccgtctgtgaggaggccaagtgccctaatttgggcgagtgctggtctggcggcgagaccggtaccgcgaccgccaccattatgattcttggcgatacctgtacccgtggttgcaggttctgtaacgtgaagacatcgcgcactcctcctccgccggacccgaacgagccagccaacgttgctgaagcaattgcttcgtggggtttggattatgtggtgcttactagcgtcgatcgtgacgatttggccgatcaaggaagcaaccacttccgggagactgtgcagagattgaaggcactgaagccaaacatgttgattgaagctctgactcctgattttcaaggagacaaatcctgcgtggagaaggttgctacggcaggattagatgtgtttgcccacaacattgagacagtagaagaactccagagcgtggtgcgcgataatcgtgctaacttcaagcaatctttggaggttttgatggcagctagggaattttctcctcctgggacactcaccaagacttccatcatgttgggctgtggagagacacccgaccaggttgtgaaatcaatggagaaggtgagggcagctggtgttgatgtcattacctttggtcagtacatgagaccctcaaaacgccacatgcccgtgtctgaatacatcacccctgaggccttcgagaagtataaagttcttggcgatgaaatgggattccgttatgtagcatctggtcccatggtaaggtcatcatacaaagctggggagttctacatcaagaacatgatagaacgtgatagggctgcagccgcccaacagaaactctctgttgcttga

SEQ ID NO: 2976 - protein, 375 aa, Bruguiera gymnorhiza
MQSRVPSLLARTLRSRCFSATVEPTKSDATAASLAALRARLADESPSLGDFMNLQSGYSVEVGNKKKPMPKPKWMREAIPGGDKYVHIKKKLRELKLHTVCEEAKCPNLGECWSGGETGTATATIMILGDTCTRGCRFCNVKTSRTPPPPDPNEPANVAEAIASWGLDYVVLTSVDRDDLADQGSNHFRETVQRLKALKPNMLIEALTPDFQGDKSCVEKVATAGLDVFAHNIETVEELQSVVRDNRANFKQSLEVLMAAREFSPPGTLTKTSIMLGCGETPDQVVKSMEKVRAAGVDVITFGQYMRPSKRHMPVSEYITPEAFEKYKVLGDEMGFRYVASGPMVRSSYKAGEFYIKNMIERDRAAAAQQKLSVA

SEQ ID NO: 2977 - DNA, 876 bp, Anabaena sp
  CDS (1)..(876): transl_table=11
gtgactgtaaaaccagactggttgcgggtaaaagcgcctcaatgggagcgcgttggtaacgttaaagaaattttgcgggatttagcgctaaatacagtttgtgaggaagcgtcatgtccaaacattggtgaatgcttccaagctggtacagccacatttttgattatggggccagcctgcacccgtgcttgtccttattgtgatattgattttgagaaaaaacccaaagcgctcgaccccacagaacccacacgattagccgaagctgtgcggcggatgagactgaatcatgtggtcatcacttctgtgaaccgagatgatttaccagatggtggtgcatcacagtttgtcaagtgtattgcagaggtgcgcgcggtttcgcctcaaaccacaattgaggtgctaatccctgatttgtgcggtaattgggaggcgttaaggatcattctccaagcatcaccagaggtattaaaccataacacagaaacgattcctcgcctttatcgacgagtccgaccccaaggtaactacgatcgcaccctagaattattgcagcgatcgcgtcaaattgctccctggctttacaccaaatccggtatcatggtcggcttaggcgaaactaatgccgaagttcgccaagtgatgcaagacctacgtgctgtggattgcgatatcctaacaatcgggcagtatctccaacccagtcaaaagcacttgcaagtcaacgatttcgttactccagagcaatttgctgcttggcaagtttatggtgaagaactcggatttttacaagttgtctcctcacctttgacgagaagttcttaccacgccgaacaagtacgacaattaatggagcgttacccacggaacaagtag

SEQ ID NO: 2978 - protein, 291 aa, Anabaena sp
MTVKPDWLRVKAPQWERVGNVKEILRDLALNTVCEEASCPNIGECFQAGTATFLIMGPACTRACPYCDIDFEKKPKALDPTEPTRLAEAVRRMRLNHVVITSVNRDDLPDGGASQFVKCIAEVRAVSPQTTIEVLIPDLCGNWEALRIILQASPEVLNHNTETIPRLYRRVRPQGNYDRTLELLQRSRQIAPWLYTKSGIMVGLGETNAEVRQVMQDLRAVDCDILTIGQYLQPSQKHLQVNDFVTPEQFAAWQVYGEELGFLQVVSSPLTRSSYHAEQVRQLMERYPRNK

SEQ ID NO: 2979 - DNA, 957 bp, Bradyrhizobium japonicum
  CDS (1)..(957): transl_table=11
atggtcgttattgtcgataccatctcgaacccgctgcgcccgcgccaccccgaaaaggtgaatcgccccgattccgcttcaccgccgaagccggactggatccgcgtgcgcgcgcccaacacccgcggctatgccgacacccgcaacatcgtgagggcgaacggcctgcacacggtgtgcgaggaggcgggctgcccgaatatcggcgagtgctgggacaagaagcacgcgaccttcatgatcatgggtgacacgtgcacccgtgcctgcgccttctgcaacgtcaagaccggcctgcccaacgcgctggatgcggacgagccgcagaacgtcgccgaggccgtggccaagctgggcctcgcccacgtcgtcatcacctcggtcgaccgcgacgacctcgccgatggcggcgccgagcatttcgcccagaccatccgcgccatccgcgccgcatgcccctcgaccacgatcgagatcctgacgcctgacttcctgcgcaaggaaggcgcgctggaggtcgtcgtcgcggcgaggcccgacgtcttcaaccacaatctcgagaccgtgccgtcgcgctatctcacggtacggccaggcgcgcgctacttccattcgatccggctgttgcagcgggtcaaggagctcgatgcgtccatcttcaccaagtccggcatcatggtgggcctgggtgaagagcgccacgaggtgcagcaggtgatggacgatctgcgctcggccgatgtcgacttcctgaccatcgggcaatatctccagccgacccgtaagcatcacgcggtgatgcgctacgtgccgccggacgagttttcgtcctatgaaaaggtcgcctacaccaagggcttcctgatggtgtcggcgagcccgctcacccgctcgtcgcatcatgccggcgaggatttcgcgagactgaaggctgcgcgggcagctcacgcccgctga

SEQ ID NO: 2980 - protein, 318 aa, Bradyrhizobium japonicum
MVVIVDTISNPLRPRHPEKVNRPDSASPPKPDWIRVRAPNTRGYADTRNIVRANGLHTVCEEAGCPNIGECWDKKHATFMIMGDTCTRACAFCNVKTGLPNALDADEPQNVAEAVAKLGLAHVVITSVDRDDLADGGAEHFAQTIRAIRAACPSTTIEILTPDFLRKEGALEVVVAARPDVFNHNLETVPSRYLTVRPGARYFHSIRLLQRVKELDASIFTKSGIMVGLGEERHEVQQVMDDLRSADVDFLTIGQYLQPTRKHHAVMRYVPPDEFSSYEKVAYTKGFLMVSASPLTRSSHHAGEDFARLKAARAAHAR

SEQ ID NO: 2981 - DNA, 897 bp, Gloeobacter violaceus
  CDS (1)..(897): transl_table=11
atggtcaccaagccggactggctcagggtcaaagcgccgcagcgcgagcgggtgggagcagttaaagacatcctgcgcgacctggcgctcaacaccgtctgtgaggaagcttcttgcccaaatatcggcgaatgtttcaaagccgggacggcaacgtttctgatcatgggaccggcctgcacgcgggcttgcccttactgcgacatcgattttgagaaatatcccaaggccctcgatccgaccgaacccgagcggctcgcacaggccgtgcggcggatgggcctgcgccatgtggtgattacctcggtcaaccgcgacgatctggccgacggcggcgctctgcagtttgcccgctgcatcgaagcggtgcgccgggtcatgccccaaacgaccatcgaagtgttgatccccgatttttgcggctccgaagcggccctcgatatcgtgattgccgcccatccacaagtaatcaatcacaataccgagaccgtccctcggctctaccggcgggtcagaccccagggcgactacggacgcactttgcaattgctcgagcgcgttcgcgccaaagcatcccacatctacaccaagtcgggcctgatggcgggccttggcgagagcgaagcggaagtgctcgcggtcatggcagatctgcgggccgtctactgcgacatcctgaccatcggccagtacctgcagcccacccccaaacacctcaaagtcgaagcctttgtcgaaccggcgctttttgagcgctggcggcgggcgggcgaagggatgggcttcttgcagatggtctcctcgcccctgacgcgcagttcctaccacgccgagcaggtgcagcgactgatgcgctcccacccccggacccccaaaaatcagcactcgccggagtaa

SEQ ID NO: 2982 - protein, 298 aa, Gloeobacter violaceus
MVTKPDWLRVKAPQRERVGAVKDILRDLALNTVCEEASCPNIGECFKAGTATFLIMGPACTRACPYCDIDFEKYPKALDPTEPERLAQAVRRMGLRHVVITSVNRDDLADGGALQFARCIEAVRRVMPQTTIEVLIPDFCGSEAALDIVIAAHPQVINHNTETVPRLYRRVRPQGDYGRTLQLLERVRAKASHIYTKSGLMAGLGESEAEVLAVMADLRAVYCDILTIGQYLQPTPKHLKVEAFVEPALFERWRRAGEGMGFLQMVSSPLTRSSYHAEQVQRLMRSHPRTPKNQHSPE

SEQ ID NO: 2983 - DNA, 885 bp, Prochlorococcus marinus
  CDS (1)..(885): transl_table=11
gtggcaagtatgaatacgcataagcctgattggctaagagtgaaagctcctcagcatgaacggattggttatgtagctgatttattatcagatttaaatttaaatactgtttgtcaagaagctagttgcccaaatattggtgagtgttttgcaggtggcacagctacgtttttgataatgggaccaggttgtactagagcatgtccttattgtgatattgattttgataaaagtgttcgaagtttggatccttctgaacctgaaagacttggcgaagcagttaaaagactgggcttaaaacatgtagtaattacttctgtaaatagggacgatttagaagacggaggagccagtcaatttgttagttgcattgatgcagttcgagctagttctgtagaaaccacaattgaattactcattcccgatttttgtggaaattgggatgcttttaaaaaggttatgaatgcttccccaaatgttttaaatcacaatattgaaactgtccctagattatataaacgagcaagaccccaaggtttatataagcgttcattagaactgttaagacgtgttagacaagaatctccaaatgtatattccaaatcaggtttgatggttggacttggtgagacagatgatgaggtcttgcaagtgctttcagatcttcatgataataatgtagatatagttacgataggtcaatatctttctccagggacaaagcatttgccagtagatagatttgtgactcctgaccagtttcaaaaatacaaggaggaaggacaaacccgatttggttttctacaggtagttagttctccattaactcgtagtagttatcacgctggcgaagttaagagacttatgcaaatttatccacgttga

SEQ ID NO: 2984 - protein, 294 aa, Prochlorococcus marinus
MASMNTHKPDWLRVKAPQHERIGYVADLLSDLNLNTVCQEASCPNIGECFAGGTATFLIMGPGCTRACPYCDIDFDKSVRSLDPSEPERLGEAVKRLGLKHVVITSVNRDDLEDGGASQFVSCIDAVRASSVETTIELLIPDFCGNWDAFKKVMNASPNVLNHNIETVPRLYKRARPQGLYKRSLELLRRVRQESPNVYSKSGLMVGLGETDDEVLQVLSDLHDNNVDIVTIGQYLSPGTKHLPVDRFVTPDQFQKYKEEGQTRFGFLQVVSSPLTRSSYHAGEVKRLMQIYPR

SEQ ID NO: 2985 - DNA, 885 bp, Prochlorococcus marinus
  CDS (1)..(885): transl_table=11
atgactggaaaagccttactgaaaccccactggttgcgcgtcaaggctccacaacagcaacgcatcggcgaggtagccgagctgctgaagggcctcaatctcaagacggtgtgtcaagaagccagctgcccgaatatcggggagtgcttcgcaggaggaactgccaccttcttgatcatggggccgggctgcacccgcgcttgcccttactgcgacatcgactttgacaaaagcccacgctccctagaccccactgagccagagcgcctaagcgaagcggtggctcagatgaaccttcgtcatgttgtcatcacttcagttaaccgtgatgacctcagcgacgggggagccagtcaattcgtcgcatgcatcgaggccattcgccaacgttctcccctaaccacaattgagctgctaattcctgatttcaacggcaattgggatgccctcgccaaggtaatgggagcagctccggaggtgctcaaccacaacattgagaccgtcccccggctctacaaacgggctcgtccacaagctgactacatgcgatctcttgagctgttgtatcaagtgcggcaaggctggccgaaggtctatagcaagtccggcctgatggtggggctaggtgaaacagatgctgaggtaattgaggtcctagaggatctacgccgtcaccgagtcgacatagtgaccatcggccaatacctatcgccaagcccaaaacatcttccagtcgatcgctttgtgacaccagaacagttcgaatatttccgctctatgggggaaactgagctggggttcctgcaagtggttagtacccctctcacacgcagcagctaccacgccggcgaggtccagcggctgatggccgcccacccacgctga

SEQ ID NO: 2986 - protein, 294 aa, Prochlorococcus marinus
MTGKALLKPHWLRVKAPQQQRIGEVAELLKGLNLKTVCQEASCPNIGECFAGGTATFLIMGPGCTRACPYCDIDFDKSPRSLDPTEPERLSEAVAQMNLRHVVITSVNRDDLSDGGASQFVACIEAIRQRSPLTTIELLIPDFNGNWDALAKVMGAAPEVLNHNIETVPRLYKRARPQADYMRSLELLYQVRQGWPKVYSKSGLMVGLGETDAEVIEVLEDLRRHRVDIVTIGQYLSPSPKHLPVDRFVTPEQFEYFRSMGETELGFLQVVSTPLTRSSYHAGEVQRLMAAHPR

SEQ ID NO: 2987 - DNA, 894 bp, Prochlorococcus marinus subsp
  CDS (1)..(894): transl_table=11
ttgactaatatttccaaaaatgcagttacgaagcctgactggttaagagtaaaagcacctcaagttgagagaatagggaatactgcaaatttattgagtgatttaaaattaaatactgtatgccaagaagcaagctgtcctaatattggcgaatgttttgctagcgggactgcaacttttttaattatgggaccaggttgtactagagcatgtccatattgtgatattgattttgatagatccaagagagatttagacccaacagaaccagatcgtttagcagaggctgtttttagattaaaacttaaacatgttgtgattacctcagttaatagagatgatctagatgatggtggagcttctcagttttataaatgtgtttctgaagttagaaaaaaatctcctgaaacaactattgaattattaattccagatttatgtggtaactggtcagcacttgaaaagattttagattctagaccaaatgttttaaatcataatattgaaactgtctcagctttgtataggaaagtaaggccacaaggaaactatcaaagaactttagagttactaaaaagaacaagagaatatttcccaagtgtttatactaaatctggattcatgttgggattaggagaaaaggatgatgaagttcttactcttctaatggatttaagaaaaaatgatgtagatatagttactattggtcaatatttatctccaggcccaaaacatcttcaggtccaaagatttgttaccccttcaaaatttaattattttaaattatttggagaaaatgaattagggtttatgcaagttgtcagttctcctttaactcgtagtagttatcatgctgaagagattcagaaactcatgaaaaagtttccaagataa

SEQ ID NO: 2988 - protein, 297 aa, Prochlorococcus marinus subsp
MTNISKNAVTKPDWLRVKAPQVERIGNTANLLSDLKLNTVCQEASCPNIGECFASGTATFLIMGPGCTRACPYCDIDFDRSKRDLDPTEPDRLAEAVFRLKLKHVVITSVNRDDLDDGGASQFYKCVSEVRKKSPETTIELLIPDLCGNWSALEKILDSRPNVLNHNIETVSALYRKVRPQGNYQRTLELLKRTREYFPSVYTKSGFMLGLGEKDDEVLTLLMDLRKNDVDIVTIGQYLSPGPKHLQVQRFVTPSKFNYFKLFGENELGFMQVVSSPLTRSSYHAEEIQKLMKKFPR

SEQ ID NO: 2989 - DNA, 870 bp, Synechocystis sp
  CDS (1)..(870): transl_table=11
gtgaccgtcaaaccggattggctccgagtcaaagcgccccaatggcagagggtgggcagtgttaaggatattctgcgagatttacaattaaataccgtctgtgaagaagcttcctgtcccaatattggcgagtgttttcaggccgggacggctacttttttgattatgggtcctgcttgcaccagggcttgcccctattgtgatattgattttgagaaaaagcctcaacccttagactccacagagccggaaagattggcgatcgccgtgaaaaggctcaatcttaagcatgtggtgattaccgcagtcaaccgggatgatttacccgatggaggagcctcccagtttgttagttgcatagaggctatccgcaaaatttctccaggcaccaccattgaggttttgattccagatttgtgcggcaattggcaagccttagcggcgctgttggaagctgccccagaggttttgaatcacaatatggaaacagtgcccaggctttataaacgggtgcggccccaggcggattatgatcaatccctagaattattcaaccaggcgaaacggattctgcccaaggtttacactaagtccggcattatggtggggctgggggaaacagatgcggaagtaagacaggtgatggaagatctacgccgggtggattgcgatattttgactattggccagtatctacaacctagccaaaaacatttgggagtcaaggaatttgtcaccccggaacagttcgacgtttggcgaatttatggtgaatccattggctttttacaagtggtatcctcccctttaacccgcagttcctaccatgcggaacaggtgcaggctttgatgacccgtttcccccgttaa

SEQ ID NO: 2990 - protein, 289 aa, Synechocystis sp
MTVKPDWLRVKAPQWQRVGSVKDILRDLQLNTVCEEASCPNIGECFQAGTATFLIMGPACTRACPYCDIDFEKKPQPLDSTEPERLAIAVKRLNLKHVVITAVNRDDLPDGGASQFVSCIEAIRKISPGTTIEVLIPDLCGNWQALAALLEAAPEVLNHNMETVPRLYKRVRPQADYDQSLELFNQAKRILPKVYTKSGIMVGLGETDAEVRQVMEDLRRVDCDILTIGQYLQPSQKHLGVKEFVTPEQFDVWRIYGESIGFLQVVSSPLTRSSYHAEQVQALMTRFPR

SEQ ID NO: 2991 - DNA, 903 bp, Anabaena sp
  CDS (1)..(903): transl_table=11
atgactgcctcacaatctgctcagtttaagtcggaaattacggcaatgcccagttggttgcgccgtcccattggcaaagctagcgaactgtcaacagtacagcgcattattaagcagcgtcaaattcatacaatttgtgaagaaggtcgctgcccgaatcggggtgagtgctatgcccaaaaaacggctacattcttacttatggggcctacctgcacccgtgtctgtgctttttgtcaagtcgataaaggtcatgcaccgatgccacttgacccagaggaagggcaaaaggtggcagaagcggtacaacttttgggactgcgttatgtagtacttacgtctgtagctcgtgatgatttacaagaccagggagcaagccactttgtccaaactatggaggcaatccgtcaattaaatccaggtactcaaattgaagttttgacaccggatttttggggtggtgcaggtgcgggggaatccggacaacgccagcgcataaaaatgattgtagaggcacaaccggcttgttttaaccataacattgagacagtgcgccgcttaaccgggccagtacgccggggtgcgaaatacgatcgctctttgcgagttctttctctggtcaaagaactcaacccccgtattcccaccaaatcaggcttaatggtgggatatggcgagacggttgctgaactagttgaagcaatgacagacttaaggaacataggatgcgatcgcctaactattggtcagtatatgcgcccatccctagaacatctaccagtccaaaaatattggacaccagaagaatttgagcatctaggcaaactagccagagaaatgggctttagccatgtccgttcggctccactagttcgcagttcctatcatgctggagaggagtga

SEQ ID NO: 2992 - protein, 300 aa, Anabaena sp
MTASQSAQFKSEITAMPSWLRRPIGKASELSTVQRIIKQRQIHTICEEGRCPNRGECYAQKTATFLLMGPTCTRVCAFCQVDKGHAPMPLDPEEGQKVAEAVQLLGLRYVVLTSVARDDLQDQGASHFVQTMEAIRQLNPGTQIEVLTPDFWGGAGAGESGQRQRIKMIVEAQPACFNHNIETVRRLTGPVRRGAKYDRSLRVLSLVKELNPRIPTKSGLMVGYGETVAELVEAMTDLRNIGCDRLTIGQYMRPSLEHLPVQKYWTPEEFEHLGKLAREMGFSHVRSAPLVRSSYHAGEE

SEQ ID NO: 2993 - DNA, 969 bp, Bradyrhizobium japonicum
  CDS (1)..(969): transl_table=11
atgaaagtgatacttgatctcctcaacaacgatccgcgcacgacgcagcggaccgaaaggccgcgccatcccgaaaaggccaaccgcccggacacaccgatggaaagcaggcccgcatggatccgcgtgaaagcccccggctccgcccaatggactgagacgcaacgtatcgtgcgcgaaaacaagctcgtgaccgtctgcgaggaagccagctgccccaacatcggcgagtgctgggcgaagaagcacgcgaccttcatgatcatgggtgacacctgcacgcgcgcctgcgcgttctgcaacgtgcgcaccggcctgcccggcccgctcgatgccgacgagcccggcaaggtcgccgacgccgtggccaagctcgggctcgagcacgtggtcgtgacatcggtcgatcgcgacgacctcgccgacggcggcgccgcccatttcgcagccacaattgcggcgatccgcgcaatgagcccggcaacgtcaatcgaaatcctcacgcctgatttcctgcgcaagcacggcgcgctcgaaacggtcgttgcggcaaggccagacgtgctcaatcacaatctggaaacggtgccgtcaaaatatctcgcggtacgcccaggtgcccgctatttccattcggtgcgacttctgcaacgcgcgaaggagctcgacccgcgcatcttcaccaaatcgggaatcatggtcggcctcggcgaggatcgtagcgaggtgctgcagttgatggacgatctgcgttccgccgacgtcgacttcctgaccatcggccagtatctccagccgacgcgcaagcaccatgccgtgatgcgcttcgtgccccctgatgaattcgaggcctatgagaagaccgcctatgccaagggatttctcatggtctcggccacgccactgacgcgatcctcacaccacgccggtgacgacttccgcaagctgcgcgagcgccgacgcgcgtag

SEQ ID NO: 2994 - protein, 322 aa, Bradyrhizobium japonicum
MKVILDLLNNDPRTTQRTERPRHPEKANRPDTPMESRPAWIRVKAPGSAQWTETQRIVRENKLVTVCEEASCPNIGECWAKKHATFMIMGDTCTRACAFCNVRTGLPGPLDADEPGKVADAVAKLGLEHVVVTSVDRDDLADGGAAHFAATIAAIRAMSPATSIEILTPDFLRKHGALETVVAARPDVLNHNLETVPSKYLAVRPGARYFHSVRLLQRAKELDPRIFTKSGIMVGLGEDRSEVLQLMDDLRSADVDFLTIGQYLQPTRKHHAVMRFVPPDEFEAYEKTAYAKGFLMVSATPLTRSSHHAGDDFRKLRERRRA

SEQ ID NO: 2995 - DNA, 870 bp, Gloeobacter violaceus
  CDS (1)..(870): transl_table=11
gtgctcgccatgtcccaccagactgccagctcccgcctgcccgagtgggcgcgccgcaccatcggcactgcctcgcaagtctcgacggtcgagaagatcgtcaagcagcgctcgctgcacaccatctgcgaggaggggcgctgcccgaaccgggcggagtgctacgcccagaagacagcgacgtttttgttgatgggaccggtgtgcacccgcgcctgcggcttctgccaggttgccggcggcaaggctcttcccctcgacccgcaggagcctgaaaaagtcgccgaggcggtggcgctgttgggactcaagtacgtggtgctcacttcggtggcccgcgacgacctgccggatcagggggcgggctggtttgtgcgcacgatggaatctattcgcgcgcgcaactgcgcggtcgagatcgaagtactcaccccggattttcgcggcgaagaggcgtgcatcgccaccgtggtcgccgcgcgacccgtttgctttaatcacaacatcgagacggtgcggcgcctgcaaagctacgcccgccgcgccgccacctacgcgcgcagtctggcggtccttgccgccgtcaagcgtctggatgcggagatcttcaccaagtcggggctgatgctgggccacggcgagacgcgcgaagaagtgctcgagacgttgctcgacctgcgcaaggtgggttgcgaccgggtcaccctcggccagtacctccagccttccaaagaccacctgccggtgcacaagtactggaccccggccgaatttgccgaactgggcgccgtcgcccgcgatttgggctttgcccacgtgcgctccggaccgctggtgcgcagttcctaccacgccggcgagcctgaatag

SEQ ID NO: 2996 - protein, 289 aa, Gloeobacter violaceus
MLAMSHQTASSRLPEWARRTIGTASQVSTVEKIVKQRSLHTICEEGRCPNRAECYAQKTATFLLMGPVCTRACGFCQVAGGKALPLDPQEPEKVAEAVALLGLKYVVLTSVARDDLPDQGAGWFVRTMESIRARNCAVEIEVLTPDFRGEEACIATVVAARPVCFNHNIETVRRLQSYARRAATYARSLAVLAAVKRLDAEIFTKSGLMLGHGETREEVLETLLDLRKVGCDRVTLGQYLQPSKDHLPVHKYWTPAEFAELGAVARDLGFAHVRSGPLVRSSYHAGEPE

SEQ ID NO: 2997 - DNA, 927 bp, Prochlorococcus marinus
  CDS (1)..(927): transl_table=11
atgacaaccacaaacaaaaaaactcgttacagtgcaattaagccaagcgaaaggctacctgaatggataaaaccctctttaggtacggcctcacaattagaaaaagtacagaacctagttaaagaatatcgattaaatacaatatgcgaagaaggacgctgcccaaacagaggtgagtgctatgcatcaggaacagctactttcctattaggtggttcaatctgcactcgaagctgcgctttttgccaagtagaaaaaggaatgccaccacaaaacattgatccaaatgaatcaatccgtgtagcaaaagcagttttaaaattacaactcaaatacgttgtcttaacttctgtcgcaagagacgatcttgatgatcatggagcaattcatttttcaagaacaattcatgccataagaaaaacttctcccacgacatctattgaagttctaactcctgacttttggggtggatgtattgacaaaataaaagcaacaaaaattcaaagggagcgcttaaaaatagttcttaaagcaaagccagtttgctttaaccacaaccttgaaactgtagaacgtctacaaaaagaagtgcgcagaggtgctacctaccacaggtctcttgaactattaaaagcttctagagaaattgacaacgaaatcccaacaaaatcaggattaatgttaggcctaggtgaacgaagtgatgaaataatccaaactcttaaagaccttcgctcagtcaactgtcaacaggtaacaattggtcaatacctacgtccttcgctagcgcatatacctgttcaaaaatattggcttccaaaagactttgaacactttaagagaatagccgaaggacttggtttcaaaaaagtcaatagtggtccattagtaagaagtagttatcatgctgaacttccacaaacctaa

SEQ ID NO: 2998 - protein, 308 aa, Prochlorococcus marinus
MTTTNKKTRYSAIKPSERLPEWIKPSLGTASQLEKVQNLVKEYRLNTICEEGRCPNRGECYASGTATFLLGGSICTRSCAFCQVEKGMPPQNIDPNESIRVAKAVLKLQLKYVVLTSVARDDLDDHGAIHFSRTIHAIRKTSPTTSIEVLTPDFWGGCIDKIKATKIQRERLKIVLKAKPVCFNHNLETVERLQKEVRRGATYHRSLELLKASREIDNEIPTKSGLMLGLGERSDEIIQTLKDLRSVNCQQVTIGQYLRPSLAHIPVQKYWLPKDFEHFKRIAEGLGFKKVNSGPLVRSSYHAELPQT

SEQ ID NO: 2999 - DNA, 921 bp, Prochlorococcus marinus
  CDS (1)..(921): transl_table=11
atgtcttccacccatcgcccaacccaatacagctccattttgcctgcggagcgccttccggaatggttgcggcgccccatcggcagcgtctcccaattggagcagatgcagcagctggtgaaggggaatcatcttcacaccatttgtgaggaagggcgttgtcccaatcgcggcgagtgttacgcagccggtacagcaacttttctcctaggcggatcgatctgtacgcgtagttgtgctttttgccaggtcatgaaaggccaatctcctcaggcaatcgatccactcgaagcagagcgagttgcagatgcggtgcagcagatgggtcttcgttatgtggttcttacttcagtagcaagggatgatttgcccgaccatggcgtcagtatttttactgagaccatggcggccattcgccagcgcaatcctcttattgagatagaagtgctgacgccggatttttggggcggagtcgctgatctggccaaggcattagaggcccagagagaacgactcacgcagttgctcatggctgcaccagtttgtttcaaccacaacctcgaaaccgttgaaaggcttcagagcaaggttcgacggggagctacgtatcaccattctctcagtctgctggctgcagcgcgggaacttgctcccaacatccctactaaatcaggcttgatgttgggactaggagaagagcaagaagaggtggttcagactcttgaggatctccgttctgttgactgtcaacgggtcacattgggtcagtatctgcgcccttcattggcacatattccggtgcatcgttattggcatcctgaggatttcaagaacttggctgaagttgcttgcaagcttggatttgctcaggtgcgtagcgggcctctagtgcgtagtagttatcacgctggtgaagaatga

SEQ ID NO: 3000 - protein, 306 aa, Prochlorococcus marinus
MSSTHRPTQYSSILPAERLPEWLRRPIGSVSQLEQMQQLVKGNHLHTICEEGRCPNRGECYAAGTATFLLGGSICTRSCAFCQVMKGQSPQAIDPLEAERVADAVQQMGLRYVVLTSVARDDLPDHGVSIFTETMAAIRQRNPLIEIEVLTPDFWGGVADLAKALEAQRERLTQLLMAAPVCFNHNLETVERLQSKVRRGATYHHSLSLLAAARELAPNIPTKSGLMLGLGEEQEEVVQTLEDLRSVDCQRVTLGQYLRPSLAHIPVHRYWHPEDFKNLAEVACKLGFAQVRSGPLVRSSYHAGEE

SEQ ID NO: 3001 - DNA, 900 bp, Prochlorococcus marinus subsp
  CDS (1)..(900): transl_table=11
atgaaaaataaaaatcagatgaaagtagaaaaaattttaaggcttccttcttggataaagtttcctattagcaaagcttcggaatttgagaaaatgcaaagacttattagaaagtcaaatatacatacaatttgtgaagaagggagatgtcctaatagggccgaatgttatgcctcaggtactgctacttttttacttggaggatcaatttgttctcgtgcctgcgctttctgccaggtaaacaaaggtaaacctagtgaaataaataaatatgaaagtattcaagtcgcagaagcagtaaaaattctaaacttaaaatatgttgtacttacatcagtagccagagacgaccttcccgatcatggagctaatttatttgtctcaacgattaatcagattagaaaaattgatccaaagattcaaatagaagttcttactcctgatttatggggaggtggaaaatcttttgaagataaagataaacttcaaaaagatagacttaaaaaaattctagaacaaaggccaatttgttttaatcataatcttgagacagttgaaaggcttcaaaaagaagttcgaagaggtgctaactataaaaattcaataggcttattagaaaaagcaaagtctattgctcctaatattcaaacaaaatcaggaataatgttgggtttaggagaaacgttaaaagaaatagaaactacgattctcgatctaaaaaaagtggattgtaatcaaatcacaattggacaatatctaagaccttcattaaagcatttatctgttaagaaatattgggcaccaaaggagtttgaatacctaaaaagtttttgtagtaaattagggtttaaaaaagtatcttgtggccctttagttagaagtagttatcacgctggttag

SEQ ID NO: 3002 - protein, 299 aa, Prochlorococcus marinus subsp
MKNKNQMKVEKILRLPSWIKFPISKASEFEKMQRLIRKSNIHTICEEGRCPNRAECYASGTATFLLGGSICSRACAFCQVNKGKPSEINKYESIQVAEAVKILNLKYVVLTSVARDDLPDHGANLFVSTINQIRKIDPKIQIEVLTPDLWGGGKSFEDKDKLQKDRLKKILEQRPICFNHNLETVERLQKEVRRGANYKNSIGLLEKAKSIAPNIQTKSGIMLGLGETLKEIETTILDLKKVDCNQITIGQYLRPSLKHLSVKKYWAPKEFEYLKSFCSKLGFKKVSCGPLVRSSYHAG

SEQ ID NO: 3003 - DNA, 873 bp, Synechococcus elongatus
  CDS (1)..(873): transl_table=11
atggccctctcccgacccctgccgtcgtggctgcgcaaaccccttggtaaagccagtgagatctctaccgttcagcgcttagtgcgccagtatggaattcacaccatctgcgaggaggggcggtgtcccaatcgcggggaatgctatggccaaaaaaccgccacctttttacttttggggcccacctgtacccgtgcctgtgccttttgccaagtggagaagggtcacgctcccgccgccgtggatccagaggagcccactaaaattgccgccgctgtggcgacgttaggcttgcgctatgtggttttaacctctgtggctcgcgatgacttgccggatcaaggggcgggtcaatttgtagccaccatggcggcgattcgccaacgctgccccggcaccgaaattgaagtcctcagccccgactttcgcatggatcggggtcggctctcccaacgggactgcattgcccaaattgtggcggcacagcccgcctgctacaaccacaacctggaaacagtacggcgcttacagggccctgtgcgacggggtgccacctatgagagctcactgcgcgtcttagccactgttaaagaactcaatcctgacatacccacaaagtcgggactcatgttgggcctaggggaaacggaagcagagatcattgagaccttgaaggatctacgcagggtggggtgcgatcgcctgaccttgggacaatatctgcccccttccttgagtcatttaccagtggtcaagtattggacccctgaagaatttaacaccttgggcaatattgcacgggaattgggcttttcccatgtgcgatcgggcccccttgtacgcagctcctaccatgcggctgagggcggctaa

SEQ ID NO: 3004 - protein, 290 aa, Synechococcus elongatus
MALSRPLPSWLRKPLGKASEISTVQRLVRQYGIHTICEEGRCPNRGECYGQKTATFLLLGPTCTRACAFCQVEKGHAPAAVDPEEPTKIAAAVATLGLRYVVLTSVARDDLPDQGAGQFVATMAAIRQRCPGTEIEVLSPDFRMDRGRLSQRDCIAQIVAAQPACYNHNLETVRRLQGPVRRGATYESSLRVLATVKELNPDIPTKSGLMLGLGETEAEIIETLKDLRRVGCDRLTLGQYLPPSLSHLPVVKYWTPEEFNTLGNIARELGFSHVRSGPLVRSSYHAAEGG

SEQ ID NO: 3005 - DNA, 900 bp, Synechococcus sp
  CDS (1)..(900): transl_table=11
atgagcaaatacagcaccattgctccgacggaacgactgccggagtggctgcggcgaccgatcggcgatgcatctgcgctcgagcgggtgcagggattggtcaagcagaaccggttgcacaccatctgcgaggaggggcgttgccccaaccgcggtgagtgttatgcagctggcacagccacgtttttgctgggtggttcgatctgcacccgcagctgtgccttctgccaggtggagaagggccaagcacccatggcggtggaccctgctgaggcgcagcgggtggctgatgcggtggaggcgatgcagctgcgttatgtggtgctcacggccgtcgcccgtgatgacctggctgatcacggtgcagctctcttcactacaacgatggaggcgatccgcgcccgcaatccgctgattgccatcgaggtgttgacgccggatttctggggtggctgtcccgatccacaacaggctgttgccgcgcagcgtgagcggctgtccaccgtgctcgcggctgaccccgtgtgcttcaaccacaacctggaaaccgtccaacgcctgcaaggtgaggtacggcgcggtgccacctacgagcgatccctcgggctgctggcggcgtgccgggagctggctccaacgattcccaccaaatcagggttgatgctgggccttggcgagagccgtgatgaggtgattgctgcgatgcgggatctgcgggctgtggattgtcagcgcctcaccctcggccagtacctgcgtccgtccttggctcacatcccagtggatcgctattggacgccggaggagtttgacgaactcggtgctgtggcccgcgatcttgggttcgcccaggtgcgcagtggtccgctggtgcgcagcagttatcacgctgccgattga

SEQ ID NO: 3006 - protein, 299 aa, Synechococcus sp
MSKYSTIAPTERLPEWLRRPIGDASALERVQGLVKQNRLHTICEEGRCPNRGECYAAGTATFLLGGSICTRSCAFCQVEKGQAPMAVDPAEAQRVADAVEAMQLRYVVLTAVARDDLADHGAALFTTTMEAIRARNPLIAIEVLTPDFWGGCPDPQQAVAAQRERLSTVLAADPVCFNHNLETVQRLQGEVRRGATYERSLGLLAACRELAPTIPTKSGLMLGLGESRDEVIAAMRDLRAVDCQRLTLGQYLRPSLAHIPVDRYWTPEEFDELGAVARDLGFAQVRSGPLVRSSYHAAD

SEQ ID NO: 3007 - DNA, 912 bp, Synechocystis sp
  CDS (1)..(912): transl_table=11
gtgccccaacaatcatttatgaatggctcttccttgccccgtgagttccccccacgcttacccagttggttgaaacggcccattggtagagctagtgaattatctacggttcagcagattattaaacagcgccaaattcataccatttgcgaagaaggccgctgtcccaatcggggggaatgttacgccaaccgaacggcaacttttttattaatgggtcaaatttgtactagggcatgtggtttttgtcaggtggaaaagggccaggctcccatgatgttggatcaggatgagccgagaaaagtagcggaagcagtgcaattgttgggtctaaaatatgtggtattaacttccgttgctagggatgatttaaccgatggcggtgcaggctggtttgtagcggtaatggagcgtattcgccaggataatcctgctactcaaatagaggttttaacaccggatttttggggcggtatgggtagggaaagaagccaaaaagagcgagtactgacggtgactaaagccaaaccggtttgctataaccacaacttggaaacggtggctagattacagggtaaagtacgacggggggcaaaatatcaacgctccttagatgtgttgcgctggataaaggaatttgatcccgacattttcaccaaatctgggttgatgttgggccacggggaaacggtggatgaagtggtggaaaccctcaaggatttgcgctctgtaggttgcgatcgcctgacgttgggacaatatatgcaaccatccctagaccatctgcccgtgcaaaaatattggactccagaggagtttgatcagttgggggaaattgccaaggatttgggttttagccatgtgcgatcaggaccattggtgcggagttcctaccatgccggggaagattag

SEQ ID NO: 3008 - protein, 303 aa, Synechocystis sp
MPQQSFMNGSSLPREFPPRLPSWLKRPIGRASELSTVQQIIKQRQIHTICEEGRCPNRGECYANRTATFLLMGQICTRACGFCQVEKGQAPMMLDQDEPRKVAEAVQLLGLKYVVLTSVARDDLTDGGAGWFVAVMERIRQDNPATQIEVLTPDFWGGMGRERSQKERVLTVTKAKPVCYNHNLETVARLQGKVRRGAKYQRSLDVLRWIKEFDPDIFTKSGLMLGHGETVDEVVETLKDLRSVGCDRLTLGQYMQPSLDHLPVQKYWTPEEFDQLGEIAKDLGFSHVRSGPLVRSSYHAGED

SEQ ID NO: 3009 - DNA, 915 bp, Acidobacteria bacterium
  CDS (1)..(915): transl_table=11
atggctcccgaactcatccagatcgatctagaacccaggaagccggcgcccaagccctcgtggctgcgcgccaaggcccccatgggcgaaaactaccacgacctgaagaagctggcgcgcggcatgaacctgcacacggtgtgcgagtcggcgcaatgcccgaacattggcgagtgctggaaccataagaccgcaaccttcatgttgctcggcaacctgtgtacgcgacgctgcggattctgcgcagtgccgaaggggcgtccggagccaattgatttcgacgaacctcgccgtgtagccgaagcggttgcaacgctgggattgaactttgcggttgtcacgagcgtgaatcgcgacgatgacaacgttggcgcagcgcaagtctttgcgcagacgatagaacagatccgcgagcaaaagccgggctgtcgcgtggaagtgctgatccccgatttccagggcaacgatgaatctttgcgcattgttctcgctgccaagcccgaaattttgaaccacaacaccgaaacggtgccgcggctctatcgcgcggtgcgctccggtgcccgctacgagcgcacgttgaacttgctgcgccgggcgaaagagatcaatcccgctcaggtgaccaagactggcgtgatggtcggcctcggtgaaacgacggaagagcttttgcatgtctatcgtgatctcgcgcggcagaacgtggacatcctgaccatcggacaatatctgcggccgtccaaagaccatgcgccgatgacgcgctattacacgccggaagaattcctcttcatgaaagaagaagcaatgaagatgggcttccgccacgtggagtcgggaccgctggtgcgcagcagctatcacgcgcatgaacaggcgaattcgaccaagcagccgcttgtcaccatctaa

SEQ ID NO: 3010 - protein, 304 aa, Acidobacteria bacterium
MAPELIQIDLEPRKPAPKPSWLRAKAPMGENYHDLKKLARGMNLHTVCESAQCPNIGECWNHKTATFMLLGNLCTRRCGFCAVPKGRPEPIDFDEPRRVAEAVATLGLNFAVVTSVNRDDDNVGAAQVFAQTIEQIREQKPGCRVEVLIPDFQGNDESLRIVLAAKPEILNHNTETVPRLYRAVRSGARYERTLNLLRRAKEINPAQVTKTGVMVGLGETTEELLHVYRDLARQNVDILTIGQYLRPSKDHAPMTRYYTPEEFLFMKEEAMKMGFRHVESGPLVRSSYHAHEQANSTKQPLVTI

SEQ ID NO: 3011 - DNA, 981 bp, Acidovorax sp
  CDS (1)..(981): transl_table=11
atgagcactcccgacgtcgtgcgcgaagcgcagtccaccgaagcctacaacccgctggccaagcagaaggccgcggccaagctgtcgcgcatcccgatcaaggtcgagcagggcgaggtgctcaagaagcccgagtggattcgcgtgaaggcaggcagtcccaccacgcgcttttacgagatcaagaacatcctgcgcgagcacaagctgcacacggtgtgcgaggaagccagttgccccaacatcggcgaatgctttggcaggggcacggccacgttcatgatcatgggcgacaagtgcacgcgccgctgcccgttctgcgacgtgggccacggccgccccgacccgctggacaaagacgagccgctgaacctcgccaagacgattgccgcgctgcgcctgaagtacgtggtcatcaccagcgtggaccgtgacgatctgcgcgacggcggctcgggccacttcgtggagtgcatccagcgtacccgcgaactctcgcccagcacgcagatcgagatcctcacgcccgacttccgcggccgcgacgaccgtgcgctcgaaatcctcaaggccgcgcccccggacgtgatgaaccacaacctggaaaccgtgccgcgcctgtacaaagaagcgcgccccggctccgattaccagttcagcctcaacctgctcaagaagttcaagcaactgcaccccggcgtgcccaccaagagcggcctgatggtgggcctgggcgagacggacgaggaaattctggaagtcatgcgcgacatgcgcgcacatggcatcgagatgctgaccatcggccagtacctcgcccccagcaacagccacctgcccgtgcggcgctatgtgcaccccgacaccttcaagatgttcgaggaagaagcctacaagatgggcttcagccacgccgcagtgggtgccatggtgcgctccagctaccatgccgaccagcaggcgcacgccgctggcgtttga

SEQ ID NO: 3012 - protein, 326 aa, Acidovorax sp
MSTPDVVREAQSTEAYNPLAKQKAAAKLSRIPIKVEQGEVLKKPEWIRVKAGSPTTRFYEIKNILREHKLHTVCEEASCPNIGECFGRGTATFMIMGDKCTRRCPFCDVGHGRPDPLDKDEPLNLAKTIAALRLKYVVITSVDRDDLRDGGSGHFVECIQRTRELSPSTQIEILTPDFRGRDDRALEILKAAPPDVMNHNLETVPRLYKEARPGSDYQFSLNLLKKFKQLHPGVPTKSGLMVGLGETDEEILEVMRDMRAHGIEMLTIGQYLAPSNSHLPVRRYVHPDTFKMFEEEAYKMGFSHAAVGAMVRSSYHADQQAHAAGV

SEQ ID NO: 3013 - DNA, 882 bp, Aeropyrum pernix
  CDS (1)..(882): transl_table=11
atggaggcggcgaagccgaggcttagggtcaggataaacgactcgtacgttaaggtagccaggcttgtggcaggcctgggtgtagccacggtatgcgagggagcgttgtgccccaacatatttacctgctggggggagggtacggccaccttcatgataatgggcgacacctgcacgcggggctgtaggttctgctatgtgaagaagggtgttcccgagcccctggacccccttgagccgtataaggttgctctagccgtggacgccctgggcctggactacgtgaccctcaccagcgttgacagggatgacctgcctgacggcggggccagccacttcgccgcgaccgtcagggcgataaagaggctgaggcctgacaccatagttgaggccctcatacccgacttccagggtgtggaggagcatgtgaggcttgtcgcggccagcgggctcgaggtcctcgcccacaatatagagacggtggagaggctgacgcccctggtgagggataggagggcagggtacaggcagagcctcagggttctcgagatcgctaaggaggagggggtagttaccaagtccagcatactactgggcctgggcgaggataagagcgaggttatcgaggctatgagggatttgaggagcgtaggggtagacattctggtgctcagccagtactacaggccgagtaggaagcagctgccggttgcgaagaggtatagcctctccgagttccgcgagctggctgagaagggccttcgaatggggttcgcctacgtcgtggcccaccccctggccaggacctcgttcaaggcgaaggaggcgtacttggccgcggtgaggagagttgaagctgagggtggtggtagacgggcctag

SEQ ID NO: 3014 - protein, 293 aa, Aeropyrum pernix
MEAAKPRLRVRINDSYVKVARLVAGLGVATVCEGALCPNIFTCWGEGTATFMIMGDTCTRGCRFCYVKKGVPEPLDPLEPYKVALAVDALGLDYVTLTSVDRDDLPDGGASHFAATVRAIKRLRPDTIVEALIPDFQGVEEHVRLVAASGLEVLAHNIETVERLTPLVRDRRAGYRQSLRVLEIAKEEGVVTKSSILLGLGEDKSEVIEAMRDLRSVGVDILVLSQYYRPSRKQLPVAKRYSLSEFRELAEKGLRMGFAYVVAHPLARTSFKAKEAYLAAVRRVEAEGGGRRA

SEQ ID NO: 3015 - DNA, 972 bp, Agrobacterium tumefaciens
  CDS (1)..(972): transl_table=11
atggtcactattctcgacaggacgtcgtccgacgaaaagcgcatccgccacccggaaaaggcgcatcggcccgataccgaggtcatgcgcaagccggaatggatccgcgtcaaggcgccgacttccaagggttatcacgagacgcgcgaactggtgcgcagccacaagctggtaacggtgtgcgaggaagccggctgtccgaatatcggcgagtgctgggaaaagaaacacgcgaccttcatgatcatgggtgaaatctgcacccgtgcctgcgccttctgtaacgtcgcgaccggcaagcccaatgcgcttgacatggacgagcccgaaaacgtcgccaaggccgtcaagcagatgggcctttcacatgtcgttatcacctcggttgaccgtgacgatctcgccgacggcggtgctgaacatttcgagaaggtcatctgggcgatccgtgccgcgtctccgacgacgaccatcgaaatcctcacccccgacttcctgaagaagcccggcgcgctggagcgcgtcgtcgccgccaagcctgatgtcttcaaccacaacatggaaactgttccgggcaattacctcacggttcgtccgggcgcgcgttatttccattccgtgcgtctcttgcagcgtgtcaaggaactggaccccaccatgttcaccaagtccggcatcatggtcggcttgggtgaagagcgcaacgaagtgctgcagctgatggacgatctgcgcagcgccgacgtggatttcctgaccatcggccaatatctgcagccgacccgcaaacaccacaaggttgaggccttcgtcacaccggaagaattcaagtcctacgagactgtggcctatgccaagggcttcctgatggtctcttccagcccgctgacgcgttcttcccaccatgccggcgacgattttgagcgcctgcgtgcggcccgcgagaagaagctgctggctgctgctgagtaa

SEQ ID NO: 3016 - protein, 323 aa, Agrobacterium tumefaciens
MVTILDRTSSDEKRIRHPEKAHRPDTEVMRKPEWIRVKAPTSKGYHETRELVRSHKLVTVCEEAGCPNIGECWEKKHATFMIMGEICTRACAFCNVATGKPNALDMDEPENVAKAVKQMGLSHVVITSVDRDDLADGGAEHFEKVIWAIRAASPTTTIEILTPDFLKKPGALERVVAAKPDVFNHNMETVPGNYLTVRPGARYFHSVRLLQRVKELDPTMFTKSGIMVGLGEERNEVLQLMDDLRSADVDFLTIGQYLQPTRKHHKVEAFVTPEEFKSYETVAYAKGFLMVSSSPLTRSSHHAGDDFERLRAAREKKLLAAAE

SEQ ID NO: 3017 - DNA, 996 bp, Alkalilimnicola ehrlichei
  CDS (1)..(996): transl_table=11
atgcccacgctgaaaggcattccggtggtcaccagtggcatgaaggtcgagcgcgacggggtgcgcgccatcaaggatggagttaagcacaacccgcgggccgaggcggcgccgcgcggccgcaagccgtcctggctgcgcgctcgggtacccagtggcgaggggtaccaggcggtgcgggacattgtccgcacccatcggctcagtaccgtctgcgaggagtcgcactgcccgaacatcggtgagtgctggaacgccggaacggccaccatcatgctgatgggcgcggtctgtacccgtgcctgtcgcttctgcgccgtggataccggcaacccgaagggccggctggaccacgacgaaccggcccacgccgccgactcggtgcgcctgatgggcctgagctacgtggtgctcacctcagtggatcgggatgacctggaggacggtggcgccggccactatgccgcctgcgtgaacgccatccgggaggtcaacccggaaacggcggtggaagtgctcacccccgatttcaatggcgtaccggagcatgtgcacagggtggtggacgcccgacccgaggtctttgcccagaacgtggagacggtacgccgcctcacccacccggtgcgcgatccccgtgccggctatgagcagaccctggaggtgctgcgcctggccaaggcacggcggccggacatgctcaccaagaccagcctcatgctcggcctgggcgagcgcgacgaggaaattcgggagaccctcgaggatctgcgggcggtcggggtggacatcgtcaccttcggccaatacctgcagccgacgcgcaaccacctgccagtagagcgctacgtctcccccgccgagttcgcggattaccgccgtatgggtctggagatggggttcctggaggtggtggccgggccgatggtccgctccagctaccgggccgacaaggtgctggagaaaaacaacgtgggcctggagtccgcctcctga

SEQ ID NO: 3018 - protein, 331 aa, Alkalilimnicola ehrlichei
MPTLKGIPVVTSGMKVERDGVRAIKDGVKHNPRAEAAPRGRKPSWLRARVPSGEGYQAVRDIVRTHRLSTVCEESHCPNIGECWNAGTATIMLMGAVCTRACRFCAVDTGNPKGRLDHDEPAHAADSVRLMGLSYVVLTSVDRDDLEDGGAGHYAACVNAIREVNPETAVEVLTPDFNGVPEHVHRVVDARPEVFAQNVETVRRLTHPVRDPRAGYEQTLEVLRLAKARRPDMLTKTSLMLGLGERDEEIRETLEDLRAVGVDIVTFGQYLQPTRNHLPVERYVSPAEFADYRRMGLEMGFLEVVAGPMVRSSYRADKVLEKNNVGLESAS

SEQ ID NO: 3019 - DNA, 942 bp, Anaplasma marginale; identical to SEQ ID NO: 2829
  CDS (55)..(942): transl_table=11

SEQ ID NO: 3020 - protein, 295 aa, Anaplasma marginale
MENKPDWLRVRMPGGAVFDEVTELVRRYELNTVCEEAACPNIGECWNKRHATIMIMGSVCTRACAFCNVKVGVPNALDPDEPERVGAAISKLGLKHVVITSVDRDDLPDGGASHFAKCVREIRKRDSSVTVEILTPDFLGKPCAIDIIASARPDVYNHNLETVPRLYSRVRPRAKYFNSLNLLKEVKDKSPGVFTKSGFMLGLGESKEEVYQVMDDLRCAGVDFIVMGQYLQPTKNNIEVHRYVPPSEFEQYKLMAYAKGFSMVAASPLARSSYHAEDDFRKLKELRFARAKVNE

SEQ ID NO: 3021 - DNA, 888 bp, Anaplasma phagocytophilum
  CDS (1)..(888): transl_table=11
atgaatagtaagcccagctggttaagggtaaaaatgcccgggggcgaggtatttgaagaagttagagatctagtcaaacgccaaaggctcaacacagtatgtgaagaggctgcatgtcctaatataggtgagtgctggaataagaggcatgctactataatggtgatgggtgacgtgtgtaccagagcgtgtgcgttctgtaatgttaagactggtgttccgagagcgttggatcttggggagcctgagagagtgggcgaagctatcagcaagttagggttgaagcacgtggttatcacgtctgtggatagggatgatctaccagatggtggggcaagtcactttgctaagtgtattagagaaataaggaagcgtgacccaaatgtgaccatagagatcctaacaccggattttcagggtaagccaggcgcggtggatgtcatcgcttctgcaaggcctgatgtatataatcacaacttggagacggttcctaggttatatgcaagggtgcgtcctagagctaagtatttcaattctttgcaattgttgcagcaagtaaaggataagactcagggagtattcacgaagtcgggattgatgttagggcttggtgagcagaaggaagaggtataccaggttatggatgatctcaggtgtgcgggggttgactttcttgtcttggggcagtatttgcaacctacgaaggacaacattgatgtggatcggtatgttacccctgaggagtttgaacagtacaagcgtatggcatatgccaagggtttttctatggtagcatctagtccgttagctaggtcctcataccatgctgaggatgactttctgaggcttcgcgctttacgcactgcgcgtatgcgtgttgctacttag

SEQ ID NO: 3022 - protein, 295 aa, Anaplasma phagocytophilum
MNSKPSWLRVKMPGGEVFEEVRDLVKRQRLNTVCEEAACPNIGECWNKRHATIMVMGDVCTRACAFCNVKTGVPRALDLGEPERVGEAISKLGLKHVVITSVDRDDLPDGGASHFAKCIREIRKRDPNVTIEILTPDFQGKPGAVDVIASARPDVYNHNLETVPRLYARVRPRAKYFNSLQLLQQVKDKTQGVFTKSGLMLGLGEQKEEVYQVMDDLRCAGVDFLVLGQYLQPTKDNIDVDRYVTPEEFEQYKRMAYAKGFSMVASSPLARSSYHAEDDFLRLRALRTARMRVAT

SEQ ID NO: 3023 - DNA, 831 bp, Aquifex aeolicus
  CDS (1)..(831): transl_table=11
atgatgaaacctgtccttcacttttcgaagttatacgaagtaaaaaagctactcaggaaatccagactttacacggtttgtgaagagtccagatgtcccaatatatccgagtgcttcggaaacaaaaccgcaacctttatgatcttgggaaacaggtgcacgaggaggtgtgccttctgcaacgttgagaagggctttccaaagggtgtagatccggaagagccttacagactcctcgaagcggtaaagactctgggactgaagtacgtcgtcataacttctgtgacgagggatgacttgcccgacggcggagcctcccactttgcaaagtgtataagggttctaaaagagaatattgaggatataaaggtagaagttctcatcccggacttcagaggaaacaaaaaagctctggaagttgtcctaaaggaaaagcccgtggttttgaaccacaacgttgagactgttccgagactctacccgagtgtgaggataggggctaattacaagagaagtttaaacatcctgaagtggagcaaggagattgacaaaagcgtttacacaaagtctgccctgatcttaggtttcggcgagaggaaggaggaagttataaaagttatggaagatttaagaagtgtggactgcgactttctcgtcctagggcagtattaccagccttccttaaaacaccatcccgtagtaaagtactactccgaagaggagtttaaagaatttgaagagataggttatgagatgggatttaagttcgtggtgagcaagccgaacgcaaggagttcttacaaagcttttgagagtttactcagtacgtag

SEQ ID NO: 3024 - protein, 276 aa, Aquifex aeolicus
MMKPVLHFSKLYEVKKLLRKSRLYTVCEESRCPNISECFGNKTATFMILGNRCTRRCAFCNVEKGFPKGVDPEEPYRLLEAVKTLGLKYVVITSVTRDDLPDGGASHFAKCIRVLKENIEDIKVEVLIPDFRGNKKALEVVLKEKPVVLNHNVETVPRLYPSVRIGANYKRSLNILKWSKEIDKSVYTKSALILGFGERKEEVIKVMEDLRSVDCDFLVLGQYYQPSLKHHPVVKYYSEEEFKEFEEIGYEMGFKFVVSKPNARSSYKAFESLLST

SEQ ID NO: 3025 - DNA, 948 bp, Azoarcus sp
  CDS (1)..(948): transl_table=11
atggataaccccgcacgcaagcagcgcggcgccgagaagaccgcgcgcatcccgatcaagatcgttcctgccgaacggctgaagaagccggactggatccggatccgcctcggtgcgggcgccgaggccgagcgtttcaacgaaatcaagcagaccctgcgcgagcacaagctgcatacggtgtgcgaagaagcctcctgccccaacatccacgagtgtttcggcaagggaacggccaccttcatgatcatgggcgacatctgcacccggcgctgcccgttctgcgatgtcgggcatggccgtccggagccgctcaatcccaacgaaccgacggatctagcccgcacgatcgcggcgatgcggctcaactatgtcgtgatcacctcggtcgaccgggatgatctgcgcgacggcggtgcccagcacttcgtcgactgcatccgcgaaacccgcgccgcctcgccgtccaccacgatcgaggtgctggtgcccgatttccgcggccgcatggagatcgcgctggagatcttcaaccaggcgccgcccgacgtgatgaaccacaacatggaaacggtgccgcggctgtacaaacaggcgcgcccgggggccgactatgcctattccctgcgcctgctgaaggaattcaaggcgggtcatcccgacgtgctcaccaagtccggcctcatggtggggctgggggaaaccgatgacgaaatcctcgacgtgatgcgcgacctgcgcgcccacgacgtggacatgctgaccatcggccagtacctgcaaccgtccggcggtcacctgccggtgctgcgctacgtccatcccgataccttcaagatgttcgaaaccgaggcgctgcggatgggtttccgcaacgcggcctgcggtccgatggtgcgctcgtcctactgggcggatcagcaggcccacggcgcgggcgtggtgtag

SEQ ID NO: 3026 - protein, 315 aa, Azoarcus sp
MDNPARKQRGAEKTARIPIKIVPAERLKKPDWIRIRLGAGAEAERFNEIKQTLREHKLHTVCEEASCPNIHECFGKGTATFMIMGDICTRRCPFCDVGHGRPEPLNPNEPTDLARTIAAMRLNYVVITSVDRDDLRDGGAQHFVDCIRETRAASPSTTIEVLVPDFRGRMEIALEIFNQAPPDVMNHNMETVPRLYKQARPGADYAYSLRLLKEFKAGHPDVLTKSGLMVGLGETDDEILDVMRDLRAHDVDMLTIGQYLQPSGGHLPVLRYVHPDTFKMFETEALRMGFRNAACGPMVRSSYWADQQAHGAGVV

SEQ ID NO: 3027 - DNA, 948 bp, Azoarcus sp
  CDS (1)..(948): transl_table=11
atggacagcacggcacgcaagcaacgcggcgcagacaagaccgcgcgcatcccgatcaagatcgtccccgccgaacgcctgaagaagcccgagtggatccgcatccggctcggcgccggccacgaagccgagcgcttcaacgaaatcaaggcgagcctgcgcgagcacaagctgcacaccgtatgcgaggaagcgtcgtgcccgaacatccacgaatgcttcggcaaaggtaccgcgacgttcatgatcatgggcgacatctgcacgcgtcgctgcccgttctgcgatgtcggccacggccggcccgagccgctgaacgcgaacgaaccgcaggagctcgcggcgacgatcggcgcgatgcggctcaactacgtcgtcatcaccagcgtcgaccgcgacgacctgcgtgacggcggcgcgcagcacttcgtcgactgcattcgcgagacgcgcgcggcgtcaccgaagacgcgcatcgaagtgctcgtgccggacttccgcggccggctcgacgtcgcgctcgaaatcttcgaccaggcgccgccggacgtcatgaaccacaacctcgagacagtgccgcggctctacaaacaggcgcgcccgggcgcggactacgcgtattcgcttcggctgctgaaggaattcaaggcgcgccatcccgacgtgccgacgaagtccggcctgatggtcggcctcggcgagaccgacgacgagatcctcgacgtgctgcgcgacctgcgcgcgcacgacgtcgagatgctgacgatcggccagtatctgcaaccgtcgaccggacacctgccggtgctgcgctatgtgcatccggacacgttcaagatgttcgagaccgaggcgctcgcgatgggcttcaagaacgcggcctgcggcccgatggtgcgctcgagctactgggccgaccagcaggcgtacggcgcgggcgtcgtctga

SEQ ID NO: 3028 - protein, 315 aa, Azoarcus sp
MDSTARKQRGADKTARIPIKIVPAERLKKPEWIRIRLGAGHEAERFNEIKASLREHKLHTVCEEASCPNIHECFGKGTATFMIMGDICTRRCPFCDVGHGRPEPLNANEPQELAATIGAMRLNYVVITSVDRDDLRDGGAQHFVDCIRETRAASPKTRIEVLVPDFRGRLDVALEIFDQAPPDVMNHNLETVPRLYKQARPGADYAYSLRLLKEFKARHPDVPTKSGLMVGLGETDDEILDVLRDLRAHDVEMLTIGQYLQPSTGHLPVLRYVHPDTFKMFETEALAMGFKNAACGPMVRSSYWADQQAYGAGVV

SEQ ID NO: 3029 - DNA, 897 bp, Bacillus anthracis
  CDS (1)..(897): transl_table=11
atgacaaaacaaacagaatataagcgcaagcccgaatggttgaaaattaagttaaacacgaatgaaaactatacaggcttaaagaaaatgatgcgttctaagaatcttcatacagtttgtgaagaagcgaaatgtccgaatattcatgaatgctgggctgtaagaaaaacagcaacatttatgattttaggagcagtatgtacacgtgcttgtcgtttctgtgcggttaaaacaggcttaccaacagagcttgatttacaagagccagaacgcgtagcagattctgtagtacaaatgggcttaaagcacgttgttataacagcggttgcacgtgatgatttaaaagacgggggagcagctgtttttgctgaaacagtacgcgctgtacgtcgtaaaaatccatttacgtcaatcgaagtattaccatctgatatgggtggagtagaagaaaacttaaaaatgttaatggatgcaaaaccagatattttaaaccataacattgaaacagtacgtcgattatctaaccgagttcgcgctagagcaaaatatgaccgttcattagagtttttacgtcgagcgaaagaaatgcagcctgatattccaactaaatcgagcattatggtcggcttaggggaaacgagagaagatttaattgaagcaatggatgacttacgtgcaaacaatgtggatattttaactcttggacaatacctacaaccatctaagaagcatttaccagttcttaaatattatccaccagcagaatttgcagagcttaaagaaattgcacttagcaaaggatttagccactgtgaagctggcccacttgtgcgttcttcttaccatgcggacgagcaagttcgttctgcaaaagaaaaaacagcagaagcaaaataa

SEQ ID NO: 3030 - protein, 298 aa, Bacillus anthracis
MTKQTEYKRKPEWLKIKLNTNENYTGLKKMMRSKNLHTVCEEAKCPNIHECWAVRKTATFMILGAVCTRACRFCAVKTGLPTELDLQEPERVADSVVQMGLKHVVITAVARDDLKDGGAAVFAETVRAVRRKNPFTSIEVLPSDMGGVEENLKMLMDAKPDILNHNIETVRRLSNRVRARAKYDRSLEFLRRAKEMQPDIPTKSSIMVGLGETREDLIEAMDDLRANNVDILTLGQYLQPSKKHLPVLKYYPPAEFAELKEIALSKGFSHCEAGPLVRSSYHADEQVRSAKEKTAEAK

SEQ ID NO: 3031 - DNA, 897 bp, Bacillus cereus
  CDS (1)..(897): transl_table=11
atgacaaaacaaacagaatataagcgcaagcccgaatggttgaaaattaagttaaacacgaatgaaaactatacaggcttaaagaaaatgatgcgttctaaaaatcttcatacagtttgtgaggaagcaaaatgtccgaatattcatgaatgctgggctgtaagaaaaacagcaacatttatgattttaggtgcggtttgtacacgtgcttgtcgtttttgtgcggttaaaacaggcttaccaactgagcttgatttacaagagccagaacgcgtagcagattctgtagtacaaatgggcttaaagcacgttgttataacagcggttgcacgtgatgatttaaaagatggtggagcagctgtttttgctgaaacagtacgcgctgtacgtcgtaaaaatccatttacgtcaatcgaagtattaccatctgatatgggtggagtagaagaaaacttaaaaatgttaatggatgcaaaaccagatattttaaaccataacattgaaacagtacgtcgattatctgaccgagttcgcgctagagcaaaatatgatcgttcattagagtttttacgtcgagcaaaagaaatgcagcctgatattccaactaaatcgagcattatggtgggcttaggtgaaacgagagaagatttaattgaagcaatggatgacttacgtgcaaacaatgtggatattttaactcttggacaatacctacaaccatctaagaagcatttaccagttcttaaatattacccaccagcagaatttgcagagctaaaagaaattgcacttagcaaaggctttagccactgtgaagctggcccacttgtgcgttcttcttaccatgcggacgagcaagttcgttctgcaaaagaaaacacagcagaagcaaaataa

SEQ ID NO: 3032 - protein, 298 aa, Bacillus cereus
MTKQTEYKRKPEWLKIKLNTNENYTGLKKMMRSKNLHTVCEEAKCPNIHECWAVRKTATFMILGAVCTRACRFCAVKTGLPTELDLQEPERVADSVVQMGLKHVVITAVARDDLKDGGAAVFAETVRAVRRKNPFTSIEVLPSDMGGVEENLKMLMDAKPDILNHNIETVRRLSDRVRARAKYDRSLEFLRRAKEMQPDIPTKSSIMVGLGETREDLIEAMDDLRANNVDILTLGQYLQPSKKHLPVLKYYPPAEFAELKEIALSKGFSHCEAGPLVRSSYHADEQVRSAKENTAEAK

SEQ ID NO: 3033 - DNA, 894 bp, Bacillus cereus
  CDS (1)..(894): transl_table=11
atgacaaaacaaacagaatataagcgcaagcccgaatggttgaaaattaagttaaacacgaatgaaaactatacaggcttaaagaaaatgatgcgttctaagaatcttcataccgtttgtgaagaggcaaaatgtccgaatattcatgaatgctgggctgtaagaaaaacagcaacatttatgattttaggtgcggtttgtacacgtgcttgtcgtttttgtgcggttaaaacaggcttaccaactgagcttgatttacaagaaccagaacgcgtagcagattcagtagtacaaatgggcttaaagcacgttgttataacagcggttgcacgtgatgatttaaaggacgggggagcagctgtttttgctgaaacagtacgcgcagtacgtcgtaaaaacccattcacgtctatcgaagtattaccatctgatatgggtggagtagaagaaaacttaaaaatgttaatggatgcaaaaccagatattttaaaccataacattgaaacagtacgtcgattatctgaccgagttcgcgctagagcaaaatatgaacgttcattagagtttttacgtcgagcgaaagaaatgcagcctgatattccaactaaatcgagcattatggtgggcttaggtgaaacgagagaagatttaattgaagcaatggatgacttacgtgcaaacaatgtggatattttaactcttgggcaatacctacaaccatctaagaagcatttaccagttcttaaatattacccaccagcagaatttgcagagcttaaagaaattgcacttagcaaaggatttagccactgtgaagctggcccacttgtgcgttcttcttaccatgcggacgagcaagtacgttctgcaaaagaaaaaacagcaggaagctaa

SEQ ID NO: 3034 - protein, 297 aa, Bacillus cereus
MTKQTEYKRKPEWLKIKLNTNENYTGLKKMMRSKNLHTVCEEAKCPNIHECWAVRKTATFMILGAVCTRACRFCAVKTGLPTELDLQEPERVADSVVQMGLKHVVITAVARDDLKDGGAAVFAETVRAVRRKNPFTSIEVLPSDMGGVEENLKMLMDAKPDILNHNIETVRRLSDRVRARAKYERSLEFLRRAKEMQPDIPTKSSIMVGLGETREDLIEAMDDLRANNVDILTLGQYLQPSKKHLPVLKYYPPAEFAELKEIALSKGFSHCEAGPLVRSSYHADEQVRSAKEKTAGS

SEQ ID NO: 3035 - DNA, 867 bp, Bacteroides fragilis
  CDS (1)..(867): transl_table=11
atgggaaacgataaacgggtgcgcaaacccgaatggcttaaaatcagcattggagccaatgaacgctataccgagaccaaacgcattgtcgaatcgcactgcctgcacaccatctgtagcagtgggcgttgccccaacatgggcgaatgctggggaaaagggacagctacgttcatgattgccggtgacatctgtacccgcagttgtaaattctgtaatacccagaccggacgacctctgcctttggatcccgacgaaccgacccacgttgcagaatcgattgccctgatgaaactctcacacgcagttatcacatctgtagaccgcgacgatctgcctgatttgggtgcagcccattgggcacaaacaattcgtgaaatcaaacgactaaatccggaaacaactaccgaagtactgattcccgatttccagggacgcaaagagcttgttgaccaagtgataaaagcctgtcccgaaatcatctcccataacatggagactgtgaaacgcatcagtccacaggtgcgtagtgccgccaactatcacaccagcctggaagtgatccgccaaatagccgaaagcggtattacggcaaaatcgggcattatggttggtctgggtgaaactcctgctgaagtagaagagttaatggacgacctgatttccgtcggttgcaaaatcctcaccatcgggcaatatctgcagccaacccacaaacacttcccggttgcagcatacattactccggaacagtttgctgtttataaagaaacaggactgaagaaagggttcgaacaagtggaaagcgcaccgttagtacgctcctcgtatcatgcagaaaaacatatccgatttaataataagtag

SEQ ID NO: 3036 - protein, 288 aa, Bacteroides fragilis
MGNDKRVRKPEWLKISIGANERYTETKRIVESHCLHTICSSGRCPNMGECWGKGTATFMIAGDICTRSCKFCNTQTGRPLPLDPDEPTHVAESIALMKLSHAVITSVDRDDLPDLGAAHWAQTIREIKRLNPETTTEVLIPDFQGRKELVDQVIKACPEIISHNMETVKRISPQVRSAANYHTSLEVIRQIAESGITAKSGIMVGLGETPAEVEELMDDLISVGCKILTIGQYLQPTHKHFPVAAYITPEQFAVYKETGLKKGFEQVESAPLVRSSYHAEKHIRFNNK

SEQ ID NO: 3037 - DNA, 867 bp, Bacteroides fragilis
  CDS (1)..(867): transl_table=11
atgggaaacgataaacgggtgcgcaaacccgaatggcttaaaatcagcattggagccaatgaacgctataccgagaccaaacgcattgtcgaatcgcactgcctgcacaccatctgtagcagtgggcgttgccccaacatgggcgaatgctggggaaaagggacagctacgttcatgattgccggtgacatctgtacccgcagttgtaaattctgtaatacccagaccggacgacctctgcctttggatcccgacgaaccggcccacgttgcagaatcgattgccctgatgaaactctcacacgcagttatcacatctgtagaccgcgatgatctgcctgatttgggtgcagcccattgggcacaaacaattcgtgaaatcaaacgactaaatccggaaacaactaccgaagtactgattcccgatttccaaggacgcaaagagcttattgaccaagtgataaaagcctgtcccgaaatcatctcccataacatggagactgtgaaacgcatcagtccacaggtgcgtagtgccgccaactatcacaccagcctggaagtgatccgccaaatagccgaaagcggtattacggcaaaatcgggcattatggttggtctgggtgaaactcctgctgaagtagaagagttaatggacgacctgatttccgtcggttgcaaaatcctcaccatcgggcaatatctgcagccaacccacaaacacttcccggttgcagcatacattactccggaacagtttgctgtttataaagaaacaggactgaagaaagggttcgaacaagtggaaagcgcaccattagtacgctcctcgtatcatgcagaaaaacatatccgatttaataataagtag

SEQ ID NO: 3038 - protein, 288 aa, Bacteroides fragilis
MGNDKRVRKPEWLKISIGANERYTETKRIVESHCLHTICSSGRCPNMGECWGKGTATFMIAGDICTRSCKFCNTQTGRPLPLDPDEPAHVAESIALMKLSHAVITSVDRDDLPDLGAAHWAQTIREIKRLNPETTTEVLIPDFQGRKELIDQVIKACPEIISHNMETVKRISPQVRSAANYHTSLEVIRQIAESGITAKSGIMVGLGETPAEVEELMDDLISVGCKILTIGQYLQPTHKHFPVAAYITPEQFAVYKETGLKKGFEQVESAPLVRSSYHAEKHIRFNNK

SEQ ID NO: 3039 - DNA, 912 bp, Bacillus halodurans
  CDS (1)..(912): transl_table=11
atggcgaagaaagaagagtatgtacgcaagccggattggctaaagataaagctcaatacgaatgagacgtatacaggcctgaaaaaaatgatgcgcgagaaaaatttacatacggtttgtgaagaagcgaaatgtccaaacattcatgagtgctgggctgtgcggaaaacggccacgtttatgattcttggggatgtatgcacgcgcgcgtgtcgattctgcgctgttaaaacagggcttccgaatgaacttgatctacaggaaccagagcgcgtagcagaatcggttgaaattatgggcttaaagcacgctgtcattaccgctgtggctcgtgatgatttgaaggatggtggagcaggtgtattcgcggaaaccgttcgcgcggttcgccgtcgtaatccattttgtacgattgaagtgcttccatcagatatgatggggaatgacgataacttaaaaacattaatggacgcaagaccgaacattttaaaccataacattgaaacggttcgccgtttgactccaagggttcgtgcaagagcaacctatgagcgctccttagaatttttacgtcgcgcaaaggaaatgcagcctgatattccgacaaagtcaagtcttatgattggccttggggaaacgaaggacgagattattgagacgatggatgacctccgtgcgaacaatgtggacattatgacaatcggtcaatatttacagccgacgaaaaagcatttgaaggtgcagaaatattaccatccagacgaatttgctgagttgaaggaaattgcgttaagcaaaggatttagtcattgtgaagcgggtccgctcgtacgctcttcttaccatgccgatgagcaagtgaatgaagcacaagtgcgtgaggaagcgcgcaaggcagcggcgaaatcataa

SEQ ID NO: 3040 - protein, 303 aa, Bacillus halodurans
MAKKEEYVRKPDWLKIKLNTNETYTGLKKMMREKNLHTVCEEAKCPNIHECWAVRKTATFMILGDVCTRACRFCAVKTGLPNELDLQEPERVAESVEIMGLKHAVITAVARDDLKDGGAGVFAETVRAVRRRNPFCTIEVLPSDMMGNDDNLKTLMDARPNILNHNIETVRRLTPRVRARATYERSLEFLRRAKEMQPDIPTKSSLMIGLGETKDEIIETMDDLRANNVDIMTIGQYLQPTKKHLKVQKYYHPDEFAELKEIALSKGFSHCEAGPLVRSSYHADEQVNEAQVREEARKAAAKS

SEQ ID NO: 3041 - DNA, 930 bp, Bacillus clausii
  CDS (1)..(930): transl_table=11
atgccagaaaaagatgaaaaagagcagcatatgcgcaaaccggactggctaaaaatcaagctaaatacaaacgagtcttatacaggcttgaaaaaaatgatgcgtgagaaaaaactacataccgtatgtgaagaagcacgctgcccgaacatccatgaatgttgggcggttcgaaaaacggctacttttatgatccttggcgatatttgtacacgaggttgccgtttttgtgcagtcaagacaggcttgccaacggagcttgacttgcaagagccagagcgcgtggcggaatccgtggagaccatggggttaaaacatgtcgttattactgctgttgcccgtgatgatttaaaagacggcggcgccgcagtgtttgccgaaacggtacgagccgtacgccggaaaaacccattttgcacaattgaagttttgccttctgacatgcttggcaatgaatcaagcttgcaaacattaatggatgcgcgcccgaatataatgaatcataatatcgaaaccgtaagaaggctgacgccaaaagttagagcacgagcaaaatatgaccgcacactcgagtttttgcggagagccaaagaaatgcatcctgatattccgactaaatcgagcctaatggtaggcctaggggaaacaaaggaagaaattttagaaacaatggatgatttgcgggctaataatgttgacattttgacaattggccaatatttacaacctacaaagaaacatttaaaagtcattaagtattaccatccagacgaatttgccgagttaaaggaaatcgctatgcaaaaaggctttagccattgcgaggcgggaccgcttgtccgttcgtcataccatgcagacgaacaagtgaaccaagcgcaagtgaacatggaagcaagaaaagcacaaggggagcaacagcgcgtataa

SEQ ID NO: 3042 - protein, 309 aa, Bacillus clausii
MPEKDEKEQHMRKPDWLKIKLNTNESYTGLKKMMREKKLHTVCEEARCPNIHECWAVRKTATFMILGDICTRGCRFCAVKTGLPTELDLQEPERVAESVETMGLKHVVITAVARDDLKDGGAAVFAETVRAVRRKNPFCTIEVLPSDMLGNESSLQTLMDARPNIMNHNIETVRRLTPKVRARAKYDRTLEFLRRAKEMHPDIPTKSSLMVGLGETKEEILETMDDLRANNVDILTIGQYLQPTKKHLKVIKYYHPDEFAELKEIAMQKGFSHCEAGPLVRSSYHADEQVNQAQVNMEARKAQGEQQRV

SEQ ID NO: 3043 - DNA, 897 bp, Bacillus subtilis
  CDS (1)..(897): transl_table=11
ttggcaaagaaagacgaacacctcagaaagcccgaatggcttaaaattaaattaaatacaaatgaaaactatacagggctcaaaaaactcatgcgggaaaacaacctgcataccgtatgcgaagaagcaaagtgtccgaatattcatgaatgctgggcggtcagacgtacagcgacatttatgattttaggttctgtttgtacaagagcatgccgtttctgtgctgtcaaaacaggccttccaactgagcttgatctgcaagagccggaacgcgtagcggattcagtcgcgcttatgaatttgaaacacgcggtcattacggctgttgcgcgtgacgatcagaaagatggcggggcaggcattttcgcggaaactgtccgtgcgatccgcagaaaaagcccgttcacaacaattgaggtgctgccgtctgatatgggcggaaactacgataacctaaaaaccttgatggatacacgcccagacatcctgaatcacaatatcgaaacggttcgccgcctgacgccaagagtccgcgcgcgtgcgacgtacgaccgttcattggaatttttgcgccgtgcgaaggaaatgcagcctgacattccgacaaaatcaagtatcatgatcggactcggcgaaacaaaagaagagattattgaagtaatggacgacctcttggcgaacaacgtggatattatggcaatcggccaatatctgcagccgacgaagaaacacttgaaagtccaaaaatactaccatcctgatgaatttgcagaattaaaagaaatcgcgatgcaaaaaggcttcagccattgtgaagccggtccgcttgtccgttcctcttaccatgcggatgaacaagtaaacgaagcatctaaaaagcgtcaagcacaagcataa

SEQ ID NO: 3044 - protein, 298 aa, Bacillus subtilis
MAKKDEHLRKPEWLKIKLNTNENYTGLKKLMRENNLHTVCEEAKCPNIHECWAVRRTATFMILGSVCTRACRFCAVKTGLPTELDLQEPERVADSVALMNLKHAVITAVARDDQKDGGAGIFAETVRAIRRKSPFTTIEVLPSDMGGNYDNLKTLMDTRPDILNHNIETVRRLTPRVRARATYDRSLEFLRRAKEMQPDIPTKSSIMIGLGETKEEIIEVMDDLLANNVDIMAIGQYLQPTKKHLKVQKYYHPDEFAELKEIAMQKGFSHCEAGPLVRSSYHADEQVNEASKKRQAQA

SEQ ID NO: 3045 - DNA, 849 bp, Bacteroides thetaiotaomicron
  CDS (1)..(849): transl_table=11
atggctgacagagtgcgcaagcctgaatggctgaaaataaatatcggtgccaacgaccgttacaccgaaactaaaagaattgtcgactcccactgcctgcatacgatatgcagcagtgggcgttgtcccaacatgggagaatgctggggaaaaggaactgccacatttatgatcggcggtgacatctgtacccgcagctgcaaattctgcaacacacaaaccggacgcccgcatccactggatgccaacgaaccgacacacgtagcggagtctatcgctcttatgaaactagatcatgcggtagttacctcggtagaccgtgacgaccttcccgatctgggagccggacattgggcacataccattcgtgagatcaaacgactgaatccgcagaccacaatcgaagtactgatacccgattttcagggtagaatggaactggtagacctagtgatagaagccaatcccgacatcatttcccataatatggagacggtaagacgcatcagtcccctggttcgcagtgcggccaactatgataccagcctgcaagtgatcggtcacatcgcccgaagcggaacaaaatcaaaaagcggtattatggtggggttgggagaaactccacaggaagtggaaaccattatggacgacctgctggcagtcggctgccagattcttacgataggacaatatttgcagcctacgcaccgtcattatccggttgccgagtatgtgacgccacagcaattcgccacatacaaaaccatcggtttggagaaaggattcagcattgtagagagtgctcctctcgttcgttcgtcttatcatgcagagaaacacattcgatag

SEQ ID NO: 3046 - protein, 282 aa, Bacteroides thetaiotaomicron
MADRVRKPEWLKINIGANDRYTETKRIVDSHCLHTICSSGRCPNMGECWGKGTATFMIGGDICTRSCKFCNTQTGRPHPLDANEPTHVAESIALMKLDHAVVTSVDRDDLPDLGAGHWAHTIREIKRLNPQTTIEVLIPDFQGRMELVDLVIEANPDIISHNMETVRRISPLVRSAANYDTSLQVIGHIARSGTKSKSGIMVGLGETPQEVETIMDDLLAVGCQILTIGQYLQPTHRHYPVAEYVTPQQFATYKTIGLEKGFSIVESAPLVRSSYHAEKHIR

SEQ ID NO: 3047 - DNA, 963 bp, Bartonella henselae
  CDS (1)..(963): transl_table=11
atggttacggttgttgatagagttacagatagacgtttgcgtcaccctgaaaaggcacatcgtcctgatacaagtgttcaaaaaaaaccggattggattcgtgtaaaagcgccaacatcacaggtctataaggaaacgcatggtattgtacgtgctcataaattagtaaccgtatgtgaagaagcgggttgcccaaatattggtgaatgttggagccagcgtcatgccagttttatgattttgggtgaaatatgtacgcgggcatgtgcattttgcaacgttgcaacaggtataccatttgccgttgatgagaacgagccagaacgtgtggcagatgctgttgcacggatggaattaaaacatgttgtcattacatcagttgatcgtgatgatcttgctgatggtggtgctgagcattttgcgaaagtgatttatgcgattcgtcgaaaagctcctaaaacaacaattgaagttctcacacctgattttcgccataaggatggagctttagaaattgttgttgctgctaaacctgatgtttttaatcataatttagaaacggttccttctaaatatttaaaggttcgtccaggggcacgttattttcattcgattcggttattacaacgtgttaaagaactggatccgacaatctttacaaaatcaggaattatggttggtcttggagaagaacgaaatgaaattctccaattgatggatgatttacgctctgcagatgttgactttatgacaattgggcaatatttgcagcctacgcgaaagcatcatccagttattcgttttgtgcctcccgaagagtttgagtcttttgccaaaattggtaaagtgaaaggttttttacatatggcttccaatcctctgacgcgttcatctcatcatgcgggtgatgattttgcaattttgcaaaaagcgcgtgatgaaaaatttgctttacagagatag

SEQ ID NO: 3048 - protein, 320 aa, Bartonella henselae
MVTVVDRVTDRRLRHPEKAHRPDTSVQKKPDWIRVKAPTSQVYKETHGIVRAHKLVTVCEEAGCPNIGECWSQRHASFMILGEICTRACAFCNVATGIPFAVDENEPERVADAVARMELKHVVITSVDRDDLADGGAEHFAKVIYAIRRKAPKTTIEVLTPDFRHKDGALEIVVAAKPDVFNHNLETVPSKYLKVRPGARYFHSIRLLQRVKELDPTIFTKSGIMVGLGEERNEILQLMDDLRSADVDFMTIGQYLQPTRKHHPVIRFVPPEEFESFAKIGKVKGFLHMASNPLTRSSHHAGDDFAILQKARDEKFALQR

SEQ ID NO: 3049 - DNA, 963 bp, Bartonella quintana
  CDS (1)..(963): transl_table=11
atggttacggttgttgatagagttacgagtagacgtttgcgtcatcctgaaaagatgcatcgtccggatacaagcattcagaaaaaaccagattggattcgtgtgaaagcgccaacatcaaagatatataaggagacgtatgatattgtacgcgctcataaattagtgacggtatgtgaagaagcgggttgtccaaatgttggcgaatgttggagccagcggcatgccagttttatgattttgggtgaaatatgtacacgggcttgtgctttttgcaacgttgcaacaggtattccgcttgcagtcgatgataatgagccagaacgtgtggcggatgctgttgcacagatggaattaaaacatgttgtgattacatctgttgatcgtgatgaccttgctgatggtggtgcacaacattttgcaaaagttatttatgctattcgtcgaaaagctcccaagacaacaattgaagtcctcacacctgattttcgccataaggatggagctttagaaattgttgttgctgctaagcctgatgtctttaatcataatttggaaacagttccatctaaatatttaaaagttcgtccaggggcgcgttattttcattcgattcggctcttacaacgtgttaaggaacttgatccgacgatcttcacaaaatcaggaattatggttggacttggggaagaacgaaatgaaattcttcagttgatggatgatttacgctctgctgatgttgactttatgacaattgggcaatatttgcaacctacacgaaaacatcatccggttattcgtttttttcctcctgaagagtttgagtcttttgccaagattggtaaagtaaagggttttttgcatatggcttccaatcctctaacgcgttcatctcatcatgcaggggatgatttcgcaattttgcaaaaagcacgtgatgaaaaatttgctttacagagataa

SEQ ID NO: 3050 - protein, 320 aa, Bartonella quintana
MVTVVDRVTSRRLRHPEKMHRPDTSIQKKPDWIRVKAPTSKIYKETYDIVRAHKLVTVCEEAGCPNVGECWSQRHASFMILGEICTRACAFCNVATGIPLAVDDNEPERVADAVAQMELKHVVITSVDRDDLADGGAQHFAKVIYAIRRKAPKTTIEVLTPDFRHKDGALEIVVAAKPDVFNHNLETVPSKYLKVRPGARYFHSIRLLQRVKELDPTIFTKSGIMVGLGEERNEILQLMDDLRSADVDFMTIGQYLQPTRKHHPVIRFFPPEEFESFAKIGKVKGFLHMASNPLTRSSHHAGDDFAILQKARDEKFALQR

SEQ ID NO: 3051 - DNA, 1002 bp, Bordetella bronchiseptica
  CDS (1)..(1002): transl_table=11
atgtccacgctcgtcgagtcccccgttccctcgaacgactcgcaggccgccgcgccggccgcctacgatcccacccagaagcagaaatcgcaggccaagaccgcgcgcattccgatcaaggtggtcgcggccgagaagctgaagaagccggaatggatccgcgtgcgcgccgccgccccggggtcgcgcttctacgacatcaagcgcatcctgcgcgagcacaacctgcatacggtgtgcgaagaggcatcctgcccgaacatcggcgaatgcttcggcaagggcacggccaccttcatgatcatgggcgacaagtgcacgcgccgttgcccgttctgtgatgtgggccacggccgtcccgatccgctggacacgcaagagcccgaaaacctggcgcgcaccatcgccgcgctcaagctgtcctacgtggtcatcacctcggtcgaccgcgacgacctgcgcgacggtggcgccgcccacttcgtcgaatgcatcgccaaggtgcgcgagtattcgcccgatacccgcatcgaagtgctggtgcccgacttccgcggccgcctggaccgtgcgctgcacatcctcaacagcggcccgccggacgtcatgaaccacaacctggaaaccgtgccgcgcctgtacaagcaggcacgcccgggctcggactacgcgcattcgctcaagctgctggccgagttcaagaagctgcaccccgaggtgcccaccaagtcgggcctgatgctgggcctgggcgagacggacgaggaaatcctgcaggtcatgcgggacatgcgcgagcacaacgtcgacatgctgaccatcggccagtatctccagccgtcggagcaccatctgccggtgctgcgctacgtgcatccggacaccttcgcgatgttcgagcgcgaggcctacgccatgggctttacgcatgcggccgtgggcgccatggtgcgctcgtcgtaccacgccgaccagcaggcgcacgccgccggcgtcaactga

SEQ ID NO: 3052 - protein, 333 aa, Bordetella bronchiseptica
MSTLVESPVPSNDSQAAAPAAYDPTQKQKSQAKTARIPIKVVAAEKLKKPEWIRVRAAAPGSRFYDIKRILREHNLHTVCEEASCPNIGECFGKGTATFMIMGDKCTRRCPFCDVGHGRPDPLDTQEPENLARTIAALKLSYVVITSVDRDDLRDGGAAHFVECIAKVREYSPDTRIEVLVPDFRGRLDRALHILNSGPPDVMNHNLETVPRLYKQARPGSDYAHSLKLLAEFKKLHPEVPTKSGLMLGLGETDEEILQVMRDMREHNVDMLTIGQYLQPSEHHLPVLRYVHPDTFAMFEREAYAMGFTHAAVGAMVRSSYHADQQAHAAGVN

SEQ ID NO: 3053 - DNA, 960 bp, Bradyrhizobium sp
  CDS (1)..(960): transl_table=11
atggtcaccatcgtcgacatcaacgcgaacacgccgctgcgcccccgccaccccgaaaaggtgaaccggccggactcggtgtcgccggccaagcccgcctggatccgcgtcaaggcgccgaccacccgcggctatgccgacacccgcaacatcgtccgcgagaacggcctcgtcaccgtgtgcgaggaggccggctgcccgaacatcggcgagtgctgggacaagaagcacgccaccttcatgatcatgggcgacacctgcacccgggcctgcgccttctgcaacgtcaagaccggcatgcccgccgcgctcgacgccggcgagccggagcacgtggcggaggcgaccttcaagctcggcctcgcccatgtcgtcgtcacatcggtcgaccgcgacgatcttgccgacgggggcgccgcgcacatcgcagaaaccatccgcgcgatccgcgcgaagtgcccgaccaccacgatcgaggtcctcacgccagatttcctgcgcaaggacggcgcgctggagcagatcgtcgcggccaagcccgatgtcttcaaccacaatctcgagaccgtgccgtcgcgctatctctcggtccgacccggcgcgcgctacttccactcgatccggctgctgcagcgggtcaaggagatcgacccgaccatcttcacgaagtccggcatcatggtcggcctcggcgagcagcgccacgaggtgttgcaggtgatggatgacatgcgctcggccgaggtcgactttctcacgatcgggcagtatctgcagcccaccaagaagcaccacgccgtgatgaactacgtcactccggaggagttctccaactacgagaccgtcgcctacaccaagggcttcctgatggtgtcggcgagcccgctcacgcgctcctcgcaccatgccggcgaggacttcgccaagctgaaggccgcgcgcgacgcgctcgcgcgctga

SEQ ID NO: 3054 - protein, 319 aa, Bradyrhizobium sp
MVTIVDINANTPLRPRHPEKVNRPDSVSPAKPAWIRVKAPTTRGYADTRNIVRENGLVTVCEEAGCPNIGECWDKKHATFMIMGDTCTRACAFCNVKTGMPAALDAGEPEHVAEATFKLGLAHVVVTSVDRDDLADGGAAHIAETIRAIRAKCPTTTIEVLTPDFLRKDGALEQIVAAKPDVFNHNLETVPSRYLSVRPGARYFHSIRLLQRVKEIDPTIFTKSGIMVGLGEQRHEVLQVMDDMRSAEVDFLTIGQYLQPTKKHHAVMNYVTPEEFSNYETVAYTKGFLMVSASPLTRSSHHAGEDFAKLKAARDALAR

SEQ ID NO: 3055 - DNA, 960 bp, Buchnera aphidicola subsp
  CDS (1)..(960): transl_table=11
atgaataaaaaaaaagattctttgttcaaaacaataaaaaaaaataacataataaatgttattactactgaaagtttttctaaaaaaataataaaacttaataaacctgattggataaaaattaaaatacctgtcgatacgtttcgtattcgtgaaataaaaagtgctttacgtaaaaacaatttacattctgtttgtgaagaagctaattgtccaaatctaccagaatgttttaatcgcggaactgcaacgtttatgattcttggatcaagatgtactcgtaattgtccattttgtgctgtatctcatggcaaacctaattctctaaatgtcgaagaaccaaataatttagcaaaaactatatttgatatgggtattgattatgtagtaatcacttcagttgtaagagatgatttgtatgacggaggagcgcaacattttgttaattgtattaaatcaattagaaaaaaaaataaagttaaaattgaaatattagttcctgactttaggggaagagtagaattaattttaaaaatttttaattcaggattgcctgatgtgtttaatcataatgtagaaaatgttcctcgtctttataaaaaagtacgtcctggagctgattataaaaaatcgttgtttctattagaatcctttaaaaaaaaatattctaatattcctacaaaatcaggtttaatgttaggtttaggagaaaaagatacagaaataattcaagtaatgaaagatctgtattcaaatggtgttacattgttaacagtaggacagtatctgcaacctagtattaatcacattccagtacaacgttatataccactttcagaattcaaaaatataaaaaaagaagcattatctatcggttttactaatgcattctgcggaccttttgtacgttcatcgtatcatgctagttttcaagcaaataaattgattaaaaaaatttaa

SEQ ID NO: 3056 - protein, 319 aa, Buchnera aphidicola subsp
MNKKKDSLFKTIKKNNIINVITTESFSKKIIKLNKPDWIKIKIPVDTFRIREIKSALRKNNLHSVCEEANCPNLPECFNRGTATFMILGSRCTRNCPFCAVSHGKPNSLNVEEPNNLAKTIFDMGIDYVVITSVVRDDLYDGGAQHFVNCIKSIRKKNKVKIEILVPDFRGRVELILKIFNSGLPDVFNHNVENVPRLYKKVRPGADYKKSLFLLESFKKKYSNIPTKSGLMLGLGEKDTEIIQVMKDLYSNGVTLLTVGQYLQPSINHIPVQRYIPLSEFKNIKKEALSIGFTNAFCGPFVRSSYHASFQANKLIKKI

SEQ ID NO: 3057 - DNA, 945 bp, Buchnera aphidicola subsp
  CDS (1)..(945): transl_table=11
atgcgtactaaaaattcaaaaattattaattctgaacaagatatatttcgcaacaaagttattccaataaaatttttatctaattataataatgaaatactaaaaaaacctcagtggatgaaaattaaatttcctgttagcaccaataaaataaaaaatttaactctaatattaagacagcataatttaaatactgtttgcgaacaggcattatgtcctaatttagccgaatgttttaatcgaggaacagctacatttatgattttaggttctatttgtacgagacgttgtccattttgcgctgtaagtcatggaaaaccatcgttagttaataaaaacgaaccacagcaattagcacgggtaatatttgatatgaaaattaattatgtagttattacttctgtggtaagagacgatttgaaagatcgaggagcacaacatttttctaattgtatacaggaaattagaaataaaaataatgttaaaattgaaatattagtaccagattttagaggaatgatgcgtgaatcatgcaaaattattagtatgaatccacctaatgtgtttaatcataatttggaaaatgtcccaaggttatataaattaataagaccaggggctagctatataagatccttgaaattattagagttttttaaaaaattgaatccaaatgttccaactaaatctggtttaatcttaggtttaggggaaacatataaagaaatagttcatgttataaatgatttattagatcatggtgtaaccattttaaccataggacaatatcttcaacctagctctaaacattttcccgtacaaaaatatattactcctgatgaatttaaaaaaattaaaaattatgcgttatccattggttttaaaaaagttttttgtgggccactaatacgatcttcttatcatgctgagaaatattttgaataa

SEQ ID NO: 3058 - protein, 314 aa, Buchnera aphidicola subsp
MRTKNSKIINSEQDIFRNKVIPIKFLSNYNNEILKKPQWMKIKFPVSTNKIKNLTLILRQHNLNTVCEQALCPNLAECFNRGTATFMILGSICTRRCPFCAVSHGKPSLVNKNEPQQLARVIFDMKINYVVITSVVRDDLKDRGAQHFSNCIQEIRNKNNVKIEILVPDFRGMMRESCKIISMNPPNVFNHNLENVPRLYKLIRPGASYIRSLKLLEFFKKLNPNVPTKSGLILGLGETYKEIVHVINDLLDHGVTILTIGQYLQPSSKHFPVQKYITPDEFKKIKNYALSIGFKKVFCGPLIRSSYHAEKYFE

SEQ ID NO: 3059 - DNA, 990 bp, Burkholderia thailandensis
  CDS (1)..(990): transl_table=11
atgactgaccttaccgctacccccgcacccgccgaaccggccgcgtccgcctacgatccgaccgccaagcagaaggcgcaggcgaagaccgcgcgcattccgatcaagatcgtcccgatcgagaagctgaagaagcccgaatggattcgcgtgaaggcggccaccggcagctcgcgcttcaacgagatcaagacgatcctgcgcgagcacaatctgcacacggtgtgcgaggaggcgagctgtccgaacatcggcgagtgcttcggcaagggcaccgcgacgttcatgatcatgggcgacaagtgcacgcgccgctgcccgttctgcgacgtcggccacggccgtcccgatccgctcgacgccgacgagccgaagaacctcgcgcgcacgatcgcggcgctcaagctcaagtacgtggtgatcacgagcgtcgaccgcgacgacttgcgcgacggcggcgccggacacttcgtcgagtgcatccgcgaagtgcgcgagcagtcgccggcgacgcgcatcgagatcctgacgccggacttccgcggccgcctcgaccgcgcgctcgagatcctgaacgccgcgccgcccgacgtgatgaaccacaacctcgaaacggtgccgcgcctgtacaaggaggcgcgccccggctcggactacgcgcattcgctgaagctgctgaaggacttcaaggcgctgcatccggacgtcgcgacgaagtcgggcctgatggtcggcctcggcgagacgaccgacgaaatcctgcaggtgatgcgcgacctgcgcgcgcacgatgtcgacatgctgacgatcggccaatacctgcagccgtccgagcaccatttgccggtgcgcgaatacgtgcatccggatacgttcaagatgtacgaggaagaggcgtacaagatgggcttcacgcacgcggccgtcggcgcgatggtgcgttcgagctatcacgccgatctgcaggcgcacggcgccggggtggtctga

SEQ ID NO: 3060 - protein, 329 aa, Burkholderia thailandensis
MTDLTATPAPAEPAASAYDPTAKQKAQAKTARIPIKIVPIEKLKKPEWIRVKAATGSSRFNEIKTILREHNLHTVCEEASCPNIGECFGKGTATFMIMGDKCTRRCPFCDVGHGRPDPLDADEPKNLARTIAALKLKYVVITSVDRDDLRDGGAGHFVECIREVREQSPATRIEILTPDFRGRLDRALEILNAAPPDVMNHNLETVPRLYKEARPGSDYAHSLKLLKDFKALHPDVATKSGLMVGLGETTDEILQVMRDLRAHDVDMLTIGQYLQPSEHHLPVREYVHPDTFKMYEEEAYKMGFTHAAVGAMVRSSYHADLQAHGAGVV

SEQ ID NO: 3061 - DNA, 978 bp, Caulobacter crescentus
  CDS (1)..(978): transl_table=11
atggccacggtgatcgacaccctgaaggctcgcggctcggaagaccgggcggcgcgccatcctgaaaagcagaaccgaccggacacgccggtgcttcgcaagcctgaatggctgcgtgtgcgcgcgcccggctcggggcagtacaacgagaccaagggcatcgtgcgcgagcacaagctgcacacggtctgcgaagaggcggcctgcccgaacatcggcgagtgctggagccagaagcacgcgaccatgatgatcatgggcgagatctgcacccgcgcctgcgccttctgcaatgtgaccacgggcctgccgacgcaactggatcccgacgagccgcgccgcgtggccgaggctgtcgccaagatgggcctcaaacacgtggtcatcacctcggtggaccgcgacgaccttctggacggcggcgcgcgccatttcgccgaggtggtcacgtccatccgggccgccgccccgggcacgacgatcgagatcctgaccccggatttcctccgcaaggacggcgccgagaacgtcgtcatcgactccaagccggacgtcttcaaccacaatctcgaaaccgtgccgcggctctacctgaagatccgtcccggcgcgcgctactacaactcgctgcgcctgctcgaccgcgtcaagcagcgtgacccttcgcagttcaccaagtcgggcctgatggtcggtctgggtgaaaccaaggaagaggtcatgcaggtgatggacgacatgcgctcggcgggcgtcgatttcatcaccatcggccagtacctgcagccgacgcgcaagcacgcggcgatcgaccgtttcgtgacgcctgaagagttcaaggcctacgaggcgatcgcgcgggctaagggcttcctgatggtgtcgtccagtccgctgacccgctcgtcgcaccacgccggcgaggatttcgccaagttgcaggccgcgcggcgcgccctcgacgctcgtaccgcctaa

SEQ ID NO: 3062 - protein, 325 aa, Caulobacter crescentus
MATVIDTLKARGSEDRAARHPEKQNRPDTPVLRKPEWLRVRAPGSGQYNETKGIVREHKLHTVCEEAACPNIGECWSQKHATMMIMGEICTRACAFCNVTTGLPTQLDPDEPRRVAEAVAKMGLKHVVITSVDRDDLLDGGARHFAEVVTSIRAAAPGTTIEILTPDFLRKDGAENVVIDSKPDVFNHNLETVPRLYLKIRPGARYYNSLRLLDRVKQRDPSQFTKSGLMVGLGETKEEVMQVMDDMRSAGVDFITIGQYLQPTRKHAAIDRFVTPEEFKAYEAIARAKGFLMVSSSPLTRSSHHAGEDFAKLQAARRALDARTA

SEQ ID NO: 3063 - DNA, 933 bp, Chlamydophila abortus
  CDS (1)..(933): transl_table=11
atgaatgacactcctaatgacatacaaaaacccaaacaagggaaacgtttttcagaacgtctccctcactggctaaggcaagctttacccaaaggctcagtctttgactttaccgacaaaactataaaacgtactggcatggctacagtatgtgaggaagcgctctgccctaatcgtacgcgctgttggtcaagaaagacagcaacatacttagctttaggagatgcctgctctcgacgttgtggattttgtaacattgatttcacaaaaaaacccctacctccagatcctgatgaaccaagaaaaatagcagaatccgcaaagatccttcagcttaagcatatcgtattaactatggtcgctcgcgacgacttagaagatggaggggcgagttgtttggtacgtattatcgatactcttcacaaagagctccccgaatctactgtagaaatgcttgcttccgactttcaaggaaatgtcgatgccttgcataccctgctagattcaggattaaccatttataatcacaacgtggaaacagttgaacgtctcacccctgtagttcgacataaagccacataccggcgttctttatttatgttggagcaagccgcgttatacctccccgatcttaaaatcaaatccggcatcatggtggggttaggagaacaagaaagcgaggtaaaacaaacactcaaagatcttgcagatcatggtgtacgtattgtcacaataggacagtatttacgtccttcacgattgcacatacctgtaaagagctacgttactcctgagacttttgattactaccggagagtaggagaatccttaggcctctttgtttatgcagggcctttcgtaagatccagcttcaacgcagatattgttttacaagatatggaaaataaacaatctaaaatggcaaaaacgtag

SEQ ID NO: 3064 - protein, 310 aa, Chlamydophila abortus
MNDTPNDIQKPKQGKRFSERLPHWLRQALPKGSVFDFTDKTIKRTGMATVCEEALCPNRTRCWSRKTATYLALGDACSRRCGFCNIDFTKKPLPPDPDEPRKIAESAKILQLKHIVLTMVARDDLEDGGASCLVRIIDTLHKELPESTVEMLASDFQGNVDALHTLLDSGLTIYNHNVETVERLTPVVRHKATYRRSLFMLEQAALYLPDLKIKSGIMVGLGEQESEVKQTLKDLADHGVRIVTIGQYLRPSRLHIPVKSYVTPETFDYYRRVGESLGLFVYAGPFVRSSFNADIVLQDMENKQSKMAKT

SEQ ID NO: 3065 - DNA, 939 bp, Chlamydophila caviae
  CDS (1)..(939): transl_table=11
atgaatacaccttccgatgaaacacgaaaacctccacaaggtaaacgtttcgccgagcgtcttcccaaatggctaaggcaagttttacctactggtccagtctttgcccaaacagatacaacgataaagcgcacgggaatggccacggtatgcgaagaagctctatgtcccaatcgggcatgttgctggtcaagaaagacagcaacctatctagctttaggagatgcgtgcacaagacgttgtggtttctgtaacattgacttcacgaaaaagcctatctcccctgatcctgaagaacctcaaaaaattgcagaatcagcaaaaattcttcagcttaagcatattgttttaaccatggtagcccgtgatgatctagaagatggcggtgcaagttttctcgtgcgtattattgatactctacatcaagagcttccagaatctactgtcgaggtattagcttcagactttcaaggaaacattgatgctttacacacactattggattcaggattaaccatttataatcataatgtggaaacggttgaacgtctcacacctgtagtacgtcataaagcaacatatcgtcgttctttatttatgttagagcaagcggctatgtatctccctgatcttaagattaaatcaggaattatggtgggtcttggagagcaggaaagcgaggtaaaacaaacgctaaaagatcttgcagatcacggagtgaaaatcgtcaccataggacagtatttacgtccttcccgatcacatataccagtaaaaagctacgttactcccgagacttttgattactaccgtacaataggaacgtctttagggctttttgtctatgcaggaccttttgttcgttctagtttcaatgcagatatcgtcttgcataatctggagaacaaacaatctgatgtagcaaaaatgcagaattag

SEQ ID NO: 3066 - protein, 312 aa, Chlamydophila caviae
MNTPSDETRKPPQGKRFAERLPKWLRQVLPTGPVFAQTDTTIKRTGMATVCEEALCPNRACCWSRKTATYLALGDACTRRCGFCNIDFTKKPISPDPEEPQKIAESAKILQLKHIVLTMVARDDLEDGGASFLVRIIDTLHQELPESTVEVLASDFQGNIDALHTLLDSGLTIYNHNVETVERLTPVVRHKATYRRSLFMLEQAAMYLPDLKIKSGIMVGLGEQESEVKQTLKDLADHGVKIVTIGQYLRPSRSHIPVKSYVTPETFDYYRTIGTSLGLFVYAGPFVRSSFNADIVLHNLENKQSDVAKMQN

SEQ ID NO: 3067 - DNA, 927 bp, Chlamydia muridarum
  CDS (1)..(927): transl_table=11
atgagtaattccccagaatcctcaactcccaagcagtccatcccagcacgattccccaaatggttgcgacaaaaacttcctctagggaaagtattttctcgaactgatggcactataaaaaataaggggctccccactgtttgtgaagaagcctcttgtcccaatcgcacgcattgttggtccagacataccgctacataccttgcattgggtgatgcatgtacacgtcgctgtggcttttgtgatattgatttcactaaaaaacctcttcccccagatcctcaagaaggagagaaaatcgctgcttccgcaaaagcattgggcctaaaacatatcgtgatcaccatggtttctcgcgatgatttggaggatggcggagcagatgctctagctcgtatcattacaaccttacatatagaacttccagaagctactattgaagttctagcctctgattttgaagggaacattgatgctttacaccatctacttgatgcacgtattgccatctataaccataatgtagaaactgtagaacgactatctccccttgttcgtcataaagcaacctaccgacggtctctgatgatgttagagcaggctgcacaatacctcccagaccttatgattaagtctggtataatggtaggattaggagaacaggaaagcgaaatcaagcaaacgttaaaagatcttgcagatcatggcgttaagatagttactataggacaataccttcgtccttcgcgaagacatattcctgtgaaaagctatgtttctccagaaacatttgattattatcgatccgtaggggaggctttgggtcttttcatttatgcaggacctttcgttcgttctagctttaatgcagatgctgtttttgaagctatgagtcaacgagagcgcctgtccgcttctatacaatag

SEQ ID NO: 3068 - protein, 308 aa, Chlamydia muridarum
MSNSPESSTPKQSIPARFPKWLRQKLPLGKVFSRTDGTIKNKGLPTVCEEASCPNRTHCWSRHTATYLALGDACTRRCGFCDIDFTKKPLPPDPQEGEKIAASAKALGLKHIVITMVSRDDLEDGGADALARIITTLHIELPEATIEVLASDFEGNIDALHHLLDARIAIYNHNVETVERLSPLVRHKATYRRSLMMLEQAAQYLPDLMIKSGIMVGLGEQESEIKQTLKDLADHGVKIVTIGQYLRPSRRHIPVKSYVSPETFDYYRSVGEALGLFIYAGPFVRSSFNADAVFEAMSQRERLSASIQ

SEQ ID NO: 3069 - DNA, 924 bp, Chlamydia pneumoniae
  CDS (1)..(924): transl_table=11
atgaaatgtagaccaactttaaatacagaccaacctagagtgcggaaaaagcttcccgagcgtttccccaagtggttacagaggcccttaccacaaggttctgcatttcatgctacggacgctacaataaaacgctcaggaatgccaacggtatgcgaagaagctctctgccccaatcgagcagaatgttggtctcgtaaaactgccacctaccttgctctcggcgatgtctgtacaagaagttgcggtttttgcaatattgggcattctaaaaccccacccgcgctagatcctacagaacccgagcgcattgctttgtcagcgaaagaactggggttgaagcatgtggtaatcaccatggtggctcgcgatgaccttgaggatggtggtgcacaaggtttagtcgatatcattcaaaagttacgtgaagaactccctcaagcgactacagaagttttagcttctgatttccaagggaatgtttctgctctccacaccctgttagattctggcattactatttataatcataatgtcgaaactgtagcgaggctctcgcctctagtacggcacaaagcaacctatgcccgatctatgttcatgttagaacaagctgccaactacctccccgatcttaaaatcaaatccgggatcatggtaggattaggtgagatggaaggagaagtcaaacaaactctccaagatctggcttccataggagttcgtattgtcactataggtcaatacttacgtccttctcgtaagcatctccaagtcaaaagttatgtgactcccgagacttttgattactatcgtcgagtcggagaagctatgggtctttttgtttacgcaggaccttttgtacgctcgagttttaatgccgatatgatcctagcttctgtacaagacaaagcgtcagcttaa

SEQ ID NO: 3070 - protein, 307 aa, Chlamydia pneumoniae
MKCRPTLNTDQPRVRKKLPERFPKWLQRPLPQGSAFHATDATIKRSGMPTVCEEALCPNRAECWSRKTATYLALGDVCTRSCGFCNIGHSKTPPALDPTEPERIALSAKELGLKHVVITMVARDDLEDGGAQGLVDIIQKLREELPQATTEVLASDFQGNVSALHTLLDSGITIYNHNVETVARLSPLVRHKATYARSMFMLEQAANYLPDLKIKSGIMVGLGEMEGEVKQTLQDLASIGVRIVTIGQYLRPSRKHLQVKSYVTPETFDYYRRVGEAMGLFVYAGPFVRSSFNADMILASVQDKASA

SEQ ID NO: 3071 - DNA, 873 bp, Chlorobium tepidum
  CDS (1)..(873): transl_table=11
atgaactctggtcccggaaagaaacccgactggctcaagatcaagctcgcttcgggctcgtcgtttgcttcgacgcgcaagctgctgaaccggcacagcctccacacggtgtgccgctcggcgatgtgcccgaacctgcacgagtgctggtcgaaaggcacggccaccttcctcttgctcggcaacgtctgcacccgctcctgccgtttttgcgcggtcggaacggaatgccggccggctatgcccgatccggaggagccgtcgaagatcgccgaggcggtgaaaacgatgaagctccgccacgccgtgctaaccagcgtcaaccgtgacgatctcgccgatggcggtgcaacgcactgggttgaaaccatccgcgcgattcgcgaagtgaaccccggcgtgagtctcgaatgtctcattcccgacttcagcggcaatgaacagtcgctcgatttggtgatgcaggagctcccggaggtgctgaatcacaacatcgaaaccgtgccgtcacgctacgccgccgtgcgcccgcaagccttgtacgaacgctcgcttgcggtgatcgagcgggcgaagcgccagttccggctcgccaccaagtccggcatgatggtcggcatgggtgaaacggaggaggagctcgaagcgtcgctgcacgacctgcgaggtcacggctgtgacatggtgactatcggccagtacctgcaaccaaccgccgcgcatctgccggtgagccgctacgtgacgcccgaagagttcgagcgctaccgcgaaatcgcgctcgacgccggattccggcacgttcagtcgggccccttcgtgcgcagttcgtaccacgccgaggcattcgagccagttgaaaaaatttcctga

SEQ ID NO: 3072 - protein, 290 aa, Chlorobium tepidum
MNSGPGKKPDWLKIKLASGSSFASTRKLLNRHSLHTVCRSAMCPNLHECWSKGTATFLLLGNVCTRSCRFCAVGTECRPAMPDPEEPSKIAEAVKTMKLRHAVLTSVNRDDLADGGATHWVETIRAIREVNPGVSLECLIPDFSGNEQSLDLVMQELPEVLNHNIETVPSRYAAVRPQALYERSLAVIERAKRQFRLATKSGMMVGMGETEEELEASLHDLRGHGCDMVTIGQYLQPTAAHLPVSRYVTPEEFERYREIALDAGFRHVQSGPFVRSSYHAEAFEPVEKIS

SEQ ID NO: 3073 - DNA, 936 bp, Chlamydia trachomatis
  CDS (1)..(936): transl_table=11
atgaccgattcagaatctcctattcctaaaaaatctatacccgccagattccctaagtggctacgccagaaactccctttagggcgggtatttgctcaaactgataatactatcaaaaataaagggcttcctacagtctgtgaggaagcctcttgtccgaatcgcacccattgttggtctagacatacagctacctatctagccttaggtgatgcctgtacacgtcgctgcggcttttgtgatattgacttcactagaaatcccttacccccagatcctgaagaaggagctaaaattgctgagtccgcaaaagctttgggactcaagcacattgtcatcactatggtttcccgtgatgatttagaggatggaggagccagcgctcttgtccacattattgaaacgttgcacacagaattaccaacagcaactattgaagtcctagcctctgattttgaaggtaacattgctgccttacatcacttactggatgcgcacattgctatctataatcataatgtagaaacagtagaacgactcactccatttgtccgtcataaagctacctaccgaagatcgcttatgatgttggagaatgcagccaaatacctccctaacctgatgactaaatcaggtatcatggtaggattaggagagcaagaaagcgaggtcaagcaaaccttaaaagatcttgctgatcatggcgttaagatcgtaactataggccagtatcttcgtccttcacgcagacatattcctgtgaaaagctatgtgtctcccgagactttcgattattatcgctcggtaggagagtcgttaggactctttatttatgctggcccattcgttcgttctagctttaatgcggattctgtttttgaagccatgcgccagcgggaaacctcaacctctgcgctacttccgaataaagattag

SEQ ID NO: 3074 - protein, 311 aa, Chlamydia trachomatis
MTDSESPIPKKSIPARFPKWLRQKLPLGRVFAQTDNTIKNKGLPTVCEEASCPNRTHCWSRHTATYLALGDACTRRCGFCDIDFTRNPLPPDPEEGAKIAESAKALGLKHIVITMVSRDDLEDGGASALVHIIETLHTELPTATIEVLASDFEGNIAALHHLLDAHIAIYNHNVETVERLTPFVRHKATYRRSLMMLENAAKYLPNLMTKSGIMVGLGEQESEVKQTLKDLADHGVKIVTIGQYLRPSRRHIPVKSYVSPETFDYYRSVGESLGLFIYAGPFVRSSFNADSVFEAMRQRETSTSALLPNKD

SEQ ID NO: 3075 - DNA, 948 bp, Chromobacterium violaceum
  CDS (1)..(948): transl_table=11
atgaagccggacaaccaggccggggtgaagcacaagggcgcggccaagaccgcccgcatcccgatcaagatcgtgccgctggacgaaaagctgaaaaagccggagtggatccgcgccaagctgcccaatggccagcgtttccacgagatcaagcagatcctgcgcgagcagaagctgcacacggtctgcgaagaggccacctgcccgaacatcggcgagtgcttcagcaagggcaccgccacctttatgatcatgggcgacatctgcacccgccgctgcccgttctgcgacgtcggccacggccgtcccaatccgctggacgagaacgagccgagacacctggccgagagcgtggccgcgatgcgcctgaagtacgtggtggtcacctcggtggaccgcgacgacctgcgcgacggcggcgcccaacacttcgcagactgcatcaacgccgtgcgcgaaatgtcgccggcgacccagatcgagaccctggtgcccgacttccgcggccggctggacatcgccgtcgacatcctgacccagacgccgccggacgtgatgaaccacaacctggaaaccgtgccgcgcctgtacaagcaggcgcgcccgggcgccgactacgcgcactcgctgcagctcctcaaggactacaaggcgaagaatccgaacgtgcgcaccaagtccggcctgatggtgggcttgggcgagaccgacgaggaaatcctggaagtgatgcgcgacctgcgcgcgcacaacgtggacatgctgaccataggccagtacctgcagccgtccgacggccacctgccggtgctgcgctacgtgcatcccgacgtattcaagatgttcgaggaaaaagcctatgaaatgggcttcgtccatgccgcggtcggcgcgatggtgcgctccagctaccatgccgacgtgcaggcgcacgaagccggcgtttaa

SEQ ID NO: 3076 - protein, 315 aa, Chromobacterium violaceum
MKPDNQAGVKHKGAAKTARIPIKIVPLDEKLKKPEWIRAKLPNGQRFHEIKQILREQKLHTVCEEATCPNIGECFSKGTATFMIMGDICTRRCPFCDVGHGRPNPLDENEPRHLAESVAAMRLKYVVVTSVDRDDLRDGGAQHFADCINAVREMSPATQIETLVPDFRGRLDIAVDILTQTPPDVMNHNLETVPRLYKQARPGADYAHSLQLLKDYKAKNPNVRTKSGLMVGLGETDEEILEVMRDLRAHNVDMLTIGQYLQPSDGHLPVLRYVHPDVFKMFEEKAYEMGFVHAAVGAMVRSSYHADVQAHEAGV

SEQ ID NO: 3077 - DNA, 987 bp, Colwellia psychrerythraea
  CDS (1)..(987): transl_table=11
atgagtaacgacttaacatcagaatcaaaaacagccaaccgtgctgctggcgaaaaatttcgcgatgcagataaattagctcacatccctattaaagttgttagttcaacaaaagcgaccatgttacgtaaaccaagttggttacgtatcaagttaccaaaatctagtgaacgtattgataacatcaaagctaatttacgaaaaaatgaccttcattctgtttgtgaagaagcatcatgccctaatttatctgagtgttttaaccatggtactgccacctttatgattttaggtgatatttgtacgcgtcgttgccctttctgtgatgttggccatggtcgtccactggctccaaaaagtgatgaaccaaaaaagttagccaatagccttaaagatatgggcttaaagtacgtcgttattacttcagttgatagagatgatttacgtgatggtggcgcacagcaatttgcagattgtgtgaaagaaattggtgaacaagcgccaaatactaaagtcgaaatattagtacctgacttccgtggtcgtatggaccgtgcgcttgaaatactgaatcaaaaccctccacacgttttcaaccataatatggaaacagcaccacgtctttatactaaagttcgtccaggcgctaactatcaatggtcattagacttacttaaacgttttggtgaagcaaacccagacgtaaccactaaatctggtttgatggttggtttaggtgaaactaacgaagaaattttagaagtaatgcaagacttacgcgatcatggtgtaactatgcttaccgttggtcagtaccttcaaccaagtaaagatcaccttgccgttgagcgctacgttcaccctgatgactttgctatgtttgaacgtgaagcaaagaaaatgggctatgaacacgctgcttgtggtccacttgttcgttcgagctaccatgctgacaaacaagctgctggtgaagaagttaagtaa

SEQ ID NO: 3078 - protein, 328 aa, Colwellia psychrerythraea
MSNDLTSESKTANRAAGEKFRDADKLAHIPIKVVSSTKATMLRKPSWLRIKLPKSSERIDNIKANLRKNDLHSVCEEASCPNLSECFNHGTATFMILGDICTRRCPFCDVGHGRPLAPKSDEPKKLANSLKDMGLKYVVITSVDRDDLRDGGAQQFADCVKEIGEQAPNTKVEILVPDFRGRMDRALEILNQNPPHVFNHNMETAPRLYTKVRPGANYQWSLDLLKRFGEANPDVTTKSGLMVGLGETNEEILEVMQDLRDHGVTMLTVGQYLQPSKDHLAVERYVHPDDFAMFEREAKKMGYEHAACGPLVRSSYHADKQAAGEEVK

SEQ ID NO: 3079 - DNA, 1047 bp, Corynebacterium efficiens
  CDS (1)..(1047): transl_table=11
gtgactatcgcacctgaggggcgtcgtatgctccgcgtcgaggcccggaactcccagaccccgatcgagaccaagccccggtggatcagaaaccaggtcaagaacggccctgagtacaaggacatgaaggagcgcgtcgcaggtgcctccctccacaccgtgtgtcaggaggccggttgccccaacatccacgagtgctgggaatcccgcgaggccaccttcctcatcggtggggccaactgctcacgtcgttgtgatttctgcatgatcaactcggctcgtccggaacccctcgatcgtggtgagcccctccgtgtcgcggagtcggtgcgcgagatgcgtctgaactactccaccatcaccggtgtgacccgtgatgatctcccggatgagggtgcctggctctattccgaggtggtccgcaagatccacgagctcaaccccaacaccggtgtggagaatctggttccggatttctccggcaagagggatctcctgcaggaggtcttcgaatcccgtccggaggtcttcgcccacaacctggagaccgtcccccgtatcttcaaacggatccgcccggcgttccgctacgaccgttccctggatgtcatccgtcaggcccgggacttcggtctggtcaccaagtccaacctgatcctgggcatgggtgagacccgtgaggagatctccgaggctctccgcgatctgcactccgccggcaccgacatcatcaccatcacccagtacctgcgtcccggaccgctcttccaccccattgagcgttgggtgaagccggaggagttcctcgagctctccgatgaggcctatgagatcggttttgcagcggtcatgtccggtcccctggtgcgctcgtcctaccgtgccggcaagctctacgcccaggcactgaagttccgcggtgaggagctgcccgccaacctctcccacctggctgagaccaccgagggcccgaccacgcaggaggcttcctcgctgctggagcgctacggtgcctccgaggatgcgcccgtgatcccccgcggttag

SEQ ID NO: 3080 - protein, 348 aa, Corynebacterium efficiens
MTIAPEGRRMLRVEARNSQTPIETKPRWIRNQVKNGPEYKDMKERVAGASLHTVCQEAGCPNIHECWESREATFLIGGANCSRRCDFCMINSARPEPLDRGEPLRVAESVREMRLNYSTITGVTRDDLPDEGAWLYSEVVRKIHELNPNTGVENLVPDFSGKRDLLQEVFESRPEVFAHNLETVPRIFKRIRPAFRYDRSLDVIRQARDFGLVTKSNLILGMGETREEISEALRDLHSAGTDIITITQYLRPGPLFHPIERWVKPEEFLELSDEAYEIGFAAVMSGPLVRSSYRAGKLYAQALKFRGEELPANLSHLAETTEGPTTQEASSLLERYGASEDAPVIPRG

SEQ ID NO: 3081 - DNA, 873 bp, Cytophaga hutchinsonii
  CDS (1)..(873): transl_table=11
atgattgaattaccagtagtaccctccgcatctgatcgcaaatccaagcccgactggttacgcgtaaaattgccgatcggaaaagaatatacaaaattacgtgcgttagttgacgagcataagcttcacaccatctgccagagcggcaattgccccaatatgggcgaatgctggggcgcaggtacggctacgtttatgatccttggaaatgtatgtacgcgcagctgttccttctgcgcagttgcaacaggcagacctacggaatatgatattgacgaaccgaaacgtgttgcagaagccgttcggttgatgaatgtaaaacattgtgtgatcacctctgtaaacagagatgaactgaaagataaaggggcagaagtctggtatcagaccgtagtgcgtgtgaaggaagaaagcccgcagactacgatcgaaacattgataccggatgtgaaatctgactgggcttcgttagagcgcatgatcagcggcggacaggaagtggtatctcacaacatggaaacagtggaacgcctgtacagacgtgtacgtccgcaagcgaaatacagcagaagcctggaagaaatccaacgtatcaaggcatttggcaaacgcacaaaatccggtattatgctgggccttggtgaaacaaaagacgaagtattgaaagcaatggatgatctggttgcgcatggtctggatgtacttacgctggggcaatatttacagcctacaaaaatgcacctggaagttgctgaatttattcatccggatcaatttgccgaatataaagaaatcggattatctaaaggtttgaattatgtagagtccggcccgttggtgcgttcctcctatcatgcagagaagcatatttaa

SEQ ID NO: 3082 - protein, 290 aa, Cytophaga hutchinsonii
MIELPVVPSASDRKSKPDWLRVKLPIGKEYTKLRALVDEHKLHTICQSGNCPNMGECWGAGTATFMILGNVCTRSCSFCAVATGRPTEYDIDEPKRVAEAVRLMNVKHCVITSVNRDELKDKGAEVWYQTVVRVKEESPQTTIETLIPDVKSDWASLERMISGGQEVVSHNMETVERLYRRVRPQAKYSRSLEEIQRIKAFGKRTKSGIMLGLGETKDEVLKAMDDLVAHGLDVLTLGQYLQPTKMHLEVAEFIHPDQFAEYKEIGLSKGLNYVESGPLVRSSYHAEKHI

SEQ ID NO: 3083 - DNA, 945 bp, Dechloromonas aromatica
  CDS (1)..(945): transl_table=11
atggctgaaaaaggcgtcaaacaaaaaggcgaactgaaaaccgcgcgcatccccatcaagatcgtgccggtcgatacgccgctacgcaaaccggagtggattcgcgtcaaggccggcaacagcgccgggcgattcggcgagatcaagtccatgctgcgcgagaaaaagctgcacaccgtctgcgaagaagcggcctgccccaacatcggcgaatgcttcggccgcggcacggcgaccttcatgatccttggcgacatctgcacccgccgctgccctttctgcgacgttggccacggccagccgctgccgcccaacccgaacgaaccggccgagctggctgattcggtgtcgtcgctaaagctgcagtacgtggtaatcaccagcgtcgaccgcgacgacctgcgcgatggcggcgcccagcatttcgtcgatgtcgtccgtgccgtacgcgaggcctcgcccaagacgaccatcgaaaccctggtccccgacttccgtggccgcatggacatcgccatcgacattctcggcaatggcctgcccgatgtgctgaaccacaacatggaaaccgtgccccgcctgtacaagcaagcccgtcccggtgccgactacgcccattcgctggccctgatgaagcagttcaaggcacgctaccccgacgtcaagaccaagtccggcctgatggtcggcctcggcgagaccgacgaggaaatcctcgaagtcatgcgtgacctgcgggccaacgatgtcgaaatgctgactatcggccaatacctggccccgtcaggccaccacctgccggtcagccgctacgtccatcccgacactttcaaaatgttcgaggaagaagccaaaaagatgggcttctccggtgcggcctgcgccccgatggtgcgctcgagctactgggctgaccagcaggcccatagcgctggcgtcgcctga

SEQ ID NO: 3084 - protein, 314 aa, Dechloromonas aromatica
MAEKGVKQKGELKTARIPIKIVPVDTPLRKPEWIRVKAGNSAGRFGEIKSMLREKKLHTVCEEAACPNIGECFGRGTATFMILGDICTRRCPFCDVGHGQPLPPNPNEPAELADSVSSLKLQYVVITSVDRDDLRDGGAQHFVDVVRAVREASPKTTIETLVPDFRGRMDIAIDILGNGLPDVLNHNMETVPRLYKQARPGADYAHSLALMKQFKARYPDVKTKSGLMVGLGETDEEILEVMRDLRANDVEMLTIGQYLAPSGHHLPVSRYVHPDTFKMFEEEAKKMGFSGAACAPMVRSSYWADQQAHSAGVA

SEQ ID NO: 3085 - DNA, 996 bp, Deinococcus radiodurans
  CDS (1)..(996): transl_table=11
atgacccagcaagacccgtccaccaaggaacctaaattcatcaaaaacggcatctaccgcaaggacagcgtgccggtgcgcgagaagaaacctgagtggctgaaagtcaccatccccaccgggcaggtgtttaccgaagtccgcaaaatcgtgaaggagcaccgcctgcatacggtgtgcgaggaagcgatgtgccccaacatcggcgagtgctggtcgcgtgggacggcgacgttcatgctgatgggccacatctgcacccgcgcctgccgcttttgcgcggtggacactggcaacccgatgggcaaactggacctcgacgagccgcgcagcgtggccgactcggtgcggctgatggacctgaagtacgtggtgctgacctcggtggaccgcgatgacctgcccgacggcggcgcctaccacttcgccaagacggtgaaggccatcaaagaggtcaatccgcagacccgcgtggaagcgctgacgcccgacttcggcggcaacacggcctgcgtggacctcgtgctggacagcggcgtggatacctacgcccagaacctcgaaaccgtgcggcgcctgacccacccggtgcgcgacattcgcgcgagctacgaccgcaccctgagcgtgctggcccacgccaagcaggcccgccccgacgtgattaccaagacgagcctcatgctgggcctgggcgaaacccgcgaggaaatccgcgaggcgatggctgattgccgcgccgccggggtggacgtgctcaccttcgggcagtacctgcgccccaccatgcaccatctaccggtggaacgctacatttcgcccgccgagttcgacgaaatccgcgaagaaggcatgcaacttggtttcctggaagtcgtctccggtccgctggtgcgctcgtcgtacaaggctgagcagatcgtgatggaccggcccggcaacctgcccgagcacctgagccacttagacggcggcagcgaattgaccttgatttga

SEQ ID NO: 3086 - protein, 331 aa, Deinococcus radiodurans
MTQQDPSTKEPKFIKNGIYRKDSVPVREKKPEWLKVTIPTGQVFTEVRKIVKEHRLHTVCEEAMCPNIGECWSRGTATFMLMGHICTRACRFCAVDTGNPMGKLDLDEPRSVADSVRLMDLKYVVLTSVDRDDLPDGGAYHFAKTVKAIKEVNPQTRVEALTPDFGGNTACVDLVLDSGVDTYAQNLETVRRLTHPVRDIRASYDRTLSVLAHAKQARPDVITKTSLMLGLGETREEIREAMADCRAAGVDVLTFGQYLRPTMHHLPVERYISPAEFDEIREEGMQLGFLEVVSGPLVRSSYKAEQIVMDRPGNLPEHLSHLDGGSELTLI

SEQ ID NO: 3087 - DNA, 876 bp, Desulfovibrio desulfuricans
  CDS (1)..(876): transl_table=11
atgtctgcgcaggagaattccgcgccgtttttgcgcatccccccgtggctgcgcaccagaattccgtgtaaccgcacctatacggctaccagagagctcataggcgatcttaatctgcatacggtctgccagtcggccaagtgtccgaacatgttcgagtgcttttccagccgcacggccacatttctcattctgggcggtacctgcacgcgcaactgcgccttctgcaatatcgaaccgggtgacgtactgccccccgacgccggtgaaccgcagcgcgttgcgctggctgcagcgcggctggaactgaagcatgtggtcataacatccgtcacccgcgacgacctgcccgacggcggtgccgcccactttgcagccaccatacaggccgtgcgcagccggctgccccgctgcacggtggaagtgctcatacccgactttcagggagatgccgcagccctgcagacagtgctgcaagcccgccccgacgtgctgaaccacaacgtggaaaccccgcccgcgcattacagccgcatacgcccgcaggcagactatagtcagagccttgagctgctgcgcagagcacgcgcagccggttttaccgtaaaaagcggactgatgaccggactgggggaaacggacgccgaggtgctcggtgtcattgacgatctttgcgccacgggctgcaacatagtaaccgtggggcagtatatgcggccttcgcgcaggcaccccgcagtacagcgttatgtccatcccgacatgttcgaagagtatgcggcttacggacgcgcacggggcataccgcatatgttctgcgctcctctggtgcgcagcagctacaatgcatccatgttcgtgcaggaaaaaaactga

SEQ ID NO: 3088 - protein, 291 aa, Desulfovibrio desulfuricans
MSAQENSAPFLRIPPWLRTRIPCNRTYTATRELIGDLNLHTVCQSAKCPNMFECFSSRTATFLILGGTCTRNCAFCNIEPGDVLPPDAGEPQRVALAAARLELKHVVITSVTRDDLPDGGAAHFAATIQAVRSRLPRCTVEVLIPDFQGDAAALQTVLQARPDVLNHNVETPPAHYSRIRPQADYSQSLELLRRARAAGFTVKSGLMTGLGETDAEVLGVIDDLCATGCNIVTVGQYMRPSRRHPAVQRYVHPDMFEEYAAYGRARGIPHMFCAPLVRSSYNASMFVQEKN

SEQ ID NO: 3089 - DNA, 900 bp, Desulfotalea psychrophila
  CDS (1)..(900): transl_table=11
atggcttgttcccatcagaagaatgagcagatgcgcgttggtaaaccaaaatggcttcgtcgcagtctgcctaccggtcctgaatacgaaaaaatcagaacattgctcaagggcagtggtttgaccaccgtatgtcaggaggcgcagtgccccaatcaatttgaatgttactccaagggaacggcaacatttatgattatgggcgatcactgtacccgtaactgccgtttttgtgccgtggcccatggacccaaggccctgcccgatgaggatgaggcagagcgggtggcggatgcggtctctctcttgggcctgcgctatgccgttatcacctcggtgacccgggatgatctggccgatggtggagcatcctgttttgtcagggtcatagaggccatccgcaagaaaaaccccaagaccttgattgaggtgctgattcccgatcttgccggtaattggggggccctgcagactattctcgatgctcgtcccgatgtccttaaccacaatattgaaacagtgccccgactctactccgtagcccgtcctggtgctgagtatagacgttctctggaactcctgcgggaggtacgtcgtcgtgcccctcagatggtgactaagacgggtatgatgttgggccttggtgaagagacagaagagctctatgccacctggcaggacctgcgtgagtccgactgtgatatccttaccatgggccagtacctgcaacccacggtggatcatctgctggtgcaacgttttgttgagccgacagagtttgatcgtctgggcgatgtggctctggcaaaagattttctggctgtggcttccggcccctttgtccgtagctcctatgaggcggagaaactttttcgtaaggccgagctggcccgaaaatag

SEQ ID NO: 3090 - protein, 299 aa, Desulfotalea psychrophila
MACSHQKNEQMRVGKPKWLRRSLPTGPEYEKIRTLLKGSGLTTVCQEAQCPNQFECYSKGTATFMIMGDHCTRNCRFCAVAHGPKALPDEDEAERVADAVSLLGLRYAVITSVTRDDLADGGASCFVRVIEAIRKKNPKTLIEVLIPDLAGNWGALQTILDARPDVLNHNIETVPRLYSVARPGAEYRRSLELLREVRRRAPQMVTKTGMMLGLGEETEELYATWQDLRESDCDILTMGQYLQPTVDHLLVQRFVEPTEFDRLGDVALAKDFLAVASGPFVRSSYEAEKLFRKAELARK

SEQ ID NO: 3091 - DNA, 897 bp, Desulfovibrio vulgaris
  CDS (1)..(897): transl_table=11
atgtcctcacccgacaattcctcgccatctttacgcatcccgccgtggctgcgggtgaagctgccctgtagccacacctttgccgacacccgcgcactggtcgaagggctcgggctgaacaccgtatgcaacagcgccaagtgcccgaacatgttcgagtgcttctcgtcgggcacggccaccttcctcatcctcggcaacgtctgtacccgcaactgcgcgttctgcaacatcacgccgggccatgtgtccccgccagaccccgatgaaccccggcgcgtcgccgaggctgcggcacgactcgccctgcggcatgtggtcgtcacgtccgtgacgcgcgacgacctcgacgatggcggggcggcacacttcgccgccaccatcacacggcttcgcgcagcgttgcccgccgccacggtcgaagtcctcattcccgacttcaggggcgaccatgcagccttgcgcactgtcatggcggctgcaccgcatatcgtgaaccacaatgtggagaccccccccgcacactacgcccgcatccgcccgcaggccgactacaggcaaagcctcgaactgctgcgacgtgtgaaggctgcaggtggcgtggccaagagtggactcatggtcggccttggcgagaatgacacagaggtcgagggggttctcgccgacctcgccgattgcggctgtgacatcgtcaccatcgggcagtacatgcgcccttcgcgccagcatccccccgtcgaacgctacgtgcatcctgatactttcgaaagcttcgccgcgtgtggccggggcatgggcattcccttcgtgttctccgcaccgctggtgcgtagcagctacaacgccgaaagcgcctataacgccctgtgcaccctccgcacggaacctgcctga

SEQ ID NO: 3092 - protein, 298 aa, Desulfovibrio vulgaris
MSSPDNSSPSLRIPPWLRVKLPCSHTFADTRALVEGLGLNTVCNSAKCPNMFECFSSGTATFLILGNVCTRNCAFCNITPGHVSPPDPDEPRRVAEAAARLALRHVVVTSVTRDDLDDGGAAHFAATITRLRAALPAATVEVLIPDFRGDHAALRTVMAAAPHIVNHNVETPPAHYARIRPQADYRQSLELLRRVKAAGGVAKSGLMVGLGENDTEVEGVLADLADCGCDIVTIGQYMRPSRQHPPVERYVHPDTFESFAACGRGMGIPFVFSAPLVRSSYNAESAYNALCTLRTEPA

SEQ ID NO: 3093 - DNA, 975 bp, Dichelobacter nodosus
  CDS (1)..(975): transl_table=11
atggcagagccaattatcgttaaaggtcaaaaacaaaacgcaatgggcgttaaacgcaaaggcgcagaaaaagtgcgccatgttgccgctgatgccgaacattttgaacaagaacgcttgaaaaaacccagctggattcgagcaaaaatgccgacgggtcccgaagtcatgcgcatgaaagcgatgatgcgcgagcaaaaattgcatagcgtttgcgaagaagcgagttgcccgaatttaggcgaatgtttccgttttggtaccgcttctttcatgattatgggcgatatttgcacgcggcgctgtcctttttgcgatgttgcgcacggtcgcccgcgcccgctcaatccatttgaaccgcgaaatttagcgcaaaccgtttacaatttggggctcgcgcacgtggtgattacttctgttgaccgcgatgatttgcgcgacggcggcgccgcacattttgccgcgtgtattcgtgaaattcgccgcgtatcgccgaaaatgacgattgaaatcttaacgccggattttcgtggacgcgcggagctcgccgtgcagattttatctgcaacgccgccagatgtgtttaaccataatttggagacgattccgcggttttatgatgttgtgcgtccgggggcgaattatgaacgttctttgcatttgctgcgtgattataaaaaagcctgcccgaaaaaaatcatcacaaaatcagggttaatggtgggattaggtgaagaaattgaggaaattttgcaagtgatgcaggatttacgcagccacgatgtagatatgttaaccgttgggcaatatctccaaccttccgtgcatcatttgccggtaaaacgttattacacgcccgaagaattcgattttttagcgcaagaaggcaaaaaaatgggctttttacacgttgcttcgggcgcaatggtgcgttcttcttatcatgctgaccgttccgcgcaaacggttttgtaa

SEQ ID NO: 3094 - protein, 324 aa, Dichelobacter nodosus
MAEPIIVKGQKQNAMGVKRKGAEKVRHVAADAEHFEQERLKKPSWIRAKMPTGPEVMRMKAMMREQKLHSVCEEASCPNLGECFRFGTASFMIMGDICTRRCPFCDVAHGRPRPLNPFEPRNLAQTVYNLGLAHVVITSVDRDDLRDGGAAHFAACIREIRRVSPKMTIEILTPDFRGRAELAVQILSATPPDVFNHNLETIPRFYDVVRPGANYERSLHLLRDYKKACPKKIITKSGLMVGLGEEIEEILQVMQDLRSHDVDMLTVGQYLQPSVHHLPVKRYYTPEEFDFLAQEGKKMGFLHVASGAMVRSSYHADRSAQTVL

SEQ ID NO: 3095 - DNA, 900 bp, Ehrlichia canis
  CDS (1)..(900): transl_table=11
atgagaagtaagcctgattggttaaaagtgaaaatgcctacaggtgatactttttatcagatgcgtaatttgatgaagttgtacaagctaaacacggtgtgtgaggaagctgcttgcccaaatgttggtgaatgttggaataaaaaacatgcaacagtaatgattttaggttctacttgtactagagcatgtgccttttgtaatgttgctactgggattccagataagttggatcctcatgagcctcaaaacttggctaaagctatcaactcacttaaacttcatcatgttgttattacatctgttgatagggatgatttaccagatggtggagctgggcattttgttgagtgtatagaagaaatacgaaagagagatgataacattactattgaaatattaactccagattttttaaataaacatggtgcaattgataagattgctgcagtagctcctgatgtttataatcataatgtagaaactgtaccaagattatatgcaaggattaggccaaaagcacgttattttcattctctgtatttgcttaaagcagtgaaatataagaatcctaaaatatttactaaatctggaataatggtagggttaggtgaaacaaaggaagaaatatatcaggtgatggatgatttaagatcagcagatgttgattttataacaattggtcaatatttacagcctactcctaaacatgctgtagttgatagatatgtaactcctgaggaatttgatcattacaaatatgttgcatattctaaagggtttttgatggttgcttcaggtcctttagttaggtcttcatatcatgctgaagaagattttcaaaaattaaaacaaaatcgtactgctatgttaatgcgtgctgaaagtaattcgatatag

SEQ ID NO: 3096 - protein, 299 aa, Ehrlichia canis
MRSKPDWLKVKMPTGDTFYQMRNLMKLYKLNTVCEEAACPNVGECWNKKHATVMILGSTCTRACAFCNVATGIPDKLDPHEPQNLAKAINSLKLHHVVITSVDRDDLPDGGAGHFVECIEEIRKRDDNITIEILTPDFLNKHGAIDKIAAVAPDVYNHNVETVPRLYARIRPKARYFHSLYLLKAVKYKNPKIFTKSGIMVGLGETKEEIYQVMDDLRSADVDFITIGQYLQPTPKHAVVDRYVTPEEFDHYKYVAYSKGFLMVASGPLVRSSYHAEEDFQKLKQNRTAMLMRAESNSI

SEQ ID NO: 3097 - DNA, 894 bp, Ehrlichia chaffeensis
  CDS (1)..(894): transl_table=11
atgagaagtaaacctgattggttaaaagttaagatgcctacaggggatactttttatcaagttcgcaatttaatgaaattgtataaattaaatactgtgtgtgaagaagcagcttgtcccaacattggtgagtgttggaataaaagacatgcaacagtaatgattttaggttctacatgtactagagcatgtgcattttgtaatgttgtttctggaattccagataaactggatcctcatgagcctcaaaacttagctaaggctgttggtttacttaaacttgagcacgttgttattacatctgtagacagggatgacttggaagatggtggatctggacattttgtagagtgtatagaagaaatacgaaaaaacgatcagaatgttactattgaagtattaactccagattttttgaataaacatggtgcaattgaaaaggttgctgatgctgctcctgatgtttacaatcataatatagaaactgttccaaggttgtatgcaaaaattagaccaaaagcacgttactttcattctctttatttgttaaaaacagttaaatataaaaatcctaaagtatttactaaatctggaattatggtaggattgggtgaaacaaaagaagaaatatatcaagtaatgaatgatttaagatctgcggatgttgattttataacgattggtcaatatttgcagcctactcctaagcatgctgcagttgataggtatgtaactcctgaagaatttgatcattacaagtatgttgcatactctaaagggtttttaatggttgcgtcgggccctttagtaaggtcttcataccatgctggagaggattttcaaaggttaaagaaaaatcgtgctgctatgttcatgcatgctaaaagcaattag

SEQ ID NO: 3098 - protein, 297 aa, Ehrlichia chaffeensis
MRSKPDWLKVKMPTGDTFYQVRNLMKLYKLNTVCEEAACPNIGECWNKRHATVMILGSTCTRACAFCNVVSGIPDKLDPHEPQNLAKAVGLLKLEHVVITSVDRDDLEDGGSGHFVECIEEIRKNDQNVTIEVLTPDFLNKHGAIEKVADAAPDVYNHNIETVPRLYAKIRPKARYFHSLYLLKTVKYKNPKVFTKSGIMVGLGETKEEIYQVMNDLRSADVDFITIGQYLQPTPKHAAVDRYVTPEEFDHYKYVAYSKGFLMVASGPLVRSSYHAGEDFQRLKKNRAAMFMHAKSN

SEQ ID NO: 3099 - DNA, 966 bp, Erwinia carotovora subsp
  CDS (1)..(966): transl_table=11
atgagtaaaccgattcagatcgaacgtggtgtcaaataccgcgatgccgataagatggccctaattccggtacgtactgtcgttaccgaacgccaagagcttctgcgcaaacctgaatggatgaagattaaacttccggcggattcgagccgtattcagggaatcaaagcggcaatgcgcaaaaatgggttgcactcagtttgcgaagaagcgtcctgtccgaatctggccgagtgtttcaaccacggcaccgccacctttatgattctgggcgccatttgtacgcgtcgctgtccgttctgtgacgttgcccacggccgaccgcttacgccggatgccaacgaaccagagaaactggcacagactatccatgacatgggcttacgctatgtcgtgatcacctccgttgaccgtgatgacctgcgcgacggtggagctcaacactttgcggactgcattagcgccattcgtcgcaaaaacccgcatattcgtatcgaaacgctggtgccagacttccgtggtcgtatggatcgcgcgttggaaatattgaccgccacgccaccagacgtgttcaaccataatctggaaaacgtgccgcgtgtttaccgacaggtacgccctggcgcgaactatgaatggtccctgaagttgctggaaaacttcaagaacgcgcatcccgatatcacgaccaaatcaggcctgatggttggtctgggggaaaccaatgctgaaatcgtggaagtcatgcgcgatcttcgccgccacggtgtgacaatgctgacgctgggacaatatttacagccgagccgccatcatctgccggtacagcgctacgtcagcccagatgagttcgatgagatgaaagccgaagcgatggcgatgggctttacccatgccgcctgcggcccgtttgttcgctcgtcctaccatgccgacttacaggccaagggcatcgaagtaaaataa

SEQ ID NO: 3100 - protein, 321 aa, Erwinia carotovora subsp
MSKPIQIERGVKYRDADKMALIPVRTVVTERQELLRKPEWMKIKLPADSSRIQGIKAAMRKNGLHSVCEEASCPNLAECFNHGTATFMILGAICTRRCPFCDVAHGRPLTPDANEPEKLAQTIHDMGLRYVVITSVDRDDLRDGGAQHFADCISAIRRKNPHIRIETLVPDFRGRMDRALEILTATPPDVFNHNLENVPRVYRQVRPGANYEWSLKLLENFKNAHPDITTKSGLMVGLGETNAEIVEVMRDLRRHGVTMLTLGQYLQPSRHHLPVQRYVSPDEFDEMKAEAMAMGFTHAACGPFVRSSYHADLQAKGIEVK

SEQ ID NO: 3101 - DNA, 1002 bp, Frankia sp
  CDS (1)..(1002): transl_table=11
atgaccgccgtcgcccccgagggtcgcccgctgctgcgcatcgaggcccgtaatgcgcagacgccgatcgaacgcaagccatcgtggatcaggactcggctgcgcaccggtccgcagtaccaggacgtcaaggggctggtccaatcggccgggctgcacacggtgtgcgaggaagccggctgtcccaacatctacgaatgctgggaggaccgcgaggcgaccttcctgatcggcggggaggtctgcacccgccgctgcgacttctgccagatcgactccgggcggcctgccccgctcgaccatgacgagccgcgccgggtggcggagtccgtcgccaccatgggcctgcggtacgcgacggtcaccggagtcgctcgggacgacctcgcggacggcggctcgtggctgtacgcggagacggtccgccagatccacgcacgctcggccgataccggcgtggaggtcctgatcccggacttcggcggccggcccgaccagttgggcgaggtgttcgaggcggcgcccgaggtactcgcccacaacctcgaaaccgtaccccggatcttcaggcggatccggccggcgttccggtacgagcgctcactcgacgtgctgcgccaggcccgccaggccgggctggtcacgaagtcgaacctcatcctgggtctgggtgagacggcggaggagatccacacggccctgcgggatctgcggtcggcggggtgtgagctgctcaccgtgacccagtacctgcgcccgacgccgcggcaccatccggtcgagcggtgggtgcggccggaggagttcctcgactggggacgtgtcggcgcggagctcgggttctccggggtgatgtccggtccgctcgtccggtcttcctaccgggccagccgcctctaccagcaagcgatgacggcacgtgaccaggaccgcagcgaaatgtccgttcccccggaaagtgtgtcggagaactctcacgggcaacggccgagtccgtggtga

SEQ ID NO: 3102 - protein, 333 aa, Frankia sp
MTAVAPEGRPLLRIEARNAQTPIERKPSWIRTRLRTGPQYQDVKGLVQSAGLHTVCEEAGCPNIYECWEDREATFLIGGEVCTRRCDFCQIDSGRPAPLDHDEPRRVAESVATMGLRYATVTGVARDDLADGGSWLYAETVRQIHARSADTGVEVLIPDFGGRPDQLGEVFEAAPEVLAHNLETVPRIFRRIRPAFRYERSLDVLRQARQAGLVTKSNLILGLGETAEEIHTALRDLRSAGCELLTVTQYLRPTPRHHPVERWVRPEEFLDWGRVGAELGFSGVMSGPLVRSSYRASRLYQQAMTARDQDRSEMSVPPESVSENSHGQRPSPW

SEQ ID NO: 3103 - DNA, 936 bp, Geobacillus kaustophilus
  CDS (40)..(936): transl_table=11
atgagaaatgaacaatcatcgacaagtggagtgagaacgatggcgacgaaagaagaacacgtccgcaagccggactggttgaaaatcaagttgaacacgaacgagaattatatcggtttaaagaagctgatgcgggaaaaccgtttacataccgtttgcgaggaagcgaagtgcccaaacattcacgaatgctgggccgtacggcggacggcgacgtttatgattttaggcagcgtctgcacgcgcgcctgccgcttctgcgccgtcaaaaccgggctgccgaccgagctcgattggcaggagccggaacgcgtcgcggaatcggtgcgcatcatgaacttgaaacacgtcgtcgtcaccgccgtcgcccgcgatgacctaaaagacggcggggcggcggtattcgccgaaacggtgcgcgccatccgccggaaaaacccgtttacgacgatcgaggtgctgccgtcggatatgggcggggtgtatgaaaacttgaaaattttgatggatgcccgccctgacattttaaaccataacatcgaaacggtgcgccgcttgactccaagggtgcgcgcccgcgcgacgtacgaacgttcgcttgagtttttgcggcgcgcgaaagaattgcagccggacattccgacgaaatcgagcatcatggtcggccttggggaaacgaaagaggaaatcattgaagcgatggatgacttgcgcgccaaccatgtcgacattttgacgatcggccagtatttgcagccgacgaaaaagcatttgaaggtcgtgaaatattaccatccggacgagtttcaagagctgaaagaaatcgcgttgagcaaagggttcagccattgtgaagcggggccgctcgtccgctcgtcgtaccatgccgatgagcaggtgagcgaggcggcgaaagcgcggcagttgaaagcgtaa

SEQ ID NO: 3104 - protein, 298 aa, Geobacillus kaustophilus
MATKEEHVRKPDWLKIKLNTNENYIGLKKLMRENRLHTVCEEAKCPNIHECWAVRRTATFMILGSVCTRACRFCAVKTGLPTELDWQEPERVAESVRIMNLKHVVVTAVARDDLKDGGAAVFAETVRAIRRKNPFTTIEVLPSDMGGVYENLKILMDARPDILNHNIETVRRLTPRVRARATYERSLEFLRRAKELQPDIPTKSSIMVGLGETKEEIIEAMDDLRANHVDILTIGQYLQPTKKHLKVVKYYHPDEFQELKEIALSKGFSHCEAGPLVRSSYHADEQVSEAAKARQLKA

SEQ ID NO: 3105 - DNA, 852 bp, Geobacter metallireducens
  CDS (1)..(852): transl_table=11
atgaccatcgtccgcaagccccagtggctgcaaaagaagatcaaccccgcggcccacgccggcatggaggggcttctgggggagctgcgccttcacacggtctgtcaggaggcccgctgccccaacattaccgagtgcttccgggagcgacaggcgaccttcctcatcctgggggccgcatgcacccgcctctgctccttctgcaacgtgacgaaacagacacccatccctcccgacccgggcgagccggaccgggttgcggaggcgatccgccgccttggtctctcccacgtggtcatcacgagccccacccgggacgacctccccgacggcggtgccggccactatgccgaaaccgtcgccgccatccggagtgcgtctcccgccaccacggtggagctcctcattcctgattacctcggcaaccgcgagagcctcgcccgggtcgtcgcctcggcgccggccatcatcggccacaatgtcgagacggtgccgcgcctctaccaaatccgggccggggccgactacggccgctcccttggagtgctccggaccctgcgtgaactggaccctgtcgtgcgaagcaagtcgggaatcatgctcggcctcggcgaggcggaggaggaggtgctggcggttttcgccgacctgcggtcggtggggtgttcctacctcagcatcggccagtacctggcccccagcaagagccaccatcccgtcagggaattcattcctcccgaatgtttcgaaagataccgggcagcggccctggccacggggtttgcccacgtggagagcggcccctacgtgaggagttcctaccacgcggcccgttacgacgggcaactgtga

SEQ ID NO: 3106 - protein, 283 aa, Geobacter metallireducens
MTIVRKPQWLQKKINPAAHAGMEGLLGELRLHTVCQEARCPNITECFRERQATFLILGAACTRLCSFCNVTKQTPIPPDPGEPDRVAEAIRRLGLSHVVITSPTRDDLPDGGAGHYAETVAAIRSASPATTVELLIPDYLGNRESLARVVASAPAIIGHNVETVPRLYQIRAGADYGRSLGVLRTLRELDPVVRSKSGIMLGLGEAEEEVLAVFADLRSVGCSYLSIGQYLAPSKSHHPVREFIPPECFERYRAAALATGFAHVESGPYVRSSYHAARYDGQL

SEQ ID NO: 3107 - DNA, 912 bp, Geobacter sulfurreducens
  CDS (1)..(912): transl_table=11
gtgaacatccaccgcaagccggaatggctccggaaaaaaatcaaccctgccgcccacggcgccatggatgagctgctgggagagttgcggctccacacggtctgccgggaggcgcgctgccccaatatcaccgagtgcttccgggaacgccaggcaacctttctgattctcggcgcggagtgcacccgcctctgctccttctgcaacgtcaccaagggagagccgctgccgcccgacccggacgagccggcacgggtggcccaggccgttgtccgcctgagtctggcccatgtggtgatcacgagccccacccgggacgatcttcccgacggcggagccggccactacgtcgccaccgtggcgaccatcggccgggttgcgcccgcaaccgtcgtggagcttctcatccccgacttcctcggtagtcgcgcggccctggcggatgtcgtggctgccgcgccacggatcatcgggcacaatgtggaaaccgttccccgtctctacgccattcgtgccggcgccgactacggccgttcgctggcggtgctccgcaccctgcgcgaactggcgccggggtgtgccaccaagtcggggctcatgctcggcctgggtgagacggaagaggaagtcctggcggtgatggccgacctgcggcgggtcgactgcacctacctcagcctcggccagtacctggctccgagccggttccaccaccccgtgcgggagttcgtcctccccgagacctttgaccggctgaaggaactggccgaaaagatgggattccgccacgtggagagtggcccctacgtccgcagttcctaccacgctgccggctacggcggcggaacgcgtacagatcaacccgtcgcatccggctgtctgtcggatcaggaaggagtatcagcacaatga

SEQ ID NO: 3108 - protein, 303 aa, Geobacter sulfurreducens
MNIHRKPEWLRKKINPAAHGAMDELLGELRLHTVCREARCPNITECFRERQATFLILGAECTRLCSFCNVTKGEPLPPDPDEPARVAQAVVRLSLAHVVITSPTRDDLPDGGAGHYVATVATIGRVAPATVVELLIPDFLGSRAALADVVAAAPRIIGHNVETVPRLYAIRAGADYGRSLAVLRTLRELAPGCATKSGLMLGLGETEEEVLAVMADLRRVDCTYLSLGQYLAPSRFHHPVREFVLPETFDRLKELAEKMGFRHVESGPYVRSSYHAAGYGGGTRTDQPVASGCLSDQEGVSAQ

SEQ ID NO: 3109 - DNA, 969 bp, Gluconobacter oxydans
  CDS (1)..(969): transl_table=11
atgtcccagcgcatcaccatcgatcaccgttcggcgcctgcccttcgccatccggagaaggcgcatcggcctgataacccgatccagcgcaagccgtcctggatccgggtcaaggcgccgaaccatccagtctatcacgagacccgtgcgctcatgcgggatgccgggctggtgacggtctgcgaggaggcggcgtgccccaatatcggggaatgctggtcgcagcgtcatgccacgatgatgatcatgggcgagatctgcacccgggcgtgtgcattctgcaatgtcacgaccggactgccgaagcatctcgatgaggacgagccacggcgggtcggagaagcggtggcgaagcttgggctcaagcatgtcgtcatcacttcggtggaccgtgacgatctggaagacgggggggcgatgcacttcgcgcgggtcattcatgcgatccgcgagacctctccacagaccacgatcgagattctgacgcctgatttcctgcgcaaggatggcgcgctggaggtcgtggtggcggctcggccggacgttttcaatcacaatatcgagaccataccccggctttaccccaccatcagaccgggtgcgcgttactatcagtccgtccgtctcctggacggagtaaagaaactcgatccttccatttttaccaagtccggcctgatgcttgggcttggcgaggagcggatggaagtggcccaggtgatggatgatttccggatcgcggacgtcgatttcctgacgcttggacagtatctccagccgtccgcgaaacatgcggcggtggaaaagtttgttacccccgacgagtttgacggctatgctgctgctgcccgttcaaaaggatttcttcaggtcagtgccagtccgctgacccggtcctcctaccatgcggacagtgatttcgcgaagcttcaggctgcgcggaacagccgtctgaaagaaagtctctga

SEQ ID NO: 3110 - protein, 322 aa, Gluconobacter oxydans
MSQRITIDHRSAPALRHPEKAHRPDNPIQRKPSWIRVKAPNHPVYHETRALMRDAGLVTVCEEAACPNIGECWSQRHATMMIMGEICTRACAFCNVTTGLPKHLDEDEPRRVGEAVAKLGLKHVVITSVDRDDLEDGGAMHFARVIHAIRETSPQTTIEILTPDFLRKDGALEVVVAARPDVFNHNIETIPRLYPTIRPGARYYQSVRLLDGVKKLDPSIFTKSGLMLGLGEERMEVAQVMDDFRIADVDFLTLGQYLQPSAKHAAVEKFVTPDEFDGYAAAARSKGFLQVSASPLTRSSYHADSDFAKLQAARNSRLKESL

SEQ ID NO: 3111 - DNA, 993 bp, Haemophilus ducreyi
  CDS (1)..(993): transl_table=11
atgacaacagcaatcggtaaaaaaacaactaaattagaaccatttaaaatggaacgcggtgtaaaatatcgtgatgcggcaaagacttcagtgattcaagtcaggaatattgacccagaccaagaattattgaaaaaacctgagtggatgaaaatcaagttaccgactaattcagcgaaaattgatagcattaaatatggtatgcgtcgccacgggttacattcagtttgtgaagaagcatcttgtccaaatttacatgaatgttttaatcatggtactgccacttttatgattatgggcgcaatttgtactcgtcgttgtccgttttgtgatgttgcgcatggtaagccattaccacttgatccctatgaaccgcgtaaagttgccgaaacagtgcaagatatgaaattaaaatacgtggtaattacgtcggtcgatcgtgatgatttggccgatcggggggcagcacattttgcggctacagtgcgagaaattaaagcattaaatcctgaatgcaaagtcgagattttagtcccggattttcgtggtcgagtagaacaagcggttgctattttgaaacaaaatccacccgatgtatttaatcataatttagaaaatgtgccacgtttatatcgcgaaattcgcccgggagcggattataaatggtcattagaattgcttaaaattttcaaacaagagttccctaatattcccactaaatcaggcttaatggttggattgggcgaaacaaacgaagaaattttagcggttatgcaagatttacgtgatcatggtgtgacgatgttgaccgttggtcaatatttacaaccaagccgtcatcacttaagagtagaacgttatgttccgcctgctgaatttgaaatgtttcgcagtgaagctgaaaaaatgggatttgaacacgctgcttgcggtccatttgttcgttcttcttatcatgcagatttacaagcgaaaggcgagctagttaaataa

SEQ ID NO: 3112 - protein, 330 aa, Haemophilus ducreyi
MTTAIGKKTTKLEPFKMERGVKYRDAAKTSVIQVRNIDPDQELLKKPEWMKIKLPTNSAKIDSIKYGMRRHGLHSVCEEASCPNLHECFNHGTATFMIMGAICTRRCPFCDVAHGKPLPLDPYEPRKVAETVQDMKLKYVVITSVDRDDLADRGAAHFAATVREIKALNPECKVEILVPDFRGRVEQAVAILKQNPPDVFNHNLENVPRLYREIRPGADYKWSLELLKIFKQEFPNIPTKSGLMVGLGETNEEILAVMQDLRDHGVTMLTVGQYLQPSRHHLRVERYVPPAEFEMFRSEAEKMGFEHAACGPFVRSSYHADLQAKGELVK

SEQ ID NO: 3113 - DNA, 963 bp, Haemophilus influenzae
  CDS (1)..(963): transl_table=11
atgtctacgcctttcaaaatggaacgcggtgtaaaatatcgcgatgcggcaaaaacctcaattattcccgtaaaaaatatcgatcctaatcaagagttattaaaaaaaccagaatggatgaaaattaaacttccagcaagttcagctaaaattgaaagcattaaaaatggaatgcgccgtcacggattacattctgtttgtgaggaagcgtcttgtccaaatttacacgaatgttttaatcatggcacagccacttttatgattttaggtgcaatttgtacgcgccgttgcccattctgtgatgtggctcacggtaaaccattaccgcctgatcctgaagagccacaaaaattggcagaaacgattcaagatatgaaacttaaatatgtggtaatcacatcggtggatcgtgatgacttgcctgatcgtggtgctggtcatttttctgaatgtgtaaaagctgtgcgcgagcttaatcctaacattaagattgaaattttagtgcctgattttcgtggtcgcattacacaggctttagagaaattaaaagataatccgccagatgtctttaaccataatttagaaaacgtaccgcgcttatataaagaaattcgtccaggtgcggattacgaatggtcacttaaattattgcgtgaattcaaagaaatattcccaaatatcccaaccaaatctggtttaatggttgggttaggcgaaaccaacgaggaaattttgcaagtgatgcaagatttacgtgataacggtgtgactatgctcacgttgggtcaatatcttcaacctagccgccatcatttgcctgttgcccgttatgtgccgccaactgaatttgatgaattccgtgataaagccaatgaaatgggctttgaacatgcggcttgtgggccatttgttcgttcttcttatcacgctgatttacaagccagtggcggattagtgaaataa

SEQ ID NO: 3114 - protein, 320 aa, Haemophilus influenzae
MSTPFKMERGVKYRDAAKTSIIPVKNIDPNQELLKKPEWMKIKLPASSAKIESIKNGMRRHGLHSVCEEASCPNLHECFNHGTATFMILGAICTRRCPFCDVAHGKPLPPDPEEPQKLAETIQDMKLKYVVITSVDRDDLPDRGAGHFSECVKAVRELNPNIKIEILVPDFRGRITQALEKLKDNPPDVFNHNLENVPRLYKEIRPGADYEWSLKLLREFKEIFPNIPTKSGLMVGLGETNEEILQVMQDLRDNGVTMLTLGQYLQPSRHHLPVARYVPPTEFDEFRDKANEMGFEHAACGPFVRSSYHADLQASGGLVK

SEQ ID NO: 3115 - DNA, 963 bp, Haemophilus influenzae
  CDS (1)..(963): transl_table=11
atgtctacgcctttcaaaatggaacgcggtgtaaaatatcgcgatgcggcaaaaacctcaattattcccgtaaaaaatatcgatcctaatcaagatttattaaaaaaaccagaatggatgaaaattaaacttccagcaagttcagctaaaattgaaagcattaaaaatggaatgcgccgtcacggattacattctgtttgtgaggaagcatcttgtccaaatttacacgaatgttttaatcatggcacagccacttttatgattttaggtgcaatttgtacgcgccgttgcccattctgtgatgtggctcacggtaaaccattaccgccagatcctgaagagccacaaaaattggcagaaacgattcaagatatgaaacttaaatatgtggtaatcacatcggtggatcgtgatgacttgcctgatcgtggtgctggtcatttttctgaatgtgtaaaagctgtgcgcgagcttaatcctaacattaagattgaaattttagtgcctgattttcgtggtcgcattacacaggctttagagaaattaaaagataatccgccagatgtctttaaccataatttagaaaacgtaccgcgcttatataaagaaattcgtccaggtgcggattacgaatggtcacttaaattattgcgtgaattcaaagaaatattcccaaatatcccaaccaaatctggtttaatggttgggttaggcgaaaccaacgaggaaattttgcaagtgatgcaagatttacgtgataacggtgtgactatgctcacgttgggtcaatatcttcaacctagccgccatcatttgcctgttgcccgttatgtgccgccaactgaatttgatgaattccgtgataaagccaatgaaatgggctttgaacatgcggcttgtgggccatttgttcgttcttcttatcacgctgatttacaagccagtggcggattagtgaaataa

SEQ ID NO: 3116 - protein, 320 aa, Haemophilus influenzae
MSTPFKMERGVKYRDAAKTSIIPVKNIDPNQDLLKKPEWMKIKLPASSAKIESIKNGMRRHGLHSVCEEASCPNLHECFNHGTATFMILGAICTRRCPFCDVAHGKPLPPDPEEPQKLAETIQDMKLKYVVITSVDRDDLPDRGAGHFSECVKAVRELNPNIKIEILVPDFRGRITQALEKLKDNPPDVFNHNLENVPRLYKEIRPGADYEWSLKLLREFKEIFPNIPTKSGLMVGLGETNEEILQVMQDLRDNGVTMLTLGQYLQPSRHHLPVARYVPPTEFDEFRDKANEMGFEHAACGPFVRSSYHADLQASGGLVK

SEQ ID NO: 3117 - DNA, 963 bp, Haemophilus somnus
  CDS (1)..(963): transl_table=11
atgacaaccccttttaaaatggaacgtggtgtcaaatatcgtgatgctgcaaaaacgtcaatcattccggttaaaaatatcgatccaaatcaggagttattaaaaaaacctgaatggatgaaaatcaagcttcctgcaaattctgcgaaaattaacagtattaaaaacggaatgcgtcgtcatggattacattccgtatgtgaagaagcgtcttgtccaaatttacatgaatgcttcaatcacggcacagcaacatttatgattttaggtgcaatttgtacacgccgatgtccattctgcgatgttgcccatggaaaaccattacccccagatccggatgaaccaaaaaaattggcggaaaccattcaagatatgaaattacgttatgtcgttattacatcagtggatcgtgatgatttaccggatcgtggtgcgggacattttgctgaatgtgttaaagaaattcgtaaacttaatccaggtattaaaattgaaattttggtgcctgattttcgtggacgcattgagcaagcattagaaaaattaaaagataatccccctgatgtttttaatcataatttagaaaatgtacctcgtttatatcgtgaaatcagaccaggtgcggactataattggtcgttaaaattactcaaagaatttaaaaccatttttccacatatccctaccaaatcaggcattatggttggcttgggagaaaccaatgaagaaattttacaggtaatgcaggacttacgggataacggtgtaaccatgttgactctaggtcaatatttgcaaccaagtcgccaccacttacctgttgcccgatacgttccacctgaggaatttgatgatttccgtgataaagccgaaaaaatgggatttgagcatgccgcttgcggaccttttgtgcgttcttcgtatcatgctgacttacaagcaagtggcgggctagtcaaataa

SEQ ID NO: 3118 - protein, 320 aa, Haemophilus somnus
MTTPFKMERGVKYRDAAKTSIIPVKNIDPNQELLKKPEWMKIKLPANSAKINSIKNGMRRHGLHSVCEEASCPNLHECFNHGTATFMILGAICTRRCPFCDVAHGKPLPPDPDEPKKLAETIQDMKLRYVVITSVDRDDLPDRGAGHFAECVKEIRKLNPGIKIEILVPDFRGRIEQALEKLKDNPPDVFNHNLENVPRLYREIRPGADYNWSLKLLKEFKTIFPHIPTKSGIMVGLGETNEEILQVMQDLRDNGVTMLTLGQYLQPSRHHLPVARYVPPEEFDDFRDKAEKMGFEHAACGPFVRSSYHADLQASGGLVK

SEQ ID NO: 3119 - DNA, 936 bp, Halobacterium salinarium
  CDS (1)..(936): transl_table=11
atgagtagccgccggaagccggagtggctaaagatgcggccgccgtccggggagcggttcacggacatcaaggagacgctccgcgacaacgacctccacacggtctgcgaggaggcgtcgtgtcccaacatgggggagtgttggagcggccgtgacggccccggcacggcgacgttcatgctgatgggggatcgctgctcgcgtggctgcaacttctgtgacgtgaaaaccggcggcatggagcccctagatcccgatgagccggcgaacgtcgcggagtccgtggcggagatcgggctggactacgtggtgttgacgtccgtcgaccgcgacgacctcgacgaccagggggccggccacttcgcgcggacgatccgggagatcaaagagcgcgacccctcgatcctggtggaagtgctgattccggatttccagggcgagaaatcgctggttcagaagatcatcgacgcggggccggacgtgatcgcgcacaacatcgaaaccgtcgcgcgccggcaggtccccgtgcgggaccggcgcgcgggctacgagcagtccctgtcggtgctggagtacgtgacccgggagtcggacatctacaccaagacgagcatcatgctgggagtcggcgagtacgaccacgaggtctatcagacgcttggagacctccgggaggccggcgtggacgtggtgaccctggggcagtatctccagccgtcgcggtcacacctcgacgtcgcggactacgtccacccccagaagttcgagacgtggcagcgcgtggccgaatccgagttcgggttcctgtactgcgcgtcgggaccgatggtgcggtcctcgtacaaggccggcgagctgttcgtggacgccgtgctgcgggagggcaaaagcgtccaggaggcccgccggaacgcgcggcgtgcggcgtcggagtga

SEQ ID NO: 3120 - protein, 311 aa, Halobacterium salinarium
MSSRRKPEWLKMRPPSGERFTDIKETLRDNDLHTVCEEASCPNMGECWSGRDGPGTATFMLMGDRCSRGCNFCDVKTGGMEPLDPDEPANVAESVAEIGLDYVVLTSVDRDDLDDQGAGHFARTIREIKERDPSILVEVLIPDFQGEKSLVQKIIDAGPDVIAHNIETVARRQVPVRDRRAGYEQSLSVLEYVTRESDIYTKTSIMLGVGEYDHEVYQTLGDLREAGVDVVTLGQYLQPSRSHLDVADYVHPQKFETWQRVAESEFGFLYCASGPMVRSSYKAGELFVDAVLREGKSVQEARRNARRAASE

SEQ ID NO: 3121 - DNA, 1008 bp, Herminiimonas arsenicoxydans
  CDS (1)..(1008): transl_table=11
atgacgatcgataccaatccagaatcctccacaccttctgctcccgcttacaatccgagcgaaaaacaaaaaggttcggccaaaaccatacgcatcccgatcaaggtggtgcctatggaacgcttgccgaaaccggactggatacgcgtcaaggccggatcgccatcgacccgcttttacgaaatcaaggacatcctgcgcgccaacaatctggtgacagtgtgcgaagaagccagctgccccaacatcggcgaatgcttcggcaaaggcaccgcgaccttcatgatcatgggcgacaagtgcacgcgtcgctgcccgttctgcgacgtcggccacggccgtcccgatccgctcgacgtgaacgaaccggaaaatctggcgaaaaccatcgctgcattacgtctgaactacgtcgtcattacctcggtggaccgtgacgatctgcgcgacggcggtgccggccatttcgccgaatgcatacgccgcgtgcgcgaactgtcgccgaacacccgcatagaaattctggtgccggatttccgtggtcgcatggaccgcgcactcgagatcctgaatctggcaccgcccgatgtcatgaatcacaatctggaaactgcaccgcgcctgtacaaggaagcgcgtcccggctccgattacgcatactcgctgaacctgctcaagcgcttcaaggcgctgcatccgaacacgccgaccaaatccggcatcatggtcggcctcggcgaaaccgatgaagaagttttgcaagtcatgcgcgacatgcgtgcacacgatgtcgacatgctgaccataggccagtacctgatgcctagcggcgaccatcttcccgtgcgtcgctacgtgcatcccgacaccttcaagatgtacgaagaagaagcctacaagatgggcttcgcacatgcggcagtgggggcaatggtgcgttcgagttaccacgcggatcaacaggcacatggcgtaacagccggagccagccaactaccgcatgactga

SEQ ID NO: 3122 - protein, 335 aa, Herminiimonas arsenicoxydans
MTIDTNPESSTPSAPAYNPSEKQKGSAKTIRIPIKVVPMERLPKPDWIRVKAGSPSTRFYEIKDILRANNLVTVCEEASCPNIGECFGKGTATFMIMGDKCTRRCPFCDVGHGRPDPLDVNEPENLAKTIAALRLNYVVITSVDRDDLRDGGAGHFAECIRRVRELSPNTRIEILVPDFRGRMDRALEILNLAPPDVMNHNLETAPRLYKEARPGSDYAYSLNLLKRFKALHPNTPTKSGIMVGLGETDEEVLQVMRDMRAHDVDMLTIGQYLMPSGDHLPVRRYVHPDTFKMYEEEAYKMGFAHAAVGAMVRSSYHADQQAHGVTAGASQLPHD

SEQ ID NO: 3123 - DNA, 969 bp, Idiomarina loihiensis
  CDS (1)..(969): transl_table=11
atgtcaaagccagttagagttgaacctggtgtcaaaatgcgtgacgccgataaaatggcactgataccagtacaaattattcccaccgaacgcgatcagatgttgcgtaagccgtcgtggctgaaggtgaagttaccttcttcaactgagcgtattgatgaaattaagcaagcaatgcgcagccatggtttgcactctgtttgtgaggaagcatcctgtccaaatttaccggaatgttttaatcacggtacagccagttttatgatcctgggcgacatttgtacacgtcgttgcccattctgtgacgttgctcacggtcgccctcttcctcccgatccggaagaagctgaaaagctgggcaaaaccatccgcgacatgaaagtgaagtatgtcgtaattacatcggttgaccgtgatgatttacgcgacggcggtgctcagcactttgcggactgtattcgtgaaattcgtgagcacagtgagaacaacattcaggtagaagtgctggtaccggattttcgtggtcgtatgcaggttgcgatcgatattctcaaaggcgaggcgcctgacgtatttaaccacaaccttgagaccgtgccacgcctgtataaggcagctcgtcctggtgcaaattaccagtggtctttagacttgctgcaaaaatacaaagaagttcggccggatatccggactaagtcgggacttatggtcggccttggcgaaaccaaagaagaaatactggaagtcatgaaagatcttcgtgcgcacgatgtcgacatgttgactatcggacagtatttgcagcctagccgccaccatattccggtagcacgctacgtgcaccccgacgagtttgaagagctgcgtgttgctggtgttgaaatgggctttagccacattgccagtgggccactcgtacgctcgtcttatcatgctgatttacaggcagcaggcgaaaccgtacgttaa

SEQ ID NO: 3124 - protein, 322 aa, Idiomarina loihiensis
MSKPVRVEPGVKMRDADKMALIPVQIIPTERDQMLRKPSWLKVKLPSSTERIDEIKQAMRSHGLHSVCEEASCPNLPECFNHGTASFMILGDICTRRCPFCDVAHGRPLPPDPEEAEKLGKTIRDMKVKYVVITSVDRDDLRDGGAQHFADCIREIREHSENNIQVEVLVPDFRGRMQVAIDILKGEAPDVFNHNLETVPRLYKAARPGANYQWSLDLLQKYKEVRPDIRTKSGLMVGLGETKEEILEVMKDLRAHDVDMLTIGQYLQPSRHHIPVARYVHPDEFEELRVAGVEMGFSHIASGPLVRSSYHADLQAAGETVR

SEQ ID NO: 3125 - DNA, 1002 bp, Kineococcus radiotolerans
  CDS (1)..(1002): transl_table=11
gtgacgatcgcaccggaaggccggcggatgctgcgcatcgaggcgcgcaacgccgagacgccgatcgagcggaagccgtcgtggatccgcacgaaggcccgcaccggccccgactacaccgagctcaaggggctggtgaagtccggcggcctgcacacggtgtgcgaggaggccggctgccccaacatctacgagtgctgggaggaccgcgaggccacgttcctcatcggcggctccgagtgcacccgccgctgcgacttctgccagatcgacacgggcaagccctccccgctggaccgcgacgagccgcggcgggtggcggagagcatcgccacgatgggcctgcgctacgccacgatcaccggtgtcgcccgcgacgacctcgacgacggcggggcgtggctgtacgccgagacgatccgcgccacccacgccgccaaccccggcaccggcgtcgagatcctcgtgcccgacttcaacggcaagccggagctgctgcagcaggtcttcgacgcccagccggaggtgttcgcccacaacgtcgagacggtgccgcggatcttcaagagcatccgccccgccttccgctacgagcgctccctcgacgtcatcacccagggccgcgacgcgggcctggtgacgaagtccaacctcatcctcgggatgggcgagaccgacgaggaggtcctcgaggcgctcgccgacctgcgcggggccgggtgcgacatcatcaccatcacccagtacctgcgtcccaccccgcgccaccaccccgtggagcgctgggtgaagccggagaagttcgtggagttctccgccgaggccgagcgcctgggcttcgccggggtcatggccggcccgctggtgcgttcctcctaccgcgccgggcggctgtgggcgcaggcgatgaagcggcgcggggtggcgatcccggcgcagctggcccacctcgacaaggagagccccgccgcgcaggaggcgtccagcctgctcgcccgctga

SEQ ID NO: 3126 - protein, 333 aa, Kineococcus radiotolerans
MTIAPEGRRMLRIEARNAETPIERKPSWIRTKARTGPDYTELKGLVKSGGLHTVCEEAGCPNIYECWEDREATFLIGGSECTRRCDFCQIDTGKPSPLDRDEPRRVAESIATMGLRYATITGVARDDLDDGGAWLYAETIRATHAANPGTGVEILVPDFNGKPELLQQVFDAQPEVFAHNVETVPRIFKSIRPAFRYERSLDVITQGRDAGLVTKSNLILGMGETDEEVLEALADLRGAGCDIITITQYLRPTPRHHPVERWVKPEKFVEFSAEAERLGFAGVMAGPLVRSSYRAGRLWAQAMKRRGVAIPAQLAHLDKESPAAQEASSLLAR

SEQ ID NO: 3127 - DNA, 966 bp, Klebsiella pneumoniae subsp
  CDS (1)..(966): transl_table=11
atgagtaaacccattgtgatggaacgcggtgttaagtaccgcgacgccgataaaatggcccttatcccggtgaaaaacgtggcaactgagcgtgaagctctgctcagaaaaccggaatggatgaaaatcaaacttccggcagactcgtcccgtatccagggaatcaaagcagcgatgcgtaagaacggcctgcactctgtgtgcgaagaggcctcctgcccgaaccttgcagaatgcttcaaccacggtaccgcgacctttatgatcctcggcgcgatctgtacccgccgttgcccgttctgcgacgtcgcgcatggacgcccggtcgcgccagatgcaaacgagccacaaaagctggcgcaaactatcgccgatatgggtctgcgctatgtcgtagtcacctcggtagaccgtgacgacctgcgtgatggcggcgcacagcattttgccgactgcatcagcgccattcgcgagaaaaacccgtcgattaagatcgaaacgctggttccggatttccgcggccgcatggatcgcgcacttgatattctgacggtgaccccgccggatgtcttcaaccataacctcgaaaacgtgccccgtctttatcgtcaggtacgtccgggcgcggattacaactggtcgctgaagctgctggagcgttttaaagaagcgcacccggagatcccgacgaaatccggcctgatggtaggtctgggcgaaaccaacgacgagatcatcgaagtgatgcgcgacctgcgtcgccatggcgtcaccatgctgacgttaggccagtatctgcagccgagccgtcaccacctgccggtgcagcgctacgtcagcccggaagagtttgaagagatgaaagcggaagcgatggcgatgggcttcacccacgccgcctgcggtcccttcgtccgctcttcctatcatgccgacctgcaggctaaagggatggaagttaaataa

SEQ ID NO: 3128 - protein, 321 aa, Klebsiella pneumoniae subsp
MSKPIVMERGVKYRDADKMALIPVKNVATEREALLRKPEWMKIKLPADSSRIQGIKAAMRKNGLHSVCEEASCPNLAECFNHGTATFMILGAICTRRCPFCDVAHGRPVAPDANEPQKLAQTIADMGLRYVVVTSVDRDDLRDGGAQHFADCISAIREKNPSIKIETLVPDFRGRMDRALDILTVTPPDVFNHNLENVPRLYRQVRPGADYNWSLKLLERFKEAHPEIPTKSGLMVGLGETNDEIIEVMRDLRRHGVTMLTLGQYLQPSRHHLPVQRYVSPEEFEEMKAEAMAMGFTHAACGPFVRSSYHADLQAKGMEVK

SEQ ID NO: 3129 - DNA, 990 bp, Leifsonia xyli subsp
  CDS (1)..(990): transl_table=11
gtgagcgccgaaccggagggccgccggatgctgcggctcgaggtccggaacgcgcagacaccgatcgagcgcaagccggagtggatcaagacccgcgccacaatggggcccgaataccggcagctgcattccctggtgaagtccgaaggtctgcacacggtctgccaggaggctggctgcccgaacatctacgagtgctgggaggaccgggaggcgaccttcctcatcggcgggtcacagtgtacgcgacgctgcgatttctgccagatcgacacggggaagccggccgagtttgaccgcgacgaaccgcggcgggtcgccgagtcggtcgcgcggatggggctgcgctattcgacggtcacaggggtcgcgcgggacgacctggaggacgagggcgcgtggctgtacgcggagacgatccgggagatccaccggcagagccccggcaccggggtcgaaatcctggtgcccgacttctcgggagaccccgaactcctcggcgaggtgttcggagcgcgaccagaggtcttcgcacacaacgtcgagaccgtgccgcgcatcttcaagcgcatccgcccggctttccgctacgaacgttccctcgacgtgatcgcgcaggggcgcgccgccgggctcatcacgaagtccaacctgattctcgggatgggcgaggaacgccaggagatcagccaggcgctgcaggatctgcacgacgcgggcaccgacatcatcacaatcacgcagtacctgcgcccgagcccgcggcacctcccggtcgcacgctgggttcgtcccgacgagttcgtggagctgagggacgaggccgaggcgatcggcttcctgggggtgctggccgggccgctcgtgcgctcctcgtaccgcgcgggacgcctctgggcgcagtcgatgcgcgcgaagggacgcactgtcccggaggagctgcggcacctggcggatgcgtcgctggggttcgctcaggcggtgtcctga

SEQ ID NO: 3130 - protein, 329 aa, Leifsonia xyli subsp
MSAEPEGRRMLRLEVRNAQTPIERKPEWIKTRATMGPEYRQLHSLVKSEGLHTVCQEAGCPNIYECWEDREATFLIGGSQCTRRCDFCQIDTGKPAEFDRDEPRRVAESVARMGLRYSTVTGVARDDLEDEGAWLYAETIREIHRQSPGTGVEILVPDFSGDPELLGEVFGARPEVFAHNVETVPRIFKRIRPAFRYERSLDVIAQGRAAGLITKSNLILGMGEERQEISQALQDLHDAGTDIITITQYLRPSPRHLPVARWVRPDEFVELRDEAEAIGFLGVLAGPLVRSSYRAGRLWAQSMRAKGRTVPEELRHLADASLGFAQAVS

SEQ ID NO: 3131 - DNA, 906 bp, Leptospira interrogans serogroup Icterohaemorrhagiae serovar
  CDS (1)..(906): transl_table=11
atgaatcctcttaaaaaaaaacctcgtactcattctcttcaaaatgctcctgaaaaaccagattggctcaaagtaaaactcgcctttcctgatccaaaaaataaccctgtcgcaattgtaagaaattctctagaagaaaaaaaactcaatacagtttgcgaaagcgcttcttgccctaacctaaatcactgctggtccagaaaaacagcgacttatatgttaggtggagatatttgtacaagacgttgttcctattgtgacgtagcttctggaaaaccttttcctctggatccagaagaacctaaaaggatagcagaatcttcgatcgctttaggtctcagacacgtagtcattacctcggttaatagagacgatcttgaagacggaggcgcagctcattttgcaaaaaccgtaaaagaaatccgtaaaggacttccagattgtaaaatagaacttttgattccagatctgaaagtaaaacaagaggctttagaaattatttttgaatgtaatcctgatatattcaatcataacttagaaacggtaaaaagactttttccagaagtggctcctcaaaaaagatatgaacgttctttagacgttttgaaaattgcttctgcaagaggatttctgacaaaaagtggtttaattttgggtatgggagaaactttagaagaagtaaaagaatgcatgcaagatcttgcaagtgttggagtttcccttttgacactgggacagtatttacaaccgacttcgactcatcttcccgtaaaagaatacgtagttccccaagtatttaaggatttacgaatatacggaaagtccatcggttttaagggagttttttcaggaccccttgtaagaagttcttatcacgcggacgaacaaatctcatggaacccgtag

SEQ ID NO: 3132 - protein, 301 aa, Leptospira interrogans serogroup Icterohaemorrhagiae serovar
MNPLKKKPRTHSLQNAPEKPDWLKVKLAFPDPKNNPVAIVRNSLEEKKLNTVCESASCPNLNHCWSRKTATYMLGGDICTRRCSYCDVASGKPFPLDPEEPKRIAESSIALGLRHVVITSVNRDDLEDGGAAHFAKTVKEIRKGLPDCKIELLIPDLKVKQEALEIIFECNPDIFNHNLETVKRLFPEVAPQKRYERSLDVLKIASARGFLTKSGLILGMGETLEEVKECMQDLASVGVSLLTLGQYLQPTSTHLPVKEYVVPQVFKDLRIYGKSIGFKGVFSGPLVRSSYHADEQISWNP

SEQ ID NO: 3133 - DNA, 906 bp, Leptospira interrogans
  CDS (1)..(906): transl_table=11
atgaatcctcttaaaaaaaaacctcgtactcattctcttcaaaatgctcctgaaaaaccagattggctcaaagtaaaactcgcctttcctgatccaaaaaataaccctgtcgcaattgtaagaaattccctagaagaaaaaaaactcaatacagtttgcgaaagcgcttcttgccctaacctaaatcactgctggtccagaaaaacagcgacttatatgttaggtggagatatttgtacaagacgttgttcctattgtgacgtagcttctggaaaaccttttcctctggatccagaagaacctaaaaggatagcagaatcttcgatcgctttagatctcagacacgtagtcattacctcggttaatagagacgatcttgaagacggaggcgcagctcattttgcaaaaaccgtaaaagaaatccgtaaaggacttccagattgtaaaatagaacttttgattccagatctgaaagtaaaacaagaggctttagaaattatttttgaatgtaatcctgatatattcaatcataacttagaaacggtaaaaagactttttccagaagtggctcctcaaaaaagatatgaacgttctttagacgttttgaaaattgcttctgcaagagggtttctgacaaaaagtggtttaattttgggtatgggagaaactttagaagaagtaaaagaatgcatgcaagatcttgcaagtgttggagtttcccttttgacactgggacagtatttacaaccgacttcgactcatcttcctgtaaaagaatacgtagttccccaagtatttaaggatttacgaatatacggaaagtccatcggttttaagggagttttttcagggccccttgtaagaagttcttatcacgcggacgaacaaatctcatggaacccgtag

SEQ ID NO: 3134 - protein, 301 aa, Leptospira interrogans
MNPLKKKPRTHSLQNAPEKPDWLKVKLAFPDPKNNPVAIVRNSLEEKKLNTVCESASCPNLNHCWSRKTATYMLGGDICTRRCSYCDVASGKPFPLDPEEPKRIAESSIALDLRHVVITSVNRDDLEDGGAAHFAKTVKEIRKGLPDCKIELLIPDLKVKQEALEIIFECNPDIFNHNLETVKRLFPEVAPQKRYERSLDVLKIASARGFLTKSGLILGMGETLEEVKECMQDLASVGVSLLTLGQYLQPTSTHLPVKEYVVPQVFKDLRIYGKSIGFKGVFSGPLVRSSYHADEQISWNP

SEQ ID NO: 3135 - DNA, 891 bp, Magnetococcus sp
  CDS (1)..(891): transl_table=11
atgattagcggagttgatccacagacccatctaccctcgggcaagccccgctggttaaaggtcaaggcccccacctcgccaggctatcttaagctcaagggcatgctgcgccagggggggctgcacaccgtgtgtgaagaggcgacctgccccaatatcggccagtgctggcatgagggtagtgccgcctttatgatcttgggggatacctgcacccgtcgttgtgccttctgcaatgttaagaccggtaaacctctgccccccaaccccgatgaaccccagcagttggccttaaccgcccagcgcatggaactcaaacatgtggtgatcacctcggtggatcgggatgatctggaggatggtggggcgggtcagtttattgcctgcattcaagccctgcggcgggtgctgccagaggcttcggtagaggtgttgacccccgatttccggcataagcagggtgctttggagcggctggtggcagccagacccgatgtgtttaaccataatgtggagacggtaccccggctctatgccaacgtgcggccagtctccagttatgccttctccctagaggtgctgcgccgtgccaaacagctcaatcctgaggggatgaccaagtcgggcattatgctggggttgggggaggatgaggctgaagtgctggcggtgtttgccgatctgcgtgccgccggggtggattatctgaccgtgggacaatatctgcgacccagccccgcccaccatgcggtggtgcgctattgggagccggagcgctttgaggcgttggggcagcaggctttacagctgggttttaagcgggtttccagcgcaccgttggcccgttcctcattccatgccagcgagctccacggggtagacaatgcatga

SEQ ID NO: 3136 - protein, 296 aa, Magnetococcus sp
MISGVDPQTHLPSGKPRWLKVKAPTSPGYLKLKGMLRQGGLHTVCEEATCPNIGQCWHEGSAAFMILGDTCTRRCAFCNVKTGKPLPPNPDEPQQLALTAQRMELKHVVITSVDRDDLEDGGAGQFIACIQALRRVLPEASVEVLTPDFRHKQGALERLVAARPDVFNHNVETVPRLYANVRPVSSYAFSLEVLRRAKQLNPEGMTKSGIMLGLGEDEAEVLAVFADLRAAGVDYLTVGQYLRPSPAHHAVVRYWEPERFEALGQQALQLGFKRVSSAPLARSSFHASELHGVDNA

SEQ ID NO: 3137 - DNA, 963 bp, Mannheimia succiniciproducens
  CDS (1)..(963): transl_table=11
gtgagtaccgcatttaaaatggaacgaggggtaaaataccgcgatgcagcgaaaacctcgatcattcaagttaaaaatattgatcccgaccaggagttactgcaaaaaccttcctggatgaagataaaacttcccgccaattcggctaaaatccaaagtattaaaaacggtatgcgtcgtcacgggttaaattccgtttgtgaagaagcttcatgccctaatttgcacgaatgttttaatcatggcacggcgacatttatgatcctcggggcaatttgtacgcgccgttgcccgttctgtgacgttgcgcacggtaaaccgttgccgccggatcctgaagaaccgaaaaaattagcggaaactattcaggatatgaaattgaaatatgtggtgattacttccgttgaccgcgacgacttgcctgatcgcggtgcggggcattttgccgaatgtatcaaggaaatccgcaaaattaacccgaatacccaaattgaaattttggtgcctgatttccgcggacgtattgaacaggcgttggataaattaaaagacaatccgccggatgtgtttaatcataatctggaaaatgtacctcgtttgtatcgcgatattcgtccgggtgcggattatcaatggtcgctgaaattattacgtgaatttaaagcattattcccgcatattccaaccaaatcaggcttaatggtaggattgggcgagacaaacgaagaaattttaaacgtgatgcaagacctgagaaataacggggtaaccatgctgaccttagggcaatatttgcagccaagccgtttccatttaccggtcgcccgttatgtgccgcctgaagaatttgacgaattccgcaccaaagcagaagtcatgggctttgaacacgcagcctgcggtccgtttgtgcgttcttcttaccatgcggatttacaagccagcggcggattggtgaagtaa

SEQ ID NO: 3138 - protein, 320 aa, Mannheimia succiniciproducens
MSTAFKMERGVKYRDAAKTSIIQVKNIDPDQELLQKPSWMKIKLPANSAKIQSIKNGMRRHGLNSVCEEASCPNLHECFNHGTATFMILGAICTRRCPFCDVAHGKPLPPDPEEPKKLAETIQDMKLKYVVITSVDRDDLPDRGAGHFAECIKEIRKINPNTQIEILVPDFRGRIEQALDKLKDNPPDVFNHNLENVPRLYRDIRPGADYQWSLKLLREFKALFPHIPTKSGLMVGLGETNEEILNVMQDLRNNGVTMLTLGQYLQPSRFHLPVARYVPPEEFDEFRTKAEVMGFEHAACGPFVRSSYHADLQASGGLVK

SEQ ID NO: 3139 - DNA, 969 bp, Mesorhizobium sp
  CDS (1)..(969): transl_table=11
atggtcaccgtcctcgacaccgtctccaagccgcgcccgcgccatcccgagaaggcgcatcggcccgatcaggaagttctgcgcaagccggactggatccgtgtcaaagcgcctacctccaggggctatttggaaacgcgcgagatcgtgaagaccaacaagcttgtcacggtctgcgaggaggcgggctgtcccaatatcggcgaatgctgggacaagaagcacgcgaccttcatgatcatgggtgagatctgcacccgtgcctgcgccttctgtaatgtcgcgacgggcattcccggcccgctcgatccgaacgagcccgccaacgtggcgaaagctgtccgcgagatggggctgaaccacgtcgtcatcacctccgtcgaccgggacgatctgaatgacgggggcgcgcagcattttgccgacgtgatccaagcgatccgtgcggcgacgccgcagaccaccatcgagatcctgacgccggacttcctgcgcaaggacggcgctttggagttggtcgtggccgccaaaccagatgtcttcaaccacaatctggagacagtcccctcgaaatacctgacggtgcgccctggcgcccgctacttccattccatccggctcttacagagggtgaaggagatcgatccttcgatctttacgaaatccggaattatggtcgggcttggcgaggagcgaaacgaggtgcttcagctgatggatgacctgcgctcggcggatgtcgatttcatcacaatcgggcagtatctccagcccactaaaaagcaccacccagtgaagaagttcgtgacgccggaagagttcaaatcctacgagaccatcgcctacaccaagggctttctaatggcttcctccagcccgctcacgcgatcttcgcaccatgcgggcgaggatttcgagcgcttgcgcgccgcgcgcgaggcacggctctccctggcgaagacggcttaa

SEQ ID NO: 3140 - protein, 322 aa, Mesorhizobium sp
MVTVLDTVSKPRPRHPEKAHRPDQEVLRKPDWIRVKAPTSRGYLETREIVKTNKLVTVCEEAGCPNIGECWDKKHATFMIMGEICTRACAFCNVATGIPGPLDPNEPANVAKAVREMGLNHVVITSVDRDDLNDGGAQHFADVIQAIRAATPQTTIEILTPDFLRKDGALELVVAAKPDVFNHNLETVPSKYLTVRPGARYFHSIRLLQRVKEIDPSIFTKSGIMVGLGEERNEVLQLMDDLRSADVDFITIGQYLQPTKKHHPVKKFVTPEEFKSYETIAYTKGFLMASSSPLTRSSHHAGEDFERLRAAREARLSLAKTA

SEQ ID NO: 3141 - DNA, 969 bp, Methylococcus capsulatus
  CDS (1)..(969): transl_table=11
atgaaaaccctggatgaaaatcaggcgccgtcgcgccagacgccggagtcccatcggcggggcgcggaaaaactctcgcgcatccccgtcaaggtcgaacccggcgcgcctctacgcaagcccgactggattcgggtccgggccgggtcgggcgacgaagttcggcgcgtgaagcggctgctgcgcgagcgcggtctgcacagcgtctgcgaagaagcggcctgtcccaatctggcggaatgtttcggccacggcaccgccaccttcatgatcctcggcgacatctgcacccgccgctgccccttctgcgacgtcgcccacggccgcccggcgccgcccgacccggccgaacccgagcgtctcgcggaaaccatcgccctgctgagactgcgctacgtggtgatcacctcggtcgaccgggacgatctgcgcgacggcggcgcggcccatttcgccgcctgcatccgggccttgcgcacacgctcccccgcgctgtccgtcgagattctgaccccggatttccgtggacggatggagattgccctcgatttgctcgccgccgatccgccggacgtgttcaaccacaacatcgaaaccgtgccccgcctgtaccgccaggcgcggcccggcgccgactaccgccagtcgctggagctcctggcgcggttccgcgacaaggtgccgggcgtgccgaccaagtcggggctgatgctcggcctgggcgagaccctggacgaggtgcgcgaggcgctgcgcgatctccgcggccatggctgcgagatgctcacgctgggacagtatttgcagcccagtcgggaccacctgcccgtggtgcgctacgttccgccggcggaatttgatgaactcgcggggtatgcgcgggagctgggattcgccagcgtcgccagcgctcccctggtgcgttcgtcgtatcatgccgaccagcaggccgcgatcatcggacgctga

SEQ ID NO: 3142 - protein, 322 aa, Methylococcus capsulatus
MKTLDENQAPSRQTPESHRRGAEKLSRIPVKVEPGAPLRKPDWIRVRAGSGDEVRRVKRLLRERGLHSVCEEAACPNLAECFGHGTATFMILGDICTRRCPFCDVAHGRPAPPDPAEPERLAETIALLRLRYVVITSVDRDDLRDGGAAHFAACIRALRTRSPALSVEILTPDFRGRMEIALDLLAADPPDVFNHNIETVPRLYRQARPGADYRQSLELLARFRDKVPGVPTKSGLMLGLGETLDEVREALRDLRGHGCEMLTLGQYLQPSRDHLPVVRYVPPAEFDELAGYARELGFASVASAPLVRSSYHADQQAAIIGR

SEQ ID NO: 3143 - DNA, 978 bp, Methylobacillus flagellatus
  CDS (1)..(978): transl_table=11
atgacagaaattaccgaacgtatcgtcccgccgccccgcaaggtcgcgggcgtcaaggaatccagcgccgagaagatggcgcgcatcccgatcaagatcattcccatgccggctatgcgcaagccggaatggatacgcatgaaagtgccggatagcgcacgtttccgcgaaatcaagcaggtgctgcgcgagaataatctacatactgtctgtgaagaagcatcctgtcccaatatcggggaatgcttcagtggcggcaccgccacgttcatgatccttggcgacatttgcacccgccgttgcccgttttgcgatgtatctcatggcaaaccattgccacccgatgccaacgagcctgaaaacctgggccgtaccattgcccagatgcgcctcaagtatgtcgtcatcaccagtgtggaccgcgacgacttgcgtgacggtggcgcgcagcattttgtcgattgcatcgcagcagtacgcgcccactcaccacagatcaaggtggaaatcctcgtgcctgacttccgcggccgcctggatcgcgccatccatattctcaaggccgctcctcccgacgtcatgaaccacaatctggaaactgtgccgcgactatacaaggaggcgcgccctggctccgattaccagaactcgctggatttgctcaaggaattcggcaagctgcaccccgaagtgccaaccaagtccggcctgatgctggggttgggcgaaaccgacgaggaaattttggatgtcatgcgcgacctgcgggcgcacaatgtcaccatgttgaccctcggccaatatctgcagcccagcccgcaccatttgccggtcaagcgtttcgtcacgccgcaacgctttgccgagttcgagcggcaagcccttgccatggggttcacccatgccgcctgcggccccatggtgcgctcctcctaccatgccgatcatcaggcacaacaagcaggtgtcaatttctaa

SEQ ID NO: 3144 - protein, 325 aa, Methylobacillus flagellatus
MTEITERIVPPPRKVAGVKESSAEKMARIPIKIIPMPAMRKPEWIRMKVPDSARFREIKQVLRENNLHTVCEEASCPNIGECFSGGTATFMILGDICTRRCPFCDVSHGKPLPPDANEPENLGRTIAQMRLKYVVITSVDRDDLRDGGAQHFVDCIAAVRAHSPQIKVEILVPDFRGRLDRAIHILKAAPPDVMNHNLETVPRLYKEARPGSDYQNSLDLLKEFGKLHPEVPTKSGLMLGLGETDEEILDVMRDLRAHNVTMLTLGQYLQPSPHHLPVKRFVTPQRFAEFERQALAMGFTHAACGPMVRSSYHADHQAQQAGVNF

SEQ ID NO: 3145 - DNA, 891 bp, Moorella thermoacetica
  CDS (1)..(891): transl_table=11
atggttacttcaccttcaggaacagggacgcggcggatgccgccctggctccataaacgcctgccggcttccggggatatagaggccacccggcggcttctggccgacctgcaccttaacaccgtctgccagagcgctcgctgccccaaccagggggagtgtttcgccagcaggacggccacctttatgatcttgggcaacacctgtacccgcaactgccgcttctgcgccgtggaacacggccagccggaggccattgatgaggacgaaccccggcgggtggccgaagcagcccggcgcctggggctcaagcacgtcgtcgttacctccgtcacccgggacgacctgcccgacggtggcgccggccactttgccgccaccattactgccctgcgccaggccctgccgggggcctatatcgaggtcctcaccccggatttccgtggtagtcgtgctgccctggccgccgtcgcccgggccaggccggatatctttaaccataacgttgagacggtgccccgtctttacccggatgtccggccccaggccgattaccgccgcagccttgacgttctaaaacaaatgaaggaactggacgcgacgatctatacaaagtccggcctgatggtcggcgtgggggaaagcagggaagaggtcctggcagtaatggccgacctgcgggctgtcaactgtgacatcctgaccatcggccagtacctgcggccatccccccggcacttggaaatcaaagagtatgtccctccagagacctttacctggtatgcccaaaaaggccgggagatgggctttctctatgtggctgcgggaccctatgtccgcagctcttatcacgccgctgagtttagcgtgaagatagccggggtaaagtaa

SEQ ID NO: 3146 - protein, 296 aa, Moorella thermoacetica
MVTSPSGTGTRRMPPWLHKRLPASGDIEATRRLLADLHLNTVCQSARCPNQGECFASRTATFMILGNTCTRNCRFCAVEHGQPEAIDEDEPRRVAEAARRLGLKHVVVTSVTRDDLPDGGAGHFAATITALRQALPGAYIEVLTPDFRGSRAALAAVARARPDIFNHNVETVPRLYPDVRPQADYRRSLDVLKQMKELDATIYTKSGLMVGVGESREEVLAVMADLRAVNCDILTIGQYLRPSPRHLEIKEYVPPETFTWYAQKGREMGFLYVAAGPYVRSSYHAAEFSVKIAGVK

SEQ ID NO: 3147 - DNA, 924 bp, Mycobacterium avium
  CDS (1)..(924): transl_table=11
gtgactgtcgcacccgagggacgcaaactgctgcgcctggaagtgcgcaacgccgacaccccgatcgagcgcaaaccgccgtggatccgggtgcgggcccggatggggccggaatacaccgagctcaagagcctggtccggcgcgaggggctgcacacggtctgcgaagaggccggctgccccaacatcttcgaatgctgggaggaccgcgaggccaccttcctgatcggcggcgaccagtgcacccgtcgctgcgacttctgccagatcgacaccggcaagcccgccgagctggaccgcgacgagccccgccgggtggccgacagcgtgcgcacgatggggctgcgctacgccacggtcaccggggtggcccgcgacgacctgcccgacggcggcgcctggctgtacgccgagacggtgcgcgccatcaaggagctcaacccgtcgaccggtgtcgagctgttgatccccgacttcaacggccggcccgaccggctcgccgaggtgttcgggtcgcgcccggaagtgttggcgcacaacgtcgaaacggtgccgcggatcttcaaacggatccgcccggccttcacctaccggcgcagcctggacgtgctgaccgcggcccgcgaggccgggctggtcaccaagagcaacctcatcctcggcctgggcgaaacccccgacgaggtgcgcaccgcgctggccgacctgcgcggcgccggctgcgacatcatcaccatcacccagtacctgcgcccgtcggcccgccaccacccggtcgagcgctgggtgaagccggaggaattcgtcgagttcgcgcggcatgccgaagagctgggcttctccggggtgctggccgggccgctggtgcgctcgtcgtaccgcgctgggcggctctaccggcaggccgcccgcgcccgcgcctag

SEQ ID NO: 3148 - protein, 307 aa, Mycobacterium avium
MTVAPEGRKLLRLEVRNADTPIERKPPWIRVRARMGPEYTELKSLVRREGLHTVCEEAGCPNIFECWEDREATFLIGGDQCTRRCDFCQIDTGKPAELDRDEPRRVADSVRTMGLRYATVTGVARDDLPDGGAWLYAETVRAIKELNPSTGVELLIPDFNGRPDRLAEVFGSRPEVLAHNVETVPRIFKRIRPAFTYRRSLDVLTAAREAGLVTKSNLILGLGETPDEVRTALADLRGAGCDIITITQYLRPSARHHPVERWVKPEEFVEFARHAEELGFSGVLAGPLVRSSYRAGRLYRQAARARA

SEQ ID NO: 3149 - DNA, 936 bp, Mycobacterium bovis
  CDS (1)..(936): transl_table=11
atgagtgtcgctgccgagggccggcgcctgttacgcctggaggtgcgcaacgcgcagaccccaatcgagcgcaaaccgccgtggatcaagacacgagcccgcatcgggccggagtacaccgagctgaagaacctggtccgccgcgaggggctgcacacggtctgcgaggaggccggctgccccaacatcttcgaatgctgggaggaccgagaagccaccttcctgatcggcggtgaccagtgcacccgccgatgcgatttctgccagatcgacaccggaaagcccgccgagctggaccgcgacgagccacgccgagtcgccgacagcgtgcgcacgatgggcctgcgctatgccaccgtcaccggcgtggctcgcgacgacctgcctgacggcggggcctggctgtacgccgcgaccgtgcgcgccatcaaggaactcaatccgtcgaccggcgtcgaactgctgattcccgacttcaacggcgaaccaacccggctggccgaggtcttcgagtccggcccggaagtcctggcacacaatgtcgaaaccgtgccccgtatcttcaagcggatccggccggcgttcacgtaccggcgcagcctgggtgtgcttaccgctgcgcgcgacgccggcctggtcaccaagagcaacctcatcctcggcctgggcgaaacctccgacgaggtgcgcaccgccctgggcgatctgcgcgacgccggctgcgacatcgttaccatcacccaatacctgcggccgtcggcgcgccaccatccggtcgagcgctgggtgaagcccgaggagttcgtccagttcgcgcgattcgccgaagggctgggcttcgccggggtattggcgggacccctggttaggtcgtcatatcgggcgggccggctctacgaacaggcacgtaactcacgggccttggcatcccgctag

SEQ ID NO: 3150 - protein, 311 aa, Mycobacterium bovis
MSVAAEGRRLLRLEVRNAQTPIERKPPWIKTRARIGPEYTELKNLVRREGLHTVCEEAGCPNIFECWEDREATFLIGGDQCTRRCDFCQIDTGKPAELDRDEPRRVADSVRTMGLRYATVTGVARDDLPDGGAWLYAATVRAIKELNPSTGVELLIPDFNGEPTRLAEVFESGPEVLAHNVETVPRIFKRIRPAFTYRRSLGVLTAARDAGLVTKSNLILGLGETSDEVRTALGDLRDAGCDIVTITQYLRPSARHHPVERWVKPEEFVQFARFAEGLGFAGVLAGPLVRSSYRAGRLYEQARNSRALASR

SEQ ID NO: 3151 - DNA, 945 bp, Mycobacterium leprae
  CDS (1)..(945): transl_table=11
gtgactgttgcgcccgaagactgccgcttactgcgattagaagtgcgcaacgcacagaccccgatcgagcgcaagccgccatggatcaaaacccgggcccgcatgggaccagagtacaccgcgctaaaaaacctggtccgccgtgttgctctgcacacggtctgcgaagaggccggttgccccaacatcttcgaatgctgggaagatcgggaagccacctttctgatcggtggtgatcagtgcacccgccggtgcgacttctgccagatcgacaccgggaagccggctgcgttggaccgcgacgagccccgacgggtcgccgagagcgtgcaaaccatggggctgcggtataccaccgtcactggggtcgcccgcgacgacttgcccgacggcggtgcctggctgtacgccacaaccgtgcgagccattaaagagctcaatccgtcgaccggggtcgaactgttgattccggacttcaacgggcagcccgcgcgactggcggaagtcttcgactcacgcccacaagtgttggcgcacaacgtcgaaaccgtgccacgcatctttaaacggattcggcctgctttcacctaccaacgcagcctggacgtgctcactgcagcgcgcgaggccggcctggtcaccaaaagcaacctgatcctcggcctaggcgaaaccgctgatgaggtgcgcactgccctggccgatttgcgcaaaaccggctgcgacatcgtcaccatcacccaatatctgcgtccgtcgatgcgccaccacccggtcgagcgctgggtcaggcctgaggagttcgtcgagtacacgcaatacgccgaaggtttgggcttctcgggtgtgctgggcgggccgctggtgcggtcatcgtatcgcgccggtcggctctacgagcaggctgcaggcacccggaccgtcggtacctcggtatcccgttaa

SEQ ID NO: 3152 - protein, 314 aa, Mycobacterium leprae
MTVAPEDCRLLRLEVRNAQTPIERKPPWIKTRARMGPEYTALKNLVRRVALHTVCEEAGCPNIFECWEDREATFLIGGDQCTRRCDFCQIDTGKPAALDRDEPRRVAESVQTMGLRYTTVTGVARDDLPDGGAWLYATTVRAIKELNPSTGVELLIPDFNGQPARLAEVFDSRPQVLAHNVETVPRIFKRIRPAFTYQRSLDVLTAAREAGLVTKSNLILGLGETADEVRTALADLRKTGCDIVTITQYLRPSMRHHPVERWVRPEEFVEYTQYAEGLGFSGVLGGPLVRSSYRAGRLYEQAAGTRTVGTSVSR

SEQ ID NO: 3153 - DNA, 924 bp, Mycobacterium paratuberculosis
  CDS (1)..(924): transl_table=11
gtgactgtcgcacccgagggacgcaaactgctgcgcctggaagtgcgcaacgccgagaccccgatcgagcgcaaaccgccgtggatccgggtgcgggcccggatggggccggaatacaccgagctcaagagcctggtccggcgcgaggggctgcacaccgtctgcgaagaggccggctgccccaacatcttcgaatgctgggaggaccgcgaggccaccttcctgatcggcggcgaccagtgcacccgtcgctgcgacttctgccagatcgacaccggcaagccagccgagctggaccgcgacgagccccgccgggtggccgacagcgtgcgcacgatggggctgcgctacgccacggtcaccggggtggcccgcgacgacctgcccgacggcggcgcctggctgtacgccgagacggtgcgcgccatcaaggagctcaacccgtcgaccggtgtcgagctgttgatccccgacttcaacggccggcccgaccggctcgccgaggtgttcgggtcgcgcccggaagtgttggcgcacaacgtcgaaacggtgccgcggatcttcaaacggatccgcccggccttcacctaccggcgcagcctggacgtgctgaccgcggcccgcgaggccgggctggtcaccaagagcaacctcatcctcggcttgggcgaaacccccgacgaggtgcgcaccgcgctggccgacctgcgcggcgccggctgcgacatcatcaccatcacccagtacctgcgcccgtcggcccgccaccacccggtcgagcgctgggtgaagccggaggaattcgtcgagttcgcgcggcatgccgaagagctgggcttctccggggtgctggccgggccgctggtgcgctcgtcgtaccgcgccgggcggctctaccggcagaccgcccgcgcccgcgcctag

SEQ ID NO: 3154 - protein, 307 aa, Mycobacterium paratuberculosis
MTVAPEGRKLLRLEVRNAETPIERKPPWIRVRARMGPEYTELKSLVRREGLHTVCEEAGCPNIFECWEDREATFLIGGDQCTRRCDFCQIDTGKPAELDRDEPRRVADSVRTMGLRYATVTGVARDDLPDGGAWLYAETVRAIKELNPSTGVELLIPDFNGRPDRLAEVFGSRPEVLAHNVETVPRIFKRIRPAFTYRRSLDVLTAAREAGLVTKSNLILGLGETPDEVRTALADLRGAGCDIITITQYLRPSARHHPVERWVKPEEFVEFARHAEELGFSGVLAGPLVRSSYRAGRLYRQTARARA

SEQ ID NO: 3155 - DNA, 945 bp, Mycobacterium smegmatis
  CDS (1)..(945): transl_table=11
gtgactgtcgtgccagagggacgcaagctgctgcgactggaggtccgcaacgcgcagacccccatcgagcgcaagccaccgtggatcaagacccgcgccaagatgggccccgagtacaccgagctcaagggtctggtgcggcgcgagggtctgcacacggtctgtgaagaggccggctgccccaacatcttcgaatgctgggaggaccgcgaggccacgttcctcatcggcggtgaacagtgcacgcggcgttgtgacttctgccagatcgacaccggcaagccggccgacctggaccgtgacgaaccgcgccgggtcgccgagagcgtgcaggccatgggtctgcggtactcgacggtcacgggcgtcgcacgcgacgacctgcccgacggcggcgcctggctgtacgccgagaccgtgcgctacatcaagcgcctcaaccccaacacgggtgtcgaacttctgatccccgacttcaacggcaaccccgagcagctcgaggaagttttcgagtcgcgtccggaagtgttggcgcacaacgtcgaaaccgtgccgcgcatcttcaagcggatccgcccggcgttccgttacgaccgcagcctcgcggtgatcaccgcggcgcgcaacttcggtctggtcaccaagtccaacctgatcctcggtatgggcgagaccatcgacgaggtgcgcaccgcgctgcgtgacctgcacgacgccggctgcgacatcatcaccatcacgcagtacctgcgcccgtcgccgcgtcaccacccggtggagcggtgggtgcaccccgacgaattcgtcgagctctcggcctatgccgagggtctcggattcgccggagtgttggccgggccactcgtgcggtcgtcctaccgcgcgggcaagctctatgcacaggccgcgcgggtgcgattcgcagatcagccccccgtatcctga

SEQ ID NO: 3156 - protein, 314 aa, Mycobacterium smegmatis
MTVVPEGRKLLRLEVRNAQTPIERKPPWIKTRAKMGPEYTELKGLVRREGLHTVCEEAGCPNIFECWEDREATFLIGGEQCTRRCDFCQIDTGKPADLDRDEPRRVAESVQAMGLRYSTVTGVARDDLPDGGAWLYAETVRYIKRLNPNTGVELLIPDFNGNPEQLEEVFESRPEVLAHNVETVPRIFKRIRPAFRYDRSLAVITAARNFGLVTKSNLILGMGETIDEVRTALRDLHDAGCDIITITQYLRPSPRHHPVERWVHPDEFVELSAYAEGLGFAGVLAGPLVRSSYRAGKLYAQAARVRFADQPPVS

SEQ ID NO: 3157 - DNA, 978 bp, Mycobacterium sp
  CDS (1)..(978): transl_table=11
gtgaccgtcaccccttcgggatccaatggcgccggctccgcggctccggaaggccgcaagctgctgcgtctcgaggtccgtaacgcccagacgccgatcgagcgcaagccgccgtggatcaagacccgcgccaggatgggcccggagtacaaagagctcaaatcgctggtcaagcgcgagggcctgcacaccgtgtgcgaagaggccggctgccccaacatcttcgaatgctgggaggaccgcgaggccaccttcctgatcggcggcgagcagtgcacccggcgctgcgacttctgccagatcgacaccggcaagccgtcagaactcgaccgcgacgaacctcgccgggtcgccgagagcgttcaggccatgggtctgcggtactcgacggtgacgggtgtggcccgcgacgatctgcccgacggcggcgcctggctctacgccgagacggtgcgcgagatcaagcgactcaaccccaacaccggcgtcgagttgctgatccccgatttcaacggagacccggcgctgctggcgcaggtcttcgagtcgcgcccagaagtgttggcgcacaacgtcgaaacggtgccgcgcatcttcaagcggatccggccggccttccgctacgaacgcagcctcgcggtgttgaccgcggcccgcgacgacaacctggtcaccaagagcaacctgatcctcggcatgggtgagacgcccgacgaggtgcgcaccgcgctggtcgacctgcacgaggcgggctgcgacatcatcacgatcacgcagtatctgcggccctcgccgcgccaccatccggtggaacgctgggtgaaaccggaggagttcgtcgagttcgcgcagttcgccgaagggctcggattcgccggggtgctgtccggtccgctggtgcggtcgtcgtaccgggcggggcggctgtacgcgcaggccgcgcggctgaaaccggccgcgacgccacccgtatcctga

SEQ ID NO: 3158 - protein, 325 aa, Mycobacterium sp
MTVTPSGSNGAGSAAPEGRKLLRLEVRNAQTPIERKPPWIKTRARMGPEYKELKSLVKREGLHTVCEEAGCPNIFECWEDREATFLIGGEQCTRRCDFCQIDTGKPSELDRDEPRRVAESVQAMGLRYSTVTGVARDDLPDGGAWLYAETVREIKRLNPNTGVELLIPDFNGDPALLAQVFESRPEVLAHNVETVPRIFKRIRPAFRYERSLAVLTAARDDNLVTKSNLILGMGETPDEVRTALVDLHEAGCDIITITQYLRPSPRHHPVERWVKPEEFVEFAQFAEGLGFAGVLSGPLVRSSYRAGRLYAQAARLKPAATPPVS

SEQ ID NO: 3159 - DNA, 984 bp, Neisseria gonorrhoeae
  CDS (1)..(984): transl_table=11
atgagtgaaatcaaaaccgacgaccccaaacgcggcatcaaactcagaggcgcggacaaaaccgcccgcatccccatcaaagtcgtcccccttcaggaaaaactgaaaaagcccgaatggatacgcgccaaactcccatcgcgcaaattctttgaaatcaaagacattttgcgcgaacaaaagatgcacaccgtttgcgaggaagcctcctgccccaacatcggcgaatgcttcagcaaaggcacggcgaccttcatgattatgggcgacatctgcacccgccgctgcccgttctgcgacgtgggacacggccgtccgaatatgctcgaccccgacgagccgaaaaacctcgcagaatccgtcaaagccatgaacctgcgttacgtcgtcatcacctcggttgaccgcgacgacctgcgcgacggcggcgcccaacacttcgccgactgcatcaaagccatccgcgaaaccagcccgaacaccaaaatcgaaatcctcgtccccgacttccgaggccgcttggacatcgcactgaaaatccttgccgaaaccccgcccgacgtgatgaaccacaacttggaaacccatccgagcctgtacagaaaagcccgtcccggtgccaattatcaacattctttagacttattaaaacgttataaagaaatgatgccgcatatcccgaccaaatccggcattatggtaggcttgggcgaaacagacgaagacgtgcgtgaaattatgcgcgatatgcgggcgcacaatatcgagatgattaccatcggacagtacctccagccttcagacggacacttgcctgtcttgcgctacgttacacccgaacaattcaaaatatttgaaaaagaagcatacgaactgggctttaccaatgccgccatcggcgcgatggtacgttcaagttaccatgccgacgaacaggcggcggaagccttacgcgaaagccacggcggttgcgggcatcattaa

SEQ ID NO: 3160 - protein, 327 aa, Neisseria gonorrhoeae
MSEIKTDDPKRGIKLRGADKTARIPIKVVPLQEKLKKPEWIRAKLPSRKFFEIKDILREQKMHTVCEEASCPNIGECFSKGTATFMIMGDICTRRCPFCDVGHGRPNMLDPDEPKNLAESVKAMNLRYVVITSVDRDDLRDGGAQHFADCIKAIRETSPNTKIEILVPDFRGRLDIALKILAETPPDVMNHNLETHPSLYRKARPGANYQHSLDLLKRYKEMMPHIPTKSGIMVGLGETDEDVREIMRDMRAHNIEMITIGQYLQPSDGHLPVLRYVTPEQFKIFEKEAYELGFTNAAIGAMVRSSYHADEQAAEALRESHGGCGHH

SEQ ID NO: 3161 - DNA, 891 bp, Neorickettsia sennetsu
  CDS (1)..(891): transl_table=11
atggaacgaacgatagaaaagcctaggattcgtgtttctgcggataatcgtgcttttctcgagacttccaggcttgtaagtgcatgtgggttaaacactgtttgccaagaggctgcctgtccgaacattagtgagtgctggagcagtaagcatgtcaccgtgatgattttgggttctgtctgcacgagggcttgtagattttgtaatgttacgaccggcaagcctgagttactcgaccctcatgaaccggaaaaactagcttcggcagtaggtaagcttggcttgaggcacgttgttataacttctgttgatagggatgatcttgacgacgggggtgcagaacattttgcaagctgcgtaaggagaattagagaaacttcgcctggtacgagtatagaagttctcactccggactttcttggtaaggtaggtgcaagggacatcataatagctgcggcgccggatgttttcaatcataatgtggagactgtgccacgtctgcatcctaaaataaggattaaggcaagatactttaatagtctttccttattggaggaagtcaaaagaaaggatccacggatttttacgaagtctggtctaatgctgggacttggtgaggaaagaagtgaggttttgcaggttatggacgatatgcgtgtggcagggatcgactttttaactattggtcaatatctgcggccaagcaagaaacatatggaggtgcagcgctatgcaacagatgaggaatttcaatattacaaggaagctgcgtacgcacgggggtttctcatggttgcgtcaagtgctttgacacgttcttcttatcatgcggacgaagattttttgcatctaaaaaatgctagagctggggctctggcgaagttggtctaa

SEQ ID NO: 3162 - protein, 296 aa, Neorickettsia sennetsu
MERTIEKPRIRVSADNRAFLETSRLVSACGLNTVCQEAACPNISECWSSKHVTVMILGSVCTRACRFCNVTTGKPELLDPHEPEKLASAVGKLGLRHVVITSVDRDDLDDGGAEHFASCVRRIRETSPGTSIEVLTPDFLGKVGARDIIIAAAPDVFNHNVETVPRLHPKIRIKARYFNSLSLLEEVKRKDPRIFTKSGLMLGLGEERSEVLQVMDDMRVAGIDFLTIGQYLRPSKKHMEVQRYATDEEFQYYKEAAYARGFLMVASSALTRSSYHADEDFLHLKNARAGALAKLV

SEQ ID NO: 3163 - DNA, 945 bp, Nitrosomonas europaea
  CDS (1)..(945): transl_table=11
atggccgctgacacccatcaacgaggtgccgccaaaacggcacgcaacccggtcaaaatcgatctggaacaatccggacagttattgcgcaagccttcctggattcgtgtacgttcatccaacagtcagaaatatctggaagtaaaacgtctgctgcgtgaaaacagattacataccgtttgtgaggaagcctcctgcccgaatatcggggaatgcttcggtcgtggcacagcaacattcatgatactcggtgatctgtgcaccagacgctgcccgttttgtgatgtggcacacggccggcctcatgcgcccgatcctgatgagccgatgcacctggccaattccattgcggtactgaagctcaattatgtcgtcattaccagcgtggaccgtgatgacctcagagatggcggtgcgcaacactttgcagactgtatccgcgcaattcgtacccagtctccacaaacacggatcgagattctcgtccccgattttcgcggcagactggaagtggcgctggaaaaactgtctgcctgcccgcctgacgtgatgaaccataatctggagaccgtaccacgcctgtataagcaatgccggccgggcgcagattacatgcattcattacagctgctcaaggatttcaaggcagctttccctcatatcccgaccaagtccggtctgatgcttggactgggagaaaccgatgaagaaatcatcgaggtcatgcgcgatttacgcgcacatcaggttgatatgctgactgttggccaatatctgcagcccagcaaaggacaccaccccgtcatgcgttacgtttcacccgaagatttcaaaaccttcgagcgcatcgctacaaatctgggattcagccatgctgcttgcggtccgatggtgcgttcgagttaccatgctgatcagcaggcgcacgaagctggcattgaataa

SEQ ID NO: 3164 - protein, 314 aa, Nitrosomonas europaea
MAADTHQRGAAKTARNPVKIDLEQSGQLLRKPSWIRVRSSNSQKYLEVKRLLRENRLHTVCEEASCPNIGECFGRGTATFMILGDLCTRRCPFCDVAHGRPHAPDPDEPMHLANSIAVLKLNYVVITSVDRDDLRDGGAQHFADCIRAIRTQSPQTRIEILVPDFRGRLEVALEKLSACPPDVMNHNLETVPRLYKQCRPGADYMHSLQLLKDFKAAFPHIPTKSGLMLGLGETDEEIIEVMRDLRAHQVDMLTVGQYLQPSKGHHPVMRYVSPEDFKTFERIATNLGFSHAACGPMVRSSYHADQQAHEAGIE

SEQ ID NO: 3165 - DNA, 1059 bp, Nocardia farcinica
  CDS (1)..(1059): transl_table=11
gtgacctcagtcgacaccccgacaccgcacggcggcacccccgccccggcccccgccaccgcgaacggccgcaagctcctgcgcatcgaggcgcgcaacgcgcagaccccgatcgagcgcaaacccaagtggatccgcacgcgcgccaccatgggcccggagtactccgagctcaagggcttggtcaaacgcgaaggcctgcacaccgtctgcgaggaagcgggctgccccaacatcttcgaatgctgggaagaccgcgaggcgacgttcctcatcggcggcgagcagtgcacccggcgctgcgatttctgccagatcgacaccggcaaaccggccgccctcgaccgtgacgagccccgccgcgtcgccgagtccgtccaggcgatggggctgcgctactccaccatcaccggcgtcgcccgcgacgacctggaggacggcggcgcctggctctacgccgagaccgtgcgtgccatcaagcgcctcaaccccgccaccggtgtcgagctgctcatccccgacttcaacgccgatcccgaccagctcgccgaggtgttctccgcccgccccgaggtgctcgcgcacaatctcgagacggtgccgcgcatcttcaagcgcatccgccccgccttccgctacgagcgctcgctctcggtgctcaccgccgcccgcgaggcgggcctggtcaccaagtcgaacctgatcctcggcatgggcgagacccccgaagaggtcaccgaggcgatgcgcgacctgcacgaggcggggtgcgacatcctcaccatcacccagtacctgcgcccgtcgccccggcaccaccccgtcgaccgctgggtcaagccggaggagttcgtcgagcactcccgcgtcgccgaggagatcggtttcgccggcgtcatggcgggcccgctggtgcgctcctcctaccgcgccggccgtctctacgcccaggcgatggcgcaccacggccgtgagatcccgcccgcgatggcacatctcgcggaggaaggcacggcctcgcaggaagcctcggcggtactggcccggttcggtagctga

SEQ ID NO: 3166 - protein, 352 aa, Nocardia farcinica
MTSVDTPTPHGGTPAPAPATANGRKLLRIEARNAQTPIERKPKWIRTRATMGPEYSELKGLVKREGLHTVCEEAGCPNIFECWEDREATFLIGGEQCTRRCDFCQIDTGKPAALDRDEPRRVAESVQAMGLRYSTITGVARDDLEDGGAWLYAETVRAIKRLNPATGVELLIPDFNADPDQLAEVFSARPEVLAHNLETVPRIFKRIRPAFRYERSLSVLTAAREAGLVTKSNLILGMGETPEEVTEAMRDLHEAGCDILTITQYLRPSPRHHPVDRWVKPEEFVEHSRVAEEIGFAGVMAGPLVRSSYRAGRLYAQAMAHHGREIPPAMAHLAEEGTASQEASAVLARFGS

SEQ ID NO: 3167 - DNA, 951 bp, Nocardioides sp
  CDS (1)..(951): transl_table=11
gtgacgcaagctcccccctccccacaagcagagggccgcaagctgctccggctcgaggcacgcaactcggagaccccgatcgagcgcaagcccgagtggatcaagacccgagcgaagatgggtccggagtaccagcacctccagaacctggtgaagtccgagggactgcacaccgtgtgccaggaggccggctgccccaacatctacgagtgctgggaggaccgcgaggcgaccttcctgatcggcggcgagcagtgcacccggcgctgcgacttctgccagatcgacaccggccggccgaagccgctggaccgcgacgagccgcggcgggtcgcggagtcggtgcgcacgatgggcctgaggtacgccaccatcaccggcgtcacgcgcgacgacctgatcgacgagggcgcctggctgtacgccgagaccgtgcgccagatccacgagctgaacccgggcatcggcgtggagaacctgatccccgacttcagcggcaagccggacctgctcgcccaggtcttcgagtcgcggcccgaggtgctcgcccacaacctcgagaccgtgccgcggatcttcaagcggatccgtccggcgttccgctacgaccgctcgctcgacgtgctgacccaggctcgcgacttcggcctggtcacgaagtccaacctgatcctcggcctcggcgagacccgcgaggaggtctcgcaggccctgcgcgacctgcacgccgcgggctgcgagctgctcaccatcacccagtacctccgcccctcgccgcggcaccacccggtcgagcgctgggtcaagccggaggagttcgtggagctcaaggacgaggccgacgaggtcgggttcaccggggtgatgtccgggccgctcgtccgttcgtcctaccgcgccggtcggctgtaccgtcaggctgtcgaggcccgcgagggcgtcacggcctga

SEQ ID NO: 3168 - protein, 316 aa, Nocardioides sp
MTQAPPSPQAEGRKLLRLEARNSETPIERKPEWIKTRAKMGPEYQHLQNLVKSEGLHTVCQEAGCPNIYECWEDREATFLIGGEQCTRRCDFCQIDTGRPKPLDRDEPRRVAESVRTMGLRYATITGVTRDDLIDEGAWLYAETVRQIHELNPGIGVENLIPDFSGKPDLLAQVFESRPEVLAHNLETVPRIFKRIRPAFRYDRSLDVLTQARDFGLVTKSNLILGLGETREEVSQALRDLHAAGCELLTITQYLRPSPRHHPVERWVKPEEFVELKDEADEVGFTGVMSGPLVRSSYRAGRLYRQAVEAREGVTA

SEQ ID NO: 3169 - DNA, 933 bp, Novosphingobium aromaticivorans
  CDS (1)..(933): transl_table=11
atgacgaaccctgccgaaaccgcccgtcccgaacgccagcgcaagccggactggatccgcgtaaaggccccgaccagcaagggctatggcgagacgcgcgccctcatgcgcgaactgggactcaacacggtctgtgaagaggcagcctgtcccaacatcggcgaatgctggaccaagaagcacgccacggtaatgatcctgggcgatgtgtgcacgcgcgcttgcgcgttctgcaacgtcaagaccggcatgccgcgcgccgtcgatccgatggagccgatcaatgtcgccacggcggcagctaagatgggcctcgagcacatcgtcatcacgtcggtcgaccgcgatgatctgccggatggcggggcagggcacttcgtcaaggtcatcaaggccctgcgcgagttgacaccgaacaccaccatagaaatcctgacgcccgacttccggaacaagatggaagcggcggtggaatcgatcgtcgaggcgggacccgacgtctacaaccacaacctcgagacggttccccgcctttacccgaccattcgtccgggcgcgcgctattacgcgtcgctgcgcttgctcgaacaggtcaagcgccacgatccgcgcatcttcaccaagtccggcgtcatgctcgggctgggcgaggagcggctagaagtccatcaggtgatggatgacatgcgctcggcccagatcgatttcctgacgatggggcagtatctccagcccacgcccaagcacgccaaggtgatcgagttcgtcacacccaaagcgttcgatgcctatggctcgatcgcgcgggccaagggcttcctccaggtcgcggcgagcccgctgacccggtcgagctatcacgcgggcgaggatttccgccagatgcggcaggcgcgcgaggcgcagctcgcgaaggccgctcagaaggcctga

SEQ ID NO: 3170 - protein, 310 aa, Novosphingobium aromaticivorans
MTNPAETARPERQRKPDWIRVKAPTSKGYGETRALMRELGLNTVCEEAACPNIGECWTKKHATVMILGDVCTRACAFCNVKTGMPRAVDPMEPINVATAAAKMGLEHIVITSVDRDDLPDGGAGHFVKVIKALRELTPNTTIEILTPDFRNKMEAAVESIVEAGPDVYNHNLETVPRLYPTIRPGARYYASLRLLEQVKRHDPRIFTKSGVMLGLGEERLEVHQVMDDMRSAQIDFLTMGQYLQPTPKHAKVIEFVTPKAFDAYGSIARAKGFLQVAASPLTRSSYHAGEDFRQMRQAREAQLAKAAQKA

SEQ ID NO: 3171 - DNA, 945 bp, Oceanobacillus iheyensis
  CDS (1)..(945): transl_table=11
atgtctaatcaacaaacgcatgtacgtaagccagattggttaaaaacaagaattaatacgaacaaatcgtatcgaaatttaaaaaagttgatgcgtgataatcggttaaacacggtttgtgaagaagcgcgctgtccaaacttacatgaatgctggagcgaacgaaaaacagctacttttatgattttaggagatacatgtacaagaggttgccggttctgtgcagtaaaaacagggttaccaaatgaactagattggggagaaccagaacgtgtggctgattctgtcaccgtaatggggttaaaacatgtggtagtaacagcagtggcgagagatgatttaaatgatggcggtgcagcagtgtttgcggaaactgtccgagctattcgtagaaagaatcctggttgtactattgaaattttgccttcggatatgaaaggagattatgaaagtctccatacattaatggatagtggaccagatatttttaatcataatattgaaaccgtacgaagacttacaaaacgagtgcgagcaagagctatgtacgatcgttctttagagttactacgacgggtaaaagagatagctcctaatacaccgacgaaatcaagtatcatggttggccttggagaagaaaaagatgagattattcaggcgatggatgatttattagcgcataatgtggatattgttacacttggccaatatttacagccaacgaaaaagcatctagaggtagtacgctattaccatccagatgaatttgaagaattgaaaaatatcgccctagaaaaaggcttttctcattgtgaatctggtccattagttcgttcctcataccatgcggatgaacaagtttctaatgcagcagctcaacgaagaattaagtatatgaaaggtgtagaaaagcaagaaaacagtcaattggattttaatttctaa

SEQ ID NO: 3172 - protein, 314 aa, Oceanobacillus iheyensis
MSNQQTHVRKPDWLKTRINTNKSYRNLKKLMRDNRLNTVCEEARCPNLHECWSERKTATFMILGDTCTRGCRFCAVKTGLPNELDWGEPERVADSVTVMGLKHVVVTAVARDDLNDGGAAVFAETVRAIRRKNPGCTIEILPSDMKGDYESLHTLMDSGPDIFNHNIETVRRLTKRVRARAMYDRSLELLRRVKEIAPNTPTKSSIMVGLGEEKDEIIQAMDDLLAHNVDIVTLGQYLQPTKKHLEVVRYYHPDEFEELKNIALEKGFSHCESGPLVRSSYHADEQVSNAAAQRRIKYMKGVEKQENSQLDFNF

SEQ ID NO: 3173 - DNA, 972 bp, Protochlamydia amoebophila
  CDS (1)..(972): transl_table=11
gtgatggaaaactctccaaaaactcgtcgcttaaatatcctaccagataatcctgaaaatactggagatggtgtggtagggcttggccgctttccttcatggttgcaccggccacttcctaaaggaaaccaacttcaaattactgggcaagtcatcaaccaaaatcgcttacacactgtttgcgaagaggctaaatgtcccaatctcttagaatgttggactaaaaaaactgccacatttcttgtaatgggtaaagagtgttcacgtaactgtggtttttgtgatatagacttttcaaaaaatcctaaacccctagatcgaagtgaaccgtcgagagttgctttatctgtccaacagttaggattaaagcacgttgtaatcacaatggtagcacgagatgatttgtctgatggaggaagttctcatctcgtcgaggtcattgaggcgattaggcaaactaatgaagatgtaactattgaggtcttaacttcggattttgaaggaaatcgaaaggctctaagctttgttttacaagctaaacctgaaatttttaatcataatattgaaacagttcgccgtttaactccacgtgttagacataaagccacttatgaaagaactttaagtgtacttgaacaagctgcccaaaagaaatatcactcccaacttaaggttaaatcagggataatggtggggttaggtgagactgaagaagaaatttttgaaacattattagatttaaaaagggtaggatgtgaaattgtcaccattggacagtatttacaacctaatcggcaaaaactccttgtaaaatcttttgttcatcctgatatatttaaaaaatatgaacaatatggattgagtataggaatacctcatctttattgtggaccttttgttagatctagctataacgcaaatttagttcttatgcgtgcaaatcaaaaagaagcaattgttaacagcgaatag

SEQ ID NO: 3174 - protein, 323 aa, Protochlamydia amoebophila
MMENSPKTRRLNILPDNPENTGDGVVGLGRFPSWLHRPLPKGNQLQITGQVINQNRLHTVCEEAKCPNLLECWTKKTATFLVMGKECSRNCGFCDIDFSKNPKPLDRSEPSRVALSVQQLGLKHVVITMVARDDLSDGGSSHLVEVIEAIRQTNEDVTIEVLTSDFEGNRKALSFVLQAKPEIFNHNIETVRRLTPRVRHKATYERTLSVLEQAAQKKYHSQLKVKSGIMVGLGETEEEIFETLLDLKRVGCEIVTIGQYLQPNRQKLLVKSFVHPDIFKKYEQYGLSIGIPHLYCGPFVRSSYNANLVLMRANQKEAIVNSE

SEQ ID NO: 3175 - DNA, 963 bp, Pasteurella multocida
  CDS (1)..(963): transl_table=11
atgggtacaccttttaaaatggaacgtggtgtcaaataccgtgatgctgctaaaacgtccattatcccggtaaaaaatatcgatccaaatcaggaattattaaaaaaaccggaatggatgaaaatcaaactccctgcgaattctgccaaaattgatagcattaaaaacggcatgcgtcgtcatggtttacactcagtgtgtgaagaagcatcgtgcccgaatttacatgaatgttttaatcacggaacagcaaccttcatgattttaggggcaatttgtactcgccgttgtcctttctgtgatgtggcgcatggtaagcctttaccgccagatcctgaagaaccacgtaagttagcggagacaatccaagacatgaaattgcgttatgtggtgattacttctgtggatcgtgatgacttgcctgatcgtggtgcgggtcactttgcagaatgtgtaaaagaaattcgtcagctcaatccaaatatcaaaattgagattttggttcctgattttcgtgggcgaattgagcaagcgttggataaattgaaagacaatccaccagatgtgtttaaccataatttagaaaatgtaccacgtttataccgtgaaattcgtccaggagcagattatcaatggtctttgaaattgcttaaagattttaaagcgatgtttccacatattccgaccaaatcaggtttaatggtggggttaggtgaaactaatgaagagattctgcaagtgatgcaagatctacgcgatcatggtgtgactatgttaaccttaggacaatatttacaaccaagtcgccatcatttacctgttgcacgttatgtacctccggcagagtttgatgagttccgtgataaagcacaagccatgggctttgaacacgctgcttgcggtccgtttgtgcgttcttcttatcatgcagacttgcaagccaaaggcgaaattgtgaaataa

SEQ ID NO: 3176 - protein, 320 aa, Pasteurella multocida
MGTPFKMERGVKYRDAAKTSIIPVKNIDPNQELLKKPEWMKIKLPANSAKIDSIKNGMRRHGLHSVCEEASCPNLHECFNHGTATFMILGAICTRRCPFCDVAHGKPLPPDPEEPRKLAETIQDMKLRYVVITSVDRDDLPDRGAGHFAECVKEIRQLNPNIKIEILVPDFRGRIEQALDKLKDNPPDVFNHNLENVPRLYREIRPGADYQWSLKLLKDFKAMFPHIPTKSGLMVGLGETNEEILQVMQDLRDHGVTMLTLGQYLQPSRHHLPVARYVPPAEFDEFRDKAQAMGFEHAACGPFVRSSYHADLQAKGEIVK

SEQ ID NO: 3177 - DNA, 966 bp, Photorhabdus luminescens subsp
  CDS (1)..(966): transl_table=11
atgagtaaaccaattcagatggaacgcggagttaagtaccgcgacgcagacaaaatggcgctgatccctgtcaaaacagtgatgaccgaacgtacagaaatcttgcgtaaacctgagtggatgaaaatcaaacttcctgcggattccagccgcattcagggcatcaaatctgccatgcgcaaaaatggcctgcattccgtttgtgaagaagcatcttgccctaacctggcagaatgcttcaatcacggtacagcaacctttatgatccttggcgcaatttgcacccgccgttgccctttctgtgatgttgcgcacggccgcccaatggcacctgacaccaacgaaccggtaaaactggcacaaaccattaaagatatggcactgcgctacgttgtcatcacctccgttgaccgtgatgatctacgtgacggtggtgctcagcactttgctgactgcatctctgctattcgtgaaaaaaatccatccattaagattgaaaccttagttcctgacttccgtggacgtatggatcgtgcacttgaaatactgacagcgacaccgcccgatgtctttaaccataacctggaaaacgtaccccgggtttaccgtcaggtgcgccctggtgcaaactatgagtggtcactaaaattacttgaaaagtttaaagaagcccatcctgatattccaaccaaatcgggtctaatggtcggtcttggtgaaaccaacgaagaaattcttgatgttatgcgtgatctgcgccgccacggtgtgactatgctgactctgggacaatacctacaacctagtcgtcatcatttaccggtacagcgctacgtcagcccacaggaatttgatgaaatgaaagaagaagcgttagctatggggttcacccatgctgcctgtggtccatttgtccgttcttcttatcatgctgacttgcaagccaaaggtgaagaggtcaaataa

SEQ ID NO: 3178 - protein, 321 aa, Photorhabdus luminescens subsp
MSKPIQMERGVKYRDADKMALIPVKTVMTERTEILRKPEWMKIKLPADSSRIQGIKSAMRKNGLHSVCEEASCPNLAECFNHGTATFMILGAICTRRCPFCDVAHGRPMAPDTNEPVKLAQTIKDMALRYVVITSVDRDDLRDGGAQHFADCISAIREKNPSIKIETLVPDFRGRMDRALEILTATPPDVFNHNLENVPRVYRQVRPGANYEWSLKLLEKFKEAHPDIPTKSGLMVGLGETNEEILDVMRDLRRHGVTMLTLGQYLQPSRHHLPVQRYVSPQEFDEMKEEALAMGFTHAACGPFVRSSYHADLQAKGEEVK

SEQ ID NO: 3179 - DNA, 969 bp, Photobacterium profundum
  CDS (1)..(969): transl_table=11
atgagcaaaccaattaagatcgaacaaggtatcaaataccgtgatgccgacaaaatggcgctaattcctgtacgcaatgttgcagaagaagcacctaaagaagtcttacgaaagccagcttggatgaagattaaacttccgtctgacagcaaacgtattcaagaaatcaaatcagcactgcgtaagaataagcttcactcggtttgtgaagaagcatcttgccctaaccttgctgagtgctttaaccacggtactgctaccttcatgattttaggtgcgatttgtactcgtcgttgcccgttctgtgatgttgctcatggtcgtcccctaccaccaaatgcagaagagccaagccatttagctcaaacaatcgcagacatgaagctgaaatacgttgttatcacttcagttgaccgtgatgacctacgtgatggtggcgcacaacactttgttgattgtatccgtgaaattcgcgagaaaagcccagaaatccatatcgaaacattagtgcccgacttccgcggtcgtatggatcgtgcgctggatattcttcaaggtacgccacctaatgtgttcaatcacaaccttgaaacagcacctcgtttgtaccgtaaagctcgccctggcgcgaactaccagtggtcacttgatctgctgaaaaacttcaaagagatccatcctgaagtgccgactaagtctggtgttatgatggggcttggtgaaacaaaagaagaaattattcaagtattgaaagatcttcgcgcacatggtgtaacaatgctaacactcggtcagtacttagcacctagtcgtcaccatttacctgttgaacgttatgtaccaccagcagagtttgatgaactaaaagagatcgcacttgaattaggtttcacacatgctgcatgtggtccttttgttcgctcatcttatcatgctgatcttcaggctcagggtcttgaaattaagtaa

SEQ ID NO: 3180 - protein, 322 aa, Photobacterium profundum
MSKPIKIEQGIKYRDADKMALIPVRNVAEEAPKEVLRKPAWMKIKLPSDSKRIQEIKSALRKNKLHSVCEEASCPNLAECFNHGTATFMILGAICTRRCPFCDVAHGRPLPPNAEEPSHLAQTIADMKLKYVVITSVDRDDLRDGGAQHFVDCIREIREKSPEIHIETLVPDFRGRMDRALDILQGTPPNVFNHNLETAPRLYRKARPGANYQWSLDLLKNFKEIHPEVPTKSGVMMGLGETKEEIIQVLKDLRAHGVTMLTLGQYLAPSRHHLPVERYVPPAEFDELKEIALELGFTHAACGPFVRSSYHADLQAQGLEIK

SEQ ID NO: 3181 - DNA, 861 bp, Picrophilus torridus
  CDS (1)..(861): transl_table=11
atgaatgcaggtccaataaactacaaggttaaactgccctcgggggaaagatatacttttatcaagagtacattatcggcaagaaatctttacactgtctgcgaggaggcgcactgcccaaacatagccgaatgctgggaaagcggtactgcaacctttatgataatgggttcaaactgctccaggggatgcaggttctgtgccgtcacccatggaaggatgctgcccctggatccaatggagcctgagaaggtttacgagtcagtaaaaatgatgaatcttgattatgttgttattacatcagtagatcgtgatgatcttccggataagggttcatcgcacttcgcagcggtaataagaaggttaaaagaccttaaaataaaaatagaggttttgatcccggacttcagcggcgttcataaatttattgacaaaattatagatgaaaggcctgatgtgatagcacataacattgaaacggttcgcaggcttacaaaaactgtcagggatccaagggccggatatgatcagagtcttaatgttctaaggtatgtaaagtccaggtcaaacatcataacaaaatcgtcgataatgcttggccttggagagaccgatgatgaggttatcgaaacactgcacgacctgcatgatgctggtgttgacattgtaacgattggacaatacctcagaccaacaaagaagcagcttgaggttaaggagtattccccaatggaaagatttaaaaatcttgaggagtccgcctatagcataggtttttcctttgtggcctcgggtccgcttgtaaggacatcttacagggcggctgaggcttttgtcaaggggggttttaaaaatgattga

SEQ ID NO: 3182 - protein, 286 aa, Picrophilus torridus
MNAGPINYKVKLPSGERYTFIKSTLSARNLYTVCEEAHCPNIAECWESGTATFMIMGSNCSRGCRFCAVTHGRMLPLDPMEPEKVYESVKMMNLDYVVITSVDRDDLPDKGSSHFAAVIRRLKDLKIKIEVLIPDFSGVHKFIDKIIDERPDVIAHNIETVRRLTKTVRDPRAGYDQSLNVLRYVKSRSNIITKSSIMLGLGETDDEVIETLHDLHDAGVDIVTIGQYLRPTKKQLEVKEYSPMERFKNLEESAYSIGFSFVASGPLVRTSYRAAEAFVKGGFKND

SEQ ID NO: 3183 - DNA, 849 bp, Porphyromonas gingivalis
  CDS (1)..(849): transl_table=11
atggcgcaacacgtcaagaaacccgaatggttgaaaatacgtcttggtgggaatgagaagtttaccgagactaaaagcattgtcgagggacattgtctgcatacgatctgtacaagtggcaaatgccccaatatgggagagtgctggagtagggggactgctaccttcatgatcggtggtgatatctgtacacgtgcctgtcgattttgcaacactttgacggggcgtcccaaaccgctcaatgaagcagaacctactcacgtcgcattgagtatcaaactgatggggcttaaccatgctgtggtgacgagcgttgaccgcgatgacttgccggattatggtgccgcacactgggttaagaccattcaggaaatcagacggatcaactcgggagtgacactcgaagttctgattcccgacttcaaaggacggatggatttggtggacatgattatcgaggcaagtccggatgttatttcgcataatctggagacggtacgtcggcttacgccatcggtacgcagcgtggctacttacgataccagccttgccgtgcttcgtcacatagctcagtccggaaaaatgcccgcgaaaacaggaatgatgctcggtttgggcgagactgaagaagagatactcgaattgatggatgatgctcttgcggcgggagtctcagttattactataggacagtatctgcaaccgtcgaggaagaatcttcctgtggtggaatacatcacgcccgaacagttcgaacatcttcgactggtgggtatcgaaaaaggcttccgtacgatagagagtgctccgctcgttcgcagttcttaccatgccgaacggcacttataa

SEQ ID NO: 3184 - protein, 282 aa, Porphyromonas gingivalis
MAQHVKKPEWLKIRLGGNEKFTETKSIVEGHCLHTICTSGKCPNMGECWSRGTATFMIGGDICTRACRFCNTLTGRPKPLNEAEPTHVALSIKLMGLNHAVVTSVDRDDLPDYGAAHWVKTIQEIRRINSGVTLEVLIPDFKGRMDLVDMIIEASPDVISHNLETVRRLTPSVRSVATYDTSLAVLRHIAQSGKMPAKTGMMLGLGETEEEILELMDDALAAGVSVITIGQYLQPSRKNLPVVEYITPEQFEHLRLVGIEKGFRTIESAPLVRSSYHAERHL

SEQ ID NO: 3185 - DNA, 993 bp, Propionibacterium acnes
  CDS (1)..(993): transl_table=11
gtgagtgtcgaagcagacggtagaaagctcctccgagtcgaggtcaagaattctcagacgcccatcgagaacaaaccccactggatcaagactcgggccacaatgggtccggagtaccgcgacatgcgtcgccgaatgatcgacggagatctgcacaccgtgtgtcaagaggctggctgccccaatattttcgagtgttgggaggatcgcgaggccactttcctcatcggcggcgaccactgcacccgccgttgtgacttctgccagatcgagtcggccaagccggaaggctacgacaaagacgagccgcgtcgcgtcgcagagtccgtcaagcagatggggctgcgctacgctaccgttacgtcggtatgccgagacgacctcgaggacgaaggtgcctggctgtgcgccgagacgattcgtcaaatccaccaggtaactcccggcgtcggcgtcgagatgttagcccaagatttttccggcaaacaggacctgctcgacatcgtcttcgaagcacgcccggaggtcttcggtcacaaccttgagacggtcccccgcatcttcaagcgcattcgacccggattccgctacgaccgttctttggccgtcctggactctgcacatgaggccggtctgatcaccaagtcaaatctcattcttggcatgggcgagacccgtgaagaaatttcacaggccatgcgggcgctccatgacgccaacaccgacctgctgacgatcacccagtacctgcgcccgaactcctacctacaccccatcgaccgttgggtgacgcctcaggagttcgatgagttagccgaagaggcccgcgaaattggatttgtcggtgtgatgagcggaccgcttgtgcgatcctcctaccgggctggccgcctctatcggcaagctatggaagcacgcggcgagcgtccggtgatgatcgtgaccgggtaccgcgacggtgcgaaacctgcaccattcgcggccaaggagtga

SEQ ID NO: 3186 - protein, 330 aa, Propionibacterium acnes
MSVEADGRKLLRVEVKNSQTPIENKPHWIKTRATMGPEYRDMRRRMIDGDLHTVCQEAGCPNIFECWEDREATFLIGGDHCTRRCDFCQIESAKPEGYDKDEPRRVAESVKQMGLRYATVTSVCRDDLEDEGAWLCAETIRQIHQVTPGVGVEMLAQDFSGKQDLLDIVFEARPEVFGHNLETVPRIFKRIRPGFRYDRSLAVLDSAHEAGLITKSNLILGMGETREEISQAMRALHDANTDLLTITQYLRPNSYLHPIDRWVTPQEFDELAEEAREIGFVGVMSGPLVRSSYRAGRLYRQAMEARGERPVMIVTGYRDGAKPAPFAAKE

SEQ ID NO: 3187 - DNA, 933 bp, Prochlorococcus marinus
  CDS (1)..(933): transl_table=11
ttgattaaaatttatttagatgaagctgaccaaagtcatttgacaagtatttccaaaaatgcggcaacaaaaccagaatggttaagggtaaaggctcctcaatttgagaggataggtaataccgcgagtttattaagtgatttaaaattaaatacagtttgtcaggaagcaagctgtccaaatattggagaatgttttgcaagtggtactgcaacttttttaatcatgggccccgcttgtactagagcatgtccgtattgcgatattaattttgatagatcaaaaagagatttagatccaactgaacctcatcgtctggcagaggctgtttctaggatgaatctcaaacatgtagttattacatcagtaaacagagatgatctcgatgatggcggggcatcacagttttttcaatgtgtttctgaagtgagaaaaaaatctccagagacaaccattgagttattaatccctgatttatgtggtaactggcaagcacttgaattagttttagattcaaaaccaaatgtcctgaaccataatattgaaactgtcaaaagtttatataggaaagtaaggcctcaaggtaattatcaaagaactttagatttactcaaacgcacaaaagaatattttcctagtgtttatacaaaatccggctttatgttgggattaggagaaagtgatgatgaagttttaaatcttctttctgatttaaaaaatcattttgtagacatagttactattggtcaatatttatctccaggcccaaaacatttgcctgttcaaagatttgtaagtcctccaaaatttacttacttcaaattgtttggagaagataatcttggttttatgcaagtagtaagctctcctttaacgcgaagtagttatcatgctgaggaaattcaaaaattaatgaaaaaatatccaagataa

SEQ ID NO: 3188 - protein, 310 aa, Prochlorococcus marinus
MIKIYLDEADQSHLTSISKNAATKPEWLRVKAPQFERIGNTASLLSDLKLNTVCQEASCPNIGECFASGTATFLIMGPACTRACPYCDINFDRSKRDLDPTEPHRLAEAVSRMNLKHVVITSVNRDDLDDGGASQFFQCVSEVRKKSPETTIELLIPDLCGNWQALELVLDSKPNVLNHNIETVKSLYRKVRPQGNYQRTLDLLKRTKEYFPSVYTKSGFMLGLGESDDEVLNLLSDLKNHFVDIVTIGQYLSPGPKHLPVQRFVSPPKFTYFKLFGEDNLGFMQVVSSPLTRSSYHAEEIQKLMKKYPR

SEQ ID NO: 3189 - DNA, 1008 bp, Pseudomonas syringae pv
  CDS (1)..(1008): transl_table=11
atgactgacaccgtgcaaaccctgatcccgacgctggatgtttccgagcgagtggcccgtccgaaagtcgaagcgggcgttaagcttcgcggagcggaaaaggttgcgcgcatcccggtcaagatcattccaacggtagatctgccgaagaaacccgactggattcgtgtgcgcatcccggtttctccggaagtcgaccgtatcaagcaattgctgcgcaagcacaagctgcacagtgtctgtgaagaggcgtcctgcccgaacctgggcgaatgcttctccggtggcaccgcaacgttcatgatcatgggcgacatctgcacccgtcgctgcccattctgcgacgtgggccatggtcgtccgaagccgctcgacgtcaacgaaccgaagagcctcgccatcgcaattgccgacctgcgtctgaagtacgtagtgatcacctcggtggaccgtgacgacttgcgtgacggcggtgctcagcactttgccgactgcatccgcgaaatccgcctgctgtcgccgggcgtacagcttgaaacactggttcccgactaccgtggccgcatggacgtagcgctggaaatcaccgctgccgagccaccggatgtgttcaaccacaacctggaaaccgttccgcgtctgtacaaggccgcgcgtccgggttcggactaccagtggtcgttgaccctgctgcagcgcttcaaacagatggtcccgcatgtaccgaccaaatcagggctgatgctgggccttggcgagaccgacgaagaggttatcgaagtcatgcagcgcatgcgcgagcacgacatcgacatgctgacgctgggtcagtacctgcagccatcgcgcaaccaccttccggtgcagcgctttgtccaccctgacacctttgcctggtttgccgaggaaggttacaagatgggcttcaagaacgtcgcatccgggccgctggtacgctcttcgtatcatgccgacgagcaggccaagatcgccaaggcaatgctctga

SEQ ID NO: 3190 - protein, 335 aa, Pseudomonas syringae pv
MTDTVQTLIPTLDVSERVARPKVEAGVKLRGAEKVARIPVKIIPTVDLPKKPDWIRVRIPVSPEVDRIKQLLRKHKLHSVCEEASCPNLGECFSGGTATFMIMGDICTRRCPFCDVGHGRPKPLDVNEPKSLAIAIADLRLKYVVITSVDRDDLRDGGAQHFADCIREIRLLSPGVQLETLVPDYRGRMDVALEITAAEPPDVFNHNLETVPRLYKAARPGSDYQWSLTLLQRFKQMVPHVPTKSGLMLGLGETDEEVIEVMQRMREHDIDMLTLGQYLQPSRNHLPVQRFVHPDTFAWFAEEGYKMGFKNVASGPLVRSSYHADEQAKIAKAML

SEQ ID NO: 3191 - DNA, 984 bp, Pseudomonas aeruginosa
  CDS (1)..(984): transl_table=11
atgagcactgttgtggagaagtccggagaagccaagccgggcaaggtggaagtcggcgtgaagctgcgcggcgcggaaaaggtcgcgcggattccggtgaagatcattcccaccgaggaactgccgaagaaacccgactggatccgcgtgcgcatcccggtttcccccgaggtcgaccgcatcaagcaactgctgcgcaagcacaagctgcacagcgtctgcgaagaggcgtcctgcccgaacctgggcgagtgcttctccggcggcaccgcgaccttcatgatcatgggtgacatctgcacccggcgctgcccgttctgcgacgtcggccatggccggccgaagccgctggacgtcgacgagccgaccaacctggccatcgccatcgccgacctgcggctgaagtacgtggtgatcacctcggtggaccgcgacgacctgcgcgacggcggtgcccagcacttcgccgactgcctgcgcgagatccgcaagctgtcgccggggatccagctggaaaccctggtgcccgactatcgcggtcgcatggacatcgccctggagatcaccgccaacgagccgccggacgtgttcaaccataacctggagacggtaccgcgcctgtaccgctcctcgcggccgggctcggacttcgagtggtcgctggacctgctgcagaagttcaagcagatggttccgcacgtaccgaccaagtccgggctgatgctcggcctgggcgagaccgacgatgaggtcatcgaggtcatgcagcggatgcgcgagcacgacatcgacatgctgaccctcggccagtacctgcagccgtcgcgcaaccacctgccggtgcagcgcttcgtgcatccggacaccttcgcctggttcgccgaggaaggcgagaagatgggcttcaagaacgtcgcgtccggcccgctggtgcgttcgtcctaccatgccgaccagcaggcgcacggcaacaagatcggctga

SEQ ID NO: 3192 - protein, 327 aa, Pseudomonas aeruginosa
MSTVVEKSGEAKPGKVEVGVKLRGAEKVARIPVKIIPTEELPKKPDWIRVRIPVSPEVDRIKQLLRKHKLHSVCEEASCPNLGECFSGGTATFMIMGDICTRRCPFCDVGHGRPKPLDVDEPTNLAIAIADLRLKYVVITSVDRDDLRDGGAQHFADCLREIRKLSPGIQLETLVPDYRGRMDIALEITANEPPDVFNHNLETVPRLYRSSRPGSDFEWSLDLLQKFKQMVPHVPTKSGLMLGLGETDDEVIEVMQRMREHDIDMLTLGQYLQPSRNHLPVQRFVHPDTFAWFAEEGEKMGFKNVASGPLVRSSYHADQQAHGNKIG

SEQ ID NO: 3193 - DNA, 1023 bp, Pseudomonas fluorescens
  CDS (1)..(1023): transl_table=11
atgactactgatgcagtgcaaaccatgatcccgacgctcgacgtgaccgagcgcccggccccgcgtcccaaggttgaagccggcgtcaagctgcgcggcgccgagaaggttgcacgcatcccggtgaagatcattccgaccaccgaactgccgaagaaacccgactggatccgcgtgcgcatcccggtttcgccggaagtcgaccgcatcaagagcctgctgcgcaagcacaagctgcacagcgtctgcgaagaggcgtcctgcccgaacctgggcgagtgcttctccggcggcaccgcgaccttcatgatcatgggtgacatctgcacccgtcgttgcccgttctgcgacgttggccacggtcgtccgaaaccactggacgtcaatgagccggaaagcctggccatcgccatcgccgacctgaaactcaagtacgtggtgatcacctcggttgaccgcgacgacctgcgtgacggcggtgcccagcactttgccgactgcatccgcgaaatccgcaaactgtcgccgaacgtgcagctcgagaccctggtcccggactatcgtggccgcatggacatcgccctggaaatcaccgcggccgagccgccggacgtgttcaaccacaacctggaaaccgtaccgcgcctgtacaaggctgcgcgtccgggttcggactaccagtggtcgctgactctgttgcaacgcttcaagcagatgatgccgcacatcccgaccaaatccggcctgatgctgggtctgggcgagaccgacgacgaagtcatcgaagtcatgaagcgcatgcgcgaacacgatatcgacatgctgaccctgggccagtacctgcaaccgtcccgcagccacttgccggtgcagcgtttcgtgcacccggacaccttcgcctggttcgccgaggaaggttacaagatgggcttcaagaacgtcgcgtccggcccattggtgcgttcttcgtaccacgctgacgagcaagcgaaactggtcaaggccgagctgctcggttcctga

SEQ ID NO: 3194 - protein, 340 aa, Pseudomonas fluorescens
MTTDAVQTMIPTLDVTERPAPRPKVEAGVKLRGAEKVARIPVKIIPTTELPKKPDWIRVRIPVSPEVDRIKSLLRKHKLHSVCEEASCPNLGECFSGGTATFMIMGDICTRRCPFCDVGHGRPKPLDVNEPESLAIAIADLKLKYVVITSVDRDDLRDGGAQHFADCIREIRKLSPNVQLETLVPDYRGRMDIALEITAAEPPDVFNHNLETVPRLYKAARPGSDYQWSLTLLQRFKQMMPHIPTKSGLMLGLGETDDEVIEVMKRMREHDIDMLTLGQYLQPSRSHLPVQRFVHPDTFAWFAEEGYKMGFKNVASGPLVRSSYHADEQAKLVKAELLGS

SEQ ID NO: 3195 - DNA, 873 bp, Pyrobaculum aerophilum
  CDS (1)..(873): transl_table=11
atgattccgtcttgggtttccctaagggccggagattatgaaaaaataattaacgtgaggagggcgttaagcagacacgggatttatacagtgtgcgagggggctaagtgccccaatattttccactgctggggcgaggggacggccaccttcatgattctaggggaggtctgcacaagggcgtgtagattctgcgccgtgcgcactggtaatccgagggggtatgtggactggggcgaggtggataggcttgttgaggctgttagagagctcgggcttaaatacgtcgtggtgacctcagtggctagagacgacctccccgacggaggggcctcggtatttgcggcagttgtgaaaaaactacgcgaggtgggttgcgtcgtggaggttttagtgcccgacttcggcggaagtccggcctcggtaaaaactgtggttagctcgggcccagatgtgttcgcccacaacgtggaaacagtgagacggcttacgccgctagttagagaccgcagggcgggttatgagcgttcgctatctgtgttgaaatacgcaaaagaattcggcgcacccctcactaaatcaggcttgatgttagggcttggggagacgtttgaggaggtggtggagactttagaggatttgaggagggctgatgtggacattgtgactataggccagtatataaaacccagcggctcgcctcgtcatttaaaccccgttaggtacgcgactcccgaagagttcgccaaaattaaagaggtggccgtgtccctgggctttaaggccgttgcctcaggccctttagtgcgtagctcatataaggcttacagtctatatagagaagctttaaaaaatatagtatacttaggttaa

SEQ ID NO: 3196 - protein, 290 aa, Pyrobaculum aerophilum
MIPSWVSLRAGDYEKIINVRRALSRHGIYTVCEGAKCPNIFHCWGEGTATFMILGEVCTRACRFCAVRTGNPRGYVDWGEVDRLVEAVRELGLKYVVVTSVARDDLPDGGASVFAAVVKKLREVGCVVEVLVPDFGGSPASVKTVVSSGPDVFAHNVETVRRLTPLVRDRRAGYERSLSVLKYAKEFGAPLTKSGLMLGLGETFEEVVETLEDLRRADVDIVTIGQYIKPSGSPRHLNPVRYATPEEFAKIKEVAVSLGFKAVASGPLVRSSYKAYSLYREALKNIVYLG

SEQ ID NO: 3197 - DNA, 996 bp, Ralstonia eutropha
  CDS (1)..(996): transl_table=11
atgagcgacgccctgatcgcctcctccagcgaagccccccaatcccccgcggagcagtacgatccgacccgcaagcagaaatcggccgacaagaccgcgcgcatccccatcaagatcgtgccggccgaaaagctcaagaagccggactggatccgcgtgaaggccgccaccggcaattcgcgtttctacgagatcaaggacatcctgcgcgcgaacaacctcgtcacggtgtgcgaggaagcaagctgcccgaacatcggcgaatgcttcggcaagggcacggcgacgttcatgatcatgggcgacaagtgcacgcgccggtgcccgttctgcgacgtcggccacggccgccccgatccgctcgatgtgaacgagcccggcaacctggcccgcaccatcgcccaactcaagctcaactacgtggtcatcaccagcgttgaccgtgacgacctgcgcgacggcggtgcccagcactacgtggactgcatcagccagacgcgcgagctgtcgcccgccacccgcatcgaagtgctggtgcccgacttccgcggccgcctggacaaggcgctggacatcctgcaggcctgcccgccggacgtcatgaaccacaacatggaaacggtgccgcgcctgtacaagcaggcccgcccgggtgccgactacgcgcactcgctcaagctgctgcaggaattcaagcgccgcaacccgaacgtgccgaccaagtccggcctgatggtcggcctgggcgagaccgacgaggaaatcctcgaagtcatgcgcgacatgcgcgcgcacgatatcgacatgctgaccatcggccagtacctcgcaccgtcgaaccaccacctgccggtgctgcgctacgtgcatcccgatacgttcaagatgttcgaggaagaggcctacaagatgggcttcacccacgccgccgtgggcgcgatggtgcgcagctcgtaccacgccgaccagcaggcgcatcaggcggggtttgcctga

SEQ ID NO: 3198 - protein, 331 aa, Ralstonia eutropha
MSDALIASSSEAPQSPAEQYDPTRKQKSADKTARIPIKIVPAEKLKKPDWIRVKAATGNSRFYEIKDILRANNLVTVCEEASCPNIGECFGKGTATFMIMGDKCTRRCPFCDVGHGRPDPLDVNEPGNLARTIAQLKLNYVVITSVDRDDLRDGGAQHYVDCISQTRELSPATRIEVLVPDFRGRLDKALDILQACPPDVMNHNMETVPRLYKQARPGADYAHSLKLLQEFKRRNPNVPTKSGLMVGLGETDEEILEVMRDMRAHDIDMLTIGQYLAPSNHHLPVLRYVHPDTFKMFEEEAYKMGFTHAAVGAMVRSSYHADQQAHQAGFA

SEQ ID NO: 3199 - DNA, 993 bp, Ralstonia metallidurans
  CDS (1)..(993): transl_table=11
atgagcgacgccccgatcgccacgtccagcgaagtcacgcaatcccctgccgactacgatccgaccaagaagcagaagtcggccgagaagaccgctcgcatccctatcaagatcgtgccggcggaaaagctcaagaagccggactggattcgcgtcaaggctgccactggcaattcgcgcttctatgagatcaaggacatcctgcgcgccaacaatctcgtgaccgtgtgcgaggaagccagctgcccgaacatcggtgaatgcttcggcaagggcaccgccacgttcatgatcatgggtgacaagtgcacgcgtcgctgcccgttctgcgacgtgggccacggccgcccggacccgctcgacgtgaacgagcccggcaacctggcgcgcacgatcgcccagctcaagctcaactacgtggtgatcaccagcgtcgaccgcgacgacctgcgtgacggtggcgcccagcactacgtcgactgcatctcgcaaacgcgcgagctgtcgccgaacacgcgtatcgaagtgctggtgccggacttccgcggccgcctggaccgcgcgctggacatcctgcaggcatgcccgcccgacgtgatgaaccacaacatggaaaccgtgccgcgcctgtacaagcaggcccgccccggcgctgattacgcgcattcgctgaagctgctgcaggatttcaagcgccgcaatcccaatgtgccgaccaagtcgggcctgatggtgggcctgggcgaaactgacgaggaaatcctcgacgtcatgcgcgacatgcgcgcccacgacatcgacatgctgacgatcggccagtacctggcgccgtcgaaccaccacctgccggttacgcgctacgtccacccggacaccttcaagatgttcgaagaagaggcgtacaagatgggcttcacccacgccgctgtcggcgcgatggtccgcagctcgtatcacgctgatcagcaggcgcatcaggcggggtttgcctga

SEQ ID NO: 3200 - protein, 330 aa, Ralstonia metallidurans
MSDAPIATSSEVTQSPADYDPTKKQKSAEKTARIPIKIVPAEKLKKPDWIRVKAATGNSRFYEIKDILRANNLVTVCEEASCPNIGECFGKGTATFMIMGDKCTRRCPFCDVGHGRPDPLDVNEPGNLARTIAQLKLNYVVITSVDRDDLRDGGAQHYVDCISQTRELSPNTRIEVLVPDFRGRLDRALDILQACPPDVMNHNMETVPRLYKQARPGADYAHSLKLLQDFKRRNPNVPTKSGLMVGLGETDEEILDVMRDMRAHDIDMLTIGQYLAPSNHHLPVTRYVHPDTFKMFEEEAYKMGFTHAAVGAMVRSSYHADQQAHQAGFA

SEQ ID NO: 3201 - DNA, 1002 bp, Ralstonia solanacearum
  CDS (1)..(1002): transl_table=11
atgaccgattccgcctccggcgcctccgcagtcgccaacatcgccaccccgtcgaacgagccgtacgacgcgacccgcaagcagaagtcgctcgacaagaccgcgcgcatccccatcaagatcgtgccggccgagaagctgaagaagccggagtggatccgcgtcaaggccgccaccggcaactcacgcttctacgagatcaaggacatcctgcgcgccaacaacctcgtgacggtgtgcgaggaggcgagctgcccgaacatcggcgagtgcttcggcaagggcacggccaccttcatgatcatgggcgacaagtgcacgcgccgctgcccgttctgcgacgtcggccacggccgccccgacccgctcgatgcgaacgagcccgagaacctggccaagaccatcgcccagctcagactgaactacgtggtcatcaccagcgtggaccgcgacgacctgcgcgacggcggtgcccagcactatgtcgattgcatctcgcgcacgcgcgagctgtcgccggccacgcgcatcgaggtgctggtgccggacttccgcggccggctggaaaaggcgctggacatcctccaggcctgcccgccggacgtgatgaaccacaacatggaaaccgtgccgcgcctgtacaagcaggcccgcccgggcgccgactacgcgcactcgctgaagctgctcaaggacttcaaggcgcgcaacccgaacctcccgaccaagtccggcctgatggtcggcctgggcgagaccgacgaggaaatcctggaggtgatgcgcgacatgcgcgagcacgacatcgacatgctgaccatcggccagtatctcgctccgtcgggccaccatctgccggtgctgcgctacgtgcacccggacaccttcaagatgttcgaggagaaagcctacgagatgggcttcacgcacgccgctgtcggcgccatggtgcgcagctcgtaccacgcggatcagcaggcgcacgaagccggcttcgcctga

SEQ ID NO: 3202 - protein, 333 aa, Ralstonia solanacearum
MTDSASGASAVANIATPSNEPYDATRKQKSLDKTARIPIKIVPAEKLKKPEWIRVKAATGNSRFYEIKDILRANNLVTVCEEASCPNIGECFGKGTATFMIMGDKCTRRCPFCDVGHGRPDPLDANEPENLAKTIAQLRLNYVVITSVDRDDLRDGGAQHYVDCISRTRELSPATRIEVLVPDFRGRLEKALDILQACPPDVMNHNMETVPRLYKQARPGADYAHSLKLLKDFKARNPNLPTKSGLMVGLGETDEEILEVMRDMREHDIDMLTIGQYLAPSGHHLPVLRYVHPDTFKMFEEKAYEMGFTHAAVGAMVRSSYHADQQAHEAGFA

SEQ ID NO: 3203 - DNA, 969 bp, Rhizobium etli
  CDS (1)..(969): transl_table=11
atggtgaccattctcgacacgatcaatcccgacgccaagcgcgtgcgccatcccgaaaaggcgcatcggccggatacggaagtcatgcgcaagccggactggatccgtgtcaaggcgccgacctccaagggttatgccgagacgcgcgcgatcgtgaaggagcacaagctcgtcaccgtctgcgaggaggccggctgcccgaatatcggcgagtgctgggacaagaagcacgccaccttcatgatcatgggcgagatctgtacccgcgcctgccgcttctgcaacgtcgccaccggacagccgaatgcgctcgatatggacgagccagaaaacgttgccaaggccgtcaggagatgggctcagcacgtcgtcatcacctcggtcgaccgcgacgatctcgaggacggcggcgcgcagcacttcgaaaaggtgatctgggcgatccgctccgcctcgccggcaacgacgatcgagatcctgacgccggacttcctgaagaagccgggtgctttggagcgtgtcgtcgccgccaagcccgacgttttcaaccacaatatggaaacggtagccggcaactatctgacggttcgccctggcgcccgctacttccactccatccgcttgcttcagcgggtgaaggaactcgatccgaccatgttcaccaagtctggcatcatggtcggcctcggcgaggagcgcaacgaggtgctgcagctgatggacgacctgcgcaccgccgatgtcgatttcctgacaatcggccaatacctgcagccgacccgaaagcaccacaaggtcgaaagcttcgtcacccccgaagagttcaagtcctacgagacggtcgcctacagcaagggcttcctgatggtcgcctccagtccgctgacccgctcctcccaccatgccggtgatgattttgcgcggctgcgggcagcgcgtgagaagaacgtgctgatggcggctgagtaa

SEQ ID NO: 3204 - protein, 322 aa, Rhizobium etli
MVTILDTINPDAKRVRHPEKAHRPDTEVMRKPDWIRVKAPTSKGYAETRAIVKEHKLVTVCEEAGCPNIGECWDKKHATFMIMGEICTRACRFCNVATGQPNALDMDEPENVAKAVRRWAQHVVITSVDRDDLEDGGAQHFEKVIWAIRSASPATTIEILTPDFLKKPGALERVVAAKPDVFNHNMETVAGNYLTVRPGARYFHSIRLLQRVKELDPTMFTKSGIMVGLGEERNEVLQLMDDLRTADVDFLTIGQYLQPTRKHHKVESFVTPEEFKSYETVAYSKGFLMVASSPLTRSSHHAGDDFARLRAAREKNVLMAAE

SEQ ID NO: 3205 - DNA, 972 bp, Rhizobium leguminosarum bv
  CDS (1)..(972): transl_table=11
atggtgacgatcctcgatacgatcaatcccgacgccaagcgcgtgcggcatcccgagaaggcgcatcggccggacacggaagtcatgcgcaagccggactggattcgcgtcaaggcgccgacctccaagggttatgccgagacgcgcgcgatcgtgaaggagcacaagctcgtcaccgtctgcgaggaggccggctgcccgaatatcggcgagtgctgggacaagaagcacgcgaccttcatgatcatgggcgagatctgtacccgcgcctgcgccttctgcaatgtcgccaccggcaagccgaatgcgctcgacatggccgagccggagaatgtcgccaaggcggtcaaggagatgggcctcagccacgtcgtcatcacctcggtcgaccgtgacgacctggaggacggcggcgccgagcacttcgaaaaggtgatctgggcgatccgtgccgcctcgccgatgacgacgatcgagatcctgacgccagacttcctgaagaagccaggggcgctggaacgcgtcgtcgccgccaagcccgacgtcttcaaccacaatatggaaacggtgcccggcaactatctgacggttcgccccggcgcccgctacttccattccgtccgcctgctgcagcgggtgaaggaactcgatccgacgatgttcaccaaatcgggcatcatggtcggtctcggcgaagagcgaaacgaagtgctgcagctgatggacgatctgcgcaccgccgatgtcgatttcctgacgatcggccagtacctgcagccgacccgcaagcaccacaaggtcgaaagcttcgtcaccccagacgagttcaagtcctacgagactgtcgcctacagcaagggcttcctgatggtcgcctccagccccctgacccgctcctcccaccatgccggcgacgactttgcccggctgagagctgcgcgcgagaagaagctgttgatggctgccgagtaa

SEQ ID NO: 3206 - protein, 323 aa, Rhizobium leguminosarum bv
MVTILDTINPDAKRVRHPEKAHRPDTEVMRKPDWIRVKAPTSKGYAETRAIVKEHKLVTVCEEAGCPNIGECWDKKHATFMIMGEICTRACAFCNVATGKPNALDMAEPENVAKAVKEMGLSHVVITSVDRDDLEDGGAEHFEKVIWAIRAASPMTTIEILTPDFLKKPGALERVVAAKPDVFNHNMETVPGNYLTVRPGARYFHSVRLLQRVKELDPTMFTKSGIMVGLGEERNEVLQLMDDLRTADVDFLTIGQYLQPTRKHHKVESFVTPDEFKSYETVAYSKGFLMVASSPLTRSSHHAGDDFARLRAAREKKLLMAAE

SEQ ID NO: 3207 - DNA, 966 bp, Rhizobium loti
  CDS (1)..(966): transl_table=11
atggttactgtcctcgacgcgatcgccaacgcaccacggttgcggcaccccgagaaggcgcacaagcccgaccaggaggtgttgcgcaagccggactggatccgcgtcaaggcgccggtctcgaagggctatgccgagacgcgcgagatcgtcaaatcccacaagctggtgacggtctgcgaagaggccggttgccccaacatcggcgagtgctgggaaaagaagcacgccaccttcatgatcatgggcgagatctgcacgcgcgcttgcgccttctgcaatgtcgccaccggcattccgaccgcgctggaccccgatgagccggcccgcgtcgcgcatgccgtcaagcagatggggctcagccacgtcgtcatcacctcggtcgaccgcgacgatcttgccgatggcggtgcgcagcattttgccgatgtcatccgggcgatccgcgcggcaacgccgtcgaccacgatcgaaatcctgacgcccgatttcctgcgcaaggacggcgcgcttgagatcgtcgtggcggccaggcccgacgtcttcaaccacaatctcgaaaccgtgccgtcgaactatctgaaggtccggccgggcgcccgctatttccactcgatccggctgttgcagcgggtcaaggaactcgatccgtcgatcttcaccaaatccggcatcatggttggcctgggcgaggagcgaaatgaaatcctgcagctgatggacgatctgcgctcggccaatgtcgacttcatgaccatcggccaatatctgcagccttcgaaaaagcaccatccggtgatccgcttcgtgacgcccgaagagttcaagtccttcgagacgatcggccggaccaagggtttcctgcttgtggcatcgagcccgctgacgcgttcatcgcaccatgccggcgacgatttcgcccggctgcgcgcggcgcgggaagcgcagctccagaaatcggtctag

SEQ ID NO: 3208 - protein, 321 aa, Rhizobium loti
MVTVLDAIANAPRLRHPEKAHKPDQEVLRKPDWIRVKAPVSKGYAETREIVKSHKLVTVCEEAGCPNIGECWEKKHATFMIMGEICTRACAFCNVATGIPTALDPDEPARVAHAVKQMGLSHVVITSVDRDDLADGGAQHFADVIRAIRAATPSTTIEILTPDFLRKDGALEIVVAARPDVFNHNLETVPSNYLKVRPGARYFHSIRLLQRVKELDPSIFTKSGIMVGLGEERNEILQLMDDLRSANVDFMTIGQYLQPSKKHHPVIRFVTPEEFKSFETIGRTKGFLLVASSPLTRSSHHAGDDFARLRAAREAQLQKSV

SEQ ID NO: 3209 - DNA, 969 bp, Rhizobium meliloti
  CDS (1)..(969): transl_table=11
atggtaacggttttcgacgccgtctcggatcgggcgcagcgtgttcgccacccggaaaaggcccaccggcccgacaccgaggtcctgcgcaagccggactggatccgtgtgaaggcaccgacctcgaagggataccaggagacccgctcgatcgtgaagagccacaagctcgttacggtctgcgaggaagccggatgccctaacatcggcgagtgctgggacaagaagcacgcgacgttcatgatcatgggcgagatctgcacgcgtgcctgtgccttctgcaacgtcgcgaccggcaagcccaatgccctcgatctggacgagcccgcaaatgtcgccaaggcggtgaagcagatgggcctgagccatgtcgtcatcacctccgtcgaccgcgacgacctcgacgacggcggcgccgagcatttcgagaaggtcatcttcgcgatccgggaagcctcgccggaaaccacgatcgaaatcctgacgcccgatttcctccgcaagcccggcgcgctggagcgtgtcgtggccgccaagccggacgttatcaaccacaatctcgaaacggttccgtccaactacctgacggtccggccgggcgcgcgctatttccattcgatccggctactgcagcgcgtgaaggaactcgaccccaccatgttcaccaagtcgggcatcatggtcggcctcggcgaggagcgcaacgaagtgctgcagctgatggacgacctgcgtaccgccgatgtcgatttcctgacgatcggccaatatctgcagccgagccgcaagcatcacaaggtcgagaaattcgtcactccggaagaattcaagtcctacgagacggtcgcctacaccaagggcttcctgatggtttcctcaagcccgctgacccgctcgtcccaccatgccggcgacgacttcgcaaggctgaaggcggcgcgcgaaaggaagctggctgcggcggagtag

SEQ ID NO: 3210 - protein, 322 aa, Rhizobium meliloti
MVTVFDAVSDRAQRVRHPEKAHRPDTEVLRKPDWIRVKAPTSKGYQETRSIVKSHKLVTVCEEAGCPNIGECWDKKHATFMIMGEICTRACAFCNVATGKPNALDLDEPANVAKAVKQMGLSHVVITSVDRDDLDDGGAEHFEKVIFAIREASPETTIEILTPDFLRKPGALERVVAAKPDVINHNLETVPSNYLTVRPGARYFHSIRLLQRVKELDPTMFTKSGIMVGLGEERNEVLQLMDDLRTADVDFLTIGQYLQPSRKHHKVEKFVTPEEFKSYETVAYTKGFLMVSSSPLTRSSHHAGDDFARLKAARERKLAAAE

SEQ ID NO: 3211 - DNA, 951 bp, Rhodopirellula baltica
  CDS (1)..(951): transl_table=11
ttgattttttgcctttcatccggacagacgccgatggcttttcgattgccagttgtcgccgaaccagaaatgcctgcgggcaccgacgtcagctcgacgggacggttgccacgttggctcaagcggcccatccccaaatccaactcgaatcatttgaccgattcgttgatggaagaatacgggttggaaaccgtatgcgacaacgccaagtgccccaaccggatggagtgctacagccagcaaacggcgacgttcatggttctggggaatgtttgtacccgcccatgtggtttctgtgccgtcagccgtggacgcccaccggctgcccccgccgtcgatgagccagatcgcatcgccaaagcggccgaacgattggggctgaagcacgttgtcatcaccagcgtcacgcgagatgacttgcccgacggaggtgccgaccatttccacaactgcgtcatcgcagttcgggaacgcaccggggcgaccaccgaagtcctcacgcctgactttgtgcactgcaaggaagcgttggctcgggtcatcgaagcaaaaccgaccgtgttcaatcacaacatggaaaccgtgccacgtctttaccgccgagtccgcggtccaaagagtgactatgcttggacgttggaaatgatgcggcaagtcaaacgctacgacgccgaagtcaaaaccaagagcggtttgatgcttggattgggcgaagaacgaggcgagttgctcgacgctctgtcagatcttcgcgaacacgatgtcgatttcctgacgttgggccagtacctgcaaccgggcgagaaatacttgcccgtcgttcgctatgttccgccagaagaattcgatgaattggccgacatcgccaaatcaatgggattcaaaaaggtcgccagtggcccctttgtgcgaagtagctaccacgcccgtgacatggccgagactgagtga

SEQ ID NO: 3212 - protein, 316 aa, Rhodopirellula baltica
MIFCLSSGQTPMAFRLPVVAEPEMPAGTDVSSTGRLPRWLKRPIPKSNSNHLTDSLMEEYGLETVCDNAKCPNRMECYSQQTATFMVLGNVCTRPCGFCAVSRGRPPAAPAVDEPDRIAKAAERLGLKHVVITSVTRDDLPDGGADHFHNCVIAVRERTGATTEVLTPDFVHCKEALARVIEAKPTVFNHNMETVPRLYRRVRGPKSDYAWTLEMMRQVKRYDAEVKTKSGLMLGLGEERGELLDALSDLREHDVDFLTLGQYLQPGEKYLPVVRYVPPEEFDELADIAKSMGFKKVASGPFVRSSYHARDMAETE

SEQ ID NO: 3213 - DNA, 960 bp, Rhodopseudomonas palustris
  CDS (1)..(960): transl_table=11
atggtcgttctcgtcgatacggtgtccgccaatcccgtccgcccccggcatccggagaaggcggcgcggccggatgcgctgtcgccgaagaagccggactggatccgggtgcgcgcgccgaccacgcgcggctatggcgagacccgcggcatcgtcaaggaaaacggcctgcacacggtgtgcgaggaggccggctgcccgaatatcggcgagtgctgggacaagaagcacgccaccttcatgatcatgggggacacctgcacccgggcgtgcgcgttctgcaacgtcaagaccgggatgccgggcgcactcgacgccaacgagccagcctacgtcgccgaggcgacccgcaagctcgggctgcagcatctggtgattacctcggtcgaccgcgatgatctggccgatggaggcgccgcgcacttcgccgcaacgatccgcgcggtgcgcgaagcctgcccaacgacgacgatcgagatcctgacgccagacttcctgcgcaaggacggcgcgctggaggtggtggtcgccgccaagccggacgtgttcaaccacaatctcgaaaccgtgccgtcgcgctatctgtcggtgcggccgggcgcacgctacttccactcgatccggctgctgcagcgggtcaaggaactcgatcccagcatcttcaccaagtccggcatcatggtcgggctcggcgaggaacgccacgaggtgctgcaggtgatggacgacctgcgctcggcggaggtcgatttcctcaccatcggccagtatctacagccgacccgcaagcaccatgcggtgatgcgctacgtcacgccggacgaatttgccggctatcagaccaccgcctacgctaagggcttcctgatggtgtcggcgagcccgatgacccgctcgtcgcatcacgccggcgacgatttcgccaagctcaaggcggcgcgcgcggcgcgagcccgctaa

SEQ ID NO: 3214 - protein, 319 aa, Rhodopseudomonas palustris
MVVLVDTVSANPVRPRHPEKAARPDALSPKKPDWIRVRAPTTRGYGETRGIVKENGLHTVCEEAGCPNIGECWDKKHATFMIMGDTCTRACAFCNVKTGMPGALDANEPAYVAEATRKLGLQHLVITSVDRDDLADGGAAHFAATIRAVREACPTTTIEILTPDFLRKDGALEVVVAAKPDVFNHNLETVPSRYLSVRPGARYFHSIRLLQRVKELDPSIFTKSGIMVGLGEERHEVLQVMDDLRSAEVDFLTIGQYLQPTRKHHAVMRYVTPDEFAGYQTTAYAKGFLMVSASPMTRSSHHAGDDFAKLKAARAARAR

SEQ ID NO: 3215 - DNA, 945 bp, Rhodospirillum rubrum
  CDS (1)..(945): transl_table=11
atgatggacactccaatcattcgtcaccccgagaaggttcgccggcccgacaatccgtcgccgcgcaaacccgagtggattcgcgtgagggccccggtttcccacgaggccgcggaggtccgccagcttatgcgctcgaagaaccttttcaccgtctgtgaagaggctgcctgcccgaatatcggcgagtgctggaagcgccgtcacgccaccttcatgatcctgggcgatatctgcacccgggcctgcgccttttgtaacgtgcggaccggcaagcccggccatgtcgatgaccaggagccggtcaatctggccgactccgtggtggcgatgggcctgaagcatgtcgtcatcacctcggtcgatcgcgatgatctggccgatggcggggccggccatttccatcgctgcatcaccgaggtccgcagccgggccccgagttgctcgatcgaggtactgaccccggatttccgtgacaagccgcaaggcgcgcttgcccgggtggtcgaagccggtcccgatgtcttcaatcacaatctggagaccgtgccccggctataccccaccatccgtccgggggcgcgctactttcattccctgaagcttctcgaccgggtcaagacgatcgatccgggggtgttcaccaaatcgggcatcatggtcggtctgggggaaacccgcgaggaggttttgcaggtcatggacgacatgcgttcggccggggtcgatttcctgaccatcggtcaataccttcagccgaccttgaagcatgtcgccgtcgaccgcttcgtgacgcccgatgaattcaaggactatgccgatatcgcccggggcaagggtttccttatggtcgcctcgtcgccgctcacccgctcctcccaccatgcggaccgcgatttcgaggacctgcgcaaggcccgacaggacgccgccgccaccaagtga

SEQ ID NO: 3216 - protein, 314 aa, Rhodospirillum rubrum
MMDTPIIRHPEKVRRPDNPSPRKPEWIRVRAPVSHEAAEVRQLMRSKNLFTVCEEAACPNIGECWKRRHATFMILGDICTRACAFCNVRTGKPGHVDDQEPVNLADSVVAMGLKHVVITSVDRDDLADGGAGHFHRCITEVRSRAPSCSIEVLTPDFRDKPQGALARVVEAGPDVFNHNLETVPRLYPTIRPGARYFHSLKLLDRVKTIDPGVFTKSGIMVGLGETREEVLQVMDDMRSAGVDFLTIGQYLQPTLKHVAVDRFVTPDEFKDYADIARGKGFLMVASSPLTRSSHHADRDFEDLRKARQDAAATK

SEQ ID NO: 3217 - DNA, 894 bp, Rickettsia akari
  CDS (1)..(894): transl_table=11
atgactaatttaaataaaaaaccggattggataaaggttaaagctcctaattctgcagagtattataatacaaaagatttaataaagaatctgagtttaaatactgtgtgcgaagaagctgcttgtcctaatatcggtgagtgttggtcgaaaaaacatgcaaccatgattattttaggttcggtttgtactagagcctgtatgttttgtaatgtcaaaactggtagacctgatttacttgatccgcacgaaccgcaaaggttagcagaggctgtacaaaagttaaatcttaaacatgtagtaattacttccgtcgatcgtgatgaccttgaagacggtggagcttcacattttgcggagtgtattaatgaaattagaaaatcctcgacaaatactactatcgagattctaacacccgattttttaagaaaagaaggagcagctgaaataatagccaattcaaagcctgacgtatttaatcataatgtcgaaacagtaccgtctttatataaaacgattagacctggagctagatattataattctttaagcttacttcacaatatcaaaaaattatctcctgaaatttttacaaaatcaggtatgatggtaggacttggcgaagaaataaatgaagtagtacaggttatggatgatttaagggaagcacaagttgatttcctcactatcggacagtatctgcaacctactaaaaatcatgccgaggtcgcaaaatatgttactcctgaagagtttcaatatttagggcgaatagcaaaaacaaaaggattcttgatggtttcgtcaaccccgctaacccgttcttcataccatgccgatgaggattttcaaaaattaaaagagaattaccaacagcgtcatacagtggcttaa

SEQ ID NO: 3218 - protein, 297 aa, Rickettsia akari
MTNLNKKPDWIKVKAPNSAEYYNTKDLIKNLSLNTVCEEAACPNIGECWSKKHATMIILGSVCTRACMFCNVKTGRPDLLDPHEPQRLAEAVQKLNLKHVVITSVDRDDLEDGGASHFAECINEIRKSSTNTTIEILTPDFLRKEGAAEIIANSKPDVFNHNVETVPSLYKTIRPGARYYNSLSLLHNIKKLSPEIFTKSGMMVGLGEEINEVVQVMDDLREAQVDFLTIGQYLQPTKNHAEVAKYVTPEEFQYLGRIAKTKGFLMVSSTPLTRSSYHADEDFQKLKENYQQRHTVA

SEQ ID NO: 3219 - DNA, 909 bp, Rickettsia conorii; identical to SEQ ID NO: 2717
  CDS (19)..(909): transl_table=11

SEQ ID NO: 3220 - protein, 296 aa, Rickettsia conorii
MANLNKRPDWIKVKAPNSTEYYNTKDLIKNLRLNTVCEEAACPNIGECWSKKHTTVMILGSVCTRACRFCNVKTGRPDLLDPYEPQRLAEAVQKLNLKHVVITSVDRDDLEDGGASHFAECISEIRKSSPNTTIEILTPDFLRKEGAAEIIANAKPDVFNHNVETVPSLYKTIRPGARYYNSLSLLHNIKKLSPEIFTKSGMMVGLGEEINEVVQVIDDLREAKVDFLTIGQYLQPTKNHAEVAKYVTPEEFKYLERVAKTKGFLMVSASPLTRSSYHADEDFQKLKENYQQKLVS

SEQ ID NO: 3221 - DNA, 1047 bp, Rickettsia felis
  CDS (142)..(1047): transl_table=11
gtgaatttcaaaaattggcgttgtcgttctataagagtgcaggtagccacgtattattatacgctccgctccttgccttgtgaactcctcgctctttttgaaattgaccttcgtatacaactattcatttcacaggagtatatgtctaatttaaacaaaagaccggattggataaaagtaaaagctccgaattccgcagaatattataatacaaaagatttaataaagaatctgagattaaatactgtgtgcgaggaagctgcttgtcctaatatcggtgagtgctggtcgaaaaaacatgcaaccgtgatgattttaggttcggtttgtactagagcctgtaggttttgtaatgtcaaaactggtagaccggatttgcttgacccgcacgaaccgcaaaggttagcggaagcggtacaaaagttaaatcttaagcatgtagtaattacttccgtcgatcgtgatgatcttgatgatggcggagctacgcattttgcggagtgtattagcgaaattagaaaatcatcgccaaatactactattgagattctaactcctgattttttaagaaaagaaggagcagctgaaataatagcaaatgcaaaacctgacgtctttaaccataatgtcgaaacagtcccgtctttatacaaaacgattagaccaggagctagatattataattctttaagcttacttcacaatatcaaaaaattatctcctgaaatttttacaaaatccggtatgatggtagggcttggagaagaaataagtgaagtaatacaggttatggatgatttaagagaagcaaaggttgattttctaactatagggcagtatctgcaacctactaaaaatcatgctgaggtcgcaaaatatgttactcccgaagagtttaaatatttagagcgaatagcaagaacaaaaggattcttgatggtttcggcaaccccgctaacccgttcttcataccatgccgatgaggattttcaaaaattaaaagagaattaccagcagcgtcattgcgaggaggcatggcctgcgtga

SEQ ID NO: 3222 - protein, 301 aa, Rickettsia felis
MSNLNKRPDWIKVKAPNSAEYYNTKDLIKNLRLNTVCEEAACPNIGECWSKKHATVMILGSVCTRACRFCNVKTGRPDLLDPHEPQRLAEAVQKLNLKHVVITSVDRDDLDDGGATHFAECISEIRKSSPNTTIEILTPDFLRKEGAAEIIANAKPDVFNHNVETVPSLYKTIRPGARYYNSLSLLHNIKKLSPEIFTKSGMMVGLGEEISEVIQVMDDLREAKVDFLTIGQYLQPTKNHAEVAKYVTPEEFKYLERIARTKGFLMVSATPLTRSSYHADEDFQKLKENYQQRHCEEAWPA

SEQ ID NO: 3223 - DNA, 894 bp, Rickettsia prowazekii
  CDS (1)..(894): transl_table=11
atgactaatttaaacaaaagaccagattggatcaaagtaaaagctcctaattctgtagagtattatcagacaaaagatttaataaagaatttgagattaaatactgtgtgtgaagaagcggcttgtcctaatattggcgattgttggtcgaggaaacatgcaactgtgatgatcttaggtgcggtttgtactagagcttgtagattttgtaatgttaaaacaggtagaccggatttacttgatccacacgaaccgcgaaggttagcagaagcagtgcaaaagttaaatctgcagcatgtagtcattacttctgttgatcgtgatgatcttgaagatggtggagcttcacattttgctgagtgtattaatgaaattagaaggtcatcaccaaatactactatagagattcttacacctgattttttaagaaaagaaggagcagtcgaaataatagcaaatgcaaagcctgatgtatttaatcataatgtcgaaacagtaccatctttatataaaacgattagacctggagctagatattataattctttaagcttacttcacaatatcaaaaaattatctcctgaaatttttacaaaatctggtatgatggtagggcttggtgaagaaataaatgaagtagtgcaggttatggatgatttaagagaagcaaatgttgattttttaactattgggcagtatctgcaacctactaaaagtcatgctgagattagaaaatatgttacccctgaagaatttaaatacttagagcgaatagcaaaaacaaaaggtttcttaatggtttctgcaactccattaacacgttcttcataccatgcagataaggattttcaaaaattaaaagggaattataatataagacttgcatcaatgtaa

SEQ ID NO: 3224 - protein, 297 aa, Rickettsia prowazekii
MTNLNKRPDWIKVKAPNSVEYYQTKDLIKNLRLNTVCEEAACPNIGDCWSRKHATVMILGAVCTRACRFCNVKTGRPDLLDPHEPRRLAEAVQKLNLQHVVITSVDRDDLEDGGASHFAECINEIRRSSPNTTIEILTPDFLRKEGAVEIIANAKPDVFNHNVETVPSLYKTIRPGARYYNSLSLLHNIKKLSPEIFTKSGMMVGLGEEINEVVQVMDDLREANVDFLTIGQYLQPTKSHAEIRKYVTPEEFKYLERIAKTKGFLMVSATPLTRSSYHADKDFQKLKGNYNIRLASM

SEQ ID NO: 3225 - DNA, 894 bp, Rickettsia typhi
  CDS (1)..(894): transl_table=11
atgactaatgtaaacagaagaccagattggataaaagtaaaagctcctaattctgcagagtattataatacaaaagatttaataaagaatttgagattaaatactgtgtgtgaagaagctgcttgtcctaatattggtgagtgttggtcgaggaaacatgccaccgtgatgattttaggttcagtttgtactagagcttgtagattttgtaatgtcaaaacgggtagaccggatttacttgatccacacgaaccgcgaaggttagcagaagcagtacaaaagttaaatttgaatcatgtagtaattacttctgttgatcgtgatgatcttgaagacggtggagcttcacattttgctgagtgtattaatgaaattagaaggtcatcaccaaatactactatagagattcttacacctgattttttaagaaaagcaggagcagtcgaagtaatagcaaattcaaagcctgatgtttttaatcataatgtcgaaacagtaccatctttatataaaacgattagacctggagctaggtattataattctttaagcttacttcacaatattaaaaaattatctcctgaaatttttacaaaatctggtatgatggtagggcttggtgaagaaataaatgaagtagtgcaggttatggatgatttaagagaagcaaatgttgattttttaactattgggcagtatcttcaacctactaaaagtcatgctgaggtcataaaatacgttactcctgaagaatttaaatatttagagcgaatagcaaaaacaaaaggattcttaatggtgtctgcaactccgttaacacgttcttcataccatgcagataaggattttcaaaaattaaaagagaattataatataaggcttgcatcaatgtaa

SEQ ID NO: 3226 - protein, 297 aa, Rickettsia typhi
MTNVNRRPDWIKVKAPNSAEYYNTKDLIKNLRLNTVCEEAACPNIGECWSRKHATVMILGSVCTRACRFCNVKTGRPDLLDPHEPRRLAEAVQKLNLNHVVITSVDRDDLEDGGASHFAECINEIRRSSPNTTIEILTPDFLRKAGAVEVIANSKPDVFNHNVETVPSLYKTIRPGARYYNSLSLLHNIKKLSPEIFTKSGMMVGLGEEINEVVQVMDDLREANVDFLTIGQYLQPTKSHAEVIKYVTPEEFKYLERIAKTKGFLMVSATPLTRSSYHADKDFQKLKENYNIRLASM

SEQ ID NO: 3227 - DNA, 966 bp, Rubrobacter xylanophilus
  CDS (1)..(966): transl_table=11
gtgcgccaccgctgggaggacaggcccgtcgcccccccgccggacggcaggcccaccgagtacctgcccttccggcaggagcggggtcggcacggtcgcccggggtggctcaaggcgcgggtcccggacgggcccggctaccgggagataaaggagaccatgcgcgggctcagcctgcacaccgtctgcgaggaggcccgctgcccgaacatcggggagtgctggaacaaccgcaccgcgaccttcatgatcctgggcaacgtctgcacccgctcctgcggcttctgcgcggtgctcaccggcaggccgcaggagctggatttggaggagccctaccgggtggccgacgcggtgaagaagatggggctcaggcacgcggtcatcacgagcgtcaaccgcgacgagctgcccgacgggggggcctcggtctttgctgccaccatccgggccatccggagggaggtgccgggctgcgccgtggaggtcttgacgccggacttcaagggcgaccgcgacgccataaagaccgtcatcgacgcccgccccgacaccttcaaccacaacatcgagacggtcccgcgcctctacccggcggtgcggccgcaggcgaagtacgggaggtcgctggaggtgctgcgctacgccaaggagctcgaccccggcgtcctgaccaagagcgggttcatggtgggccttggggaggtggaggaggagatagtgcggacgatgcgcgacctgcgggagcacggcgtggacatcctgaccatcggccagtacctccgtccgacggagaaccacctgccgatggcccgctactacacgccgcaggagtttgcccgctacaagaagctgggcctggagatgggcttctctcacgtggagagcggccctctggtgcgcagctcctaccacgcccacgagcagaccgaggacgcccgccgcggcgccctgggagcgaggggctag

SEQ ID NO: 3228 - protein, 321 aa, Rubrobacter xylanophilus
MRHRWEDRPVAPPPDGRPTEYLPFRQERGRHGRPGWLKARVPDGPGYREIKETMRGLSLHTVCEEARCPNIGECWNNRTATFMILGNVCTRSCGFCAVLTGRPQELDLEEPYRVADAVKKMGLRHAVITSVNRDELPDGGASVFAATIRAIRREVPGCAVEVLTPDFKGDRDAIKTVIDARPDTFNHNIETVPRLYPAVRPQAKYGRSLEVLRYAKELDPGVLTKSGFMVGLGEVEEEIVRTMRDLREHGVDILTIGQYLRPTENHLPMARYYTPQEFARYKKLGLEMGFSHVESGPLVRSSYHAHEQTEDARRGALGARG

SEQ ID NO: 3229 - DNA, 966 bp, Salmonella arizonae
  CDS (1)..(966): transl_table=11
atgagtaaacccattgtgatggaacgcggtgtaaaataccgcgatgccgataagatggctcttatcccggtaaaaaatgtgatcacagagcgcgacgctctgctccgtaaaccggaatggatgaaaataaaacttccggcggattctacccgtatccagggcatcaaagccgcaatgcgcaaaaatggcttgcattctgtctgcgaggaagcgtcttgtccgaatctggctgaatgcttcaaccacggcaccgccacatttatgatcctcggcgcgatttgcacccgccgctgtccgttctgcgatgttgcccatggccgccccgttgcgccggatgcggaagagccgcagaaactggcgcaaacgatcgccgacatggcgctacgctatgtggtgatcacttctgtcgaccgtgacgatctgcgtgacggcggcgcccagcattttgctgactgcatcacagccatccgagccaaaagtccggagataaaaatagagacgctggtgccagacttccgtggacgtatggatcgcgcactggagatccttaacgcgacgccgccagatgtgtttaaccataaccttgaaaacgtgccgcgtatctaccgccaggtacgtcctggcgccgactacaactggtcgctgaaattactggagcgctttaaagaagcgcacccggaaattccgacaaaatcgggtctgatggtcggcttaggcgaaactaacgcagaaattattgaggttatgcgcgacttacgccgtcacggcgtcaccatgctgacgcttggtcagtatctacagccaagccgccatcatctgccggtgcagcgctatgtcagcccggaagagtttgacgagatgaaagcggaagcactggcgatgggctttacccatgccgcctgtgggccttttgttcgttcttcgtaccatgctgatctccaggccaaaggcatggaagtaaaatga

SEQ ID NO: 3230 - protein, 321 aa, Salmonella arizonae
MSKPIVMERGVKYRDADKMALIPVKNVITERDALLRKPEWMKIKLPADSTRIQGIKAAMRKNGLHSVCEEASCPNLAECFNHGTATFMILGAICTRRCPFCDVAHGRPVAPDAEEPQKLAQTIADMALRYVVITSVDRDDLRDGGAQHFADCITAIRAKSPEIKIETLVPDFRGRMDRALEILNATPPDVFNHNLENVPRIYRQVRPGADYNWSLKLLERFKEAHPEIPTKSGLMVGLGETNAEIIEVMRDLRRHGVTMLTLGQYLQPSRHHLPVQRYVSPEEFDEMKAEALAMGFTHAACGPFVRSSYHADLQAKGMEVK

SEQ ID NO: 3231 - DNA, 966 bp, Salmonella choleraesuis
  CDS (1)..(966): transl_table=11
atgagtaaacccattgtgatggaacgcggtgtaaaataccgcgatgccgataagatggctcttatcccggttaaaaatgtggtcacagagcgcgacgctctactacgtaaaccggaatggatgaaaataaaacttccggcggattctacccgtatccagggcatcaaagccgcaatgcgcaaaaatggcctgcattctgtctgcgaggaagcgtcttgcccaaacctggctgaatgtttcaaccacggtaccgctacgtttatgatccttggcgccatttgcactcgccgctgcccgttctgtgatgtcgcccatggccgccccgttgcgccggatgcggaagagccgcagaaactggcgcaaacgatcgccgacatggcgctacgctatgtggtcatcacctctgtcgaccgtgacgatctgcgtgacggcggcgcccagcattttgctgactgcatcaccgccatccgtgccaaaagcccggagataaaaatagagacgctggtgccagacttccgtggacgtatggatcgcgcgctggatattcttaacgcgacgccgccggatgtgtttaaccacaacctggaaaacgtgccgcgtatttaccgccaggttcgtccgggcgccgattacaactggtcgctgaaattactggaacgcttcaaagaagcgcacccggaaattccgacaaaatcgggtctgatggtgggcttaggcgaaaccaatgcggaaatcattgaggttatgcgcgacttacgccgtcacggcgttaccatgctgacgcttggtcagtatctacagccaagccgccatcacctgccggtacagcgttatgtcagcccggaagagtttgacgagatgaaagcggaagctctggcgatgggctttacccatgccgcctgtggcccctttgtacgttcttcgtaccatgctgatctccaggccaaaggcatggaagtgaaatga

SEQ ID NO: 3232 - protein, 321 aa, Salmonella choleraesuis
MSKPIVMERGVKYRDADKMALIPVKNVVTERDALLRKPEWMKIKLPADSTRIQGIKAAMRKNGLHSVCEEASCPNLAECFNHGTATFMILGAICTRRCPFCDVAHGRPVAPDAEEPQKLAQTIADMALRYVVITSVDRDDLRDGGAQHFADCITAIRAKSPEIKIETLVPDFRGRMDRALDILNATPPDVFNHNLENVPRIYRQVRPGADYNWSLKLLERFKEAHPEIPTKSGLMVGLGETNAEIIEVMRDLRRHGVTMLTLGQYLQPSRHHLPVQRYVSPEEFDEMKAEALAMGFTHAACGPFVRSSYHADLQAKGMEVK

SEQ ID NO: 3233 - DNA, 966 bp, Salmonella typhi
  CDS (1)..(966): transl_table=11
atgagtaaacccattgtgatggaacgcggtgtaaaataccgcgatgccgataagatggctcttatcccggttaaaaatgtggtcacagagcgcgacgctctactacgtaaaccggaatggatgaaaataaaacttccggcggattctacccgtatccaaggcatcaaagccgcaatgcgcaaaaatggcctgcattctgtctgtgaggaagcgtcttgcccaaacctggctgaatgtttcaaccacggtaccgctacgtttatgatccttggcgccatttgcactcgccgctgtccgttctgtgatgtcgcccatggccgccccgttgcgccggatgcggaagagccgcagaaactggcgcaaacgatcgccgacatggcgctacgctatgtggtcatcacctctgtcgaccgtgacgatctgcgtgacggcggcgcccagcactttgctgactgcatcaccgccatccgcgccaaaagcccggagataaaaatagagaccctggtgccagacttccgtggacgtatggatcgcgcgctggatattcttaacgcgacgccgccggatgtgtttaaccacaacctggaaaacgtgccgcgtatttaccgccaggttcgtccgggcgccgattacaactggtcgctgaaattactggaacgcttcaaagaagcgcacccggaaattccgacaaaatcgggtctgatggtgggcttaggcgaaaccaatgcggaaatcattgaggttatgcgcgacttacgccgtcacggcgttaccatgctgacgcttggtcagtatctacagccaagccgccatcacctgccggtacagcgttatgtcagcccggaagagtttgacgagatgaaagcagaagccctggcgatgggctttacccatgccgcctgtggcccctgtgtacgttcttcgtaccatgctgatctccaggccaaaggcatggaagtgaaatga

SEQ ID NO: 3234 - protein, 321 aa, Salmonella typhi
MSKPIVMERGVKYRDADKMALIPVKNVVTERDALLRKPEWMKIKLPADSTRIQGIKAAMRKNGLHSVCEEASCPNLAECFNHGTATFMILGAICTRRCPFCDVAHGRPVAPDAEEPQKLAQTIADMALRYVVITSVDRDDLRDGGAQHFADCITAIRAKSPEIKIETLVPDFRGRMDRALDILNATPPDVFNHNLENVPRIYRQVRPGADYNWSLKLLERFKEAHPEIPTKSGLMVGLGETNAEIIEVMRDLRRHGVTMLTLGQYLQPSRHHLPVQRYVSPEEFDEMKAEALAMGFTHAACGPCVRSSYHADLQAKGMEVK

SEQ ID NO: 3235 - DNA, 1113 bp, Schizosaccharomyces pombe
  CDS (1)..(1113)
atgttgaaaataggtcgaaatgctacgatattaaaaaacaatttttggtttgcctccgtgaggtttcaatctggagggttttcagaaaagttggcgaaaggaccatcatttgcagatttcttgaacatggataaaccattgactgctgacgaagctttcgagttagatagaaaagtagagctaccaaatggctctatacacaaaagattgccttcatggcttaaaaccaaagttccactaggaacaaattttaaccgaataaagcatgatttgcggggatctcatctccatacggtttgtgaagaagcgaaatgtccgaatattggagaatgctggggaggtaaagacaaatctcgtgccacagctacgatcatgcttatgggtgatacttgtactcgtggatgtcgcttttgttcggtaaagaccagtcgccgtccaggtcctttagatcccaacgagcctgaaaatacagcagaagccatcaaacaatggaaccttgggtacattgttctcactagtgtcgatagagatgacctgactgaccttggtgccaatcatatagcaaaaacgattcaaaaaattaaagaaaaagccccgcacatcttggtagaagctttgacccccgattttagtggaagaatggatttggttgagattgtagctaaatctggtttggacgtctttgcacacaatgtagaaacggtagaggaacttaccccatttgttcgagatcgacgagccacatatcgacaaagtctgagcgtgctaaaacatgtgaagaaaacatgtcctcaccttatcactaaaaccagtattatgcttggtctaggtgaaaccgatgcggaaattctaacaactcttaaggatctcctggaacataatgtagatgtcgttacctttggtcaatatatgagacctaccaaacgacacctaaaagtgcaagagtatgtacatcctaagaagtttgaatattggaaagaagtggcagagaaattaggattcttatacgtggctagtggtccacttgttcgtagtagctataaggctggcgaatattttatggagaatcttattaaaaagagatcaggaaaccctgcttctatgagtgtttaa

SEQ ID NO: 3236 - protein, 370 aa, Schizosaccharomyces pombe
MLKIGRNATILKNNFWFASVRFQSGGFSEKLAKGPSFADFLNMDKPLTADEAFELDRKVELPNGSIHKRLPSWLKTKVPLGTNFNRIKHDLRGSHLHTVCEEAKCPNIGECWGGKDKSRATATIMLMGDTCTRGCRFCSVKTSRRPGPLDPNEPENTAEAIKQWNLGYIVLTSVDRDDLTDLGANHIAKTIQKIKEKAPHILVEALTPDFSGRMDLVEIVAKSGLDVFAHNVETVEELTPFVRDRRATYRQSLSVLKHVKKTCPHLITKTSIMLGLGETDAEILTTLKDLLEHNVDVVTFGQYMRPTKRHLKVQEYVHPKKFEYWKEVAEKLGFLYVASGPLVRSSYKAGEYFMENLIKKRSGNPASMSV

SEQ ID NO: 3237 - DNA, 966 bp, Shewanella oneidensis
  CDS (1)..(966): transl_table=11
atgaataggcctgaacgtttacaacccggagtcaaattaagagatgccgaaaaggtctcacgtattccggttaaaatcgtgccctctgagcgcgaaaccatgttacgcaaaccagattggttaagggttaaactgcccgcatctaaccaacgcattctcgacattaagcaagcgttacgcgctaacggcctgcactcggtctgtgaagaggcctcctgcccgaacttggcagaatgttttaaccacggcacagcaacctttatgattttgggtgcaatttgtactcgccgttgccccttctgtgacgtggcccatggtcgtcctctcaagcctgatgagcaggaacccgttaagctggcacaaaccatccgcgatatgaagctgaaatacgtggtcatcacctcggttgaccgcgacgacctgcgtgatggcggagcccagcactttgccgactgtatccgcgagatccgcaaactcaatccagaaattaagattgagatcttagtccccgatttccgtggccgtatcgacgccgccctcgacatactgtcgaccgagccgcctgatgtgttcaaccacaacctcgaaaccgcacctatgcactatcgcaaggcgcgtccaggggcgaactatcaatggtccctcgacctactaaaacgctttaaagagcgtcacccaaatgtaccgactaagtcgggactgatgatgggtctaggcgaaaccaacgatgaaatcgcccaagtgctacgcgacttacgtgagcacaaggtcgaaatgctgaccttaggccaatacctgcaaccatctaagttccatctgccggttgagcgttacgtatcacccgcagagtttgatgagctaaaagcccttgccgatgagctgggttttactcacgcagcctgtggtccattagtgcgttcaagctaccatgctgacttacaagcccaaggtaaagaagtgaagtaa

SEQ ID NO: 3238 - protein, 321 aa, Shewanella oneidensis
MNRPERLQPGVKLRDAEKVSRIPVKIVPSERETMLRKPDWLRVKLPASNQRILDIKQALRANGLHSVCEEASCPNLAECFNHGTATFMILGAICTRRCPFCDVAHGRPLKPDEQEPVKLAQTIRDMKLKYVVITSVDRDDLRDGGAQHFADCIREIRKLNPEIKIEILVPDFRGRIDAALDILSTEPPDVFNHNLETAPMHYRKARPGANYQWSLDLLKRFKERHPNVPTKSGLMMGLGETNDEIAQVLRDLREHKVEMLTLGQYLQPSKFHLPVERYVSPAEFDELKALADELGFTHAACGPLVRSSYHADLQAQGKEVK

SEQ ID NO: 3239 - DNA, 966 bp, Shewanella sp
  CDS (1)..(966): transl_table=11
atgaataggcctgaacgtttacaacccggagtcaaattaagagatgccgataaggtctcgcgcattccggttaaaatcgtgccctctgagcgcgaaaccatgttacgcaaacccgattggttaagggtcaaactgcccgcatctaaccaacgcattctcgagatcaagcaagcattacgttcgaacggtctgcactcggtctgtgaagaagcttcttgccctaacttggcagaatgttttaaccacggcaccgcgacctttatgattttgggcgcaatttgtactcgccgctgcccattctgcgacgtggcccacggtcgtccattgaaacctgatgcagaagagccggtcaaactggcacaaaccattcgcgatatgaagctgaaatacgtggttatcacctcggttgaccgcgatgacctgcgtgatggcggtgcccagcactttgccgactgtatccgtgagatccgtaaactgaatcctgaaattaagattgagatcttagtgcccgatttccgtggtcgtatcgacgctgccctcgacattctgtcgaccgagccgcctgatgtgttcaaccacaacctcgaaactgcgcctatgcattaccgcaaagcgcgtccaggggcgaactatcaatggtcactcgacctactgaagcgctttaaagagcgtcaccccaatgtgccgacaaaatcgggactaatgatgggtctaggtgaaaccaacgaagaaatcgcccaagtgctgcgcgacttacgtgagcacaaggtagaaatgttgaccttaggtcaatatctgcaaccgtctaagttccacctgccggttgagcgttacgtctcgccagccgagttcgatgagcttaaagtccttgccgatgagctgggctttactcacgccgcctgtggcccattagtacgttcaagctaccatgcagacctgcaagctcaaggtaaagaagtgaagtaa

SEQ ID NO: 3240 - protein, 321 aa, Shewanella sp
MNRPERLQPGVKLRDADKVSRIPVKIVPSERETMLRKPDWLRVKLPASNQRILEIKQALRSNGLHSVCEEASCPNLAECFNHGTATFMILGAICTRRCPFCDVAHGRPLKPDAEEPVKLAQTIRDMKLKYVVITSVDRDDLRDGGAQHFADCIREIRKLNPEIKIEILVPDFRGRIDAALDILSTEPPDVFNHNLETAPMHYRKARPGANYQWSLDLLKRFKERHPNVPTKSGLMMGLGETNEEIAQVLRDLREHKVEMLTLGQYLQPSKFHLPVERYVSPAEFDELKVLADELGFTHAACGPLVRSSYHADLQAQGKEVK

SEQ ID NO: 3241 - DNA, 936 bp, Sphingopyxis alaskensis
  CDS (1)..(936): transl_table=11
atgaacgctcctgcatcccccgccgcctcgcccagccagcgcgcgcgcaagcccgactggatccgcgtcaaggcaccgaccagccccggctatgccgaaacgcgcaagctgatgcgcgagctgaacctgcacaccgtgtgcgaggaagcggcgtgcccgaacatcggcgagtgctggaccaagaagcacgcgacggtgatgatccttggcgacacctgcacgcgcgcctgcgctttctgcaacgtcaagaccggcatgccgcgccccgtcgacctgctcgaaccggaacatacggcgatcgctgcggcgaagatgggactcagccacatcgtcatcacctcggtcgaccgcgacgacctgcccgacggcggcgcgagtcagttcgtcaaggtcatcaacgcgctgcgccgcgaaacgccgcagacgacgatcgagatactgaccccggactttcgcaacaaacccgaaagcgcggtcgccgcgatcgtcgatgcgcgccccgacgtctataaccacaacctcgaaaccgtgccgcggctctatccgacgatccgtcccggcgcgcgctattatgcgtcgctccgcctgctcgaaagcgtcaagcggcgcgacccgtcgatcttcaccaagtcaggcatcatgctcgggctcggtgaggagcggatggaggtgcatcaggtgatggacgacatgcgcagcgccgacatcgatttcatgacgatgggccaatatctgcaaccgacgccgaaacacgccaaggtgatcgacttcgtcaccccgcaggcgttcgacgcctatgcgcagatcgcgcgcgccaagggtttcctgcaggtggcgtcatcgccgctgacgcgctccagctatcatgcgggcgacgatttcgaacatatgcgcgcggcgcgcgaggcgcagctcgcgcgcgtccgcgccgactga

SEQ ID NO: 3242 - protein, 311 aa, Sphingopyxis alaskensis
MNAPASPAASPSQRARKPDWIRVKAPTSPGYAETRKLMRELNLHTVCEEAACPNIGECWTKKHATVMILGDTCTRACAFCNVKTGMPRPVDLLEPEHTAIAAAKMGLSHIVITSVDRDDLPDGGASQFVKVINALRRETPQTTIEILTPDFRNKPESAVAAIVDARPDVYNHNLETVPRLYPTIRPGARYYASLRLLESVKRRDPSIFTKSGIMLGLGEERMEVHQVMDDMRSADIDFMTMGQYLQPTPKHAKVIDFVTPQAFDAYAQIARAKGFLQVASSPLTRSSYHAGDDFEHMRAAREAQLARVRAD

SEQ ID NO: 3243 - DNA, 915 bp, Staphylococcus epidermidis
  CDS (1)..(915): transl_table=11
atggcgactagaaatgaagaaattttacgtaaaccggattggttaaagattaagcttaacacaaacgataattatactggtcttaagaaaatgatgcgtgagaagaatttacacacagtgtgtgaagaagctaaatgtccaaatattcacgaatgttggggtgcgcgtcgtacagctacatttatgattttaggggcagtatgtacaagagcatgtcgattttgcgcggtaaaaactggtttacctaatgaattagatttaaatgaaccagaacgagttgcagaatcagtagaattaatgaatttaaaacatgttgtaattactgctgttgcacgtgatgatttaagagatcaaggctcaaacgtgtatgcagaaacagtacgtaaagtaagagaaagaaatccatttacaacaatagaaattttaccatctgacatgggtggcgattatgaagcccttgaaacattaatggcttctagaccagacattcttaatcacaacattgaaacggttcgtcgcttaacaccaagagttcgagctcgagcaacttacgatagaactttacaatttttacgtcgttctaaagaattacaacctgatattccaacaaaatcaagtttgatggttgggttaggtgaaacgatggaagaaatttatgaaacgatggatgatttacgcgctaatgatgttgatatcttaactataggtcaatatttacaaccgtctcgaaaacatttgaaagttgagaaatattatacgccattagaatttggtaaaatgagaaagattgcaatggaaaaaggatttaaacattgtcaagcaggacctttagtaagaagctcatatcatgctgatgagcaagtgaatgaagcagctaaagagaaacaacgccaaggtgaagaacaactcaattaa

SEQ ID NO: 3244 - protein, 304 aa, Staphylococcus epidermidis
MATRNEEILRKPDWLKIKLNTNDNYTGLKKMMREKNLHTVCEEAKCPNIHECWGARRTATFMILGAVCTRACRFCAVKTGLPNELDLNEPERVAESVELMNLKHVVITAVARDDLRDQGSNVYAETVRKVRERNPFTTIEILPSDMGGDYEALETLMASRPDILNHNIETVRRLTPRVRARATYDRTLQFLRRSKELQPDIPTKSSLMVGLGETMEEIYETMDDLRANDVDILTIGQYLQPSRKHLKVEKYYTPLEFGKMRKIAMEKGFKHCQAGPLVRSSYHADEQVNEAAKEKQRQGEEQLN

SEQ ID NO: 3245 - DNA, 987 bp, Streptomyces avermitilis
  CDS (1)..(987): transl_table=11
gtgtccgcagtcgcacccgacggacgcaagatgctgcgcctggaggtccggaacgcccagacccccatcgagcgcaagcccgagtggatcaagacccgggcgaaaatgggtcccgaatacacgaagatgcagaacctcgtgaagagcgaggggctgcacacggtctgccaggaggcgggctgtcccaacatctacgagtgctgggaagaccgcgaggccaccttcctcatcggcggcgaccagtgcacccggcgctgcgacttctgccagatcgacaccggcaagcccgaggccctcgaccgcgacgagccgcgccgcgtcggtgagtccgtcgtcacgatggacctgaactacgccacgatcacgggcgtcgcccgcgacgacctcgaggacggcggcgcctggctgtacgcggagacggtccgccagatccacgcgcagacggcgggccgcgaggccggccgcaccaaggtcgagctgctcgcccccgacttcaacgccgagcccgaccagctggccgaggtcttctccgcgcgccccgaggtcttcgcgcacaacgtcgagacggtcccgcggatcttcaagcgcatccgccccggcttccgctacgagcgctccctgaaggtcatcacggaggcccgggactacggtctggtcacgaagtcgaacctcatcctcggcatgggtgagacccgcgaagaggtcagcgaggcgctccggcagctgcacgacgcgggctgcgagctcatcacgatcacgcagtacctgcgcccctccgtgcgccaccaccccgtggagcgctgggtcaagccgcacgagttcgtggaactcaaggaggaggccgaggagatcggcttctccggtgtcatgtcgggcccgctggtccgctcctcgtaccgggccggccgcctgtaccagatggccatggagctgcgtcagtcagccgctccgcagggcggtgcgcaggtcgcctcgcaggcggtctga

SEQ ID NO: 3246 - protein, 328 aa, Streptomyces avermitilis
MSAVAPDGRKMLRLEVRNAQTPIERKPEWIKTRAKMGPEYTKMQNLVKSEGLHTVCQEAGCPNIYECWEDREATFLIGGDQCTRRCDFCQIDTGKPEALDRDEPRRVGESVVTMDLNYATITGVARDDLEDGGAWLYAETVRQIHAQTAGREAGRTKVELLAPDFNAEPDQLAEVFSARPEVFAHNVETVPRIFKRIRPGFRYERSLKVITEARDYGLVTKSNLILGMGETREEVSEALRQLHDAGCELITITQYLRPSVRHHPVERWVKPHEFVELKEEAEEIGFSGVMSGPLVRSSYRAGRLYQMAMELRQSAAPQGGAQVASQAV

SEQ ID NO: 3247 - DNA, 954 bp, Streptomyces coelicolor
  CDS (1)..(954): transl_table=11
gtgtccgcagtcgcacccgacggacgcaagatgctgcgcctggaggtccgcaacagccagacccccatcgagcgcaagcccgagtggatcaagacccgggcgaaaatgggccccgaatacaccaagatgcagaacctcgtgaagagcgagggcctgcacacggtctgccaggaagccggctgtcccaacatctacgagtgctgggaggaccgcgaggcgaccttcctcatcggcggcgaccagtgcacccggcgctgcgacttctgccagatcgacaccggcaagcccgaggcgctcgaccgcgacgagccgcgccgcgtcggcgagtccgtggtcaccatggacctgaactacgccaccatcaccggcgtcgcccgcgacgacctccccgacggcggcgcgtggctgtacgcggagacggtgcgccagatccacgagcagaccgccggccgcgaggccggccgcaccaaggtcgagctgctggccccggacttcaacgccgttccggagctgctccgggaggtcttcgagtcccgccccgaggtcttcgcgcacaacgtcgagaccgtcccgcggatcttcaagcgcatccgcccgggcttccgctacgagcgctccctgaaggtcatcaccgacgcccgcgacttcggcctggtcaccaagtcgaacctgatcctcggcatgggcgagacccgcgaggagatcagcgaggcgctgaagcagctgcacgaggccggctgcgagctgatcaccatcacgcagtacctgcgcccgtccgtgcgccaccacccggtggagcgctgggtcaagccgcaggagttcgtcgagctgaaggaggaggccgagcagatcggcttctccggcgtgatgtcgggcccgctggtccgctcgtcgtaccgggccggacggctctacggaatggccatggagcagcgccggtccgccaccgtgtga

SEQ ID NO: 3248 - protein, 317 aa, Streptomyces coelicolor
MSAVAPDGRKMLRLEVRNSQTPIERKPEWIKTRAKMGPEYTKMQNLVKSEGLHTVCQEAGCPNIYECWEDREATFLIGGDQCTRRCDFCQIDTGKPEALDRDEPRRVGESVVTMDLNYATITGVARDDLPDGGAWLYAETVRQIHEQTAGREAGRTKVELLAPDFNAVPELLREVFESRPEVFAHNVETVPRIFKRIRPGFRYERSLKVITDARDFGLVTKSNLILGMGETREEISEALKQLHEAGCELITITQYLRPSVRHHPVERWVKPQEFVELKEEAEQIGFSGVMSGPLVRSSYRAGRLYGMAMEQRRSATV

SEQ ID NO: 3249 - DNA, 861 bp, Sulfolobus acidocaldarius
  CDS (1)..(861): transl_table=11
atgaaaagcgaagtggtagtaaggattaatgagaacttcaagaaacttagcaggatagtgtctgagaaagggatatccactgtatgcgaggaagctctatgtccaaatatcatggagtgttggggatcaggaactgctacgttcatgataatgggagatatctgcacaagaggttgtaggttttgttatgtaaaaaagggtaaaccagtcctactagaccatgaggagccaataaaagtagcagaggcagtaagggaaatgggtttagactatgttgtcataaccagtgttgacagggatgatttagcagatgggggagcttctcatttttctcaagttgttaaagccgtgaaagagatgaatcctgacgtcatagttgaggtccttacaccagattttatggggaataaagaactagtggagaaagtaatagggtctggcgtagacgtatttgcacacaacgtggaaacggtaagaagcctgactccattagtgagagacgcaagagcatcatacgaacaaagtttaagagtacttagttatgctaagaacgttgtcaaaaaatcctctattcttttaggtcttggggagagcttagaggaagtagttgaaaccatgaaggatttgagaaatgtcggtgtagatattttagtcctttcccagtacatgagacctagcattaaacaactggaagttaagaaacgttataacatggaagagtacaaggaacttgaaaaaatagcttattctttaggtttttcatatgtcgttgcactacctcacgctagaacttcctacagggcaaaagaggcatatttgagggcgatggcaaatgttaagaataataatagatggtcctag

SEQ ID NO: 3250 - protein, 286 aa, Sulfolobus acidocaldarius
MKSEVVVRINENFKKLSRIVSEKGISTVCEEALCPNIMECWGSGTATFMIMGDICTRGCRFCYVKKGKPVLLDHEEPIKVAEAVREMGLDYVVITSVDRDDLADGGASHFSQVVKAVKEMNPDVIVEVLTPDFMGNKELVEKVIGSGVDVFAHNVETVRSLTPLVRDARASYEQSLRVLSYAKNVVKKSSILLGLGESLEEVVETMKDLRNVGVDILVLSQYMRPSIKQLEVKKRYNMEEYKELEKIAYSLGFSYVVALPHARTSYRAKEAYLRAMANVKNNNRWS

SEQ ID NO: 3251 - DNA, 858 bp, Sulfolobus solfataricus
  CDS (1)..(858): transl_table=11
atggagaaaaaagttcaaattgcagtttacgagaatgaaaacttcaaaagagtagcagagattgtaaagaagaaaagtattgctactgtgtgtgaagaggcgctatgcccaaacattatggaatgctggggatctggaactgcaacatttatgatcatggggagcatttgtactagaggttgtaggttttgttatgtgttaaagggaaagccctcaccattggacgatgaagaacctaaaagagttgcagaagcggtaaaggagatggaactggactacgttgtaataaccagtgttgatagagacgacctatccgatgggggagcacaacatttcgctaacgtggtgaaaacagtaaaagaacttaacccgggtataatagttgaagtgttaactccagactttagggggaatattgacgcagttaaaaaagtaattgatgctggagttgacgtatttgcacataacgttgagaccgtaagaagactaacgccaatagtaagggaccctagagcctcatatgagcaaagtctcaatgttttaaaatatgctgaaaacgtgataaaaaaatcctcaatcctcttaggtctcggtgagacttgggatgagatagtagaaacgatgagagatttgagaagtgtaggagttagtatattggtactttcacaatatatgagacctagtcgtaaacaattggaggttaagaagcgttatactttagaagagtttaaggaacttgaggaaatagcctactcaatgggtttctcagctgtgatctccttaccattagctagaacctcttataaggcgaaagaggcctattttagggcgattgaaaatgctaagaatcatagttga

SEQ ID NO: 3252 - protein, 285 aa, Sulfolobus solfataricus
MEKKVQIAVYENENFKRVAEIVKKKSIATVCEEALCPNIMECWGSGTATFMIMGSICTRGCRFCYVLKGKPSPLDDEEPKRVAEAVKEMELDYVVITSVDRDDLSDGGAQHFANVVKTVKELNPGIIVEVLTPDFRGNIDAVKKVIDAGVDVFAHNVETVRRLTPIVRDPRASYEQSLNVLKYAENVIKKSSILLGLGETWDEIVETMRDLRSVGVSILVLSQYMRPSRKQLEVKKRYTLEEFKELEEIAYSMGFSAVISLPLARTSYKAKEAYFRAIENAKNHS

SEQ ID NO: 3253 - DNA, 963 bp, Symbiobacterium thermophilum
  CDS (1)..(963): transl_table=11
atggccgagttccggatcgaccccgagatggagctgcccgtcctgcccagccgcgcccgggcggacgtgagccggaaacccgagtggctgaagatcaacctgcgtacggatgcggagttcgtcgagctgaagcggctgatgcgcggccaggggctgcacacggtctgcgaggaggcccgctgccccaacatcttcgagtgctggaaccggcggacggcgacgttcatgatcctgggcgacatctgcacccgcaactgcgggttctgcgccgtgcggtcgggcgtgcccaccgggctggacctggcggagcctgaacgggtggcggacgcctgcgtgcagctgggcctgcggcacgtggtggtcacctcggtggcccgggacgacctgagcgacggcggtgcgtccatcttcgccgagaccatccgggccatccggcgcaagaaccccttcaccggcgtggaggtgctcatccccgacttcggcggcaactgggacgccctggccgtcgtcatggacgcggagcccgacgtcctcaaccacaacatcgagacggtgcgccggctttcggaccgggtgcggtcccgggcgaagtacgaccggtcgctggagctgctccgccgggcgaaggagatgaagccccacgtcagcacgaagtcctcgatcatggtcggcctgggcgagaccatgcaggagctgtacgaggcgatggacgacctgcgcgcggcgggcgtcgacatcgtgaccttcggccagtacctgcggcccacggcccgccatctggcggtggagaagttctacaccccggccgagttcgaacacctgcgggaggaggccctgaagcgggggttcgcccattgcgagtcgggtcccctggtacgttcctcctaccacgccgacgagcagtcggcgcaggccgtcgcccggcgcacgggtgccgggcgcgcggcgcagaccggggactga

SEQ ID NO: 3254 - protein, 320 aa, Symbiobacterium thermophilum
MAEFRIDPEMELPVLPSRARADVSRKPEWLKINLRTDAEFVELKRLMRGQGLHTVCEEARCPNIFECWNRRTATFMILGDICTRNCGFCAVRSGVPTGLDLAEPERVADACVQLGLRHVVVTSVARDDLSDGGASIFAETIRAIRRKNPFTGVEVLIPDFGGNWDALAVVMDAEPDVLNHNIETVRRLSDRVRSRAKYDRSLELLRRAKEMKPHVSTKSSIMVGLGETMQELYEAMDDLRAAGVDIVTFGQYLRPTARHLAVEKFYTPAEFEHLREEALKRGFAHCESGPLVRSSYHADEQSAQAVARRTGAGRAAQTGD

SEQ ID NO: 3255 - DNA, 939 bp, Thermobifida fusca
  CDS (1)..(939): transl_table=11
gtgagcatcgctcccgagggccgccgcctgttgcggatcgaagcccgcaacagcactaccccgattgagaagaagccgccgtggatcaagatcagggcgaagatgggctcggagtacaccgagctgcacgccctggtcaaacgcgagggcctgcacacggtgtgccaggaggccgggtgccccaacatctacgagtgctgggaggaccgggaggccacgttcctcatcggcggcgaccagtgcacgcgacgctgcgacttctgccagatcgctaccgggaagccggcggcgttggaccggggggagccgctgcgggtcgccgagtcggtgcgcacgatgggtctcaagtatgcgacggtcaccggggtggcccgcgacgacttggacgacgggggcgcgtggctgtacgcggaaacggtccgcaagatccacgagttgaaccccggcaccggcgtggagctgctgatccccgacttcaacgccgacccggacctgctggccgaggtgttcagctcccggccggaggtgctggcgcacaacattgagacggtgccgcggatcttcaagcgcatccgtcccgggttccgctacgagcgttctttggaggtgatcacccgggcccgcgaggcggggctggtcaccaagtcgaatctgatcctgggcatgggcgagacccgggaggagatcagccaggcgatgcgggacctgtacgaggccgggtgcgacttgttgacgatcacccagtacctgcggccgtcccgcttgcaccacccggtggaccggtgggtgaagccggaggagttcgtggagctgggccgggaggccgaggagatcggtttcgccggggtgatgtcgggtccgctggtgcggtcgtcgtaccgggcgggccggttgtaccgccaggcgatcgagcgtcgcaaggcggacgcgaaatcgtaa

SEQ ID NO: 3256 - protein, 312 aa, Thermobifida fusca
MSIAPEGRRLLRIEARNSTTPIEKKPPWIKIRAKMGSEYTELHALVKREGLHTVCQEAGCPNIYECWEDREATFLIGGDQCTRRCDFCQIATGKPAALDRGEPLRVAESVRTMGLKYATVTGVARDDLDDGGAWLYAETVRKIHELNPGTGVELLIPDFNADPDLLAEVFSSRPEVLAHNIETVPRIFKRIRPGFRYERSLEVITRAREAGLVTKSNLILGMGETREEISQAMRDLYEAGCDLLTITQYLRPSRLHHPVDRWVKPEEFVELGREAEEIGFAGVMSGPLVRSSYRAGRLYRQAIERRKADAKS

SEQ ID NO: 3257 - DNA, 972 bp, Thermus thermophilus
  CDS (1)..(972): transl_table=11
atgaagcctaagtttgagacggtggagctcctctcccccacgggggaggtcgttgagctcaaggtggtgaagcggggcctggcccaggcccggcccgagcccgtggaccggaacaagcccgcctggatcaaggcccctttgcccaccgggcccagataccaggccctgaaggccatggtgcgggagcttaggctccacaccgtctgccaggaggccctctgccccaacatcggggagtgctggacccacgggacccttacggtgatgatcctgggggacatctgcacccgggcctgcaagttctgcgccgtccacaccgggaaccccaagggcctcgtggacccggaggaaccaaggagggtggccgaggccatcgcccgcatgggggtgcggtacgtggtcttgaccagcgtggaccgggatgaccttccggatggcggcgcctcccacttcgccgccaccatccgggccatcaaggagagggcccccggggtcttggtggaggccctgacccccgacttccagggggacctgaaggccgtggagacggtcctcgccgcgaaccccgaggtctacgcccagaacctggagacggtgcgccgcctcacccccaaggtccgcgacccccgggcggggtacgagcagaccctgaaggttctcgcccacgccaagaaggtccggcccgacatcctcaccaagtctagcctcatgctgggcttgggggagacggaggaggagatcctcgaggccatgcgggacctcagggccgcgggggtggacatcctcaccttgggccagtacctgaggcccacccccgcccacctccccgtggcccgctacgtcccccccgaggacttcaagcggtacgaggcctgggggtacgagctgggctttagggaggtcttcgccgggcccttggtgcggagctcctaccgggcggaccgggtcttcctggaggccacccaaagatga

SEQ ID NO: 3258 - protein, 323 aa, Thermus thermophilus
MKPKFETVELLSPTGEVVELKVVKRGLAQARPEPVDRNKPAWIKAPLPTGPRYQALKAMVRELRLHTVCQEALCPNIGECWTHGTLTVMILGDICTRACKFCAVHTGNPKGLVDPEEPRRVAEAIARMGVRYVVLTSVDRDDLPDGGASHFAATIRAIKERAPGVLVEALTPDFQGDLKAVETVLAANPEVYAQNLETVRRLTPKVRDPRAGYEQTLKVLAHAKKVRPDILTKSSLMLGLGETEEEILEAMRDLRAAGVDILTLGQYLRPTPAHLPVARYVPPEDFKRYEAWGYELGFREVFAGPLVRSSYRADRVFLEATQR

SEQ ID NO: 3259 - DNA, 855 bp, Thermoanaerobacter tengcongensis
  CDS (1)..(855): transl_table=11
ttgacagtgcgaaagcctgaatggcttaaagtgagaattttaagtgaggatttaaacaggatggaagcttttttgaaaaatatggccttaaataccgtatgtcaaagtgcaaactgcccaaacatgggggagtgctttgcaaggagaacagcaacttttatgataatgggcaacatatgtactagaaactgcagattttgtgcagtggaaaaagggcatcctcagccccttgatgaagaagagccgagaagagtggcggaagcagctagaaggttggggttaaggcatgtggtagttacgtctgttacaagggatgatttgccagacggtggggcttcacattttgcgaagacaatatatgagctaaaaaagctgccaggagtcactgttgaagtgcttgtgcctgattttatgggaaatgaagaggcaatcaggactgttgtggaagcaaaacctgatgtaataaatcacaatgtagagacggttccgaggctttactcaagagtgaggccaaaagcggattacattaggtctttaaacctccttaaaaaggtcaaagagctggaccctctaatacttactaaatcagggattatggtgggactgggcgaaacagaagaggaagtaatagaagttatgaaggatttaagagatattgattgcgatatgatgaccataggacagtatctaagaccttctcataagcacatagaagtagctgaatatgtaacccctgaacagtttaaaagatatgaagagataggctacaaattaggatttaagcatgtagcttctgggccgttggttagaagttcttatcatgctgatgtgggtttgagtttagcaagaggatga

SEQ ID NO: 3260 - protein, 284 aa, Thermoanaerobacter tengcongensis
MTVRKPEWLKVRILSEDLNRMEAFLKNMALNTVCQSANCPNMGECFARRTATFMIMGNICTRNCRFCAVEKGHPQPLDEEEPRRVAEAARRLGLRHVVVTSVTRDDLPDGGASHFAKTIYELKKLPGVTVEVLVPDFMGNEEAIRTVVEAKPDVINHNVETVPRLYSRVRPKADYIRSLNLLKKVKELDPLILTKSGIMVGLGETEEEVIEVMKDLRDIDCDMMTIGQYLRPSHKHIEVAEYVTPEQFKRYEEIGYKLGFKHVASGPLVRSSYHADVGLSLARG

SEQ ID NO: 3261 - DNA, 936 bp, Thiobacillus denitrificans
  CDS (1)..(936): transl_table=11
atggcagaccccctccagcacaaaggcgcggcgaagacgtcgcgcatcccgatcaagatcgtgccgcaagagcggcaacgcctgccgccgtggatccgggcgaaggcgccgagcctaccgaacgtcggacggctcaagggcatcctgcgcgaagccaagctgcacacggtgtgcgaggaggcgtcgtgcccgaatctcggcgagtgcttcggccacggcacggcgactttcatgatccttggcgacctctgcacgcggcgttgcccgttctgtgacgtcggccacggcacgcccttgccgccggacgccgacgagccgcgtcatctcgccgaaacgatcgcgctgatggccttgaagtacgttgtcatcacgagcgtcgaccgcgacgacctgcgtgacggcggcgccgggcattttgccgagtgcatcgcggccgtgcgcgaaaaatcgccggcgacgcggatcgagatactgactcccgattttcgtggccgcctcgacaaggcgctcgcggcgctcgaccgtgccccgcccgacgtcatgaaccacaacctcgaaaccgtgccgcgcctctacaaggccgcgcgcccgggcgccgactacgcgcattcgctcaaactgctgcaggatttcaggacgcgccaccccgacatcccgaccaagtcgggcctgatgctcgggctgggcgaaaccgacgacgagatcctcgaggtcatgcgcgacctgcgcgcgcacggcgtagacatgctgaccctaggccagtacctgcagccctcgcggcaccatctggcggtgctgcgcttcgtcacccccgagcgctttgcgcagttcgagcaggaagcattggcgatgggtttccggcacgcggcctgcgggccgatggtgcgctcgagctaccacgccgaccagcaggccgccgcggcagcggcaggttag

SEQ ID NO: 3262 - protein, 311 aa, Thiobacillus denitrificans
MADPLQHKGAAKTSRIPIKIVPQERQRLPPWIRAKAPSLPNVGRLKGILREAKLHTVCEEASCPNLGECFGHGTATFMILGDLCTRRCPFCDVGHGTPLPPDADEPRHLAETIALMALKYVVITSVDRDDLRDGGAGHFAECIAAVREKSPATRIEILTPDFRGRLDKALAALDRAPPDVMNHNLETVPRLYKAARPGADYAHSLKLLQDFRTRHPDIPTKSGLMLGLGETDDEILEVMRDLRAHGVDMLTLGQYLQPSRHHLAVLRFVTPERFAQFEQEALAMGFRHAACGPMVRSSYHADQQAAAAAAG

SEQ ID NO: 3263 - DNA, 873 bp, Treponema denticola
  CDS (1)..(873): transl_table=11
atgaattttaaggctgggtttatgacttgtaatcaaagaaaacctgattggttaaaaataaaacttcctaccggagaactttcacaggaagtatcgaatacaataaaaatacataaattaaatactatatgtaccagcggcaaatgtcccaatcagggagaatgttggaggtgcggaactgcaacatttatgatttgcggaaatatctgtacgcgtgcatgtaaattctgtaatgtgcctaccggttgcccattgcccctaaatcctaatgagccgatggaaatagctcaatcggttgaggctttaaaattaaaacatgtagttttaacctcggtagatagggacgatataaaagatttcggtgcttcccactgggtaaaggttataagagccgtaaaacaaaaaacaccgaatgttactatggaagttttaattcccgattttcaaggccatgaagatttggtatcgatgattatcgaagcaaaacctgaggtaatttctcataatcttgaaacggtacgcaggctttctccccatgtcaggagcagggctacatatgatacttctctcaaagttttaaaacaaattgcagactccggcttggtatgcaaatcaggtattatgttggggctgggggaaacaagggctgaaattttagaaaccatggacgatttacgcaaaataaactgcaaagttatgaccataggccaatacctcaggccctctataaaaaacattgaggttaaagaatatgtaaggcctgaagtctttgaagaatataaacaaataggtttggagaagggcttttcttttgtggaaagcggtccccttgttcgttccagttatcatgccgaaaagcatgtgttgagctaa

SEQ ID NO: 3264 - protein, 290 aa, Treponema denticola
MNFKAGFMTCNQRKPDWLKIKLPTGELSQEVSNTIKIHKLNTICTSGKCPNQGECWRCGTATFMICGNICTRACKFCNVPTGCPLPLNPNEPMEIAQSVEALKLKHVVLTSVDRDDIKDFGASHWVKVIRAVKQKTPNVTMEVLIPDFQGHEDLVSMIIEAKPEVISHNLETVRRLSPHVRSRATYDTSLKVLKQIADSGLVCKSGIMLGLGETRAEILETMDDLRKINCKVMTIGQYLRPSIKNIEVKEYVRPEVFEEYKQIGLEKGFSFVESGPLVRSSYHAEKHVLS

SEQ ID NO: 3265 - DNA, 1056 bp, Tropheryma whipplei
  CDS (1)..(1056): transl_table=11
atgaacgattctggcaattcaagcaaagttaatgtaaggcccccttcagccggtttgggagcaccctccccgggcaagcgtaagatgctccgcctggaggtacgaaattcgcaggttcctatagaacggaagccctcatggataagggctcgtgcaactattggtacagagtacagaaaggttcaggaacgtgttaagaaacagaatttgcggactgtttgtcaagaagccggatgtccgaatatctacgaatgctgggaggatagagaggcaactttcctgatcggaggatcgcagtgtactcgcaggtgtgatttttgtcagatagacacgggaaaacctgcagagctcgacctggatgagccaaaacgggttggacagtccgtggcgcaaatgaagttacgctatgccaccgtaaccggagtagcacgcgacgacctgcccgatgggggtgtctggctctatgcagaaacaatccgagaaatacacaaacagtgccctggaagtggggttgaaatactcataccagattttaacggtaagccagagttgctccagcaaatcttcgaagcacaaccggaagtgtacgcacacaatatagaaactgttccacggatattcaggcgcattagaccggcattcagatacgacagatcgctggatgttatatcacaaggtcaaaaagctgggatgataacaaaatcaaatcttattcttggaatgggcgagaccggtgaagaggtaacacaggcattgagagacctcaaaagtgccggttgtgacattgtaacaataactcagtatctaagaccatcgcccaggcatttacccgtggcaagatgggtaaaaccacaagagttcatagaatataaagagcaagccaaagagatcggattctcaggcgttttggccggacctttagttagatcatcataccgtgccggaaaactgtgggcacaatctgtgaaagctaagatggttgaaatacccgagcgcgtacggaaactcataaacgaaatcgagatgcaggaaacgtcctttaggcaagcagtctag

SEQ ID NO: 3266 - protein, 351 aa, Tropheryma whipplei
MNDSGNSSKVNVRPPSAGLGAPSPGKRKMLRLEVRNSQVPIERKPSWIRARATIGTEYRKVQERVKKQNLRTVCQEAGCPNIYECWEDREATFLIGGSQCTRRCDFCQIDTGKPAELDLDEPKRVGQSVAQMKLRYATVTGVARDDLPDGGVWLYAETIREIHKQCPGSGVEILIPDFNGKPELLQQIFEAQPEVYAHNIETVPRIFRRIRPAFRYDRSLDVISQGQKAGMITKSNLILGMGETGEEVTQALRDLKSAGCDIVTITQYLRPSPRHLPVARWVKPQEFIEYKEQAKEIGFSGVLAGPLVRSSYRAGKLWAQSVKAKMVEIPERVRKLINEIEMQETSFRQAV

SEQ ID NO: 3267 - DNA, 966 bp, Vibrio cholerae
  CDS (1)..(966): transl_table=11
atgagtaaaccaattcagatggaacgcggcgttaaatatcgtgacgccgacaaaatggctttgattcctatcaagaacatgccgacagagcagaaagaagttctgcgcaaaccagaatggatgaagataaagctacctgcggatagccagcgcattcaagacatcaaggccgccatgcgtaaaaataatcttcactcagtctgtgaagaagcctcctgccctaacttggctgagtgttttaaccatggtacggcgacctttatgattttaggtgctatctgtacccgtcgctgcccattctgtgacgttgcccatggccgccccaatgcaccagaagcggaagagccgaaaaagctcgcacaaaccattcatgatatgaagctcaagtacgtggtaattacttcggtggaccgcgatgacttgcgtgatggtggtgcacaacatttcgccgattgtaaccgtgaaattcgcgctttgaatccgcacatcaagattgaaaccttggtgcctgatttccgtggtcgcatggaagtggctcttgaggccttaaaagacaatccccccgatgtgtttaaccacaatttggaaaccgcgccacgcttgtatcgtaaagtgcgcccaggcgctaactataagtggtcgttagagctgctgcgtcaatttaaagagcagcatcctcatgtaccgactaaatccggtttgatgatgggcttgggtgaaactaaagaagagatcgtcgaagtattgaaagatctccgtgctcatggcgtcaccatgctgactcttggccaatatctcgcacccagtcgccaccatctgccggttgaacgctacgtgccccccgcagagtttgatgagctgaaagaggttgctctagaactcggctttactcatgcagcctgtggaccctttgtacgttcctcttaccatgctgacttacaagccaagggtttagaagtcaaataa

SEQ ID NO: 3268 - protein, 321 aa, Vibrio cholerae
MSKPIQMERGVKYRDADKMALIPIKNMPTEQKEVLRKPEWMKIKLPADSQRIQDIKAAMRKNNLHSVCEEASCPNLAECFNHGTATFMILGAICTRRCPFCDVAHGRPNAPEAEEPKKLAQTIHDMKLKYVVITSVDRDDLRDGGAQHFADCNREIRALNPHIKIETLVPDFRGRMEVALEALKDNPPDVFNHNLETAPRLYRKVRPGANYKWSLELLRQFKEQHPHVPTKSGLMMGLGETKEEIVEVLKDLRAHGVTMLTLGQYLAPSRHHLPVERYVPPAEFDELKEVALELGFTHAACGPFVRSSYHADLQAKGLEVK

SEQ ID NO: 3269 - DNA, 966 bp, Vibrio vulnificus
  CDS (1)..(966): transl_table=11
atgagtaaaccaatccagatggaaaaaggcgttaaataccgtgacgccgacaaaatggctctgattcccgtcaagaacatgccgacagagcaaaaagaggtcctacgcaagcctgattggatgaagatcaagttgcctgcagatagccaacgcattcaagatattaaatccgctatgcgtaaaaacaatctgcactcggtttgtgaagaggcttcttgtccaaacttggcggagtgcttcaaccacggtacggcaacctttatgattctaggtgccatttgtacacgccgttgtccattctgtgatgttgcccatggccgacctcttcctccagaagcagaagaacccacgaagctggcaaaaaccattgccgacatgaaactcaaatacgtggtgattacctccgtagaccgcgacgatctgcgtgacggtggggcaaaacattttgccgattgtaaccgtgaaattcgcgctcaaagcccacatattcgtatcgaaacattggttcctgatttccgtggtcgtatggacgtggcactagaagcactaaaagataacccgccagacgtcttcaaccacaacttggaaacggcaccacgcctgtaccgtaaggtgcgtccaggggcaaactaccaatggtcactggatcttctgaagaaattcaaagagcagcatcctgatgtcccaaccaaatcgggactcatgatgggtttaggtgaaaccaaagaagagatcgttgaagtgctcaaagatcttcgtgcgcatggtgtgaccatgctgacactcggccaataccttgctccaagtcgccaccatcttccggtagagcgttacgttccaccagcagaatttgatgagctcaaagagattgctctggaactcggtttcactcatgcagcttgtggtccatttgtgcgttcgtcttatcatgctgatatgcaggcgcaaggcttagaagtcaaatag

SEQ ID NO: 3270 - protein, 321 aa, Vibrio vulnificus
MSKPIQMEKGVKYRDADKMALIPVKNMPTEQKEVLRKPDWMKIKLPADSQRIQDIKSAMRKNNLHSVCEEASCPNLAECFNHGTATFMILGAICTRRCPFCDVAHGRPLPPEAEEPTKLAKTIADMKLKYVVITSVDRDDLRDGGAKHFADCNREIRAQSPHIRIETLVPDFRGRMDVALEALKDNPPDVFNHNLETAPRLYRKVRPGANYQWSLDLLKKFKEQHPDVPTKSGLMMGLGETKEEIVEVLKDLRAHGVTMLTLGQYLAPSRHHLPVERYVPPAEFDELKEIALELGFTHAACGPFVRSSYHADMQAQGLEVK

SEQ ID NO: 3271 - DNA, 951 bp, Wigglesworthia glossinidia brevipalpis
  CDS (1)..(951): transl_table=11
atgaaatcaatatcatatttaaatacaaaagaaaaaaataaaaaaaaattatcaataccatctaaaactatatttgcaaaagaaaatgaatatggtttaaaaaaaccaaattggttaaaaattaaattacctttaaataataaaaaaattaataaaataaaattaataatgagaaaaaataatttacatactgtatgtgaagaagcagcatgtcctaatttagcagaatgttttaatagaggaactgcaacatttatgattttaggatcaatttgtacaagaagatgtcctttttgtaatgtttcgtctggaaggccatctttagtagacacaaaagaacctgaaaatttatcaaaggctgctataaaaatgaaattaaaacatatagtaattacttcggttgatagagatgatttaaaagatggtggttcagaacacttttctaattgtattagatttataagaaaaaaaaatcctgatataaaaatagaaattttagttcctgattttagaggatgtacggagttagcattaaataatattagtacatatcctccagatatttttaatcataatttagaaagcattcctagattatactctaaagtaagacctggagctaattataaaagatctttagaattattggaaaaatttaatctcatcaatccaaacattcctactaaatcaggattaatgcttggattaggagaaaccaaagaagagataattgaagtaatgaaagatttaagaaaatcttatgtaagtatgataactataggtcaatatcttagaccaactaaaaatcatcttactgttaataggtatgttcatccaaaagaatttagagagcttaatttaatagcttttgatttaggatttaaacatgctatgtgcggacctcttgtgagatcttcttatcatgcagaaaatcaaattaattgttattaa

SEQ ID NO: 3272 - protein, 316 aa, Wigglesworthia glossinidia brevipalpis
MKSISYLNTKEKNKKKLSIPSKTIFAKENEYGLKKPNWLKIKLPLNNKKINKIKLIMRKNNLHTVCEEAACPNLAECFNRGTATFMILGSICTRRCPFCNVSSGRPSLVDTKEPENLSKAAIKMKLKHIVITSVDRDDLKDGGSEHFSNCIRFIRKKNPDIKIEILVPDFRGCTELALNNISTYPPDIFNHNLESIPRLYSKVRPGANYKRSLELLEKFNLINPNIPTKSGLMLGLGETKEEIIEVMKDLRKSYVSMITIGQYLRPTKNHLTVNRYVHPKEFRELNLIAFDLGFKHAMCGPLVRSSYHAENQINCY

(The sequence listing continues in the following parts.)

1. A method for producing a plant with increased yield as compared to a corresponding wild type plant comprising increasing or generating in a plant or part thereof one or more activities selected from the group consisting of 17.6 kDa class I heat shock protein, 26.5 kDa class I small heat shock protein, 26S protease subunit, 2-Cys peroxiredoxin, 3-dehydroquinate synthase, 5-keto-D-gluconate-5-reductase, asparagine synthetase A, aspartate 1-decarboxylase precursor, ATP-dependent RNA helicase, B0567-protein, B1088-protein, B1289-protein, B2940-protein, calnexin homolog, CDS5399-protein, chromatin structure-remodeling complex protein, D-amino acid dehydrogenase, D-arabinono-1,4-lactone oxidase, Delta 1-pyrroline-5-carboxylate reductase, glycine cleavage complex lipoylprotein, ketodeoxygluconokinase, lipoyl synthase, low-molecular-weight heat-shock protein, Microsomal cytochrome b reductase, mitochondrial ribosomal protein, mitotic check point protein, monodehydroascorbate reductase, paraquat-inducible protein B, phosphatase, Phosphoglucosamine mutase, protein disaggregation chaperone, protein kinase, pyruvate decarboxylase, recA family protein, rhodanese-related sulfurtransferase, ribonuclease P protein component, ribosome modulation factor, sensory histidine kinase, serine hydroxymethyltransferase, SLL1280-protein, SLL1797-protein, small membrane lipoprotein, Small nucleolar ribonucleoprotein complex subunit, Sulfatase, transcription initiation factor subunit, tretraspanin, tRNA ligase, xyloglucan galactosyltransferase, YKL130C-protein, YLR443W-protein, YML096W-protein, and zinc finger family protein-activity.

2. A method for producing a plant with increased yield as compared to a corresponding wild type plant comprising:
(i) increasing or generating the activity of a polypeptide comprising a polypeptide, a consensus sequence, or at least one polypeptide motif as depicted in column 5 or 7 of table II or of table IV, respectively;
(ii) increasing or generating the activity of an expression product encoded by a nucleic acid molecule comprising a polynucleotide as depicted in column 5 or 7 of table I, and
(iii) increasing or generating the activity of a functional equivalent of (i) or (ii).

3. The method of claim 1, comprising
increasing or generating the expression of at least one nucleic acid molecule;
(ii) increasing or generating the expression of an expression product encoded by at least one nucleic acid molecule; and/or
(iii) increasing or generating one or more activities of an expression product encoded by at least one nucleic acid molecule;
whereby the at least one nucleic acid molecule comprises a nucleic acid molecule selected from the group consisting of:
(a) a nucleic acid molecule encoding the polypeptide shown in column 5 or 7 of table II;
(b) a nucleic acid molecule shown in column 5 or 7 of table I;
(c) a nucleic acid molecule encoding a polypeptide sequence depicted in column 5 or 7 of table II and conferring an increased yield to a plant cell, transgenic plant, or part thereof as compared to a corresponding non-transformed wild type plant cell, plant, or part thereof;
(d) a nucleic acid molecule having around 80% or more identity with the nucleic acid molecule sequence of a polynucleotide comprising the nucleic acid molecule shown in column 5 or 7 of table I and conferring an increased yield to a plant cell, transgenic plant, or part thereof as compared to a corresponding non-transformed wild type plant cell, plant, or part thereof;
(e) a nucleic acid molecule encoding a polypeptide having around 95% or more identity with the amino acid sequence of the polypeptide encoded by the nucleic acid molecule of (a) to (c) and having the activity of a nucleic acid molecule comprising a polynucleotide as depicted in column 5 of table I and conferring an increased yield to a plant cell, transgenic plant, or part thereof as compared to a corresponding non-transformed wild type plant cell, transgenic plant, or part thereof;
(f) a nucleic acid molecule which hybridizes with a nucleic acid molecule of (a) to (c) under stringent hybridization conditions and confers an increased yield to a plant cell, transgenic plant, or part thereof as compared to a corresponding non-transformed wild type plant cell, plant, or part thereof;
(g) a nucleic acid molecule encoding a polypeptide which can be isolated with the aid of monoclonal or polyclonal antibodies made against a polypeptide encoded by one of the nucleic acid molecules of (a) to (e) and having the activity represented by the nucleic acid molecule comprising a polynucleotide as depicted in column 5 of table I;
(h) a nucleic acid molecule encoding a polypeptide comprising the consensus sequence or one or more polypeptide motifs as shown in column 7 of table IV and having the activity represented by a nucleic acid molecule comprising a polynucleotide as depicted in column 5 of table II or IV;
(i) a nucleic acid molecule encoding a polypeptide having the activity of a protein as depicted in column 5 of table II and conferring increased yield to a plant cell, transgenic plant, or part thereof as compared to a corresponding non-transformed wild type plant cell, plant, or part thereof;
(j) a nucleic acid molecule which comprises a polynucleotide which is obtained by amplifying a cDNA library or a genomic library using the primers in column 7 of table III and has the activity of a nucleic acid molecule comprising a polynucleotide as depicted in column 5 of table II or IV; and
k) a nucleic acid molecule which is obtained by screening a suitable nucleic acid library under stringent hybridization conditions with a probe comprising a complementary sequence of a nucleic acid molecule of (a) or (b) or with a fragment thereof, having around 50 nt or more of a nucleic acid molecule complementary to a nucleic acid molecule sequence characterized in (a) to (e) and encoding a polypeptide having the activity of a protein comprising a polypeptide as depicted in column 5 of table II.

4. A method for producing a transgenic plant with increased yield as compared to a corresponding non-transformed wild type plant, comprising transforming a plant cell, plant cell nucleus, or plant tissue with a nucleic acid molecule comprising a nucleic acid molecule selected from the group consisting of:
(a) a nucleic acid molecule encoding the polypeptide shown in column 5 or 7 of table II;
(b) a nucleic acid molecule shown in column 5 or 7 of table I;
(c) a nucleic acid molecule encoding a polypeptide sequence depicted in column 5 or 7 of table II and conferring an increased yield to a plant cell, transgenic plant, or part thereof as compared to a corresponding non-transformed wild type plant cell, plant, or part thereof; and
(d) a nucleic acid molecule having at least around 95% identity with the nucleic acid molecule sequence of a polynucleotide comprising the nucleic acid molecule shown in column 5 or 7 of table I and conferring an increased yield to a plant cell, transgenic plant, or part thereof as compared to a corresponding non-transformed wild type plant cell, plant, or part thereof;
(e) a nucleic acid molecule encoding a polypeptide having at least around 95% identity with the amino acid sequence of the polypeptide encoded by the nucleic acid molecule of (a) to (c) and having the activity of a nucleic acid molecule comprising a polynucleotide as depicted in column 5 of table I and conferring an increased yield to a plant cell, transgenic plant, or part thereof as compared to a corresponding non-transformed wild type plant cell, transgenic plant, or part thereof;
(f) a nucleic acid molecule which hybridizes with a nucleic acid molecule of (a) to (c) under stringent hybridization conditions and confers an increased yield to a plant cell, transgenic plant, or part thereof as compared to a corresponding non-transformed wild type plant cell, plant, or part thereof;
(g) a nucleic acid molecule encoding a polypeptide which can be isolated with the aid of monoclonal or polyclonal antibodies made against a polypeptide encoded by one of the nucleic acid molecules of (a) to (e) and having the activity of the nucleic acid molecule comprising a polynucleotide as depicted in column 5 of table I;
(h) a nucleic acid molecule encoding a polypeptide comprising the consensus sequence or one or more polypeptide motifs as shown in column 7 of table IV and having the activity of a nucleic acid molecule comprising a polynucleotide as depicted in column 5 of table II or IV;
(i) a nucleic acid molecule encoding a polypeptide having the activity of a protein as depicted in column 5 of table II and conferring increased yield to a plant cell, plant, or part thereof as compared to a corresponding non-transformed wild type plant cell, plant, or part thereof;
(j) a nucleic acid molecule which comprises a polynucleotide which is obtained by amplifying a cDNA library or a genomic library using the primers in column 7 of table III and has the activity of a nucleic acid molecule comprising a polynucleotide as depicted in column 5 of table II or IV; and
k) a nucleic acid molecule which is obtained by screening a suitable nucleic acid library under stringent hybridization conditions with a probe comprising a complementary sequence of a nucleic acid molecule of (a) or (b) or with a fragment thereof, having at least around 400 nt of a nucleic acid molecule complementary to a nucleic acid molecule sequence characterized in (a) to (e) and encoding a polypeptide having the activity of a protein comprising a polypeptide as depicted in column 5 of table II,
and regenerating a transgenic plant from the transformed plant cell nucleus, plant cell or plant tissue, wherein the transgenic plant has increased yield relative to a corresponding wild type plant.

5. The method of claim 2, wherein the one or more activities increased or generated is 17.6 kDa class I heat shock protein, 26.5 kDa class I small heat shock protein, 26S protease subunit, 2-Cys peroxiredoxin, 3-dehydroquinate synthase, 5-keto-D-gluconate-5-reductase, asparagine synthetase A, aspartate 1-decarboxylase precursor, ATP-dependent RNA helicase, B0567-protein, B1088-protein, B1289-protein, B2940-protein, calnexin homolog, CDS5399-protein, chromatin structure-remodeling complex protein, D-amino acid dehydrogenase, D-arabinono-1,4-lactone oxidase, Delta 1-pyrroline-5-carboxylate reductase, glycine cleavage complex lipoylprotein, ketodeoxygluconokinase, lipoyl synthase, low-molecular-weight heat-shock protein, Microsomal cytochrome b reductase, mitochondrial ribosomal protein, mitotic check point protein, monodehydroascorbate reductase, paraquat-inducible protein B, phosphatase, Phosphoglucosamine mutase, protein disaggregation chaperone, protein kinase, pyruvate decarboxylase, recA family protein, rhodanese-related sulfurtransferase, ribonuclease P protein component, ribosome modulation factor, sensory histidine kinase, serine hydroxymethyltransferase, SLL1280-protein, SLL1797-protein, small membrane lipoprotein, Small nucleolar ribonucleoprotein complex subunit, Sulfatase, transcription initiation factor subunit, tretraspanin, tRNA ligase, xyloglucan galactosyltransferase, YKL130C-protein, YLR443W-protein, YML096W-protein, or zinc finger family proteinactivity, respectively.

6. The method of claim 1, wherein the method results in a transgenic plant with increased yield compared to a corresponding wild type plant under standard growth conditions, low temperature, drought or abiotic stress conditions.

7. An isolated nucleic acid molecule comprising a nucleic acid molecule selected from the group consisting of:
(a) a nucleic acid molecule encoding the polypeptide shown in column 5 or 7 of table II B;
(b) a nucleic acid molecule shown in column 5 or 7 of table I B;
(c) a nucleic acid molecule encoding a polypeptide sequence depicted in column 5 or 7 of table II and conferring increased yield to a plant cell, plant, or part thereof as compared to a corresponding non-transformed wild type plant cell, plant, or part thereof;
(d) a nucleic acid molecule having at least about 95% identity with the nucleic acid molecule sequence of a polynucleotide comprising the nucleic acid molecule shown in column 5 or 7 of table I and conferring increased yield to a plant cell, plant, or part thereof as compared to a corresponding non-transformed wild type plant cell, plant, or part thereof;
(e) a nucleic acid molecule encoding a polypeptide having at least about 95% identity with the amino acid sequence of the polypeptide encoded by the nucleic acid molecule of (a) to (c) and having the activity of a nucleic acid molecule comprising a polynucleotide as depicted in column 5 of table I and conferring increased yield as compared to a corresponding non-transformed wild type plant cell, plant, or part thereof;
(f) a nucleic acid molecule which hybridizes with a nucleic acid molecule of (a) to (c) under stringent hybridization conditions and confers increased yield to a plant cell, plant, or part thereof as compared to a corresponding non-transformed wild type plant cell, plant, or part thereof;
(g) a nucleic acid molecule encoding a polypeptide which can be isolated with the aid of monoclonal or polyclonal antibodies made against a polypeptide encoded by one of the nucleic acid molecules of (a) to (e) and having the activity of a nucleic acid molecule comprising a polynucleotide as depicted in column 5 of table I;
(h) a nucleic acid molecule encoding a polypeptide comprising the consensus sequence or one or more polypeptide motifs as shown in column 7 of table IV and having the activity of a nucleic acid molecule comprising a polynucleotide as depicted in column 5 of table II or IV;
(i) a nucleic acid molecule encoding a polypeptide having the activity of a protein as depicted in column 5 of table II and conferring an increased yield to a plant cell, plant, or part thereof as compared to a corresponding non-transformed wild type plant cell, plant, or part thereof;
(j) a nucleic acid molecule which comprises a polynucleotide which is obtained by amplifying a cDNA library or a genomic library using the primers in column 7 of table III and has the activity of a nucleic acid molecule comprising a polynucleotide as depicted in column 5 of table II or IV; and
(k) a nucleic acid molecule which is obtained by screening a suitable nucleic acid library under stringent hybridization conditions with a probe comprising a complementary sequence of a nucleic acid molecule of (a) or (b) or with a fragment thereof, having at least 400 nt, of a nucleic acid molecule complementary to a nucleic acid molecule sequence characterized in (a) to (e) and encoding a polypeptide having the activity of a protein comprising a polypeptide as depicted in column 5 of table II.

8. The nucleic acid molecule of claim 7, whereby the nucleic acid molecule according to (a) to (k) differs in one or more nucleotides from the sequence depicted in column 5 or 7 of table I A and encodes a protein which differs in one or more amino acids from the protein sequences depicted in column 5 or 7 of table II A.

9. A nucleic acid construct which confers the expression of the nucleic acid molecule of claim 7, comprising one or more regulatory elements.

10. A vector comprising the nucleic acid molecule of claim 7 or a nucleic acid construct which confers the expression of the nucleic acid molecule of claim 7 and comprises one or more regulatory elements.

11. A process for producing a polypeptide, wherein the polypeptide is expressed in a host nucleus or host cell comprising the nucleic acid molecule of claim 7.

12. A polypeptide encoded by the nucleic acid molecule of claim 7 or as depicted in table II B, whereby the polypeptide differs from the sequence as shown in table II A by one or more amino acids.

13. An antibody which binds specifically to the polypeptide of claim 12.

14. A plant cell nucleus, plant cell, plant tissue, propagation material, pollen, progeny, harvested material, or plant comprising the nucleic acid molecule of claim 7 or a transgenic plant tissue, propagation material, pollen, progeny, harvested material or plant comprising a host nucleus or host cell which comprises said nucleic acid molecule.

15. A transgenic plant cell nucleus, plant cell, plant tissue, propagation material, seed, pollen, progeny, plant, or plant part, transformed with the nucleic acid molecule of claim 7 or a nucleic acid construct comprising said nucleic acid molecule.

16. The transgenic plant cell nucleus, transgenic plant cell, transgenic plant or transgenic plant part of claim 15, wherein the transgenic plant is a monocotyledonous plant, or the transgenic plant cell nucleus, transgenic plant cell, or transgenic plant part is from a monocotyledonous plant.

17. The transgenic plant cell nucleus, transgenic plant cell, transgenic plant or transgenic plant part of claim 15, wherein the transgenic plant is a dicotyledonous plant, or the transgenic plant cell nucleus, transgenic plant cell, or transgenic plant part is from a dicotyledonous plant.

18. The transgenic plant cell nucleus, transgenic plant cell, transgenic plant or transgenic plant part of claim 15, wherein the corresponding plant is selected from the group consisting of corn (maize), wheat, rye, oat, triticale, rice, barley, soybean, peanut, cotton, oil seed rape, including canola and winter oil seed rape, manihot, pepper, sunflower, flax, borage, safflower, linseed, primrose, rapeseed, turnip rape, tagetes, a solanaceous plant, potato, tobacco, eggplant, tomato, Vicia species, pea, alfalfa, coffee, cacao, tea, Salix species, oil palm, coconut, perennial grass, a forage crop and Arabidopsis thaliana.

19. The transgenic plant cell nucleus, transgenic plant cell, transgenic plant or transgenic plant part of claim 15, wherein the corresponding plant is selected from the group consisting of corn, soy, oil seed rape, canola, winter oil seed rape, cotton, wheat, and rice.

20. A transgenic plant comprising one or more of a plant cell nucleus, a plant cell, progeny, seed or pollen produced by the transgenic plant of claim 14.

21. A transgenic plant, transgenic plant cell nucleus, transgenic plant cell, or transgenic plant part comprising one or more of a transgenic plant cell nucleus, plant cell, progeny, seed or pollen derived from or produced by the transgenic plant of claim 14, wherein said transgenic plant, transgenic plant cell nucleus, transgenic plant cell, or transgenic plant part comprising one or more of a transgenic plant cell nucleus, plant cell, progeny, seed or pollen is genetically homozygous for a transgene conferring increased yield to a plant cell, plant, or part thereof as compared to a corresponding non-transformed wild type plant cell, plant or part thereof.

22. A process for the identification of a compound conferring increased yield to a plant cell, plant, or part thereof as compared to a corresponding non-transformed wild type plant cell, plant, or part thereof comprising:
(a) culturing a plant cell, plant, or part thereof expressing the polypeptide of claim 12 and a readout system capable of interacting with the polypeptide under suitable conditions which permit the interaction of the polypeptide with said readout system in the presence of a compound or a sample comprising a plurality of compounds and capable of providing a detectable signal in response to the binding of a compound to said polypeptide under conditions which permit the expression of said readout system and of the polypeptide encoded by the nucleic acid molecule of claim 12;
(b) identifying if the compound is an effective agonist by detecting the presence or absence or increase of a signal produced by said readout system.

23. A method for the production of an agricultural composition comprising
a) providing the compound identified by the method of claim 22; and
b) formulating the compound identified by the method of claim 22 in a form acceptable for an application in agriculture.

24. A composition comprising
a) the nucleic acid molecule of claim 7,
b) a nucleic acid construct or vector comprising said nucleic acid molecule,
c) a polypeptide encoded by said nucleic acid molecule, or
d) an antibody which binds specifically to said polypeptide,
and optionally an agriculturally acceptable carrier.

25. The polypeptide of claim 12 or a nucleic acid molecule encoding said polypeptide, wherein the polypeptide or nucleic acid molecule is from yeast or E. coli.

26. (canceled)

27. A method for identifying or selecting a plant with increased yield compared to a corresponding non-transformed wild type plant comprising utilizing the nucleic acid molecule of claim 7 as a marker for identification or selection of a plant with increased yield as compared to a corresponding non-transformed wild type plant.

28. A method for detecting yield increase in a plant or plant cell comprising utilizing the nucleic acid molecule of claim 7 or a fragment thereof as a marker for detection of yield increase in a plant or plant cell.

29. A method for the identification of a plant with an increased yield comprising
(a) screening a population of one or more of plant cell nuclei, plant cells, plant tissues or plants or parts thereof for an activity selected from the group consisting of 17.6 kDa class I heat shock protein, 26.5 kDa class I small heat shock protein, 26S protease subunit, 2-Cys peroxiredoxin, 3-dehydroquinate synthase, 5-keto-D-gluconate-5-reductase, asparagine synthetase A, aspartate 1-decarboxylase precursor, ATP-dependent RNA helicase, B0567-protein, B1088-protein, B1289-protein, B2940-protein, calnexin homolog, CDS5399-protein, chromatin structure-remodeling complex protein, D-amino acid dehydrogenase, D-arabinono-1,4-lactone oxidase, Delta 1-pyrroline-5-carboxylate reductase, glycine cleavage complex lipoylprotein, ketodeoxygluconokinase, lipoyl synthase, low-molecular-weight heat-shock protein, Microsomal cytochrome b reductase, mitochondrial ribosomal protein, mitotic check point protein, monodehydroascorbate reductase, paraquat-inducible protein B, phosphatase, Phosphoglucosamine mutase, protein disaggregation chaperone, protein kinase, pyruvate decarboxylase, recA family protein, rhodanese-related sulfurtransferase, ribonuclease P protein component, ribosome modulation factor, sensory histidine kinase, serine hydroxymethyltransferase, SLL1280-protein, SLL1797-protein, small membrane lipoprotein, Small nucleolar ribonucleoprotein complex subunit, Sulfatase, transcription initiation factor subunit, tretraspanin, tRNA ligase, xyloglucan galactosyltransferase, YKL130C-protein, YLR443W-protein, YML096W-protein, and zinc finger family protein-activity,
(b) comparing the level of activity with the activity level in a reference;
(c) identifying one or more plant cell nuclei, plant cells, plant tissues or plants or parts thereof with increased activity compared to the reference, and optionally
(d) producing a plant from the identified one or more plant cell nuclei, plant cells or plant tissues.

30. A method for the identification of a plant with an increased yield comprising
(a) screening a population of one or more plant cell nuclei, plant cells, plant tissues or plants or parts thereof for the expression level of a nucleic acid coding for a polypeptide conferring an activity selected from the group consisting of 17.6 kDa class I heat shock protein, 26.5 kDa class I small heat shock protein, 26S protease subunit, 2-Cys peroxiredoxin, 3-dehydroquinate synthase, 5-keto-D-gluconate-5-reductase, asparagine synthetase A, aspartate 1-decarboxylase precursor, ATP-dependent RNA helicase, B0567-protein, B1088-protein, B1289-protein, B2940-protein, calnexin homolog, CDS5399-protein, chromatin structure-remodeling complex protein, D-amino acid dehydrogenase, D-arabinono-1,4-lactone oxidase, Delta 1-pyrroline-5-carboxylate reductase, glycine cleavage complex lipoylprotein, ketodeoxygluconokinase, lipoyl synthase, low-molecular-weight heat-shock protein, Microsomal cytochrome b reductase, mitochondrial ribosomal protein, mitotic check point protein, monodehydroascorbate reductase, paraquat-inducible protein B, phosphatase, Phosphoglucosamine mutase, protein disaggregation chaperone, protein kinase, pyruvate decarboxylase, recA family protein, rhodanese-related sulfurtransferase, ribonuclease P protein component, ribosome modulation factor, sensory histidine kinase, serine hydroxymethyltransferase, SLL1280-protein, SLL1797-protein, small membrane lipoprotein, Small nucleolar ribonucleoprotein complex subunit, Sulfatase, transcription initiation factor subunit, tretraspanin, tRNA ligase, xyloglucan galactosyltransferase, YKL130C-protein, YLR443W-protein, YML096W-protein, and zinc finger family protein-activity,
(b) comparing the level of expression with a reference;
(c) identifying one or more plant cell nuclei, plant cells, plant tissues or plants or parts thereof with the expression level increased compared to the reference, and optionally
(d) producing a plant from the identified plant cell nuclei, plant cells, or plant tissues.

31. The method of claim 1, wherein the plant shows an improved yield-related trait.

32. The method of claim 1, wherein the plant shows an improved nutrient use efficiency and/or abiotic stress tolerance.

33. The method of claim 1, wherein the plant shows an improved increased low temperature tolerance.

34. The method of claim 1, wherein the plant shows an increase of harvestable yield.

35. The method of claim 1, wherein the plant shows a yield increase, wherein the yield increase is calculated on a per plant basis or in relation to a specific arable area.

36. A method for increasing yield of a population of plants, comprising
(a) checking the growth temperature(s) in the area for planting,
(b) comparing the temperatures with the optimal growth temperature of a plant species or a variety considered for planting, and
(c) planting and growing the plant of claim 14 if the growth temperature is not optimal for the planting and growing of the plant species or the variety considered for planting.

37. The method of claim 1, comprising harvesting the plant or part thereof and producing fuel with or from the harvested plant or part thereof.

38. The method of claim 1, comprising
a) harvesting a plant part useful for starch isolation, and
b) isolating starch from this plant part,
wherein the plant is a plant useful for starch production.
